United States Patent Application Publication US 2006/0150283 A1 - sequence listing, part 19

SEQ ID NO: 73403 - DNA, 405 bp, Arabidopsis thaliana
  misc_feature (1)..(405): Ceres Seq. ID no. 4966214
  misc_feature (1)..(405): Ortholog of  Ceres SEQ ID NO 15171813 as cited in SEQ ID NO 57309
atggcggattcaggaaaggagatcggatccagatgtcatcactgcgcaggccctcttacgaaaaatctggaaaccaacgaatggactgtggctccgtttatcagggatagcttctctatgattggatcagctgttggtggtactgcaagtgctttcattgggtttcaccatgtaatgccgattgtacgcaagtggatcaaaggacccatgtggttgcattttcttgttggtgctccacctgtgatagttgtttcatcagcctgtgctggacttgcaggtggcgctgtaccggctttagcacagcttgcatcgtcgtcttatcatgcggctgttcattcatctcagccaccacaagggcaagataagaaccaattgcacaattcctctaccatttctcctttgtag

SEQ ID NO: 73404 - protein, 134 aa, Arabidopsis thaliana
  peptide (1)..(134): Ceres Seq. ID no. 4966215
MADSGKEIGSRCHHCAGPLTKNLETNEWTVAPFIRDSFSMIGSAVGGTASAFIGFHHVMPIVRKWIKGPMWLHFLVGAPPVIVVSSACAGLAGGAVPALAQLASSSYHAAVHSSQPPQGQDKNQLHNSSTISPL

SEQ ID NO: 73405 - protein, 95 aa, Arabidopsis thaliana
  peptide (1)..(95): Ceres Seq. ID no. 4966216
MIGSAVGGTASAFIGFHHVMPIVRKWIKGPMWLHFLVGAPPVIVVSSACAGLAGGAVPALAQLASSSYHAAVHSSQPPQGQDKNQLHNSSTISPL

SEQ ID NO: 73406 - protein, 76 aa, Arabidopsis thaliana
  peptide (1)..(76): Ceres Seq. ID no. 4966217
MPIVRKWIKGPMWLHFLVGAPPVIVVSSACAGLAGGAVPALAQLASSSYHAAVHSSQPPQGQDKNQLHNSSTISPL

SEQ ID NO: 73407 - DNA, 2463 bp, Arabidopsis thaliana
  misc_feature (1)..(2463): Ceres Seq. ID no. 4966387
  misc_feature (1)..(2463): Ortholog of  Ceres SEQ ID NO 13662063 as cited in SEQ ID NO 61450
atgggaagcagcacgggcgatcttgtgacacgtatccaatcagctcaccgtttcgatcacgatgccttgtttcgttttgccgccgacaacgtctctggctttccgaccaacccttcccaattcaaagtctcacagttcggacatgggcagtcgaatccaacgtttctgatagaggttggctcagggagttccttgaaacgatacgttttgaggaagaagcctcctggcaagcttcttcaatctgctcatgctgttgatcgagagtttcaggtgcttcgggctttaggtgaacatacacaggttcctgttcctaaagtcttctgcttatgcactgaccctgctgtcattgggactgctttttacattatggagtttatggaaggacgtattttcattgatccaaagttgccgaatgtagcacctgaaaggagaaatgcgatctatcgtgcaaccgccaaagccttggcatctcttcactctgctgatgtggatgccattggtcttgagaaatatggtcggcgaggcaattactgcaaaagacagatagataggtggttcaaacaatatttggcttcaacaagtgaaggtaaacctgaaaggaatccaaagatgtttgagcttgttgattggttacgcaaaaacatccccgcggaagattcaactggagcaacatcaggccttgtccatggagactttcgcattgacaatctcgtttttcatccttctgaggatcgagttattggaataattgactgggaattgtccacgcttgggaaccaaatgtgtgatgttgcatacagctgcatgcattacattctcgataaggagcatgttagtgaaggttttgaaactactgggcttccagaaggaatgctttcgatgccagaatttctcttagaatactgttctgcatcgggaaaaccatggcctgctgcaaactggaagttctacgtagcgttctccttatttcgggctgcttcaatctacacaggggtgtacagtagatggttaatggggaatgcttctgccggtgaaagagcgcgaaatacaggggttcaagctaatgagcttgtagagtctgccttgggttatattgcacgtgaaaatgttcttccagaacaccctccatctgttcaaagagacgtgtctccgtcgtatgaaagccttgtggatggaagcgggagattcatccccaacagaaaagtattggagttaaggcagaagttgatcaagtttatggaaactcatatctacccaatggaaaacgagttctccaaacttgctcaatcagatatgcgatggaccgttcaccctcaggaggaaaagttaaaggaaatggcaaagagagaaggcctatggaacttatttgttcctgtagatagtgctgctagagctagaagagaactggcggctaccgagaataaacataacctctcgggcaagtcttttgatcaattgtttggtgagggcctcacgaacctggagtatggttacctttgtgagatcatgggtcgttctgtttgggctccacaggtgtttaactgtggtgcaccagatactggaaacatggaggtgatactgcggtatggtaacaaagaacaaatttctgaatggcttattccgttgctcgagggaagaattcgttctggatttgctatgactgagccacaagttgcatcgtctgatgcaaccaatattgaatgctctatccgaagacaaggtgattcatacgtcattaatggcacaaaatggtggacaagtggagctatggatcccaggtgcagagtccttattctcatgggaaaaactgatttcaacgccccaaaacataagcagcagtctatgatattagtggacatgcggactccaggtataagtgtgaagaggcctctcacagtgtttggttttgatgacgcacctcatggacatgctgaaatttcttttgaaaatgtggttgtcccggcgaagaacattctccttggagaaggccgaggattcgagattgctcagggtaggttaggccctggaagactgcaccattgcatgagactaataggtgcagcagagcgtggaatggagctaatggctcaaagagctctgagtagaaaaacttttgggaagttcattgcgcagcacggttctttcgtctctgatcttgcaaagttacgggtagagctagaaggaacccgattgttggttctagaagctgctgatcatcttgataaatttggaaacaaaaaagctcgaggaattctcgcaatggccaaggttgcagctccaaacatggcattgaaggtactagacacggcaatacaagttcatggagcagccggtgtatcctcggacacagttttagcgcatttgtgggctacagctagaacactgaggattgctgatggacctgatgaggttcatcttgggaccattggcaagttagaactgcaaagagcttcaaagctttaa

SEQ ID NO: 73408 - protein, 820 aa, Arabidopsis thaliana
  peptide (1)..(820): Ceres Seq. ID no. 4966388
MGSSTGDLVTRIQSAHRFDHDALFRFAADNVSGFPTNPSQFKVSQFGHGQSNPTFLIEVGSGSSLKRYVLRKKPPGKLLQSAHAVDREFQVLRALGEHTQVPVPKVFCLCTDPAVIGTAFYIMEFMEGRIFIDPKLPNVAPERRNAIYRATAKALASLHSADVDAIGLEKYGRRGNYCKRQIDRWFKQYLASTSEGKPERNPKMFELVDWLRKNIPAEDSTGATSGLVHGDFRIDNLVFHPSEDRVIGIIDWELSTLGNQMCDVAYSCMHYILDKEHVSEGFETTGLPEGMLSMPEFLLEYCSASGKPWPAANWKFYVAFSLFRAASIYTGVYSRWLMGNASAGERARNTGVQANELVESALGYIARENVLPEHPPSVQRDVSPSYESLVDGSGRFIPNRKVLELRQKLIKFMETHIYPMENEFSKLAQSDMRWTVHPQEEKLKEMAKREGLWNLFVPVDSAARARRELAATENKHNLSGKSFDQLFGEGLTNLEYGYLCEIMGRSVWAPQVFNCGAPDTGNMEVILRYGNKEQISEWLIPLLEGRIRSGFAMTEPQVASSDATNIECSIRRQGDSYVINGTKWWTSGAMDPRCRVLILMGKTDFNAPKHKQQSMILVDMRTPGISVKRPLTVFGFDDAPHGHAEISFENVVVPAKNILLGEGRGFEIAQGRLGPGRLHHCMRLIGAAERGMELMAQRALSRKTFGKFIAQHGSFVSDLAKLRVELEGTRLLVLEAADHLDKFGNKKARGILAMAKVAAPNMALKVLDTAIQVHGAAGVSSDTVLAHLWATARTLRIADGPDEVHLGTIGKLELQRASKL

SEQ ID NO: 73409 - protein, 698 aa, Arabidopsis thaliana
  peptide (1)..(698): Ceres Seq. ID no. 4966389
MEFMEGRIFIDPKLPNVAPERRNAIYRATAKALASLHSADVDAIGLEKYGRRGNYCKRQIDRWFKQYLASTSEGKPERNPKMFELVDWLRKNIPAEDSTGATSGLVHGDFRIDNLVFHPSEDRVIGIIDWELSTLGNQMCDVAYSCMHYILDKEHVSEGFETTGLPEGMLSMPEFLLEYCSASGKPWPAANWKFYVAFSLFRAASIYTGVYSRWLMGNASAGERARNTGVQANELVESALGYIARENVLPEHPPSVQRDVSPSYESLVDGSGRFIPNRKVLELRQKLIKFMETHIYPMENEFSKLAQSDMRWTVHPQEEKLKEMAKREGLWNLFVPVDSAARARRELAATENKHNLSGKSFDQLFGEGLTNLEYGYLCEIMGRSVWAPQVFNCGAPDTGNMEVILRYGNKEQISEWLIPLLEGRIRSGFAMTEPQVASSDATNIECSIRRQGDSYVINGTKWWTSGAMDPRCRVLILMGKTDFNAPKHKQQSMILVDMRTPGISVKRPLTVFGFDDAPHGHAEISFENVVVPAKNILLGEGRGFEIAQGRLGPGRLHHCMRLIGAAERGMELMAQRALSRKTFGKFIAQHGSFVSDLAKLRVELEGTRLLVLEAADHLDKFGNKKARGILAMAKVAAPNMALKVLDTAIQVHGAAGVSSDTVLAHLWATARTLRIADGPDEVHLGTIGKLELQRASKL

SEQ ID NO: 73410 - protein, 695 aa, Arabidopsis thaliana
  peptide (1)..(695): Ceres Seq. ID no. 4966390
MEGRIFIDPKLPNVAPERRNAIYRATAKALASLHSADVDAIGLEKYGRRGNYCKRQIDRWFKQYLASTSEGKPERNPKMFELVDWLRKNIPAEDSTGATSGLVHGDFRIDNLVFHPSEDRVIGIIDWELSTLGNQMCDVAYSCMHYILDKEHVSEGFETTGLPEGMLSMPEFLLEYCSASGKPWPAANWKFYVAFSLFRAASIYTGVYSRWLMGNASAGERARNTGVQANELVESALGYIARENVLPEHPPSVQRDVSPSYESLVDGSGRFIPNRKVLELRQKLIKFMETHIYPMENEFSKLAQSDMRWTVHPQEEKLKEMAKREGLWNLFVPVDSAARARRELAATENKHNLSGKSFDQLFGEGLTNLEYGYLCEIMGRSVWAPQVFNCGAPDTGNMEVILRYGNKEQISEWLIPLLEGRIRSGFAMTEPQVASSDATNIECSIRRQGDSYVINGTKWWTSGAMDPRCRVLILMGKTDFNAPKHKQQSMILVDMRTPGISVKRPLTVFGFDDAPHGHAEISFENVVVPAKNILLGEGRGFEIAQGRLGPGRLHHCMRLIGAAERGMELMAQRALSRKTFGKFIAQHGSFVSDLAKLRVELEGTRLLVLEAADHLDKFGNKKARGILAMAKVAAPNMALKVLDTAIQVHGAAGVSSDTVLAHLWATARTLRIADGPDEVHLGTIGKLELQRASKL

SEQ ID NO: 73411 - DNA, 1710 bp, Arabidopsis thaliana
  misc_feature (1)..(1710): Ceres Seq. ID no. 4966813
  misc_feature (1)..(1710): Ortholog of  Ceres SEQ ID NO 14303201 as cited in SEQ ID NO 67304
atggctgtcgtcgtcactaacctaggaagctgtctgaagatttcttatgtcatctttgccttttgttctgctttctttctcggtgctatcaaaggtttgatcgtaggtccaattgctggattaacattaatagttgggaatgttggagtgattctttgtttgttccctgcacatgttacttggactatttacgctgttgcaaagacaaatagatttgacattcctctgaaggtagcaatcttagtggcacttcctgcattgtttgggatatggttaggtctaagtctagcaattagtgttcttgttggtgttggctatggattcttcactccttggatctctgcttttgaagcctttagacaagacactgaatccaacaagttcttccactgtcttgtggatggaacttggggaaccatcaaagggagttgcattgtggttactgattttgcagatttttgttaccattcttatccactttacttaaaggagttacgcgaatccccggtttcagatgagcttcaaactcttaggttgattcatgttccaggatgcatcattgttgggattctaggattagtcattgatatccctcttttcactgcaatcgcggttattaaaagcccttaccttcttctcaaaggctggtaccgactagctcaagacgcgattaatcgagaaggaccatttcttgaaatagcttgtataccagttgctggtttgacagtactgttatggcctatagttgtcattggttttattttggtgaccatcttctccagcatctttgtaggactatatggagcagttgttgtatttcaggaaaggtcattcagaagaggagtctcttatgtgattgcagtagttggagaatttgatgagtacacaaatgattggctttaccttagagaaggaaccatcttcccaaagccaagatatcggatgggaagaggatcgttttcaagtgaagtatctgtgatcgttcacccttcagatgtaacaagagtcaatagttctggttctgtcgatgctccagcgatgctagtaccgagcctagttcactctgtatctgttagagaagcaatacaagaagtgagaatggttcagatttgggagcatatgatggggtggtttgagatgcaaggcaaagagctactagatgcagaagtgttaacaccaactgatctctatgagtctttaaagggcagacacggaaacgaatcatcgattatcaatgtcgggcttccttcttacgctttgttgcatacattgcttagctctataaaagctggtgttcatggtgtgcttttgcttgatggctcggaagtgacacatttgaatagaccacaagacaagttcttggactgggtctttaatccaataatggtattgaaagatcagattcgagctcttaaacttggagaaagtgaagttaaatacttagagaaagttgttctctttggaaaccatgaacaaaggatggaagcttgggataatcacagtaacccgcctcaagaaaaccttcgaactgctcaaatccaaggaatcagcagaaggatgatgggaatggtacggagcgtatcgaagcttccgacttatagaagaaggttcagacaagtggttaaggctctaattacttattattcagagaaacaaggcttaaatcgaaccggttccatgagctctggagatttcattgaagagggttaa

SEQ ID NO: 73412 - protein, 569 aa, Arabidopsis thaliana
  peptide (1)..(569): Ceres Seq. ID no. 4966814
MAVVVTNLGSCLKISYVIFAFCSAFFLGAIKGLIVGPIAGLTLIVGNVGVILCLFPAHVTWTIYAVAKTNRFDIPLKVAILVALPALFGIWLGLSLAISVLVGVGYGFFTPWISAFEAFRQDTESNKFFHCLVDGTWGTIKGSCIVVTDFADFCYHSYPLYLKELRESPVSDELQTLRLIHVPGCIIVGILGLVIDIPLFTAIAVIKSPYLLLKGWYRLAQDAINREGPFLEIACIPVAGLTVLLWPIVVIGFILVTIFSSIFVGLYGAVVVFQERSFRRGVSYVIAVVGEFDEYTNDWLYLREGTIFPKPRYRMGRGSFSSEVSVIVHPSDVTRVNSSGSVDAPAMLVPSLVHSVSVREAIQEVRMVQIWEHMMGWFEMQGKELLDAEVLTPTDLYESLKGRHGNESSIINVGLPSYALLHTLLSSIKAGVHGVLLLDGSEVTHLNRPQDKFLDWVFNPIMVLKDQIRALKLGESEVKYLEKVVLFGNHEQRMEAWDNHSNPPQENLRTAQIQGISRRMMGMVRSVSKLPTYRRRFRQVVKALITYYSEKQGLNRTGSMSSGDFIEEG

SEQ ID NO: 73413 - DNA, 2652 bp, Arabidopsis thaliana
  misc_feature (1)..(2652): Ceres Seq. ID no. 4967008
  misc_feature (1)..(2652): Ortholog of  Ceres SEQ ID NO 12586556 as cited in SEQ ID NO 64667
  misc_feature (1)..(2652): Ortholog of  Ceres SEQ ID NO 14316045 as cited in SEQ ID NO 66810
  misc_feature (1)..(2652): Ortholog of  Ceres SEQ ID NO 13660894 as cited in SEQ ID NO 67475
atgtttcatcgttcgctcacgaagcaaggacttgataatgatgtctccactataactaagcttgtagcacggagttgtgaattgggtactcgtgaaagtttgagctttgctaaagaagtgtttgagaacagtgaatcgtatggaacttgtttcatgtacaattctttgattcgaggatatgcatcttctgggttatgcaacgaagctatattgttatttcttcgaatgatgaattctgggatttctccagataagtacacgtttccttttggattgagtgcgtgtgcgaaaagcagagcgaaaggtaatgggattcagattcatgggttgattgtgaagatgggttatgcgaaagatttgtttgtgcagaactcgctggttcatttttacgccgagtgtggagagcttgatagtgcacgtaaggtgtttgatgaaatgtctgagagaaatgttgtttcttggacgagtatgatttgtggttacgcgaggcgggattttgctaaagacgctgttgatttgttttttcggatggtgagagatgaagaggtgactcctaattcggttacaatggtgtgtgtgatatcggcttgtgctaagctagaggatcttgagacgggcgagaaggtttatgcttttatccgtaattctggtattgaagttaatgatcttatggttagtgcactggttgatatgtacatgaaatgcaatgccattgatgtagcaaaacggctttttgatgaatatggtgctagtaatttggatttgtgcaatgcaatggcatcaaattatgtacggcaagggttaacgagggaggctttaggtgtttttaatctgatgatggactctggtgttagacctgataggatttcgatgttgagtgcgatttcatcttgttcacaattgagaaatatcttgtggggaaagagctgtcatgggtatgtattgaggaatgggtttgagagttgggataatatatgcaatgcgttgattgatatgtacatgaaatgtcataggcaagatactgcgtttaggatctttgatcggatgtcgaacaagacagtggtgacgtggaactcgattgttgctggctatgtagagaatggtgaggtggatgcagcctgggaaacatttgaaaccatgcctgagaaaaacattgtttcttggaatacgattatcagcggtctggtgcaaggaagtttgtttgaggaagcgattgaagttttctgttctatgcaaagccaagagggtgtcaatgcggatggtgtgacaatgatgagtattgcatctgcttgtgggcacttgggagctcttgatctagctaaatggatatattactacattgagaagaacggaattcagcttgatgtcagacttggtacaaccttagtagatatgttttctaggtgtggggatcctgaaagtgctatgtcaatttttaatagtttgacaaacagagatgtctcagcttggacagcggctataggagcaatggctatggcaggaaacgctgagcgagcaattgagcttttcgatgatatgattgaacaagggttgaaaccagatggggttgcgtttgttggagcactgacagcttgcagccatggtggattggtccaacagggtaaggaaattttctattcgatgttgaaacttcatggagtttctccagaagatgtgcactatggatgtatggttgatctgcttggtcgagcaggattgttagaggaagctgtgcaactcattgaggacatgcctatggagccaaacgatgtgatttggaactctcttttagctgcttgtcgtgttcagggaaatgtggagatggcagcttatgcagccgagaagatacaagtcttggctccagagagaactgggagttatgttcttctgtcaaatgtttatgcatcagctggaagatggaacgacatggcgaaagtgagactgagtatgaaggagaaagggttacgtaaaccgccagggactagttcaatacagattcgaggtaaaacccatgagttcacatcaggggacgagtcacaccctgaaatgccaaacatagaagcaatgctagatgaagttagtcaaagagcgagtcacttaggccatgtacctgatcttagtaatgttcttatggatgttgatgagaaagagaagatctttatgcttagcagacacagcgagaaacttgcaatggcctatggactcattagctcaaacaaaggcacaacaatccgaatagtcaagaacctaagagtatgctctgattgtcattcatttgcaaaatttgcatccaaagtatacaacagagaaatcattctaagagacaataaccggtttcattacatccgtcaagggaagtgttcttgcggtgacttctgtttgacggatgacgatctcgaagttctcaaaggttgtttagatctaggctttggtttcaactacgacgagatccctgcgctctgcaagactttacctgctttagagctttgctattcaatgagccaaaaaaatttagacgataagcatacaccatcactccaattgccaattggaagatctctagtcccgtcgtgtgataatccggatgatgtgaaagctagactcaaatgctgggcacaagccgttgcctgtactgtccaattgtgcagctga

SEQ ID NO: 73414 - protein, 883 aa, Arabidopsis thaliana
  peptide (1)..(883): Ceres Seq. ID no. 4967009
MFHRSLTKQGLDNDVSTITKLVARSCELGTRESLSFAKEVFENSESYGTCFMYNSLIRGYASSGLCNEAILLFLRMMNSGISPDKYTFPFGLSACAKSRAKGNGIQIHGLIVKMGYAKDLFVQNSLVHFYAECGELDSARKVFDEMSERNVVSWTSMICGYARRDFAKDAVDLFFRMVRDEEVTPNSVTMVCVISACAKLEDLETGEKVYAFIRNSGIEVNDLMVSALVDMYMKCNAIDVAKRLFDEYGASNLDLCNAMASNYVRQGLTREALGVFNLMMDSGVRPDRISMLSAISSCSQLRNILWGKSCHGYVLRNGFESWDNICNALIDMYMKCHRQDTAFRIFDRMSNKTVVTWNSIVAGYVENGEVDAAWETFETMPEKNIVSWNTIISGLVQGSLFEEAIEVFCSMQSQEGVNADGVTMMSIASACGHLGALDLAKWIYYYIEKNGIQLDVRLGTTLVDMFSRCGDPESAMSIFNSLTNRDVSAWTAAIGAMAMAGNAERAIELFDDMIEQGLKPDGVAFVGALTACSHGGLVQQGKEIFYSMLKLHGVSPEDVHYGCMVDLLGRAGLLEEAVQLIEDMPMEPNDVIWNSLLAACRVQGNVEMAAYAAEKIQVLAPERTGSYVLLSNVYASAGRWNDMAKVRLSMKEKGLRKPPGTSSIQIRGKTHEFTSGDESHPEMPNIEAMLDEVSQRASHLGHVPDLSNVLMDVDEKEKIFMLSRHSEKLAMAYGLISSNKGTTIRIVKNLRVCSDCHSFAKFASKVYNREIILRDNNRFHYIRQGKCSCGDFCLTDDDLEVLKGCLDLGFGFNYDEIPALCKTLPALELCYSMSQKNLDDKHTPSLQLPIGRSLVPSCDNPDDVKARLKCWAQAVACTVQLCS

SEQ ID NO: 73415 - protein, 832 aa, Arabidopsis thaliana
  peptide (1)..(832): Ceres Seq. ID no. 4967010
MYNSLIRGYASSGLCNEAILLFLRMMNSGISPDKYTFPFGLSACAKSRAKGNGIQIHGLIVKMGYAKDLFVQNSLVHFYAECGELDSARKVFDEMSERNVVSWTSMICGYARRDFAKDAVDLFFRMVRDEEVTPNSVTMVCVISACAKLEDLETGEKVYAFIRNSGIEVNDLMVSALVDMYMKCNAIDVAKRLFDEYGASNLDLCNAMASNYVRQGLTREALGVFNLMMDSGVRPDRISMLSAISSCSQLRNILWGKSCHGYVLRNGFESWDNICNALIDMYMKCHRQDTAFRIFDRMSNKTVVTWNSIVAGYVENGEVDAAWETFETMPEKNIVSWNTIISGLVQGSLFEEAIEVFCSMQSQEGVNADGVTMMSIASACGHLGALDLAKWIYYYIEKNGIQLDVRLGTTLVDMFSRCGDPESAMSIFNSLTNRDVSAWTAAIGAMAMAGNAERAIELFDDMIEQGLKPDGVAFVGALTACSHGGLVQQGKEIFYSMLKLHGVSPEDVHYGCMVDLLGRAGLLEEAVQLIEDMPMEPNDVIWNSLLAACRVQGNVEMAAYAAEKIQVLAPERTGSYVLLSNVYASAGRWNDMAKVRLSMKEKGLRKPPGTSSIQIRGKTHEFTSGDESHPEMPNIEAMLDEVSQRASHLGHVPDLSNVLMDVDEKEKIFMLSRHSEKLAMAYGLISSNKGTTIRIVKNLRVCSDCHSFAKFASKVYNREIILRDNNRFHYIRQGKCSCGDFCLTDDDLEVLKGCLDLGFGFNYDEIPALCKTLPALELCYSMSQKNLDDKHTPSLQLPIGRSLVPSCDNPDDVKARLKCWAQAVACTVQLCS

SEQ ID NO: 73416 - protein, 808 aa, Arabidopsis thaliana
  peptide (1)..(808): Ceres Seq. ID no. 4967011
MMNSGISPDKYTFPFGLSACAKSRAKGNGIQIHGLIVKMGYAKDLFVQNSLVHFYAECGELDSARKVFDEMSERNVVSWTSMICGYARRDFAKDAVDLFFRMVRDEEVTPNSVTMVCVISACAKLEDLETGEKVYAFIRNSGIEVNDLMVSALVDMYMKCNAIDVAKRLFDEYGASNLDLCNAMASNYVRQGLTREALGVFNLMMDSGVRPDRISMLSAISSCSQLRNILWGKSCHGYVLRNGFESWDNICNALIDMYMKCHRQDTAFRIFDRMSNKTVVTWNSIVAGYVENGEVDAAWETFETMPEKNIVSWNTIISGLVQGSLFEEAIEVFCSMQSQEGVNADGVTMMSIASACGHLGALDLAKWIYYYIEKNGIQLDVRLGTTLVDMFSRCGDPESAMSIFNSLTNRDVSAWTAAIGAMAMAGNAERAIELFDDMIEQGLKPDGVAFVGALTACSHGGLVQQGKEIFYSMLKLHGVSPEDVHYGCMVDLLGRAGLLEEAVQLIEDMPMEPNDVIWNSLLAACRVQGNVEMAAYAAEKIQVLAPERTGSYVLLSNVYASAGRWNDMAKVRLSMKEKGLRKPPGTSSIQIRGKTHEFTSGDESHPEMPNIEAMLDEVSQRASHLGHVPDLSNVLMDVDEKEKIFMLSRHSEKLAMAYGLISSNKGTTIRIVKNLRVCSDCHSFAKFASKVYNREIILRDNNRFHYIRQGKCSCGDFCLTDDDLEVLKGCLDLGFGFNYDEIPALCKTLPALELCYSMSQKNLDDKHTPSLQLPIGRSLVPSCDNPDDVKARLKCWAQAVACTVQLCS

SEQ ID NO: 73417 - DNA, 3603 bp, Arabidopsis thaliana
  misc_feature (1)..(3603): Ceres Seq. ID no. 4968107
  misc_feature (1)..(3603): Ortholog of  Ceres SEQ ID NO 12586556 as cited in SEQ ID NO 64667
atgaaacgcatcaatgtcgatctccatcttctccattttccgaaattcagaaaatttcaatcacgaaaagtatcttcgtccctacccaaattggaactcgatcagaaatcaccacaggagacagttttcttacttggtcaggtacttgacacttacccagatatcagaacacttagaacagtccactcaagaatcattttggaagatctacgttgtaattcttctttgggtgttaaacttatgagagcttatgcttctctaaaagatgtagcgtcagcacgcaaggtgttcgacgaaattcctgagagaaacgtaattatcattaatgttatgattagaagctatgtgaataatgggttttacggtgaaggtgttaaagtgtttgggacgatgtgtggttgtaatgttagacctgatcattatactttcccgtgtgttctaaaggcgtgttcttgctctgggactattgtcattgggaggaaaattcatgggtctgctacaaaagttgggctctcttcgactttgtttgttgggaatggtttagtttctatgtatggaaagtgtggatttttatctgaagcaaggcttgtacttgacgagatgtctaggagagatgtggtgtcttggaactcgttggttgttgggtatgcgcaaaatcagagatttgatgatgctttggaggtttgtagggaaatggagtctgtgaagataagccatgatgctggtacgatggctagtctgttaccagcagtgagtaacactacaactgaaaacgttatgtatgttaaagatatgttttttaaaatggggaaaaagagtttggtttcatggaatgtgatgatcggtgtgtatatgaaaaatgcgatgcctgttgaagctgtggaattgtattcccgaatggaggctgatgggtttgaacctgatgcagtctcaatcacaagtgtattacctgcttgtggagatacctctgctctgtctcttggtaagaaaatccatggatacattgagaggaagaagctgataccaaatctgttgttagagaatgcactgatcgacatgtatgcaaaatgcggatgtttagagaaagctagagatgtgtttgagaacatgaagtcacgtgatgttgtgtcttggacagctatgatttcagcttatggattcagcggacgaggctgtgacgcagtggcattgttttcgaaattgcaagattcgggtctcgtccctgattcaattgcgtttgtcacaacgcttgctgcttgtagccatgcggggttactagaagaaggtaggagttgtttcaaactcatgacagatcattacaagatcactcctaggttagagcatttggcttgtatggtggatcttcttggccgagccgggaaagtgaaagaagcttacagatttatacaagatatgtcaatggaaccaaacgagagagtttggggagcattattaggagcttgcagggtgcattctgatacagacatcggtctactagcagctgataaacttttccagttagcacccgagcaatcgggttactacgtattgctttctaacatatacgcaaaggctggaagatgggaagaagtgactaacatcagaaacataatgaagagcaaagggttaaagaagaatcccggagcaagcaatgttgaggtcaacagaataattcatacattcttagtaggcgacaggtcacacccgcaatccgatgagatatacagagagctggatgttctagtaaagaaaatgaaagagttaggttatgttcctgattcagagtcagcgcttcacgatgtggaagaggaagataaagagacgcatttagctgttcacagtgagaaattagccattgtgtttgctctgatgaacactaaggaggaagaagaagacagtaataataccataagaataacgaagaatcttaggatatgtggagactgtcatgttgcagctaagcttatctcacagataacttctcgagagataatcatcagagacactaatagatttcatgtgttccggttcggtgtttgctcttgtgcttctgagctcagagatagagagagcgagaggttagagataacagtagttttaccgatgattgagtcggttatggccgttcgtctctccaccggattttgctcgtcgacggcgttactccagtatcgtacagcaccgagctcggaggagggaggaaactgcttccattatgcgtcccgccgcgtttttcagcctcaacgtatccaccatattgatgggagtgggtttctgaagtacaacagtgactatataacaagaaaacacctacggaagaatcgaactcaagccacagctgagtatgtagattcagcttcagatccagaaaagcaaactggcaagtcaaggtatcatccttcagaagaaatcagagcctctttgccacagaatgatggagattccaggctttcacctgcagaaactactagaaccatcattgaggtgaacaataaaggaaccctgatgcttacaggttctattggtgatggagttcatgagaatattctctggccagatataccttatataacagatcaaaatggaaatttatactttcaagtaaaggaggatgaggacgtcatgcagtccgttacttctgaaaataattatgtgcaagttatagttggttttgatacgatggagatgatcaaggaaatggagctgatgggactttctgatagtgactttgaaactgaagatgatgaaagtggagatgatgacagtgaggatacaggagaagacgaagatgaggaggaatgggttgctattttagaggatgaagatgaagacgatgatgatgatgatgatgatgatgaggatgatgatgattctgattctgatgaatcgctgggagactgggcaaatttggaaacaatgaggagttgtcatcccatgttttttgcaaagagaatgactgaggttgcttcaaatgatcctgttgattggatggatcagccgtctgctggccttgctatccagggacttttgagtcatatcttagtggaagattattcagatatccaaaagaaacttgctgatagcaattctacaactaacggaaacaaggatgcagaaaacttagtggacaagcttgaagacaatagtaaggcaggtggtgacgaatctgagatagattcatcacaggatgaaaaagcaagaaatgtggtggcgttttacaagctggagatgataagaattcagcttatcacagcacaaggggatcagactgaagttgaggtggaagatgtcagaaaagcacaacctgatgctattgctcatgcatcagctgaaatcataagccgtttagaagaatctggtgataaaataactgaagcactcaaatctctgtgttggagacataacagtattcaagcagaggaagtgaagctgattgggatagattccctaggttttgacctcaggctttgcgcaggagcaaagattgagtcattgcgatttgcattctcgacaagggcaacatcagaagaaaacgcagagggacaaataagaaaactattattcccgaaaacgaaccagtcgacacaaccaaaaccaaaatga

SEQ ID NO: 73418 - protein, 1200 aa, Arabidopsis thaliana
  peptide (1)..(1200): Ceres Seq. ID no. 4968108
MKRINVDLHLLHFPKFRKFQSRKVSSSLPKLELDQKSPQETVFLLGQVLDTYPDIRTLRTVHSRIILEDLRCNSSLGVKLMRAYASLKDVASARKVFDEIPERNVIIINVMIRSYVNNGFYGEGVKVFGTMCGCNVRPDHYTFPCVLKACSCSGTIVIGRKIHGSATKVGLSSTLFVGNGLVSMYGKCGFLSEARLVLDEMSRRDVVSWNSLVVGYAQNQRFDDALEVCREMESVKISHDAGTMASLLPAVSNTTTENVMYVKDMFFKMGKKSLVSWNVMIGVYMKNAMPVEAVELYSRMEADGFEPDAVSITSVLPACGDTSALSLGKKIHGYIERKKLIPNLLLENALIDMYAKCGCLEKARDVFENMKSRDVVSWTAMISAYGFSGRGCDAVALFSKLQDSGLVPDSIAFVTTLAACSHAGLLEEGRSCFKLMTDHYKITPRLEHLACMVDLLGRAGKVKEAYRFIQDMSMEPNERVWGALLGACRVHSDTDIGLLAADKLFQLAPEQSGYYVLLSNIYAKAGRWEEVTNIRNIMKSKGLKKNPGASNVEVNRIIHTFLVGDRSHPQSDEIYRELDVLVKKMKELGYVPDSESALHDVEEEDKETHLAVHSEKLAIVFALMNTKEEEEDSNNTIRITKNLRICGDCHVAAKLISQITSREIIIRDTNRFHVFRFGVCSCASELRDRESERLEITVVLPMIESVMAVRLSTGFCSSTALLQYRTAPSSEEGGNCFHYASRRVFQPQRIHHIDGSGFLKYNSDYITRKHLRKNRTQATAEYVDSASDPEKQTGKSRYHPSEEIRASLPQNDGDSRLSPAETTRTIIEVNNKGTLMLTGSIGDGVHENILWPDIPYITDQNGNLYFQVKEDEDVMQSVTSENNYVQVIVGFDTMEMIKEMELMGLSDSDFETEDDESGDDDSEDTGEDEDEEEWVAILEDEDEDDDDDDDDDEDDDDSDSDESLGDWANLETMRSCHPMFFAKRMTEVASNDPVDWMDQPSAGLAIQGLLSHILVEDYSDIQKKLADSNSTTNGNKDAENLVDKLEDNSKAGGDESEIDSSQDEKARNVVAFYKLEMIRIQLITAQGDQTEVEVEDVRKAQPDAIAHASAEIISRLEESGDKITEALKSLCWRHNSIQAEEVKLIGIDSLGFDLRLCAGAKIESLRFAFSTRATSEENAEGQIRKLLFPKTNQSTQPKPK

SEQ ID NO: 73419 - protein, 1120 aa, Arabidopsis thaliana
  peptide (1)..(1120): Ceres Seq. ID no. 4968109
MRAYASLKDVASARKVFDEIPERNVIIINVMIRSYVNNGFYGEGVKVFGTMCGCNVRPDHYTFPCVLKACSCSGTIVIGRKIHGSATKVGLSSTLFVGNGLVSMYGKCGFLSEARLVLDEMSRRDVVSWNSLVVGYAQNQRFDDALEVCREMESVKISHDAGTMASLLPAVSNTTTENVMYVKDMFFKMGKKSLVSWNVMIGVYMKNAMPVEAVELYSRMEADGFEPDAVSITSVLPACGDTSALSLGKKIHGYIERKKLIPNLLLENALIDMYAKCGCLEKARDVFENMKSRDVVSWTAMISAYGFSGRGCDAVALFSKLQDSGLVPDSIAFVTTLAACSHAGLLEEGRSCFKLMTDHYKITPRLEHLACMVDLLGRAGKVKEAYRFIQDMSMEPNERVWGALLGACRVHSDTDIGLLAADKLFQLAPEQSGYYVLLSNIYAKAGRWEEVTNIRNIMKSKGLKKNPGASNVEVNRIIHTFLVGDRSHPQSDEIYRELDVLVKKMKELGYVPDSESALHDVEEEDKETHLAVHSEKLAIVFALMNTKEEEEDSNNTIRITKNLRICGDCHVAAKLISQITSREIIIRDTNRFHVFRFGVCSCASELRDRESERLEITVVLPMIESVMAVRLSTGFCSSTALLQYRTAPSSEEGGNCFHYASRRVFQPQRIHHIDGSGFLKYNSDYITRKHLRKNRTQATAEYVDSASDPEKQTGKSRYHPSEEIRASLPQNDGDSRLSPAETTRTIIEVNNKGTLMLTGSIGDGVHENILWPDIPYITDQNGNLYFQVKEDEDVMQSVTSENNYVQVIVGFDTMEMIKEMELMGLSDSDFETEDDESGDDDSEDTGEDEDEEEWVAILEDEDEDDDDDDDDDEDDDDSDSDESLGDWANLETMRSCHPMFFAKRMTEVASNDPVDWMDQPSAGLAIQGLLSHILVEDYSDIQKKLADSNSTTNGNKDAENLVDKLEDNSKAGGDESEIDSSQDEKARNVVAFYKLEMIRIQLITAQGDQTEVEVEDVRKAQPDAIAHASAEIISRLEESGDKITEALKSLCWRHNSIQAEEVKLIGIDSLGFDLRLCAGAKIESLRFAFSTRATSEENAEGQIRKLLFPKTNQSTQPKPK

SEQ ID NO: 73420 - protein, 1090 aa, Arabidopsis thaliana
  peptide (1)..(1090): Ceres Seq. ID no. 4968110
MIRSYVNNGFYGEGVKVFGTMCGCNVRPDHYTFPCVLKACSCSGTIVIGRKIHGSATKVGLSSTLFVGNGLVSMYGKCGFLSEARLVLDEMSRRDVVSWNSLVVGYAQNQRFDDALEVCREMESVKISHDAGTMASLLPAVSNTTTENVMYVKDMFFKMGKKSLVSWNVMIGVYMKNAMPVEAVELYSRMEADGFEPDAVSITSVLPACGDTSALSLGKKIHGYIERKKLIPNLLLENALIDMYAKCGCLEKARDVFENMKSRDVVSWTAMISAYGFSGRGCDAVALFSKLQDSGLVPDSIAFVTTLAACSHAGLLEEGRSCFKLMTDHYKITPRLEHLACMVDLLGRAGKVKEAYRFIQDMSMEPNERVWGALLGACRVHSDTDIGLLAADKLFQLAPEQSGYYVLLSNIYAKAGRWEEVTNIRNIMKSKGLKKNPGASNVEVNRIIHTFLVGDRSHPQSDEIYRELDVLVKKMKELGYVPDSESALHDVEEEDKETHLAVHSEKLAIVFALMNTKEEEEDSNNTIRITKNLRICGDCHVAAKLISQITSREIIIRDTNRFHVFRFGVCSCASELRDRESERLEITVVLPMIESVMAVRLSTGFCSSTALLQYRTAPSSEEGGNCFHYASRRVFQPQRIHHIDGSGFLKYNSDYITRKHLRKNRTQATAEYVDSASDPEKQTGKSRYHPSEEIRASLPQNDGDSRLSPAETTRTIIEVNNKGTLMLTGSIGDGVHENILWPDIPYITDQNGNLYFQVKEDEDVMQSVTSENNYVQVIVGFDTMEMIKEMELMGLSDSDFETEDDESGDDDSEDTGEDEDEEEWVAILEDEDEDDDDDDDDDEDDDDSDSDESLGDWANLETMRSCHPMFFAKRMTEVASNDPVDWMDQPSAGLAIQGLLSHILVEDYSDIQKKLADSNSTTNGNKDAENLVDKLEDNSKAGGDESEIDSSQDEKARNVVAFYKLEMIRIQLITAQGDQTEVEVEDVRKAQPDAIAHASAEIISRLEESGDKITEALKSLCWRHNSIQAEEVKLIGIDSLGFDLRLCAGAKIESLRFAFSTRATSEENAEGQIRKLLFPKTNQSTQPKPK

SEQ ID NO: 73421 - DNA, 930 bp, Arabidopsis thaliana
  misc_feature (1)..(930): Ceres Seq. ID no. 4968183
  misc_feature (1)..(930): Ortholog of  Ceres SEQ ID NO 15169976 as cited in SEQ ID NO 60438
atggaagatctatggaagagagcgaaatcgtttgcagaagaagcagcgaagaaatcacaaaccataacactacaatcatcttcaacaacattcgtcaatctcgtcaccgaaaccgctaaaaaatccaaagagttcgctctcgaagcttctaagaaagctgattcgatcaatgtctccgagttcgtcgccgagacggcgaagaagtcaaaggaattcgctgctgaggtttcaacgaaagcggatcagctcaaagtcgtagcattgaaacaagctgatcagatccagaatataaaatcgattgccgacattatacctggaggattaggaggatcaggatctggtggtggtggttctgagatttctgaatctgagcttgttagttttggtattactgatgatttgagagagtttgttaaaggtttgacatctgctacgttccaggcttttcctgaacaagatgaatcgtcggaagtttctgatttggaaacaagtgcgtcgaatgttcggaaggatctttctgagtggcaggagagacatgccactcttgttcttggttctgtcaagcaaatttcgaagttgagatatgaactatgcccacgagttatgaaagaaaggaggttctggaggatatactttaccttagtgagcactcatgttgcaccatatgaaaggaagtacatggaggaacttaggaacaaagcagagagtaaagatgaagaagctaagaagagtccagggcttggaaggacagaatcagctgaaaagaacagaatatctactgcatcgtctgagcaagatctcgatacattcctgctgggagatctagaagacagtgacgaagctcctgatgatggtgatggtgatgatggaggaagcctgggtgatgatgactttgacaagattggcaactctgtaagtgaaaacgtttga

SEQ ID NO: 73422 - protein, 309 aa, Arabidopsis thaliana
  peptide (1)..(309): Ceres Seq. ID no. 4968184
MEDLWKRAKSFAEEAAKKSQTITLQSSSTTFVNLVTETAKKSKEFALEASKKADSINVSEFVAETAKKSKEFAAEVSTKADQLKVVALKQADQIQNIKSIADIIPGGLGGSGSGGGGSEISESELVSFGITDDLREFVKGLTSATFQAFPEQDESSEVSDLETSASNVRKDLSEWQERHATLVLGSVKQISKLRYELCPRVMKERRFWRIYFTLVSTHVAPYERKYMEELRNKAESKDEEAKKSPGLGRTESAEKNRISTASSEQDLDTFLLGDLEDSDEAPDDGDGDDGGSLGDDDFDKIGNSVSENV

SEQ ID NO: 73423 - DNA, 603 bp, Arabidopsis thaliana
  misc_feature (1)..(603): Ceres Seq. ID no. 4968265
  misc_feature (1)..(603): Ortholog of  Ceres SEQ ID NO 13597570 as cited in SEQ ID NO 64673
atgagctccttcaatggaaacagcaacatcgacaacctcctaatccaaaccctacttggacgtctccaaattcgtccccctaactctcatttcctctctcaatccctagacgacctcctcttcaaatccgacgacagcgacggcgatgatgacggagaaggtcagaccagtctcgacagagaagaagctaggcttgagaaagagctaatccgagtcatcgtctctggtcgaagcgattctctcaagccgaattcaggtcaagccgtgacagtcaacgaacaccacatctgcgttgggtttcatgaggatgaggaatcggattatcgtgtttgggagtggcatggtcatatcatgttgtttgatgaagagaatgggtacacgcctgagtatatctacgggaattacttcgagaggttgcctgtgaagcttcctaataaccgccgtgtggagaaggagaagaagaaggagatgaaagaagaggaggtggagaatttggggcttagagagttgatcgatggtggtgacgctgctcctggtaggattcttcataggaacaacatcaacatcggttcctcaagtttctttttcgttgcaagacaataa

SEQ ID NO: 73424 - protein, 200 aa, Arabidopsis thaliana
  peptide (1)..(200): Ceres Seq. ID no. 4968266
MSSFNGNSNIDNLLIQTLLGRLQIRPPNSHFLSQSLDDLLFKSDDSDGDDDGEGQTSLDREEARLEKELIRVIVSGRSDSLKPNSGQAVTVNEHHICVGFHEDEESDYRVWEWHGHIMLFDEENGYTPEYIYGNYFERLPVKLPNNRRVEKEKKKEMKEEEVENLGLRELIDGGDAAPGRILHRNNINIGSSSFFFVARQ

SEQ ID NO: 73425 - DNA, 1809 bp, Arabidopsis thaliana
  misc_feature (1)..(1809): Ceres Seq. ID no. 4968288
  misc_feature (1)..(1809): Ortholog of  Ceres SEQ ID NO 12613725 as cited in SEQ ID NO 68196
atggagcacaacaaggttgatacagaacctcaagattcatatgatgatcaacaaaaatgggttctcgattcttcgaccgatagtagaggagagattccgcttcgggctcaaaccggagcttggagagctgcactcttcatcattggtatcgaattcagcgagaggctaagttactttgggatctccacgaacttagtggtctacttgactaccattcttcaccaagatctcaagatggctgtaaaaaatacgaactactggtctggtgtcactactttgatgcctcttcttggaggcttcgtcgcagatgcttatctcggccgttatggaactgtcctacttgcaaccaccatttaccttatgggcttgattctgttaacattgtcttggtttataccgggattgaaagcatgtcatgaagacatgtgtgttgagccaaggaaagcccacgagatagccttcttcattgcaatctacttgatctccataggcactggaggtcataagccatcccttgagagctttggagctgaccaattcgaagatggccatccggaagaacgaaaaatgaaaatgtcttactttaactggtggaatgctggtctatgcgctggtattttaaccgcggtgactgtaattgtctatatcgaagaccggattggttggggtgtggctagcatcatactcacaatagttatggctacttcgttttttatcttccgtatcggcaaaccgttttaccgttatagagcaccttctggtagcccattgaccccaatgttgcaagtctttgtcgccgccattgccaaaagaaatcttccttgtcccagtgattcttctcttcttcatgagttaactaatgaagagtatactaaaggccggcttctttccagctcaaagaatcttaaatttctagacaaagcagcagttattgaggaccgaaacgagaacactaaagccgagaagcagagtccatggcgactcgcaacggttacgaaagtggaagaagttaagctactcatcaacatgattccaatctggttctttacattagcctttggagtatgcgccactcaaagctcaacactctttatcaaacaagccataataatggaccgacacatcacagggacaagcttcatagttcctccagcttcattgttctctctcatagctctctccataatcatcaccgtaacaatctacgagaaactcctcgttcctcttttgagacgtgccacaggaaacgaaagaggcattagcattctacaaagaatcggggtcggtatggttttctccttattcgctatgatcattgctgctctgattgagaagaaaagattagattatgctaaggaacaccacatgaataagaccatgaccttgagtgctatatggttagctcctcaattcctagtcttaggagttgcggatgcttttacccttgtcggtcttcaagaatatttctacgaccaagtcccagattctatgagaagcttaggcatagcgttttacctcagcgtgcttggagcggctagctttgtcaacaatcttttgataacggttagtgatcatttagccgaggaaatttccgggaagggctggtttgggaaagaccttaatagcagccgcttggaccgcttttactggatgctagccgccttgaccgctgcaaatatatgctgctttgtgatcgtggccatgagatacacttacaagactgtgcagccgagtctggctgttgttgctgacggcggtgatgacgttgagacagccacggggacgaataacacgtccaagtttacgtaa

SEQ ID NO: 73426 - protein, 602 aa, Arabidopsis thaliana
  peptide (1)..(602): Ceres Seq. ID no. 4968289
MEHNKVDTEPQDSYDDQQKWVLDSSTDSRGEIPLRAQTGAWRAALFIIGIEFSERLSYFGISTNLVVYLTTILHQDLKMAVKNTNYWSGVTTLMPLLGGFVADAYLGRYGTVLLATTIYLMGLILLTLSWFIPGLKACHEDMCVEPRKAHEIAFFIAIYLISIGTGGHKPSLESFGADQFEDGHPEERKMKMSYFNWWNAGLCAGILTAVTVIVYIEDRIGWGVASIILTIVMATSFFIFRIGKPFYRYRAPSGSPLTPMLQVFVAAIAKRNLPCPSDSSLLHELTNEEYTKGRLLSSSKNLKFLDKAAVIEDRNENTKAEKQSPWRLATVTKVEEVKLLINMIPIWFFTLAFGVCATQSSTLFIKQAIIMDRHITGTSFIVPPASLFSLIALSIIITVTIYEKLLVPLLRRATGNERGISILQRIGVGMVFSLFAMIIAALIEKKRLDYAKEHHMNKTMTLSAIWLAPQFLVLGVADAFTLVGLQEYFYDQVPDSMRSLGIAFYLSVLGAASFVNNLLITVSDHLAEEISGKGWFGKDLNSSRLDRFYWMLAALTAANICCFVIVAMRYTYKTVQPSLAVVADGGDDVETATGTNNTSKFT

SEQ ID NO: 73427 - protein, 524 aa, Arabidopsis thaliana
  peptide (1)..(524): Ceres Seq. ID no. 4968290
MAVKNTNYWSGVTTLMPLLGGFVADAYLGRYGTVLLATTIYLMGLILLTLSWFIPGLKACHEDMCVEPRKAHEIAFFIAIYLISIGTGGHKPSLESFGADQFEDGHPEERKMKMSYFNWWNAGLCAGILTAVTVIVYIEDRIGWGVASIILTIVMATSFFIFRIGKPFYRYRAPSGSPLTPMLQVFVAAIAKRNLPCPSDSSLLHELTNEEYTKGRLLSSSKNLKFLDKAAVIEDRNENTKAEKQSPWRLATVTKVEEVKLLINMIPIWFFTLAFGVCATQSSTLFIKQAIIMDRHITGTSFIVPPASLFSLIALSIIITVTIYEKLLVPLLRRATGNERGISILQRIGVGMVFSLFAMIIAALIEKKRLDYAKEHHMNKTMTLSAIWLAPQFLVLGVADAFTLVGLQEYFYDQVPDSMRSLGIAFYLSVLGAASFVNNLLITVSDHLAEEISGKGWFGKDLNSSRLDRFYWMLAALTAANICCFVIVAMRYTYKTVQPSLAVVADGGDDVETATGTNNTSKFT

SEQ ID NO: 73428 - protein, 509 aa, Arabidopsis thaliana
  peptide (1)..(509): Ceres Seq. ID no. 4968291
MPLLGGFVADAYLGRYGTVLLATTIYLMGLILLTLSWFIPGLKACHEDMCVEPRKAHEIAFFIAIYLISIGTGGHKPSLESFGADQFEDGHPEERKMKMSYFNWWNAGLCAGILTAVTVIVYIEDRIGWGVASIILTIVMATSFFIFRIGKPFYRYRAPSGSPLTPMLQVFVAAIAKRNLPCPSDSSLLHELTNEEYTKGRLLSSSKNLKFLDKAAVIEDRNENTKAEKQSPWRLATVTKVEEVKLLINMIPIWFFTLAFGVCATQSSTLFIKQAIIMDRHITGTSFIVPPASLFSLIALSIIITVTIYEKLLVPLLRRATGNERGISILQRIGVGMVFSLFAMIIAALIEKKRLDYAKEHHMNKTMTLSAIWLAPQFLVLGVADAFTLVGLQEYFYDQVPDSMRSLGIAFYLSVLGAASFVNNLLITVSDHLAEEISGKGWFGKDLNSSRLDRFYWMLAALTAANICCFVIVAMRYTYKTVQPSLAVVADGGDDVETATGTNNTSKFT

SEQ ID NO: 73429 - DNA, 1167 bp, Arabidopsis thaliana
  misc_feature (1)..(1167): Ceres Seq. ID no. 4968376
  misc_feature (1)..(1167): Ortholog of  Ceres SEQ ID NO 15179593 as cited in SEQ ID NO 1057
  misc_feature (1)..(1167): Ortholog of  Ceres SEQ ID NO 14306904 as cited in SEQ ID NO 53566
  misc_feature (1)..(1167): Ortholog of  Ceres SEQ ID NO 13658640 as cited in SEQ ID NO 66419
atggatcctcggagaaacttccaaccaggtggctatgactctcggaataccttcacttcaggatcttttgggcctccagattttggtgaaagtgatgaagcagagttggtttctgtttcttggaatcaggattacagttgttttgctgctggcactagccatggttttcgtatatataactgtgaaccgttcaaggaaacttttaggcgagagctgaaggatggagggtttaaaattgtagagatgcttttccggagtaatatcttggcgcttgttggtggtggacctaactcccagtacccttcaaataaagtattgatttgggatgatcatcaggggcgctgcatcagtgagtttacttttcggtcggaaattcgtgcagtgaagttaagaagagatcgaattgttgttgttcttgagcacaagatatatgtctacaattttatggatctaagacttcttcatcagattgaaaatatggcaaatccaaggggactatgttgcctctctcatcacatgaatacatctgtcttggcttgtccaggtattcgtcgaggagaggtccgagttgaacattttgggcttaacatggttcaaatcattaatgctcatgattctaatatcgcgtgcatgaccttgacattggatggcttgctccttgcaactgccagtacaaagggaactctgattagaattttcaacacgatggacggaactcgtctgcaagaggtccgaagaggcgtggacagagcagatatctatagcattgctctatcaccaaacgtgcagtggcttgcagtatcaagcgacaaggggactgttcacattttctctctcagagtgagagttataggggaggacgcatactccactgaacatgagacttcttcaaattccctgcagcctcttgtttctccagccagtggtgccaaccctggttcgtcattgtcttttctgagaggtgttctaccaaaatatttcagctcggaatggtcattttctcagttccatgtacctgaagtcacccaatactttgcagcatttggtgctcagaacacaattgcaattattggcttggacggaaggtgcaatttcgatccagtgaacggaggagagatgactcagcttgaacatttccattttctgaagcaagatagcccgagatag

SEQ ID NO: 73430 - protein, 388 aa, Arabidopsis thaliana
  peptide (1)..(388): Ceres Seq. ID no. 4968377
MDPRRNFQPGGYDSRNTFTSGSFGPPDFGESDEAELVSVSWNQDYSCFAAGTSHGFRIYNCEPFKETFRRELKDGGFKIVEMLFRSNILALVGGGPNSQYPSNKVLIWDDHQGRCISEFTFRSEIRAVKLRRDRIVVVLEHKIYVYNFMDLRLLHQIENMANPRGLCCLSHHMNTSVLACPGIRRGEVRVEHFGLNMVQIINAHDSNIACMTLTLDGLLLATASTKGTLIRIFNTMDGTRLQEVRRGVDRADIYSIALSPNVQWLAVSSDKGTVHIFSLRVRVIGEDAYSTEHETSSNSLQPLVSPASGANPGSSLSFLRGVLPKYFSSEWSFSQFHVPEVTQYFAAFGAQNTIAIIGLDGRCNFDPVNGGEMTQLEHFHFLKQDSPR

SEQ ID NO: 73431 - protein, 307 aa, Arabidopsis thaliana
  peptide (1)..(307): Ceres Seq. ID no. 4968378
MLFRSNILALVGGGPNSQYPSNKVLIWDDHQGRCISEFTFRSEIRAVKLRRDRIVVVLEHKIYVYNFMDLRLLHQIENMANPRGLCCLSHHMNTSVLACPGIRRGEVRVEHFGLNMVQIINAHDSNIACMTLTLDGLLLATASTKGTLIRIFNTMDGTRLQEVRRGVDRADIYSIALSPNVQWLAVSSDKGTVHIFSLRVRVIGEDAYSTEHETSSNSLQPLVSPASGANPGSSLSFLRGVLPKYFSSEWSFSQFHVPEVTQYFAAFGAQNTIAIIGLDGRCNFDPVNGGEMTQLEHFHFLKQDSPR

SEQ ID NO: 73432 - protein, 240 aa, Arabidopsis thaliana
  peptide (1)..(240): Ceres Seq. ID no. 4968379
MDLRLLHQIENMANPRGLCCLSHHMNTSVLACPGIRRGEVRVEHFGLNMVQIINAHDSNIACMTLTLDGLLLATASTKGTLIRIFNTMDGTRLQEVRRGVDRADIYSIALSPNVQWLAVSSDKGTVHIFSLRVRVIGEDAYSTEHETSSNSLQPLVSPASGANPGSSLSFLRGVLPKYFSSEWSFSQFHVPEVTQYFAAFGAQNTIAIIGLDGRCNFDPVNGGEMTQLEHFHFLKQDSPR

SEQ ID NO: 73433 - DNA, 642 bp, Arabidopsis thaliana
  misc_feature (1)..(642): Ceres Seq. ID no. 4968592
  misc_feature (1)..(642): Ortholog of  Ceres SEQ ID NO 13656286 as cited in SEQ ID NO 69168
  misc_feature (1)..(642): Ortholog of  Ceres SEQ ID NO 15174351 as cited in SEQ ID NO 0
atggcggcgtttacagggacaacagacaaatgcaaggcgtgtgacaagacggtatacgttatggacttgatgactttggaaggaatgccttatcacaagtcatgcttcaggtgcagccattgcaatggcactctcgtgatatgtaactactcatccatggatggagttttgtattgcaagacccattttgaacagctcttcaaagaatctggaaatttcagcaagaatttccaaacagctggaaagaccgagaaatcgaatgatgcgacgaaggctccaaacaggttatcatccttctttagcggcacacaagacaaatgtgcagcttgtaagaaaacagtttatcctctagagaagatgacaatggaaggagaatcttaccacaagacttgcttcagatgtgcacatagtggttgtccattaacacattcttcatatgctgctctcgatggcgtcctttactgtaaggtccacttcagccagcttttccttgagaaaggtaattacaatcatgtcctccaagccgcggctaaccaccgtcgctcgacggctgaggaagacaaaaccgaacccaaagaagatgaagcaaaccctacagaagaagaaacttctgatgcagcagctgaagaacatgaatcctaa

SEQ ID NO: 73434 - protein, 213 aa, Arabidopsis thaliana
  peptide (1)..(213): Ceres Seq. ID no. 4968593
MAAFTGTTDKCKACDKTVYVMDLMTLEGMPYHKSCFRCSHCNGTLVICNYSSMDGVLYCKTHFEQLFKESGNFSKNFQTAGKTEKSNDATKAPNRLSSFFSGTQDKCAACKKTVYPLEKMTMEGESYHKTCFRCAHSGCPLTHSSYAALDGVLYCKVHFSQLFLEKGNYNHVLQAAANHRRSTAEEDKTEPKEDEANPTEEETSDAAAEEHES

SEQ ID NO: 73435 - protein, 193 aa, Arabidopsis thaliana
  peptide (1)..(193): Ceres Seq. ID no. 4968594
MDLMTLEGMPYHKSCFRCSHCNGTLVICNYSSMDGVLYCKTHFEQLFKESGNFSKNFQTAGKTEKSNDATKAPNRLSSFFSGTQDKCAACKKTVYPLEKMTMEGESYHKTCFRCAHSGCPLTHSSYAALDGVLYCKVHFSQLFLEKGNYNHVLQAAANHRRSTAEEDKTEPKEDEANPTEEETSDAAAEEHES

SEQ ID NO: 73436 - protein, 190 aa, Arabidopsis thaliana
  peptide (1)..(190): Ceres Seq. ID no. 4968595
MTLEGMPYHKSCFRCSHCNGTLVICNYSSMDGVLYCKTHFEQLFKESGNFSKNFQTAGKTEKSNDATKAPNRLSSFFSGTQDKCAACKKTVYPLEKMTMEGESYHKTCFRCAHSGCPLTHSSYAALDGVLYCKVHFSQLFLEKGNYNHVLQAAANHRRSTAEEDKTEPKEDEANPTEEETSDAAAEEHES

SEQ ID NO: 73437 - DNA, 1023 bp, Arabidopsis thaliana
  misc_feature (1)..(1023): Ceres Seq. ID no. 4968623
  misc_feature (1)..(1023): Ortholog of  Ceres SEQ ID NO 14316382 as cited in SEQ ID NO 57756
atgatctcaaaacaagggattacagcgcaatgtttcttccggccaaagaaatttttcaggatgttgtttccaaagaaaaatttattattgaacaactttgagtcatcattaaccgagagattgaagaaactcatacctcaaaatacagatgagattctcaccttaccttggatgattctagctatggaattactttatgatacacataatgatataaacattctcatcactgatctcaagcttcattatatgactgattcggagcatggatattggtttgagaattacatgaacataaatacaaaattgctcgatctgtgtaacgcttttatgtccttgcttcgtcacatgaaccatggcattgtttgcttaaagttccttaggcataaattagaaatgaaatctgaggatctatgcactgagatttgttccgcacttgatagttggagggaaaatatcaccgcggaaatatcgaaatgccgcgaagttcttgggagatatgttgaatcattaaactttcataaagtcaagaattgtataaaagaagcaaaggttcttatgaaggcgttttatggggctaatgttcttacggcttatatctgcagtgtctttgtgatagttttgtcgaattccgacaaagatattttgcctatatatgtctggaagcaatcattgtggaaaaaagatttcttggatttgcagactatcgtaaacgtcaaaacaagagttaatatttccactgatggaacaatggtactccaagagttagaatctgttgctgccaaaatgaagaagatgtatcttacaattcaagaaggtgatgatcttgttcaagagtcctttaaggaatctattgaggaatgcaaagaagaagtcgagaaactggaacatgggttagatgaaatcttcaggaaaattggcaacttgtctgatgtaacctttaaaggacgtgaaatcattcgtgacggtttatttgattcaatgattagggagttaactcatggaccatacatatatgattaa

SEQ ID NO: 73438 - protein, 340 aa, Arabidopsis thaliana
  peptide (1)..(340): Ceres Seq. ID no. 4968624
MISKQGITAQCFFRPKKFFRMLFPKKNLLLNNFESSLTERLKKLIPQNTDEILTLPWMILAMELLYDTHNDINILITDLKLHYMTDSEHGYWFENYMNINTKLLDLCNAFMSLLRHMNHGIVCLKFLRHKLEMKSEDLCTEICSALDSWRENITAEISKCREVLGRYVESLNFHKVKNCIKEAKVLMKAFYGANVLTAYICSVFVIVLSNSDKDILPIYVWKQSLWKKDFLDLQTIVNVKTRVNISTDGTMVLQELESVAAKMKKMYLTIQEGDDLVQESFKESIEECKEEVEKLEHGLDEIFRKIGNLSDVTFKGREIIRDGLFDSMIRELTHGPYIYD

SEQ ID NO: 73439 - protein, 320 aa, Arabidopsis thaliana
  peptide (1)..(320): Ceres Seq. ID no. 4968625
MLFPKKNLLLNNFESSLTERLKKLIPQNTDEILTLPWMILAMELLYDTHNDINILITDLKLHYMTDSEHGYWFENYMNINTKLLDLCNAFMSLLRHMNHGIVCLKFLRHKLEMKSEDLCTEICSALDSWRENITAEISKCREVLGRYVESLNFHKVKNCIKEAKVLMKAFYGANVLTAYICSVFVIVLSNSDKDILPIYVWKQSLWKKDFLDLQTIVNVKTRVNISTDGTMVLQELESVAAKMKKMYLTIQEGDDLVQESFKESIEECKEEVEKLEHGLDEIFRKIGNLSDVTFKGREIIRDGLFDSMIRELTHGPYIYD

SEQ ID NO: 73440 - protein, 283 aa, Arabidopsis thaliana
  peptide (1)..(283): Ceres Seq. ID no. 4968626
MILAMELLYDTHNDINILITDLKLHYMTDSEHGYWFENYMNINTKLLDLCNAFMSLLRHMNHGIVCLKFLRHKLEMKSEDLCTEICSALDSWRENITAEISKCREVLGRYVESLNFHKVKNCIKEAKVLMKAFYGANVLTAYICSVFVIVLSNSDKDILPIYVWKQSLWKKDFLDLQTIVNVKTRVNISTDGTMVLQELESVAAKMKKMYLTIQEGDDLVQESFKESIEECKEEVEKLEHGLDEIFRKIGNLSDVTFKGREIIRDGLFDSMIRELTHGPYIYD

SEQ ID NO: 73441 - DNA, 1686 bp, Arabidopsis thaliana
  misc_feature (1)..(1686): Ceres Seq. ID no. 4968685
  misc_feature (1)..(1686): Ortholog of  Ceres SEQ ID NO 15226728 as cited in SEQ ID NO 1302
atggaggatattgggttggttaagcaaggttggaaatggatgcaatctcagaaacatatgtgctccgatgcttgttctgcgatgcgatgctttggggagatgataggagggcttgtggagcgtcactggccattggtgtgtagtggatgtgggaagctattaggattgcttcagttgtcagttctttattggaaagactgcatttttaggggtttccattgcagcgccaaattgggttcagctgctttgcttctgataatgtggagttgcttccttagcttgacttccttatcttgcttgctctatgttctccttagtatgggagctgctgcagctgttgttctgaacttgggttgcactcctgggctctttatcgtaggactatttggaattttgattttatggatgtatgcaaacttttggatcactggaacattgtttatagtcggaggctatttattctccttaaatcatgctcgcgtggtggttcttgtggcgggcttatatgcgatgtattgtgtcaaagtcagacttggatggcttggtcttttcctctcaataaatcttgctttcttgtccaacgatatattaaattgtcttcttcaatggtgtgacaatctaagtgaaaaaccacaacacgaggaaccaaagaaaccgaaagaaacaatcatagaagaagactattcaagggaatttgagtatccttcagttcctgtcgaagatgaaaccgagacaaagattcacgagaataagtcttctgctaaaccaactgcgccttctactgttgttaataccgtaaaggaaatttctagtgttaaaatagtcaaaatagaagagtcaagttcagctgatgaaatgaagagaatactgaatagtttgaatcattatgaagcattgggggtccctcggcataaaaagatcgatgctgcggtgcttaagaaagagtataggaagaaggcaatgttggttcatcctgataaaaatatggggagtccattggcaagtgaatcattcaagaaacttcaaagtgcttacgaggttctatctgatttcgtaaagaagagagattacgatgagcaactacgaaaagaagaatctaggactaggagtgtttgtcagacatctcatgcttcttcgcatcagagtggtcctgattatcgatcagatgagtcaaggcggatacactgtacaaaatgtggtaattcacacatatggatatgtaccaataggacaaaagcaaaggcaagatggtgccaggattgtggccaatatcatcaagcaaaagatggagatggatgggtcgaactcaaagggacattacccttcgagagagcacataagattgaaataccgcgtgcttttgtttgcgcggagagcaaaatatttgacgtctcagaatgggccatttgtcagggaatggcttgtagaccaaacacgcatagaccaagctttcatgtgaacatggttgggttagaaaagacaacacagagatcaaactcaagtaggttcccatgggatctagatgtggagatgatggatgaggacgaagaagagtttgagctatggcttcaacaagctcttgcttcaggtctcttctgcgaaacctcaaaacgtagaaaaagctggagccctttcaagttgggccagatgaaaagcaagaaacagtggcgaagaacttccacttga

SEQ ID NO: 73442 - protein, 561 aa, Arabidopsis thaliana
  peptide (1)..(561): Ceres Seq. ID no. 4968686
MEDIGLVKQGWKWMQSQKHMCSDACSAMRCFGEMIGGLVERHWPLVCSGCGKLLGLLQLSVLYWKDCIFRGFHCSAKLGSAALLLIMWSCFLSLTSLSCLLYVLLSMGAAAAVVLNLGCTPGLFIVGLFGILILWMYANFWITGTLFIVGGYLFSLNHARVVVLVAGLYAMYCVKVRLGWLGLFLSINLAFLSNDILNCLLQWCDNLSEKPQHEEPKKPKETIIEEDYSREFEYPSVPVEDETETKIHENKSSAKPTAPSTVVNTVKEISSVKIVKIEESSSADEMKRILNSLNHYEALGVPRHKKIDAAVLKKEYRKKAMLVHPDKNMGSPLASESFKKLQSAYEVLSDFVKKRDYDEQLRKEESRTRSVCQTSHASSHQSGPDYRSDESRRIHCTKCGNSHIWICTNRTKAKARWCQDCGQYHQAKDGDGWVELKGTLPFERAHKIEIPRAFVCAESKIFDVSEWAICQGMACRPNTHRPSFHVNMVGLEKTTQRSNSSRFPWDLDVEMMDEDEEEFELWLQQALASGLFCETSKRRKSWSPFKLGQMKSKKQWRRTST

SEQ ID NO: 73443 - protein, 548 aa, Arabidopsis thaliana
  peptide (1)..(548): Ceres Seq. ID no. 4968687
MQSQKHMCSDACSAMRCFGEMIGGLVERHWPLVCSGCGKLLGLLQLSVLYWKDCIFRGFHCSAKLGSAALLLIMWSCFLSLTSLSCLLYVLLSMGAAAAVVLNLGCTPGLFIVGLFGILILWMYANFWITGTLFIVGGYLFSLNHARVVVLVAGLYAMYCVKVRLGWLGLFLSINLAFLSNDILNCLLQWCDNLSEKPQHEEPKKPKETIIEEDYSREFEYPSVPVEDETETKIHENKSSAKPTAPSTVVNTVKEISSVKIVKIEESSSADEMKRILNSLNHYEALGVPRHKKIDAAVLKKEYRKKAMLVHPDKNMGSPLASESFKKLQSAYEVLSDFVKKRDYDEQLRKEESRTRSVCQTSHASSHQSGPDYRSDESRRIHCTKCGNSHIWICTNRTKAKARWCQDCGQYHQAKDGDGWVELKGTLPFERAHKIEIPRAFVCAESKIFDVSEWAICQGMACRPNTHRPSFHVNMVGLEKTTQRSNSSRFPWDLDVEMMDEDEEEFELWLQQALASGLFCETSKRRKSWSPFKLGQMKSKKQWRRTST

SEQ ID NO: 73444 - protein, 542 aa, Arabidopsis thaliana
  peptide (1)..(542): Ceres Seq. ID no. 4968688
MCSDACSAMRCFGEMIGGLVERHWPLVCSGCGKLLGLLQLSVLYWKDCIFRGFHCSAKLGSAALLLIMWSCFLSLTSLSCLLYVLLSMGAAAAVVLNLGCTPGLFIVGLFGILILWMYANFWITGTLFIVGGYLFSLNHARVVVLVAGLYAMYCVKVRLGWLGLFLSINLAFLSNDILNCLLQWCDNLSEKPQHEEPKKPKETIIEEDYSREFEYPSVPVEDETETKIHENKSSAKPTAPSTVVNTVKEISSVKIVKIEESSSADEMKRILNSLNHYEALGVPRHKKIDAAVLKKEYRKKAMLVHPDKNMGSPLASESFKKLQSAYEVLSDFVKKRDYDEQLRKEESRTRSVCQTSHASSHQSGPDYRSDESRRIHCTKCGNSHIWICTNRTKAKARWCQDCGQYHQAKDGDGWVELKGTLPFERAHKIEIPRAFVCAESKIFDVSEWAICQGMACRPNTHRPSFHVNMVGLEKTTQRSNSSRFPWDLDVEMMDEDEEEFELWLQQALASGLFCETSKRRKSWSPFKLGQMKSKKQWRRTST

SEQ ID NO: 73445 - DNA, 1344 bp, Arabidopsis thaliana
  misc_feature (1)..(1344): Ceres Seq. ID no. 4968870
  misc_feature (1)..(1344): Ortholog of  Ceres SEQ ID NO 14309674 as cited in SEQ ID NO 55707
  misc_feature (1)..(1344): Ortholog of  Ceres SEQ ID NO 13658728 as cited in SEQ ID NO 66270
  misc_feature (1)..(1344): Ortholog of  Ceres SEQ ID NO 12465428 as cited in SEQ ID NO 68898
atggaggaaacgctaaatcagttcgtcatggaaggcgtacctgtcaaaaaacacgacctcattcgctacgcaaaggatcttcgcaagtttcgtcaacctcaacgcgctctcgagatctttgagtggatggaaagaaaggaaatagcgtttactggcagcgatcacgcgattcgtttgaatctaattgcaaagagtaaaggcttagaggcggctgagacctacttcaacagtttagacgattctattaagaatcagtccacttatggttccttattgaactgttactgtgtggaaaaggaggaagttaaagcaaaggctcattttgaaaatatggttgatctcaatcatgtgagtaattctttgccgtttaataacctgatggctatgtatatggggctaggtcaaccagagaaggtgcctgcattggttgttgcgatgaaagagaagagtattactccttgtgatattacttactccatgtggatacaaagctgtggaagtttaaaggatttagatggagtagagaaggttcttgatgaaatgaaagcagaaggtgaaggtattttctcttggaatacatttgctaatcttgcagcaatttatattaaagtcggtctctacggtaaagcagaagaggcgttgaaatctctggagaacaatatgaatcctgacgtacgtgattgttatcattttctcattaacttgtatactggaattgcaaatgcttctgaggtttatcgagtttgggatttgcttaagaaaagataccctaatgtcaacaattcaagctatcttacaatgcttcgagcactgagtaaactcgatgacattgatggagtcaagaaagtctttgcagaatgggaatcgacatgctggacttacgatatgcggatggcgaatgtagcgattagcagctacttaaagcagaacatgtacgaagaagctgaggctgttttcaacggcgccatgaaaaagtgtaaaggtcaattctcaaaggcaaggcagcttttgatgatgcacctgttgaagaacgatcaggcagatttggctctgaagcattttgaagcggcggttttggatcaagacaagaactggacttggagctcagagctgatcagttcgttctttcttcactttgaggaagccaaagacgttgatggagcagaagaattctgcaaaaccttgacgaaatggagtcccctcagttctgaaacttacactcttcttatgaagacttacctcgctgcagggaaagcttgtccggatatgaaaaagagattggaagaacaagggatcctggtagacgaagagcaagaatgtttgcttagcaagatttgcccttga

SEQ ID NO: 73446 - protein, 447 aa, Arabidopsis thaliana
  peptide (1)..(447): Ceres Seq. ID no. 4968871
MEETLNQFVMEGVPVKKHDLIRYAKDLRKFRQPQRALEIFEWMERKEIAFTGSDHAIRLNLIAKSKGLEAAETYFNSLDDSIKNQSTYGSLLNCYCVEKEEVKAKAHFENMVDLNHVSNSLPFNNLMAMYMGLGQPEKVPALVVAMKEKSITPCDITYSMWIQSCGSLKDLDGVEKVLDEMKAEGEGIFSWNTFANLAAIYIKVGLYGKAEEALKSLENNMNPDVRDCYHFLINLYTGIANASEVYRVWDLLKKRYPNVNNSSYLTMLRALSKLDDIDGVKKVFAEWESTCWTYDMRMANVAISSYLKQNMYEEAEAVFNGAMKKCKGQFSKARQLLMMHLLKNDQADLALKHFEAAVLDQDKNWTWSSELISSFFLHFEEAKDVDGAEEFCKTLTKWSPLSSETYTLLMKTYLAAGKACPDMKKRLEEQGILVDEEQECLLSKICP

SEQ ID NO: 73447 - protein, 438 aa, Arabidopsis thaliana
  peptide (1)..(438): Ceres Seq. ID no. 4968872
MEGVPVKKHDLIRYAKDLRKFRQPQRALEIFEWMERKEIAFTGSDHAIRLNLIAKSKGLEAAETYFNSLDDSIKNQSTYGSLLNCYCVEKEEVKAKAHFENMVDLNHVSNSLPFNNLMAMYMGLGQPEKVPALVVAMKEKSITPCDITYSMWIQSCGSLKDLDGVEKVLDEMKAEGEGIFSWNTFANLAAIYIKVGLYGKAEEALKSLENNMNPDVRDCYHFLINLYTGIANASEVYRVWDLLKKRYPNVNNSSYLTMLRALSKLDDIDGVKKVFAEWESTCWTYDMRMANVAISSYLKQNMYEEAEAVFNGAMKKCKGQFSKARQLLMMHLLKNDQADLALKHFEAAVLDQDKNWTWSSELISSFFLHFEEAKDVDGAEEFCKTLTKWSPLSSETYTLLMKTYLAAGKACPDMKKRLEEQGILVDEEQECLLSKICP

SEQ ID NO: 73448 - protein, 405 aa, Arabidopsis thaliana
  peptide (1)..(405): Ceres Seq. ID no. 4968873
MERKEIAFTGSDHAIRLNLIAKSKGLEAAETYFNSLDDSIKNQSTYGSLLNCYCVEKEEVKAKAHFENMVDLNHVSNSLPFNNLMAMYMGLGQPEKVPALVVAMKEKSITPCDITYSMWIQSCGSLKDLDGVEKVLDEMKAEGEGIFSWNTFANLAAIYIKVGLYGKAEEALKSLENNMNPDVRDCYHFLINLYTGIANASEVYRVWDLLKKRYPNVNNSSYLTMLRALSKLDDIDGVKKVFAEWESTCWTYDMRMANVAISSYLKQNMYEEAEAVFNGAMKKCKGQFSKARQLLMMHLLKNDQADLALKHFEAAVLDQDKNWTWSSELISSFFLHFEEAKDVDGAEEFCKTLTKWSPLSSETYTLLMKTYLAAGKACPDMKKRLEEQGILVDEEQECLLSKICP

SEQ ID NO: 73449 - DNA, 1159 bp, Arabidopsis thaliana
  misc_feature (1)..(1159): Ceres Seq. ID no. 4970150
  misc_feature (1)..(1159): Ortholog of  Ceres SEQ ID NO 14315418 as cited in SEQ ID NO 57506
aaaaaatcaaaaacagaaagaagcagagagacgatggcgagcaaagacgaattttcccgagatctcactgcgattcgctgcgccagagctacgatgcttctctattcacttgcatcatctcgcacaatcgattccgccggcgagaagcaggagaaaggagaaacgcgaagagagatagaggatctgaggagaaagcttaccatggtgaagataaagatgaatcggattaagctttgcggattgatggaactgcttcttctcgtctttttgaacattcttagctccacttgagagactaaagcttgaatatacagttcgtggtgaacagaggaacttgttggtggttgctaagtcaattgcaactacacagggcttgactggattctggaaaggtaatttgctcaatgttcttcgaactgctcctttcaaagccgtcaatttttgtgcctatgatacctatagaaagcaattgcttaaaatcgctgggaatcaagaagcaaccaactttgaaagattcgttgctggtgccgctgctgggattactgctactgtgctctgcttgccactcgacactatacgaaccaaactagtggctcggggtggagaagccttggggggaatcggaggagcttttcggtatatgatccaaacagaagggttgttctccctctacaagggtctagtgccgtccatagcaagcatggctctgtccggtgcagttttctatggcgtttacgacatccttaagtcatcgtttctgcatacaccagaaggccggaaaagactgatagacatgaagcagcagggacaagaactcaatgctctagacaggctcgagttaggacccatcagaactctcatgtacggtgctatagcaggtgcttgtactgaagtagccacttatcctttcgaagtagtgagacgacagcttcagatgcagatgggtaaaaacaagctcaatgctttagctatgggattcaatatcattgaaagaggagggatcccagctttatacgctggacttttacctagcttgctccaggtattgccttcggcttcaataagttactttgtctacgagtgtatgaagatagtacttaaagtagaataacaagattatgatattggaagagtactagagcttaaagaatcatccatt

SEQ ID NO: 73450 - protein, 156 aa, Arabidopsis thaliana; identical to SEQ ID NO: 39607
  peptide (1)..(156): Ceres Seq. ID no. 4970151

SEQ ID NO: 73451 - protein, 136 aa, Arabidopsis thaliana; identical to SEQ ID NO: 39608
  peptide (1)..(136): Ceres Seq. ID no. 4970152

SEQ ID NO: 73452 - protein, 105 aa, Arabidopsis thaliana; identical to SEQ ID NO: 39609
  peptide (1)..(105): Ceres Seq. ID no. 4970153

SEQ ID NO: 73453 - DNA, 464 bp, Arabidopsis thaliana
  misc_feature (1)..(464): Ceres Seq. ID no. 4970171
  misc_feature (1)..(464): Ortholog of  Ceres SEQ ID NO 14308991 as cited in SEQ ID NO 0
gagatcgagagaagaatagtttgatcatcttgtgagaaaaataatggctgcttcagtgatgctatcttcggtgacattgaaaccagctggtttcacggtggagaagacggcgtcgacgcctccggcagaaagggcaagggatacggtgtttacaagtacgtcgacaagtatggagctaacgtcgatggatacagtcctatttacaacgagaacgagtggtcagcgagtggtgacgtgtacaagggaggagtcaccggattggcaatttgggcggtaactctcgccggaattcttgccggaggtgctcttcttgtgtacaacacaagtgctttggctcagtaaatcttaaagttgttagcgcatgtgtaatcatgtttctataaatgtttctgtgttgttctctttctctctaatgttgtaaaactcagacatactttgaatttataagacttctagtgtttgta

SEQ ID NO: 73454 - protein, 77 aa, Arabidopsis thaliana
  peptide (1)..(77): Ceres Seq. ID no. 4970172
MAASVMLSSVTLKPAGFTVEKTASTPPAERARDTVFTSTSTSMELTSMDTVLFTTRTSGQRVVTCTREESPDWQFGR

SEQ ID NO: 73455 - protein, 72 aa, Arabidopsis thaliana
  peptide (1)..(72): Ceres Seq. ID no. 4970173
MLSSVTLKPAGFTVEKTASTPPAERARDTVFTSTSTSMELTSMDTVLFTTRTSGQRVVTCTREESPDWQFGR

SEQ ID NO: 73456 - DNA, 1757 bp, Arabidopsis thaliana
  misc_feature (1)..(1757): Ceres Seq. ID no. 4970201
  misc_feature (1)..(1757): Ortholog of  Ceres SEQ ID NO 15226449 as cited in SEQ ID NO 58879
atcctctgttttgtaaccaatctcagctctccctctcaaacaatccaggattcttcagattcctctcctttgatcctctctttaacaatctctctctctctgttttcttcgatccgttgtaggagaaaatggtcgttatcaacagtctccgacgcttggcgcgtaccactcaggttcatttgcacagtaagtatgccacttgcatgtctgggaactccacttccaggaggattttcactactgaggcagcacctgagaagaaaaacactgttggtctaaagggcatgatatgcttgcaccttttactgctggatggcagagtgctgatttagatcccttggtcattgcaaagtctgagggaagttatgtgtatgatgatactgggaaaaaatatcttgactctctcgctggtttatggtgtactgccttaggaggaaatgagccaaggcttgtttctgccgctgttgaacagttgaacaccttgccgttttatcactccttttggaaccgtactactaaaccttctctggatcttgctaaggttcttttagagatgttcacggccaacaaaatggccaaagcattttttacaagcggtggatcagatgccaacgatacccaggtcaagctggtttggtattacaataacgcacttggaaggcccgagaagaaaaagtttatcgcgagaaagaaatcgtaccatggctccactctaatatcagcaagtttgtccggccttcccccgctacaccaaaattttgatttacctgcaccatttgtgttgcacacagattgccctcattattggcgttttcatcttccaggcgaaacggaagaggagttctcaaccagattagccaagaatttagaggatctaatcatcaaagaaggaccagaaactattggtgcttttatagctgaaccagtcatgggtgctgggggtgtgatacctccacctgctacctactttgaaaaggttcaagctgttgttaagaaatatgatatcttgttcattgctgatgaggtgatatgtgcatttggaaggctcgggacaatgtttggctgtgacaaatacaacattaagccagatcttgtgaccttagctaaggcactgtcttcagcatatatgccgattggagccattcttatgagccaagaagtggcagatgtcataaattctcatagcagcaagctaggcgttttctcccatggatttacttattctggtcatccagtttcgtgtgctgtagcaattgaagcgttaaagatatacaaggagaggaacataccagagtatgtcgccaaagttgccccaaggtttcaagatggagttaaagcgtttgcctctggtagtcctattattggagagacaagaggaacaggtttgattcttgggactgagtttgtagacaataaatctccgaacgaaccatttccaccagaatggggtgttggcgcattctttggagccgagtgccagaagcacgggatgttagtccgtgttgcaggtgatggcattttgatgtctccaccgctcattatctcacctgaagagattgatgagttgatttctatctatgggaaagcattgaaggcaacggaagagaaggtaaaagaactcaaggctcagcacaagaagtgaaaagcagagtcaaaatgatgttgatgaaaaatgttttttagattctcaaagtttggatcctttgtttttttttttaacacacaacaagtctttaaataagtacattttaatgagg

SEQ ID NO: 73457 - protein, 450 aa, Arabidopsis thaliana; identical to SEQ ID NO: 26479
  peptide (1)..(450): Ceres Seq. ID no. 4970202

SEQ ID NO: 73458 - protein, 362 aa, Arabidopsis thaliana
  peptide (1)..(362): Ceres Seq. ID no. 4970203
MFTANKMAKAFFTSGGSDANDTQVKLVWYYNNALGRPEKKKFIARKKSYHGSTLISASLSGLPPLHQNFDLPAPFVLHTDCPHYWRFHLPGETEEEFSTRLAKNLEDLIIKEGPETIGAFIAEPVMGAGGVIPPPATYFEKVQAVVKKYDILFIADEVICAFGRLGTMFGCDKYNIKPDLVTLAKALSSAYMPIGAILMSQEVADVINSHSSKLGVFSHGFTYSGHPVSCAVAIEALKIYKERNIPEYVAKVAPRFQDGVKAFASGSPIIGETRGTGLILGTEFVDNKSPNEPFPPEWGVGAFFGAECQKHGMLVRVAGDGILMSPPLIISPEEIDELISIYGKALKATEEKVKELKAQHKK

SEQ ID NO: 73459 - protein, 356 aa, Arabidopsis thaliana
  peptide (1)..(356): Ceres Seq. ID no. 4970204
MAKAFFTSGGSDANDTQVKLVWYYNNALGRPEKKKFIARKKSYHGSTLISASLSGLPPLHQNFDLPAPFVLHTDCPHYWRFHLPGETEEEFSTRLAKNLEDLIIKEGPETIGAFIAEPVMGAGGVIPPPATYFEKVQAVVKKYDILFIADEVICAFGRLGTMFGCDKYNIKPDLVTLAKALSSAYMPIGAILMSQEVADVINSHSSKLGVFSHGFTYSGHPVSCAVAIEALKIYKERNIPEYVAKVAPRFQDGVKAFASGSPIIGETRGTGLILGTEFVDNKSPNEPFPPEWGVGAFFGAECQKHGMLVRVAGDGILMSPPLIISPEEIDELISIYGKALKATEEKVKELKAQHKK

SEQ ID NO: 73460 - DNA, 696 bp, Arabidopsis thaliana
  misc_feature (1)..(696): Ceres Seq. ID no. 4970209
  misc_feature (1)..(696): Ortholog of  Ceres SEQ ID NO 13594932 as cited in SEQ ID NO 55807
  misc_feature (1)..(696): Ortholog of  Ceres SEQ ID NO 13596954 as cited in SEQ ID NO 68926
aaggaacctcgtgtggtcatcgtcttcgtacctttctgctttctacgccgtcaaaatctaactgctcgacagtgaccatgcaaagctcaatgacaatggaactacgaccatcaggtgattccggttcatctgacgtcgatgctgagatcagcgatggcttttcaccgctcgatacttctcacagagacgtcgctgatgaaggttcgttgctgagaagagcagagatgtatcaagactacatgaagcaagtaccaatcccgacgaatcgtggctcgttgattccgttcacaagctgggttggattaagcatttcaatgaaacagctttatggtcagcctctacattacctcacgaatgttctcttacaacgatgggatcaatcacgattcggtactgattctgaagaacagaggttggattctatcattcatcctactaaagctgaagctactatctggcttgttgaagagattcatcgactcactccttctcatcttcacatggctcttctttggagatctgatcctatgtatcactctttcattgacccaatctttcctgagaaatgaacaagttcttgaattgtgatgaaccatccttttttgtatctacttttgcttttagaaaccttgttcaagcattgaagcttatatgtataattgcagggtcttattcaataaaatgtgaatcttcctt

SEQ ID NO: 73461 - protein, 188 aa, Arabidopsis thaliana
  peptide (1)..(188): Ceres Seq. ID no. 4970210
GTSCGHRLRTFLLSTPSKSNCSTVTMQSSMTMELRPSGDSGSSDVDAEISDGFSPLDTSHRDVADEGSLLRRAEMYQDYMKQVPIPTNRGSLIPFTSWVGLSISMKQLYGQPLHYLTNVLLQRWDQSRFGTDSEEQRLDSIIHPTKAEATIWLVEEIHRLTPSHLHMALLWRSDPMYHSFIDPIFPEK

SEQ ID NO: 73462 - protein, 163 aa, Arabidopsis thaliana; identical to SEQ ID NO: 25944
  peptide (1)..(163): Ceres Seq. ID no. 4970211

SEQ ID NO: 73463 - protein, 159 aa, Arabidopsis thaliana; identical to SEQ ID NO: 25945
  peptide (1)..(159): Ceres Seq. ID no. 4970212

SEQ ID NO: 73464 - DNA, 1277 bp, Arabidopsis thaliana
  misc_feature (1)..(1277): Ceres Seq. ID no. 4970342
  misc_feature (1)..(1277): Ortholog of  Ceres SEQ ID NO 15169053 as cited in SEQ ID NO 53926
aaaagctgaaacaaagagttcgagaaaaatttcgattctcttgctcgtaaaagcttcttttgattctctttgactctgttttgtggatagctcctgaagaagaagaagatgatggtagtgaacagctttgatctatggcaaaaagatgttttcttctctgcagctgaagagaatggagtctgcttatagattgtggattagagagaagaaagatgagatttgtaaggaacttcaagcagctttaggtacagctaaatggcagttggaggagtttgagaaggcagtgagattgagtcataaacggtgtggggataatgattcttcatccacacggcataaacagtttgttaccgctattgaaaaccagattcatcgcgtagaaacttctctgcaagaagcttatagtgaaaatgggaaaaagcctctccgttgggttgatcttaatgaagaagagcgtgatgacttagcaatgtttctctctggatcttctcgaacttcacagagttttagtggtgagagcagcatcaagtcgagagagtctactaatagttctctagttgaaaacgttatggaagtttcagctaaagtaacattcaagaaagctaaagtttatggtgatggctctgagtgtgtcatagacattgaagaaagagtgacacctggccaagcagagaaatcagttgggctgagaagaatatggagttcaccaaatttcaattctttgagaattatagttcctggtggtgataatgaagaagaaaaggagacattggtggcacaaatagaagcgacgcctaaagttaaaggaactaagtctgtattgtggatgcagagacttcctgatcataatcagctctttgacaagaccggttgctttcaaaatccgatacgcttaccgtttaatcacccgatcaagtttattgtttccttattgctaatggtgtttctactattacccttcgtagtgtatttgtcttgagaattttaccacggttcgaaactgtcaagaagctgctaaagagatcagctttcgcgtctaatggttaggattcataatcccacaagaacaaacagagattaaaaagctttacatatgttacttttaacttgttgctttggttcttcagggaacgtatagaaacattgaaacgtgtaagattaagtaaagggattagagtttatattacggctttggctaccgttgataaagatgtaaatgcaatattcgtttcgtagatgtttgacaatacaatgccataagaatcaagatttatgcc

SEQ ID NO: 73465 - protein, 277 aa, Arabidopsis thaliana
  peptide (1)..(277): Ceres Seq. ID no. 4970343
MFSSLQLKRMESAYRLWIREKKDEICKELQAALGTAKWQLEEFEKAVRLSHKRCGDNDSSSTRHKQFVTAIENQIHRVETSLQEAYSENGKKPLRWVDLNEEERDDLAMFLSGSSRTSQSFSGESSIKSRESTNSSLVENVMEVSAKVTFKKAKVYGDGSECVIDIEERVTPGQAEKSVGLRRIWSSPNFNSLRIIVPGGDNEEEKETLVAQIEATPKVKGTKSVLWMQRLPDHNQLFDKTGCFQNPIRLPFNHPIKFIVSLLLMVFLLLPFVVYLS

SEQ ID NO: 73466 - protein, 268 aa, Arabidopsis thaliana
  peptide (1)..(268): Ceres Seq. ID no. 4970344
MESAYRLWIREKKDEICKELQAALGTAKWQLEEFEKAVRLSHKRCGDNDSSSTRHKQFVTAIENQIHRVETSLQEAYSENGKKPLRWVDLNEEERDDLAMFLSGSSRTSQSFSGESSIKSRESTNSSLVENVMEVSAKVTFKKAKVYGDGSECVIDIEERVTPGQAEKSVGLRRIWSSPNFNSLRIIVPGGDNEEEKETLVAQIEATPKVKGTKSVLWMQRLPDHNQLFDKTGCFQNPIRLPFNHPIKFIVSLLLMVFLLLPFVVYLS

SEQ ID NO: 73467 - protein, 169 aa, Arabidopsis thaliana
  peptide (1)..(169): Ceres Seq. ID no. 4970345
MFLSGSSRTSQSFSGESSIKSRESTNSSLVENVMEVSAKVTFKKAKVYGDGSECVIDIEERVTPGQAEKSVGLRRIWSSPNFNSLRIIVPGGDNEEEKETLVAQIEATPKVKGTKSVLWMQRLPDHNQLFDKTGCFQNPIRLPFNHPIKFIVSLLLMVFLLLPFVVYLS

SEQ ID NO: 73468 - DNA, 996 bp, Arabidopsis thaliana
  misc_feature (1)..(996): Ceres Seq. ID no. 4970350
  misc_feature (1)..(996): Ortholog of  Ceres SEQ ID NO 15176208 as cited in SEQ ID NO 55594
  misc_feature (1)..(996): Ortholog of  Ceres SEQ ID NO 14312330 as cited in SEQ ID NO 58581
acaaataacaacaacaatttcgccggcgtcgtcgtcgtcgtctctccatcaccgtctctgctgcattgattcgcagcactgagtcctaaatttccagtgtaaaaaaaatcagaaaatggacaacttggaagatttgaagattgtggcagagcagtggtctaaacaaggacttgaatttgttcaaaaaataccaccacctcagctttatactgccattggtgttctcttattagctaccatttggctcttatctattcgtttgtttagacgtacaaaatccaatactgtactcctctctgggctaagtggaagtggcaaaacagttctcttctatcaactacgagatggatcttcccatcagggtgctgtaacgtcaatggaaccgaacgaaggcacctttgtgcttcacaatgaaaacaacactaagaaaggaaaagtaaagcctgttcatcttattgatgttcctggacactctcggcttatatctaagctagaagaatacttgcctcgagccgccgctgttgtgtttgtagtagatgcattggagttcctcccaaatatccgggcagcttcagagtacctttacgacattctgaccaatgctagcgttattaagaataagaccccggttctgctttgctgtaacaagacagataaagtaactgcacacaccaaagagttcatccgcaagcagatggagaaagaaatagataaacttagggtttcgaggagcgcaatatcaacagctgatatagcgaatgacttcactcttgggattgaaggagaagtgttttccttttcgcattgccataacaaagtcacggtcgctgaggcgtctggactaacaggagaaacagatcaggtacaagagttcatcagagaacacgtaaagccatgaggattgtgtaagcatctcagagaatgtacttaaatgtcttttcatttgtttgtaaatgaaattataatttgagaacttagatgatattcgttggaagg

SEQ ID NO: 73469 - protein, 260 aa, Arabidopsis thaliana; identical to SEQ ID NO: 29425
  peptide (1)..(260): Ceres Seq. ID no. 4970351

SEQ ID NO: 73470 - protein, 173 aa, Arabidopsis thaliana; identical to SEQ ID NO: 29426
  peptide (1)..(173): Ceres Seq. ID no. 4970352

SEQ ID NO: 73471 - DNA, 1485 bp, Arabidopsis thaliana
  misc_feature (1)..(1485): Ceres Seq. ID no. 4970496
  misc_feature (1)..(1485): Ortholog of  Ceres SEQ ID NO 14308851 as cited in SEQ ID NO 55618
gattacttgtttctttgatttctccttccatagaaccgaattgttttcagtctgagatttctcctgccgagagaacgattttaatctattttcctcgagagtagaaaatggctgatggtgaagatattcaaccccttgtctgtgacaatggaactggaatggttaaggctggttttgctggggatgatgcaccgagggctgtgtttccaagtattgttggccgtcctcgccacactggagtgatggttggaatgggacagaaggatgcatatgttggcgatgaagctcaatccaagcgtggtattcttacccttaaataccctattgagcacggtattgtcaacaattgggatgatatggaaaaaatctggcatcatactttctacaatgagctccgtgttgctcccgaggagcatcctattctgctcactgaagcgcctcttaacccaaaggctaaccgtgagaagatgactcagatcatgtttgaaacctttaacgctccggctatgtatgtcgccattcaagctgtcctgtcgctttatgctagtggtcgtactactggtattgtgcttgactctggagatggtgtgagtcacacggtccctatctatgagggttacgctctcccgcatgcaatcctacgtcttgatcttgcaggtcgtgacctcacagatgctctgatgaagatcctcactgagcgtggttactctttcaccacaacagctgagcgtgaaattgtcagagacatcaaggagaagctttgctacattgctcttgactatgagcaggagcttgagacggctaaaaccagctcttctgtagagaagaactatgagttacctgatgggcaagtgatcaccattggatctgagcgtttccgttgccctgaggttctttaccagccatctatgatcggtatggagaatgctggtatccatgaaaccacctacaactccataatgaaatgtgatgttgacatcagaaaggacttgtatggtaacattgtgctcagtggtggaacaactatgttccctggaattgctgacagaatgagcaaagagatcactgctttggcaccgagcagcatgaagatcaaagtcgttgcacctcctgagaggaaatactctgtctggattggaggatccatcttggcctccctcagtaccttccagcagatgtggatcgcaaaggcagaatatgatgagtcaggcccgtcgattgttcaccggaaatgcttttgagcttgaagttaagtctgcttccggagaagccctgggggttttccagtttgtccttactgggtttttatcttcgttctctgctcttctttgtttttcttcttcaatattttcagattctggcctaagacattttgaagaatttacattatctgtttgtagtgttggttaaactgttgtcttgttccttttatttattttggatgacacaactgtgtttgagtgaataagaactcctgatttttcc

SEQ ID NO: 73472 - protein, 377 aa, Arabidopsis thaliana; identical to SEQ ID NO: 36003
  peptide (1)..(377): Ceres Seq. ID no. 4970497

SEQ ID NO: 73473 - protein, 360 aa, Arabidopsis thaliana; identical to SEQ ID NO: 36004
  peptide (1)..(360): Ceres Seq. ID no. 4970498

SEQ ID NO: 73474 - protein, 332 aa, Arabidopsis thaliana; identical to SEQ ID NO: 36005
  peptide (1)..(332): Ceres Seq. ID no. 4970499

SEQ ID NO: 73475 - DNA, 1130 bp, Arabidopsis thaliana
  misc_feature (1)..(1130): Ceres Seq. ID no. 4970520
  misc_feature (1)..(1130): Ortholog of  Ceres SEQ ID NO 12474685 as cited in SEQ ID NO 88
  misc_feature (1)..(1130): Ortholog of  Ceres SEQ ID NO 13638574 as cited in SEQ ID NO 51223
  misc_feature (1)..(1130): Ortholog of  Ceres SEQ ID NO 14311531 as cited in SEQ ID NO 51466
  misc_feature (1)..(1130): Ortholog of  Ceres SEQ ID NO 15170465 as cited in SEQ ID NO 52798
  misc_feature (1)..(1130): Ortholog of  Ceres SEQ ID NO 15177112 as cited in SEQ ID NO 55956
  misc_feature (1)..(1130): Ortholog of  Ceres SEQ ID NO 12610790 as cited in SEQ ID NO 56123
  misc_feature (1)..(1130): Ortholog of  Ceres SEQ ID NO 13655636 as cited in SEQ ID NO 63519
  misc_feature (1)..(1130): Ortholog of  Ceres SEQ ID NO 13655896 as cited in SEQ ID NO 64970
acaaacctcctccgtctttcgtaaaaggttctcgagatctaagtctcacttctaaagctctgacaatggcggacgaaatcggattcttccaactcaacaccggagcaaagatcccatcggttggtctcgggacatggcaagctgctcctggcgtcgttggagacgccgtcgccgccgctgtgaagattggatatcagcatattgattgtgcttcaagatatggcaatgaaattgagattgggaaagttctgaagaagttgtttgatgatggcgtagtgaagcgtgagaagctgttcatcacatcaaaaatctggttgactgatcttgaccctccggatgtacaggacgcattgaacagaactcttcaggatctgcagcttgattatgttgatttgtatctcatgcactggcctgttcggttgaagaaaggtactgttgactttaagcctgagaacattatgcctatcgatattccgagcacatggaaagcaatggaagcactggttgattcaggcaaggcaagagccattggcgtaagtaatttctctacaaagaaactctcagatcttgtggaggctgctcgtgttcctcccgctgtaaaccaggtggaatgtcatccttcatggcaacaacataagctacatgagttttgcaagtccaaagggatccacctctcaggatattcgccattgggatctcctggaacaacgtgggtgaaggccgatgttttaaagagtccggttattgaaatgattgctaaagaaatcgggaagtctcccgcacaaaccgcgcttcgatggggacttcaaatgggtcatagtatacttcccaaaagcacaaatgaaggaagaatcagagagaactttgatgtcttgggatggtctattccaaaagaaatgtttgacaagttttccaagatagagcaggctaggttagtccaaggcacgtcgtttgttcatgagacgttgagtccttataaaacacttgaagagctttgggatggtgagatctgaatcaaaagatgtcttttgttgaattttaaagttgaaaaagaacaaagttccactgctttaagctttgatcgagaatgtgtaaacgattcaattttcaataaaagtaggattttgcag

SEQ ID NO: 73476 - protein, 336 aa, Arabidopsis thaliana; identical to SEQ ID NO: 41268
  peptide (1)..(336): Ceres Seq. ID no. 4970521

SEQ ID NO: 73477 - protein, 315 aa, Arabidopsis thaliana; identical to SEQ ID NO: 41269
  peptide (1)..(315): Ceres Seq. ID no. 4970522

SEQ ID NO: 73478 - protein, 203 aa, Arabidopsis thaliana; identical to SEQ ID NO: 41270
  peptide (1)..(203): Ceres Seq. ID no. 4970523

SEQ ID NO: 73479 - DNA, 651 bp, Arabidopsis thaliana
  misc_feature (1)..(651): Ceres Seq. ID no. 4970620
  misc_feature (1)..(651): Ortholog of  Ceres SEQ ID NO 13595433 as cited in SEQ ID NO 56659
atatttgaagttcgtggattttgaaggatttgattggtttccatgatctagagttttgagaatggcgatggtatcaggaagacgatctactctaaaccccgacgcacctctttttattccggcagctgtacgacaagtggaagatttctcaccggagtggtggcaattggtgacaacttcgacttggtaccctgattactggatcagtcagcagcagcaaggcgcggatggtttctatgacaacggagagaatgagaatggtggaggtcatatcgatgtagctgatcttcttccagaatcatttgattttgatgatatggaagatttctttgacactgatgctgctgagtttgatcaaggattcgatggaagaatgtattaccaagcaccttccgaatttggctttggaaagaatggtgagatggttaagaaatcaagtggaaacaggagcccgagatcgattgtggaaccagctaagtatgcggaaaagccagcgaaatggggaaaccagagggttgctgctgctccgagaaacatccaccagcctcgctgaagagatatgttgttaactagtcagagaagtcagagcagttcggtctgtgtatctttagccaccactgtacctttgtaatttttagtatttgcttccac

SEQ ID NO: 73480 - protein, 163 aa, Arabidopsis thaliana; identical to SEQ ID NO: 20801
  peptide (1)..(163): Ceres Seq. ID no. 4970621

SEQ ID NO: 73481 - protein, 161 aa, Arabidopsis thaliana; identical to SEQ ID NO: 20802
  peptide (1)..(161): Ceres Seq. ID no. 4970622

SEQ ID NO: 73482 - protein, 85 aa, Arabidopsis thaliana; identical to SEQ ID NO: 20803
  peptide (1)..(85): Ceres Seq. ID no. 4970623

SEQ ID NO: 73483 - DNA, 1375 bp, Arabidopsis thaliana
  misc_feature (1)..(1375): Ceres Seq. ID no. 4970740
  misc_feature (1)..(1375): Ortholog of  Ceres SEQ ID NO 14301830 as cited in SEQ ID NO 62310
  misc_feature (1)..(1375): Ortholog of  Ceres SEQ ID NO 15179524 as cited in SEQ ID NO 0
ctcccatcacctccgatctcaaatctcacaatcttttctctccaaattctcttctctctgaatcaatccaatcatggttgagccggcgaacaccgttggaattccggtgaaccacatcccattgttgaaggatgagctcgatatcgtgatccccacgatccgtaacctcgatttcctggagatgtggaggccttttcttcagccttaccatctgattatcgtccaagatggagatccatcgaagaccattgctgtccctgaagggttcgattacgaactctacaacaggaacgacatcaaccgtatccttggtcctaaagcttcctgcatttccttcaaggactctgcttgtcgttgcttcggctacatggtctccaagaagaagtacatcttcactattgatgacgattgcttcgttgctaaggatccatctggaaaagctgtgaacgctcttgagcaacacatcaagaaccttctctgcccatcaactccatttttcttcaacaccttgtacgacccataccgtgaaggtgctgacttcgtccgtggataccctttcagtctccgtgagggtgtttccaccgctgtttcccacggtctgtggctcaacatccctgattacgatgcccctacccaacttgtgaagcctaaggaaaggaacacaagtatgtggatgctgtcatgaccatcccaaagggaactcttttccctatgtgtggtatgaacttggcctttgaccgtgagctcattggtccggctatgtactttggtctcatgggtgatggtcagcctattggtcgctacgacgatatgtgggctggatggtgtatcaaggtgatctgtgaccatttgggattgggagtgaagacaggtttgccctacatttaccacagcaaagccagcaacccgtttgtgaacttgaagaaggagtacaagggaatcttctggcaggaggatatcattcctttcttccagagcgcaaagctcacgaaagaagctgtgacagttcaacaatgctacatggagctgtccaagttggtgaaggagaagctaagccccattgatccttactttgacaagcttgcagatgctatggtcacttggattgaagcttgggatgagcttaacccacccactaaagcttgagcagcaaaaaaaccaccaccgcagttttggttattagctcaacatatcatctatcttctccgttttgtttttgttttgtcttttctcaaattttccggcgattcttcagttcgtttttaagttgccggagtttatttaaatagtgaatggtgtagttctatttatgaccgagacaatctctcttttgaggtttttcgtttttgtttcaataataaaaaatcatatccct

SEQ ID NO: 73484 - protein, 203 aa, Arabidopsis thaliana
  peptide (1)..(203): Ceres Seq. ID no. 4970741
MVEPANTVGIPVNHIPLLKDELDIVIPTIRNLDFLEMWRPFLQPYHLIIVQDGDPSKTIAVPEGFDYELYNRNDINRILGPKASCISFKDSACRCFGYMVSKKKYIFTIDDDCFVAKDPSGKAVNALEQHIKNLLCPSTPFFFNTLYDPYREGADFVRGYPFSLREGVSTAVSHGLWLNIPDYDAPTQLVKPKERNTSMWMLS

SEQ ID NO: 73485 - protein, 167 aa, Arabidopsis thaliana
  peptide (1)..(167): Ceres Seq. ID no. 4970742
MWRPFLQPYHLIIVQDGDPSKTIAVPEGFDYELYNRNDINRILGPKASCISFKDSACRCFGYMVSKKKYIFTIDDDCFVAKDPSGKAVNALEQHIKNLLCPSTPFFFNTLYDPYREGADFVRGYPFSLREGVSTAVSHGLWLNIPDYDAPTQLVKPKERNTSMWMLS

SEQ ID NO: 73486 - protein, 154 aa, Arabidopsis thaliana
  peptide (1)..(154): Ceres Seq. ID no. 4970743
MTIPKGTLFPMCGMNLAFDRELIGPAMYFGLMGDGQPIGRYDDMWAGWCIKVICDHLGLGVKTGLPYIYHSKASNPFVNLKKEYKGIFWQEDIIPFFQSAKLTKEAVTVQQCYMELSKLVKEKLSPIDPYFDKLADAMVTWIEAWDELNPPTKA

SEQ ID NO: 73487 - DNA, 2201 bp, Arabidopsis thaliana
  misc_feature (1)..(2201): Ceres Seq. ID no. 4970861
  misc_feature (1)..(2201): Ortholog of  Ceres SEQ ID NO 15171762 as cited in SEQ ID NO 57846
  misc_feature (1)..(2201): Ortholog of  Ceres SEQ ID NO 12597287 as cited in SEQ ID NO 63982
gctttcattctttggatgcgctgttgtcaacttgtccctcgctgcctctgcttcttaactctttctttatcacttttccactcccaaatcaatttttaggttttttttataattataatttatttgctctcggcaggatctatataatacacagaccagtctttgcgtgtgcttgtgtgcattcattgatcgggtttatatcttttcatcggattttctttgtcgagcaagagccatgtcactgagacccaacgctaagacggaggttcgccggaaccgatacaaagttgcagtggatgcggaggaaggacgacggaggagagaagacaacatggttgagatccgtaaaagcaagcgtgaggagagtttgatgaagaagagacgtgaaggtatgcaagctcttcagggtttcccttcagcttccgccgcctccgtcgataagaagttggatagtctgaaggatatggtcgctggggtttggtccgatgaccctgccttgcagcttgagtccactactcagttcaggaagcttctctctattgagagaagtcctccaatcgaggaagtgataagtgctggtgttgttcctaggtttgttgagtttcttaagaaagaagattaccccgccattcagtttgaggcagcttgggctctaacaaacattgcatctggaacatcggatcacactaaggttgtaatcgatcacaatgctgttccaatctttgttcagcttcttgcttcccctagcgatgatgttcgtgaacaggctgtatgggctttgggtaacgttgctggtgattcaccacggtgccgtgatcttgttcttggatgtggggcactgcttccgctgctcaatcagcttaatgagcatgctaaattgtccatgcttcgaaatgccacttggaccttgtcaaacttctgtcgtggcaagcctcagcctcactttgaccaggtcaaacctgctcttcccgcccttgaacgactaattcattcagatgatgaagaagtcttgacagatgcctgttgggctctttcttacctctctgatgggaccaatgacaaaatccagactgtcatccaggccggtgttgtcccaaaacttgttgaacttctcctccatcattctccatctgtgctaattcctgctcttcgcactgttggaaatatagttactggagatgatatacaaacacagtgcgtgatcaatagtggtgctctaccttgtcttgccaacctgctcactcaaaaccataagaaaagcataaagaaggaagcttgctggacgatttcaaacatcacagcaggcaacaaagatcagatccagacggtagttgaggctaatttgatttccccgttggtgagtctgcttcaaaatgctgaatttgacattaagaaggaagctgcatgggcaatttcaaatgcaacttcaggtggttctcatgatcaaataaaatacctggtggagcaagggtgcataaaaccattatgcgatctcctggtttgcccagatccaagaatcataactgtctgccttgaaggattggaaaacattttgaaggtgggagaggcagagaagaacttgggtcacacaggagacatgaactattacgctcagctgattgatgatgcagaagggctagaaaagatcgagaaccttcagagccatgacaacaatgagatctatgagaaggctgttaaaattctggagacatactggcttgaagaggaagatgatgagacacagcaacctccaggtgttgatggttctcaggctgggttccagtttggagggaatcaagctccagtaccatccggaggattcaacttcagctgaaggtaaataaaagaatggaattggaagcttgcaacttgagaatggtgaaaggtcagagtcagtcagagtctagtttcactgccatggttatactccaggtctggtctggtctggtctcagaggtttgtaccgggtggtcggtttaaaagtacagcgtctgagaaagtgtttggttcattgtccagggctatttttttgaaatgactggtacaccggtcgtgagtcgacctttgtgttgtttttaaattttggagggttataaaaacttacagtggagtcttttgtttttgtgttgacaacagtttgtatgtcggttaaaaaattgaaaccataaaccctttattggtcttaatatgtttggtgtctg

SEQ ID NO: 73488 - protein, 532 aa, Arabidopsis thaliana; identical to SEQ ID NO: 28267
  peptide (1)..(532): Ceres Seq. ID no. 4970862

SEQ ID NO: 73489 - protein, 500 aa, Arabidopsis thaliana; identical to SEQ ID NO: 28268
  peptide (1)..(500): Ceres Seq. ID no. 4970863

SEQ ID NO: 73490 - protein, 487 aa, Arabidopsis thaliana; identical to SEQ ID NO: 28269
  peptide (1)..(487): Ceres Seq. ID no. 4970864

SEQ ID NO: 73491 - DNA, 1041 bp, Arabidopsis thaliana
  misc_feature (1)..(1041): Ceres Seq. ID no. 4970938
  misc_feature (1)..(1041): Ortholog of  Ceres SEQ ID NO 13597604 as cited in SEQ ID NO 65175
ttttacgtttcttgatcatcttattgaactgggtttgatctaaagttgtattgatgggttctgaaggaccaacgggtgtgacgattcatatcacagggttcaagaagttccatggagtagctgagaatcctacagagaaaatggctaacaatttgaaagaatatttggctaagaattgtgtttcgaaagatgtgaatcttggaagttgtactgtgcttgagactgctggtcaaggagctcttgcttctctctatcagttgctacaatccgcggttaacacaaaagagtcagagtcgttgaccggaaaaaccatatgggttcactttggagttaatagtggcgctacaaaatttgcaattgagcaacaagctgtgaatgaagcgacttttcgttgtcctgatgaattgggttggaaacctcagaatttgccaattgttccctctgatggtccaatctcaactgtaagaaagactaatcttcctgttgaagagataacaaaggcgttggagaagaatggctttgaagtgataacatcagatgatgcaggtcgatttgtgtgtaactatgtctattaccattctctgagatttgcagagcagaataagaccagatcactctttgttcacgttcctcttttcgttgccgtggatgaagaaacccaaatgagattcactgtttctctgctggaggtactcgcttctatttgcaagtaatgttatcccaaatgtggctattcttattcatgaaatgtgcatcatggaccgattgtctccccacgggaaaaattcgcttatcaataaatggaatataagttcacttctctactatctcctcttcatatatgcatcattgcattcaagtttcataaactagattcattttcttcttcaaaagtggtatcaaatgaaaaatgatatatgcctacttgccagtggtgccaatgcaatgagatttggaaatatgcaatctttctgctcaaagtactaatcattttgaggaaaattcaatgtatgaatctgatttaagggtcttcttctgttt

SEQ ID NO: 73492 - protein, 219 aa, Arabidopsis thaliana; identical to SEQ ID NO: 22924
  peptide (1)..(219): Ceres Seq. ID no. 4970939

SEQ ID NO: 73493 - protein, 190 aa, Arabidopsis thaliana; identical to SEQ ID NO: 22925
  peptide (1)..(190): Ceres Seq. ID no. 4970940

SEQ ID NO: 73494 - DNA, 1651 bp, Arabidopsis thaliana
  misc_feature (1)..(1651): Ceres Seq. ID no. 4970956
  misc_feature (1)..(1651): Ortholog of  Ceres SEQ ID NO 14310803 as cited in SEQ ID NO 58463
  misc_feature (1)..(1651): Ortholog of  Ceres SEQ ID NO 13663769 as cited in SEQ ID NO 60793
aaaattgggatcattttgataggagcgactctgttccttcgccgccgatacgcactcttcttcatcggatttgttcctctggggttcgcttctggaagaaatatgggtgagactctcatcaccaccctgtctatggagaactatcacccgtcaacactgctatccatggattcaggtgcttttactcatgaagaatcagagagggatatgaatgggtctctcatacttactggaccgcctgatattaatctaccactctcttctgaagctaggccatctctgcttttgtggaacgaacactgtgacatcttagacgttggacttggacctcagctatatgagcctgaggctgttgttcatgtgcctaaggttgctaagaagtacaacaagcgtgttgatagtgcatggggtgcttggcttttcttcagtttctacttcaaacctgttttggatgagaagtctaaaagtaagttaacgagggacagcaatggcttgtctgggtatgataaatctgatttgcagctcgactcgttcttggttcagcatgacatggagaatatgtacatgtgggtgttcaaggaaaagcctgaaaatgcccttggcaagatgcagctgcggagctacatgaacggacactcacgcgagggtgagcgtcctttcccttttagtgtggacaaaggttttgtccgctctcataggatgcagaggaaacattaccgtggtctctctaacccacagtgcctccatggaatcgaagttgtttattcacccaacctttctgtactcagcgaggatgaaaagaagaagtggacagaactcacaggtcgagatgtgaactttgctattccagctgaagctagtgattacggttcatggaggaatctcccaaacaccgaatttgaggctgagagacctcttcctctggctaaagctaacgggcacacccacctgaaaaagctgaatggtacctgtctaaacctgtctacacattccccagaccatgcagttgatacagtggaagttcaactcgctggtagcaataaacgcaaaagggattgtcttgctctaggaaactgcgatgactcgagctcaagtgagaaatctctggacatgaaaatccatgcaacggagctgccttggtcaaatgattttagcggggtgatgaagaatgtgtacggtccagtcacagccgcaaaaacgatatatgaagacgacagagggttcttgatagttatgagcctgccatttgttgattccggaagggtgaaagtgacatggaggaatacaccagcacatggaatagtgaagatatcatgtgtaagtacagcatgtgagccattcatcaagagacatgatagaacatttaagctaacagatccaacaccagagcattgcccaccgggggaatttgtccgcgaagtctccctgccgaacaggattccagatgacgccaagcttgaagcttaccgggacgaaacaggaacaacactagaggttttagtgcctaaacaccgaatgggaccagaggagcatgaggttcgcgtctgtctccgtccgttcgtgctagagtgagattgtagcgcataacttcttaaaagaattttattgttcatgtatcattggattattcatatttaatcatatttactcc

SEQ ID NO: 73495 - protein, 523 aa, Arabidopsis thaliana
  peptide (1)..(523): Ceres Seq. ID no. 4970957
KIGIILIGATLFLRRRYALFFIGFVPLGFASGRNMGETLITTLSMENYHPSTLLSMDSGAFTHEESERDMNGSLILTGPPDINLPLSSEARPSLLLWNEHCDILDVGLGPQLYEPEAVVHVPKVAKKYNKRVDSAWGAWLFFSFYFKPVLDEKSKSKLTRDSNGLSGYDKSDLQLDSFLVQHDMENMYMWVFKEKPENALGKMQLRSYMNGHSREGERPFPFSVDKGFVRSHRMQRKHYRGLSNPQCLHGIEVVYSPNLSVLSEDEKKKWTELTGRDVNFAIPAEASDYGSWRNLPNTEFEAERPLPLAKANGHTHLKKLNGTCLNLSTHSPDHAVDTVEVQLAGSNKRKRDCLALGNCDDSSSSEKSLDMKIHATELPWSNDFSGVMKNVYGPVTAAKTIYEDDRGFLIVMSLPFVDSGRVKVTWRNTPAHGIVKISCVSTACEPFIKRHDRTFKLTDPTPEHCPPGEFVREVSLPNRIPDDAKLEAYRDETGTTLEVLVPKHRMGPEEHEVRVCLRPFVLE

SEQ ID NO: 73496 - protein, 489 aa, Arabidopsis thaliana; identical to SEQ ID NO: 39439
  peptide (1)..(489): Ceres Seq. ID no. 4970958

SEQ ID NO: 73497 - protein, 479 aa, Arabidopsis thaliana; identical to SEQ ID NO: 39440
  peptide (1)..(479): Ceres Seq. ID no. 4970959

SEQ ID NO: 73498 - DNA, 1199 bp, Arabidopsis thaliana
  misc_feature (1)..(1199): Ceres Seq. ID no. 4971081
  misc_feature (1)..(1199): Ortholog of  Ceres SEQ ID NO 15169809 as cited in SEQ ID NO 52839
  misc_feature (1)..(1199): Ortholog of  Ceres SEQ ID NO 14306297 as cited in SEQ ID NO 56907
aaaggaaaaagaaaaataaataatcgatctcaaccgtccgatcatccatcttgccatcaccgttcaccaatcttcttcgtctcctctctctttctctctttttgctgtttctagctcctctctctctggatctcgccggcgaaccgtttctcttgggtgtaaacagtagcaatcaagctatagaatctcagatatcgctgaattagctgttggattttatccgccttttcttcgttatccggggctcgggtataaggtttcatcgtcttatttcatctgtaaatgggctgcttccactcaaaggcagcaaaagaatttcgaggacacgaagaccctgttaagcttgcctctgagacagcttttagtgtgagtgaggttgaagcattatttgagctattcaagagcataagcagttcggttgttgatgatggtctgattaacaaggaggagtttcaacttgctttgttcaaaagccggaagagggagaatatatttgctaatagggtaaaatcttaattcttcaggcttttacaagattcatcttctggaagagtgatctaaaccaagataatatgtccattatcctaaacaatattgcttttccgcagatatttgatatgtttgatgttaaacgaaaaggagtcatcgatttcggggactttgtaagatcactcaatgttttccaccccaatgcttctctagaagacaaaatagattttacgtttaggctttacgacatggactgcacgggttacattgaacgacaagaggtcaagcaaatgttgatcgcgcttctctgcgaatctgaaatgaaactggctgatgaaaccatagagataatactcgataagacatttgaagatgcagacgtgaatcaagatggaaaaattgataaattagagtggagtgatttcgtaaacaaaaatccatcattgcttaagatcatgactcttccatatctcagggatattacgacaacgtttccgagttttgtcttccattcggaggtcgatgagattgccacatgaagaaacaaactggtttaagaccgagtagattgccacgagttggaagaacaagtctgagctaatcggtgtaatcaacatctgtttgtaaacagtagtagagcatattctcttgaaattgtttgggttacttttttcttctcacaacagtttaaaattttgggtttttagctt

SEQ ID NO: 73499 - protein, 151 aa, Arabidopsis thaliana; identical to SEQ ID NO: 35420
  peptide (1)..(151): Ceres Seq. ID no. 4971082

SEQ ID NO: 73500 - protein, 136 aa, Arabidopsis thaliana; identical to SEQ ID NO: 35421
  peptide (1)..(136): Ceres Seq. ID no. 4971083

SEQ ID NO: 73501 - protein, 96 aa, Arabidopsis thaliana; identical to SEQ ID NO: 35422
  peptide (1)..(96): Ceres Seq. ID no. 4971084

SEQ ID NO: 73502 - DNA, 1215 bp, Arabidopsis thaliana
  misc_feature (1)..(1215): Ceres Seq. ID no. 4971093
  misc_feature (1)..(1215): Ortholog of  Ceres SEQ ID NO 15171297 as cited in SEQ ID NO 51458
aaaaaggaacaaaacaaaaataaagcgcgaaattagttttcaccggcgagattttttatcctctctacgagataacacttagaagaagaggcagttaaaacagagagacgacgtcgtgttatttttccaaattccggtgatctgagaatgacgtcggggactagaacgccgacttggaaagagagagagaacaacaaacggcgagagcggcgaagacgagcgattgcggctaagatcttcgcaggactaaggattcatggaaacttcaagctccctaaacactgcgacaacaatgaagtcctcaaagctttatgcaatgaagctggttggactgtagaagacgacggaactacttaccgcaagggatgcaaaccaatggatcgaatggacctcatgaatggttctacttcagctagtccatgctcatcgtatcaacatagccctcgtgcttcctacaatccaagcccttcgtcttcatcattcccgagtcctacaaacccatttggtgatgctaactcactaatcccatggctcaagaacctctcttcaaactcaccttccaagcttcccttcttccatggaaattcaataagcgctcccgtgactccgccattggctcgaagccctactcgtgatcaagtaaccatccctgactctggatggctctcaggaatgcaaactccgcagagcggaccgtcttctcctactttcagtttagtttcaagaaacccgtttttcgacaaagaggcttttaaaatgggagattgtaattcaccaatgtggactcctggacaaagtggaaactgctctccagctattcctgctggtgttgatcagaactctgatgtgccaatggctgatggaatgacggctgagtttgcgtttggttgtaacgcaatggctgcgaatggaatggtgaagccttgggaaggagaaaggatacatggagaatgtgtttcagatgatttagaacttacacttggaaactcaagaaccagatgatcatttcagagaagaatcaaagtcgtttgctatcattaagtcttcttttttgtctgtcttttttttccagtgtgatgtttaaaggtgactcagaggaaaaaaaggagaatagaaagagaaacaaaaaaagaacattttgagctctgttttcttttttttttttctttttttttttgttggcttttgactaaagttgtagttagaatctatttt

SEQ ID NO: 73503 - protein, 284 aa, Arabidopsis thaliana; identical to SEQ ID NO: 27357
  peptide (1)..(284): Ceres Seq. ID no. 4971094

SEQ ID NO: 73504 - protein, 208 aa, Arabidopsis thaliana; identical to SEQ ID NO: 27358
  peptide (1)..(208): Ceres Seq. ID no. 4971095

SEQ ID NO: 73505 - protein, 205 aa, Arabidopsis thaliana; identical to SEQ ID NO: 27359
  peptide (1)..(205): Ceres Seq. ID no. 4971096

SEQ ID NO: 73506 - DNA, 1104 bp, Arabidopsis thaliana
  misc_feature (1)..(1104): Ceres Seq. ID no. 4971166
  misc_feature (1)..(1104): Ortholog of  Ceres SEQ ID NO 13600141 as cited in SEQ ID NO 0
aacaaaagacaaaaactttcaattatgtgaagaatcgtacacctttcttatcgtcttctccatcgtttctccctgaagatttgttctactactctttttgggttcagtttcataatttaaacaagatgcagctcaaagtccctgaacatcaggttgcaggacacattgctaaagacgggaagcctggtcctctcgtagatgacaagggtcggttcttcaagccacttcagggcgattctcgtggtgaaatcgaggtaaagttctacgaatctttctcctcaaacacagaggttccagaacacatccatagatatttcccggtgtatcacggcactcaagcagttgaaggttctgatggagcagccatgatggtgttggaaaatcttcttgcagaatacacaaaaccatcagtaatggatgttaagatgggttcgagaacatggtatcctgatgcatctgaagaatacatccaaaaatgtttgaagaaagacacgggtaccacaaccgtgtcatcgggtttcaggatctctggtttcgaagtgtatgatcacaaagaatcgagtttctggaagcccgagaggaagcttcttcgcgggctcgatgtagatggagcgagattgactctgaggaagtttgtatcatctaactcactttcggacactggctcgaaacctgactctgcttttgcctcgagtgtttacggcggttcccacgggatcttaacgcagttgctggaactcaagacctggttcgagaaccaaacgctctaccatttcaactcttgttcgattttaatggtctatgagaatgaatccatcttaaagggaaatgatgatgatgctagaccacaagtcaagctggtggattttgctcatgttcttgatggtaatggtgtcattgaccataacttcttgggtggtctttgctctttcataaacttcattcgtgagattcttcagagcccagatgagtctgcagattcttagatttaagttaatttgtttgttatggctttggctgattccaatttttggatataaacttatgtttccttcacatatgtacttgattacctaaagagcagaatacattcgtactcttttc

SEQ ID NO: 73507 - protein, 327 aa, Arabidopsis thaliana
  peptide (1)..(327): Ceres Seq. ID no. 4971167
QKTKTFNYVKNRTPFLSSSPSFLPEDLFYYSFWVQFHNLNKMQLKVPEHQVAGHIAKDGKPGPLVDDKGRFFKPLQGDSRGEIEVKFYESFSSNTEVPEHIHRYFPVYHGTQAVEGSDGAAMMVLENLLAEYTKPSVMDVKMGSRTWYPDASEEYIQKCLKKDTGTTTVSSGFRISGFEVYDHKESSFWKPERKLLRGLDVDGARLTLRKFVSSNSLSDTGSKPDSAFASSVYGGSHGILTQLLELKTWFENQTLYHFNSCSILMVYENESILKGNDDDARPQVKLVDFAHVLDGNGVIDHNFLGGLCSFINFIREILQSPDESADS

SEQ ID NO: 73508 - protein, 286 aa, Arabidopsis thaliana; identical to SEQ ID NO: 41829
  peptide (1)..(286): Ceres Seq. ID no. 4971168

SEQ ID NO: 73509 - protein, 206 aa, Arabidopsis thaliana; identical to SEQ ID NO: 41830
  peptide (1)..(206): Ceres Seq. ID no. 4971169

SEQ ID NO: 73510 - DNA, 1192 bp, Arabidopsis thaliana
  misc_feature (1)..(1192): Ceres Seq. ID no. 4971184
  misc_feature (1)..(1192): Ortholog of  Ceres SEQ ID NO 13582619 as cited in SEQ ID NO 56520
  misc_feature (1)..(1192): Ortholog of  Ceres SEQ ID NO 14314632 as cited in SEQ ID NO 59923
  misc_feature (1)..(1192): Ortholog of  Ceres SEQ ID NO 13660872 as cited in SEQ ID NO 60830
  misc_feature (1)..(1192): Ortholog of  Ceres SEQ ID NO 12616221 as cited in SEQ ID NO 63291
aaagaaaaactatttaagaaacatatgttttggatcaagtaagggtttgatcttgtaccggaatcagatggatttgcctcctggttttaggtttcatccaacagacgaagaactcataacccactatctccacaagaaggttcttgaccttggtttctcggctaaagctattggtgaggttgatttgaacaaagctgagccatgggagttgccatataaagcaaaaattggtgagaaagaatggtactttttctgtgtgagggatagaaagtatccgactggtctgaggactaaccgagcaactcaagccggttattggaaggcgacagggaaggataaagagatcttccgaggcaaatcgcttgttggtatgaagaaaacacttgttttctacagaggaagagctcctaaaggccagaaaacaaattgggtgatgcatgagtataggctagatggaaaactctctgctcacaacttgcctaaaaccgctaagaatgaatgggtgatctgcagggtatttcataaaactgctggaggtaagaagatcccgatttcgacgttaatccgaatcggttcttacggaaccgggtctagtttaccacctttaactgattcttcaccatacaacgacaaaaccaagaccgaaccagtttacgtgccctgcttctccaaccaagctgaaactagaggaacaatactcaattgcttcagcaacccttcccttagctccatccaaccagattttctccagatgattccactctaccaacctcaatctctcaacatttccgagagttccaatccggttcttacgcaagaacaatcagttttacaagcgatgatggaaaacaacagaaggcagaacttcaaaacattgagcatctcgcaagaaaccggggtttcgaacaccgataactcatcggtttttgaatttgggaggaagcgatttgatcatcaagaagttccatctccctcttccggtccggttgatcttgaacctttctggaattactgaagattcagaacctgaaaagtctattaatttaggtcacaagtaagaaaatctttgcaaagttttatccttttagcgtggtgtgctaagcttgtatagattattgacactacttcctgtattagtgttttatattattatattcaactaaagttaatattagagaggataaaatgaagc

SEQ ID NO: 73511 - protein, 337 aa, Arabidopsis thaliana; identical to SEQ ID NO: 24166
  peptide (1)..(337): Ceres Seq. ID no. 4971185

SEQ ID NO: 73512 - protein, 315 aa, Arabidopsis thaliana; identical to SEQ ID NO: 23928
  peptide (1)..(315): Ceres Seq. ID no. 4971186

SEQ ID NO: 73513 - protein, 214 aa, Arabidopsis thaliana; identical to SEQ ID NO: 23929
  peptide (1)..(214): Ceres Seq. ID no. 4971187

SEQ ID NO: 73514 - DNA, 1132 bp, Arabidopsis thaliana
  misc_feature (1)..(1132): Ceres Seq. ID no. 4971311
  misc_feature (1)..(1132): Ortholog of  Ceres SEQ ID NO 15175857 as cited in SEQ ID NO 59046
acaacaataaacactcatcgattaaatcttcttcaccggaaaaaatgccttcgatgccagaggaaccaatcctaacaccaacaccagatcgattctgtatgttcccaatccaatacccacagatttgggagatgtacaagaaagccgaagcatccttctggacagccgaagaagtcgatctctctcaagacaatcgcgactgggaaaactcactaaccaacgacgaacgtcacttcattaaacacgtcctcgccttcttcgccgcatcagacggaatcgttctcgagaatctctcaactagattcatgtccgatgttcagatctcagaagctcgtgccttctacggattccaaatcgcgattgagaatattcactccgagatgtatagtctccttctcgacacgtatatcaaagacaacaaagagagagatcatctttttcgtgcaatcgaaaccattccttgtgacgaaaaaagcagaatgggctatgaaatggatcaacggatctcaaagcttcgctgagagaatcgtagcgtttgcttgcgttgaaggtatattcttctccggtagcttttgttcgatattctggttgaagaaacgaggtttaatgcctggactcactttttcaaacgaattgatttcgagagacgaaggtcttcactgtgatttcgcttgtttgatatatagtcttcttagaactaagtttgatgaagatcgtttgaaagcgattgtttgtgatgctgttgagattgagagagagtttgtttgtgacgcgctttcttgtgccttggttgggatgaatcgtgagttgatgagtcagtacattgagttcgttgctgataggttgttggctgcgcttgggtgtggtaaggtgtatggtgtgactaatccttttgattggatggaattgatttcgcttcagggtaagaccaacttttttgagaagagagttggtgagtatcagaaagcttctgttatgtctagtgttcatggaaacgctgcgtttaatgatgatcatgtcttcaagcttgacgaggatttttagattttgcttacttgctttatttttagttttgtaattttcagtataatgaaaaacagatgaagtttaatttgataatggacatttaatt

SEQ ID NO: 73515 - protein, 243 aa, Arabidopsis thaliana; identical to SEQ ID NO: 41883
  peptide (1)..(243): Ceres Seq. ID no. 4971312

SEQ ID NO: 73516 - protein, 185 aa, Arabidopsis thaliana; identical to SEQ ID NO: 41884
  peptide (1)..(185): Ceres Seq. ID no. 4971313

SEQ ID NO: 73517 - protein, 172 aa, Arabidopsis thaliana; identical to SEQ ID NO: 41885
  peptide (1)..(172): Ceres Seq. ID no. 4971314

SEQ ID NO: 73518 - DNA, 684 bp, Arabidopsis thaliana
  misc_feature (1)..(684): Ceres Seq. ID no. 4971396
  misc_feature (1)..(684): Ortholog of  Ceres SEQ ID NO 13594962 as cited in SEQ ID NO 56140
  misc_feature (1)..(684): Ortholog of  Ceres SEQ ID NO 13598378 as cited in SEQ ID NO 62631
ctccgtcatagaacgcagaactgggtggatcaccgtggtcgtcaaattcctagctcctcgactccaaaaaaaaatcataaacgtattaccgtctcttgttttcctcgtattatatcggtcgaagtctccaatcatcggtctgagtaatctctgacaatggctgcaagagttttggcaagtgtgattgtgatgggctctggaatcatagccagggcttgtactcaggcatatcgtcaggcgcttgcaaatgcatcaaaaaccggggttgcgcatgaagcgacacagactattaagagagggttgactataggtgaagcagaagctagacagattcttggtgtaactgagaaatcatcttgggacgagattcttaagaaatacgacacgttgttcgaacgcaatgcgcagaatggaagcttctatctccaatctaaggtccatagagctaaggaatgcttagagactgcataccagaagagtacaacaacaagcgcatgaacaagcaataaaacaataggagcaaatcaggaacatatcttttgatacaagttatagttttaggacagaagtttgaaattgagtggagatagccgcaaaagttgaaattgagacaaggtcggtgatggccggaatgctgccagtaaccgactcaccggcgttgttaaaagtcttgttattttgttt

SEQ ID NO: 73519 - protein, 113 aa, Arabidopsis thaliana; identical to SEQ ID NO: 42406
  peptide (1)..(113): Ceres Seq. ID no. 4971397

SEQ ID NO: 73520 - protein, 102 aa, Arabidopsis thaliana; identical to SEQ ID NO: 42407
  peptide (1)..(102): Ceres Seq. ID no. 4971398

SEQ ID NO: 73521 - DNA, 1137 bp, Arabidopsis thaliana
  misc_feature (1)..(1137): Ceres Seq. ID no. 4971419
  misc_feature (1)..(1137): Ortholog of  Ceres SEQ ID NO 12619999 as cited in SEQ ID NO 66123
  misc_feature (1)..(1137): Ortholog of  Ceres SEQ ID NO 13656436 as cited in SEQ ID NO 69154
aaaagctaaatcgggaactggcgcattttagtcgtccgccataaccttcgctctctgattcttccgattacatcggttttcttctctctccggtacatgatcttcttctttcccgcagccgattcattcgatttctccctcttttgtttgatctaattcgatttcgatgaaactcagattttgatctttgagtttttgtttcctttagattcaatggctgctccacctgctagagccagagctgattacgattatctcattaagcttcttttgattggagatagcggtgttggtaaaagttgtcttcttctacgtttctctgatggatctttcaccactagcttcattaccaccattggcattgactttaagataagaacgattgagcttgacggtaaacgtatcaagcttcagatttgggataccgctggtcaagagcggtttcggactatcaccactgcttattaccgtggggcaatgggcattttgctggtgtatgatgtcacagacgagtcatccttcaacaacattaggaactggattcgtaatatcgaacagcatgcttcggataatgttaacaagatcttggtagggaacaaggctgacatggatgaaagcaagagggcagtacctacagcaaagggtcaggctcttgctgatgagtacggaattaagttcttcgaaacaagtgccaagacaaacctaaacgtggaagaagttttcttctcaatagggagggacattaagcagaggctttcagacaccgactcgagggcagagcctgcaacgatcaagataagccaaacggaccaagcagctggagcagggcaggccacacagaaatctgcatgctgtggaacttaaaaaagttttaaaagtgaagtttaagtcgaaaaaagtttgggggtgaagtgaaaaactaagatatcgttgggtgcttatgtaattttttgttttatgccaacaattctgattcgttcttctaaattgtccttcctatttgtacgaaggtttaatcgaaacttgtatttttcttttctattactgattttttatgacggtgactgaattgtttatgttggtcatcacttctctctatatatcctctgttcttaatttttctcttgcttcctcttt

SEQ ID NO: 73522 - protein, 216 aa, Arabidopsis thaliana
  peptide (1)..(216): Ceres Seq. ID no. 4971420
MAAPPARARADYDYLIKLLLIGDSGVGKSCLLLRFSDGSFTTSFITTIGIDFKIRTIELDGKRIKLQIWDTAGQERFRTITTAYYRGAMGILLVYDVTDESSFNNIRNWIRNIEQHASDNVNKILVGNKADMDESKRAVPTAKGQALADEYGIKFFETSAKTNLNVEEVFFSIGRDIKQRLSDTDSRAEPATIKISQTDQAAGAGQATQKSACCGT

SEQ ID NO: 73523 - protein, 128 aa, Arabidopsis thaliana
  peptide (1)..(128): Ceres Seq. ID no. 4971421
MGILLVYDVTDESSFNNIRNWIRNIEQHASDNVNKILVGNKADMDESKRAVPTAKGQALADEYGIKFFETSAKTNLNVEEVFFSIGRDIKQRLSDTDSRAEPATIKISQTDQAAGAGQATQKSACCGT

SEQ ID NO: 73524 - DNA, 541 bp, Arabidopsis thaliana
  misc_feature (1)..(541): Ceres Seq. ID no. 4971425
  misc_feature (1)..(541): Ortholog of  Ceres SEQ ID NO 14302474 as cited in SEQ ID NO 60589
ctcaaatcatctcaatctcaattaaatcttcaaatcgaaaaatttccgaagaaaaattcaagttcctttagaaaatgtcaggtcgtggaaagggaggcaaaggtttgggcaaaggtggagccaaacgtcataggaaggttctgagagacaacatccaaggaatcactaaaccggcgattcggagattggctcgtagaggtggtgttaaacgtattagtggtctgatctacgaagagacacgtggcgttctcaagatctttttggagaatgttatccgtgacgccgttacttacactgagcacgctcggaggaagacggtgactgctatggatgttgtttatgctcttaagagacaaggaagaactctctacggattcggcggctagggtttttgattgttgttttttgtgtttctacgtttattaggatgttaattttcaggatttggtgttaacttcgaaaaaattaaagaattgaaggttgttgttgcaatttcgtgattgttgaaggtgttgttgcaaacttttagtaatttcagttt

SEQ ID NO: 73525 - protein, 103 aa, Arabidopsis thaliana; identical to SEQ ID NO: 7737
  peptide (1)..(103): Ceres Seq. ID no. 4971426

SEQ ID NO: 73526 - DNA, 3684 bp, Arabidopsis thaliana
  misc_feature (1)..(3684): Ceres Seq. ID no. 4971431
  misc_feature (1)..(3684): Ortholog of  Ceres SEQ ID NO 15179695 as cited in SEQ ID NO 193
  misc_feature (1)..(3684): Ortholog of  Ceres SEQ ID NO 15176963 as cited in SEQ ID NO 52894
atgcaaccgtcaaatgatccagcaatcgtggacatggcagcggcggagaaggagaagaagcggccaagtgtatcatttcttaagctcttctcatttgctgatttttacgattgcgttctgatggctcttggatccattggtgcttgcattcacggagcctccgttccagttttcttcatcttctttggcaaactcatcaacatcatcggtcttgcttacctcttcccacaagaagcttctcacaaagtcgccaagtactcgttggattttgtatatctgagtgtggtgatactcttttcatcatggttagaggttgcatgttggatgcatacgggagagagacaagcagcgaagattagaaaagcttatttgcggtcaatgttaagccaagacataagcttattcgacaccgagatttccaccggagaagtcatctccgccatcacctccgagatccttgttgtccaagacgctatctccgagaaggtagggaatttcatgcacttcataagccggttcatagccggttttgcgatcgggttcgcgagcgtatggcaaataagtctcgtcactctctccatagtcccattcattgctctcgccggcggaatttacgcttttgtcagcagcggacttatcgtccgtgtccggaaatcatacgtcaaggccaacgagatcgcagaagaggtgatcgggaatgtgaggaccgtacaagcgtttacgggagaagaaaaggcggtgagttcgtaccaaggagctttgaggaacacttacaattacgggagaaaagccggtttagccaaaggactagggcttggttcgttgcattttgtcctgtttttgtcttgggctttgctcatttggttcacaagcatcgttgttcacaagggaatcgctaatggtggcgaatctttcacgaccatgctcaatgttgtcatcgctggcttgtctcttggtcaggcggctcctgacatttccacattcatgcgagccagtgctgctgcgtatccgatttttcagatgattgaacggaacacggaggataaaacaggtcgtaaactcgggaatgtaaacggagacattctattcaaagacgtgactttcacatacccctctcgccctgatgtggtgatctttgacaagctaaacttcgtgatccctgcggggaaagtcgtggctcttgttggaggaagcgggtctgggaaaagcaccatgatatccttaattgaacgattctacgagcctaccgatggagcggtgatgctggatgggaacgatatcagatacttggatcttaagtggttaagaggtcatattggtttggttaatcaagagcctgtcctgtttgcaaccacgattcgcgagaacattatgtatggtaaagacgatgccacctctgaggaaattaccaatgctgcaaagctctcggaagccatctcattcatcaacaacctaccggaaggattcgaaactcaggtaggtgagagaggaattcagctatctggcgggcagaagcagaggatcagtatttctagggcgatagtgaagaatccatcgatcctcttactcgatgaggcaacaagcgcactagatgcagagtcagagaaaatcgtgcaggaagctttggacagggtgatggttgggagaacaacggtcgtggtggctcatagactctccactgtaagaaacgctgacatcatagccgttgttggaggagggaagatcattgagtccggaagccacgacgaactcatatctaaccctgatggagcttattcttctcttcttcgtatccaagaagctgccagccctaacttgaaccacactccaagcttaccagtcagtacaaaacccttgccggaactaccaatcacggagacgacctcgtccattcatcaatcagtaaaccaaccagatacgaccaaacaggccaaagtaacggtgggacgtctttactctatgatccgtccggattggaaatacggattatgtgggacgttaggttcctttattgcgggatctcaaatgccgcttttcgcgcttggtatcgcacaggctttagtatcttattacatggactgggagacaactcaaaacgaggtcaaaagaatctctatcctcttctgttgtggctccgtcatcactgtcatcgtacataccattgagcataccacctttggtattatgggtgagcgtctcactctccgagtccgacaaaagatgttttcagcgatcttgaggaatgaaatcgggtggtttgataaggttgataacactagttcgatgttggcatcgcggcttgaaagtgatgcgactttgcttagaaccatcgtggtcgatagatcgacaattctacttgagaatttaggtcttgttgtgactgctttcatcatttcttttatactcaactggcgtctcactcttgttgtcttggccacataccccttgattataagcggtcatatcagcgagaaaattttcatgcaaggctatggaggaaacttgagtaaagcgtatttaaaggctaacatgttggctggagagtctattagcaacatccgaaccgtggtcgccttttgtgcagaggagaaggttttagacctttattccaaagagcttctagaaccttcagaacgttctttcaggcgtggacagatggccgggattttgtacggtgtttctcaattcttcatcttctcctcctacggccttgccctctggtacggatcgattttgatggagaaaggattatcaagtttcgaatctgtgatgaaaacattcatggttttgatagtaacggcgttagtgatgggtgaagtgttggctctagccccagatcttcttaaaggaaaccagatggttgtttcggttttcgagctattggatcgaagaacacaggttgttggtgatactggtgaggagctgagtaatgtggaaggcactatagagctcaaaggtgttcatttcagttatccttcacggcctgatgtgactattttcagcgatttcaatctactagttccttctggcaaaagcatggcgcttgtgggacaaagcggatctggaaaaagttcggttctttcgcttgttctccggttctacgatcctacagccggaataatcatgatagacgggcaagacatcaagaaactgaagttgaaatcactgcgaagacacattggtctggttcaacaagaaccggctctgtttgcaacgactatctatgagaacatcttgtatggtaaagaaggagcttctgaatctgaagtcatggaagcagctaagcttgcaaatgctcacagtttcatcagctctctccctgaaggttactcaaccaaagtcggtgaacgtggcattcagatgtcaggcggccagagacagagaattgctatagctagagccgtcctcaagaacccagagattctgcttcttgatgaagccacaagcgccttagatgttgaatcagagcgtgtggtacaacaagcattggatcggctaatgagagaccgaaccacggtggtggtggctcaccggctatcgacgatcaagaactcagatatgataagtgtaatacaagacggtaagatcatagagcaaggcagccacaatatcctcgttgagaacaagaatggtccctactctaaacttatcagtcttcagcagcggcagcgccatcatccttaa

SEQ ID NO: 73527 - protein, 1227 aa, Arabidopsis thaliana
  peptide (1)..(1227): Ceres Seq. ID no. 4971432
MQPSNDPAIVDMAAAEKEKKRPSVSFLKLFSFADFYDCVLMALGSIGACIHGASVPVFFIFFGKLINIIGLAYLFPQEASHKVAKYSLDFVYLSVVILFSSWLEVACWMHTGERQAAKIRKAYLRSMLSQDISLFDTEISTGEVISAITSEILVVQDAISEKVGNFMHFISRFIAGFAIGFASVWQISLVTLSIVPFIALAGGIYAFVSSGLIVRVRKSYVKANEIAEEVIGNVRTVQAFTGEEKAVSSYQGALRNTYNYGRKAGLAKGLGLGSLHFVLFLSWALLIWFTSIVVHKGIANGGESFTTMLNVVIAGLSLGQAAPDISTFMRASAAAYPIFQMIERNTEDKTGRKLGNVNGDILFKDVTFTYPSRPDVVIFDKLNFVIPAGKVVALVGGSGSGKSTMISLIERFYEPTDGAVMLDGNDIRYLDLKWLRGHIGLVNQEPVLFATTIRENIMYGKDDATSEEITNAAKLSEAISFINNLPEGFETQVGERGIQLSGGQKQRISISRAIVKNPSILLLDEATSALDAESEKIVQEALDRVMVGRTTVVVAHRLSTVRNADIIAVVGGGKIIESGSHDELISNPDGAYSSLLRIQEAASPNLNHTPSLPVSTKPLPELPITETTSSIHQSVNQPDTTKQAKVTVGRLYSMIRPDWKYGLCGTLGSFIAGSQMPLFALGIAQALVSYYMDWETTQNEVKRISILFCCGSVITVIVHTIEHTTFGIMGERLTLRVRQKMFSAILRNEIGWFDKVDNTSSMLASRLESDATLLRTIVVDRSTILLENLGLVVTAFIISFILNWRLTLVVLATYPLIISGHISEKIFMQGYGGNLSKAYLKANMLAGESISNIRTVVAFCAEEKVLDLYSKELLEPSERSFRRGQMAGILYGVSQFFIFSSYGLALWYGSILMEKGLSSFESVMKTFMVLIVTALVMGEVLALAPDLLKGNQMVVSVFELLDRRTQVVGDTGEELSNVEGTIELKGVHFSYPSRPDVTIFSDFNLLVPSGKSMALVGQSGSGKSSVLSLVLRFYDPTAGIIMIDGQDIKKLKLKSLRRHIGLVQQEPALFATTIYENILYGKEGASESEVMEAAKLANAHSFISSLPEGYSTKVGERGIQMSGGQRQRIAIARAVLKNPEILLLDEATSALDVESERVVQQALDRLMRDRTTVVVAHRLSTIKNSDMISVIQDGKIIEQGSHNILVENKNGPYSKLISLQQRQRHHP

SEQ ID NO: 73528 - protein, 1216 aa, Arabidopsis thaliana
  peptide (1)..(1216): Ceres Seq. ID no. 4971433
MAAAEKEKKRPSVSFLKLFSFADFYDCVLMALGSIGACIHGASVPVFFIFFGKLINIIGLAYLFPQEASHKVAKYSLDFVYLSVVILFSSWLEVACWMHTGERQAAKIRKAYLRSMLSQDISLFDTEISTGEVISAITSEILVVQDAISEKVGNFMHFISRFIAGFAIGFASVWQISLVTLSIVPFIALAGGIYAFVSSGLIVRVRKSYVKANEIAEEVIGNVRTVQAFTGEEKAVSSYQGALRNTYNYGRKAGLAKGLGLGSLHFVLFLSWALLIWFTSIVVHKGIANGGESFTTMLNVVIAGLSLGQAAPDISTFMRASAAAYPIFQMIERNTEDKTGRKLGNVNGDILFKDVTFTYPSRPDVVIFDKLNFVIPAGKVVALVGGSGSGKSTMISLIERFYEPTDGAVMLDGNDIRYLDLKWLRGHIGLVNQEPVLFATTIRENIMYGKDDATSEEITNAAKLSEAISFINNLPEGFETQVGERGIQLSGGQKQRISISRAIVKNPSILLLDEATSALDAESEKIVQEALDRVMVGRTTVVVAHRLSTVRNADIIAVVGGGKIIESGSHDELISNPDGAYSSLLRIQEAASPNLNHTPSLPVSTKPLPELPITETTSSIHQSVNQPDTTKQAKVTVGRLYSMIRPDWKYGLCGTLGSFIAGSQMPLFALGIAQALVSYYMDWETTQNEVKRISILFCCGSVITVIVHTIEHTTFGIMGERLTLRVRQKMFSAILRNEIGWFDKVDNTSSMLASRLESDATLLRTIVVDRSTILLENLGLVVTAFIISFILNWRLTLVVLATYPLIISGHISEKIFMQGYGGNLSKAYLKANMLAGESISNIRTVVAFCAEEKVLDLYSKELLEPSERSFRRGQMAGILYGVSQFFIFSSYGLALWYGSILMEKGLSSFESVMKTFMVLIVTALVMGEVLALAPDLLKGNQMVVSVFELLDRRTQVVGDTGEELSNVEGTIELKGVHFSYPSRPDVTIFSDFNLLVPSGKSMALVGQSGSGKSSVLSLVLRFYDPTAGIIMIDGQDIKKLKLKSLRRHIGLVQQEPALFATTIYENILYGKEGASESEVMEAAKLANAHSFISSLPEGYSTKVGERGIQMSGGQRQRIAIARAVLKNPEILLLDEATSALDVESERVVQQALDRLMRDRTTVVVAHRLSTIKNSDMISVIQDGKIIEQGSHNILVENKNGPYSKLISLQQRQRHHP

SEQ ID NO: 73529 - protein, 1187 aa, Arabidopsis thaliana
  peptide (1)..(1187): Ceres Seq. ID no. 4971434
MALGSIGACIHGASVPVFFIFFGKLINIIGLAYLFPQEASHKVAKYSLDFVYLSVVILFSSWLEVACWMHTGERQAAKIRKAYLRSMLSQDISLFDTEISTGEVISAITSEILVVQDAISEKVGNFMHFISRFIAGFAIGFASVWQISLVTLSIVPFIALAGGIYAFVSSGLIVRVRKSYVKANEIAEEVIGNVRTVQAFTGEEKAVSSYQGALRNTYNYGRKAGLAKGLGLGSLHFVLFLSWALLIWFTSIVVHKGIANGGESFTTMLNVVIAGLSLGQAAPDISTFMRASAAAYPIFQMIERNTEDKTGRKLGNVNGDILFKDVTFTYPSRPDVVIFDKLNFVIPAGKVVALVGGSGSGKSTMISLIERFYEPTDGAVMLDGNDIRYLDLKWLRGHIGLVNQEPVLFATTIRENIMYGKDDATSEEITNAAKLSEAISFINNLPEGFETQVGERGIQLSGGQKQRISISRAIVKNPSILLLDEATSALDAESEKIVQEALDRVMVGRTTVVVAHRLSTVRNADIIAVVGGGKIIESGSHDELISNPDGAYSSLLRIQEAASPNLNHTPSLPVSTKPLPELPITETTSSIHQSVNQPDTTKQAKVTVGRLYSMIRPDWKYGLCGTLGSFIAGSQMPLFALGIAQALVSYYMDWETTQNEVKRISILFCCGSVITVIVHTIEHTTFGIMGERLTLRVRQKMFSAILRNEIGWFDKVDNTSSMLASRLESDATLLRTIVVDRSTILLENLGLVVTAFIISFILNWRLTLVVLATYPLIISGHISEKIFMQGYGGNLSKAYLKANMLAGESISNIRTVVAFCAEEKVLDLYSKELLEPSERSFRRGQMAGILYGVSQFFIFSSYGLALWYGSILMEKGLSSFESVMKTFMVLIVTALVMGEVLALAPDLLKGNQMVVSVFELLDRRTQVVGDTGEELSNVEGTIELKGVHFSYPSRPDVTIFSDFNLLVPSGKSMALVGQSGSGKSSVLSLVLRFYDPTAGIIMIDGQDIKKLKLKSLRRHIGLVQQEPALFATTIYENILYGKEGASESEVMEAAKLANAHSFISSLPEGYSTKVGERGIQMSGGQRQRIAIARAVLKNPEILLLDEATSALDVESERVVQQALDRLMRDRTTVVVAHRLSTIKNSDMISVIQDGKIIEQGSHNILVENKNGPYSKLISLQQRQRHHP

SEQ ID NO: 73530 - DNA, 621 bp, Arabidopsis thaliana
  misc_feature (1)..(621): Ceres Seq. ID no. 4971597
  misc_feature (1)..(621): Ortholog of  Ceres SEQ ID NO 13661928 as cited in SEQ ID NO 61155
atgatgatagtggatccaaagtactgctctctgcaccctgtagatttggcgatcgtacggaaggtgttgaagataacggacggtaacttcgtgataacgaatgcggaaggaaacttgttgttcaaggtgaaggatcctttttttagtcttcacgagaagaggatcttgatggatggttttggaactaaggtcttgactttgaaagggaagataatgaccatgcatgacaggtggctagtgtttagaggagggagtacggaggaggttgatctgctatacacggtgaaaagatcaaacatggttcagataaccaccaaacttgatgtgtttttggctgataacatagagcagaagaaatgtgattacagactcgaaggggtttggctcgagacttcttgttttgtctacgctggcgattctgacatcattcttgcccaaatgcgcgagaagaaaacgatgcagagcgttctctttggaaaggacaatttctgcctcactgttaatccaaatgttgattatgccttcattgcctctctcattgtcatcctttttcatcaaaaagatgatatatacccaatcgaaagtttatggaagagggacataacagatttcatctgttag

SEQ ID NO: 73531 - protein, 206 aa, Arabidopsis thaliana
  peptide (1)..(206): Ceres Seq. ID no. 4971598
MMIVDPKYCSLHPVDLAIVRKVLKITDGNFVITNAEGNLLFKVKDPFFSLHEKRILMDGFGTKVLTLKGKIMTMHDRWLVFRGGSTEEVDLLYTVKRSNMVQITTKLDVFLADNIEQKKCDYRLEGVWLETSCFVYAGDSDIILAQMREKKTMQSVLFGKDNFCLTVNPNVDYAFIASLIVILFHQKDDIYPIESLWKRDITDFIC

SEQ ID NO: 73532 - protein, 205 aa, Arabidopsis thaliana
  peptide (1)..(205): Ceres Seq. ID no. 4971599
MIVDPKYCSLHPVDLAIVRKVLKITDGNFVITNAEGNLLFKVKDPFFSLHEKRILMDGFGTKVLTLKGKIMTMHDRWLVFRGGSTEEVDLLYTVKRSNMVQITTKLDVFLADNIEQKKCDYRLEGVWLETSCFVYAGDSDIILAQMREKKTMQSVLFGKDNFCLTVNPNVDYAFIASLIVILFHQKDDIYPIESLWKRDITDFIC

SEQ ID NO: 73533 - protein, 150 aa, Arabidopsis thaliana
  peptide (1)..(150): Ceres Seq. ID no. 4971600
MDGFGTKVLTLKGKIMTMHDRWLVFRGGSTEEVDLLYTVKRSNMVQITTKLDVFLADNIEQKKCDYRLEGVWLETSCFVYAGDSDIILAQMREKKTMQSVLFGKDNFCLTVNPNVDYAFIASLIVILFHQKDDIYPIESLWKRDITDFIC

SEQ ID NO: 73534 - DNA, 771 bp, Arabidopsis thaliana
  misc_feature (1)..(771): Ceres Seq. ID no. 4971811
  misc_feature (1)..(771): Ortholog of  Ceres SEQ ID NO 12610031 as cited in SEQ ID NO 55811
  misc_feature (1)..(771): Ortholog of  Ceres SEQ ID NO 12610896 as cited in SEQ ID NO 55861
  misc_feature (1)..(771): Ortholog of  Ceres SEQ ID NO 12619664 as cited in SEQ ID NO 66048
  misc_feature (1)..(771): Ortholog of  Ceres SEQ ID NO 12635952 as cited in SEQ ID NO 0
atgggcataaacgcgagccatgtaccggaaacttgctaccatcattgtaaccagacgttcgagagtagtcgccaatgctttaaatggtgtcaagaattagctcgtaaagatgagtacaagatttatgggtacccttactcaaccaacacaaggcgtgtcctcgccgttcttcatgagaaaggtctctcttacgatcccatcaccgtcaacttgatagccggtgaccagaagaagccgagttttctcgctatcaatccatttggtcaagtcccagttttcctagacgggggtcttaagttgactgaatctcgagctatatctgaatacatagcgactgtccataaatcaagaggcacacaacttctgaattacaaaagctacaaaacaatgggaacacaaagaatgtggatggctatcgaatcttttgagtttgatccactcacatcaacactgacctgggaacaatccatcaagcctatgtacggtctaaagacggactataaggttgtgaatgaaaccgaggcgaagctagagaaggttctagatatatacgaagaacgactcaaaaattctagcttcttggctagtaacagcttcacaatggctgatctttatcaccttcctaatatacaataccttatggacacacatacaaagagaatgtttgtaaaccggccaagcgtgcgccggtgggtggctgagatcacagctagaccggcttggaagagggcatgtgatgtgaaggcttggtaccataagaagaagaattaa

SEQ ID NO: 73535 - protein, 256 aa, Arabidopsis thaliana
  peptide (1)..(256): Ceres Seq. ID no. 4971812
MGINASHVPETCYHHCNQTFESSRQCFKWCQELARKDEYKIYGYPYSTNTRRVLAVLHEKGLSYDPITVNLIAGDQKKPSFLAINPFGQVPVFLDGGLKLTESRAISEYIATVHKSRGTQLLNYKSYKTMGTQRMWMAIESFEFDPLTSTLTWEQSIKPMYGLKTDYKVVNETEAKLEKVLDIYEERLKNSSFLASNSFTMADLYHLPNIQYLMDTHTKRMFVNRPSVRRWVAEITARPAWKRACDVKAWYHKKKN

SEQ ID NO: 73536 - DNA, 3723 bp, Arabidopsis thaliana
  misc_feature (1)..(3723): Ceres Seq. ID no. 4971813
  misc_feature (1)..(3723): Ortholog of  Ceres SEQ ID NO 13595870 as cited in SEQ ID NO 62101
  misc_feature (1)..(3723): Ortholog of  Ceres SEQ ID NO 13590241 as cited in SEQ ID NO 63878
  misc_feature (1)..(3723): Ortholog of  Ceres SEQ ID NO 13660597 as cited in SEQ ID NO 67655
  misc_feature (1)..(3723): Ortholog of  Ceres SEQ ID NO 15179308 as cited in SEQ ID NO 0
atggttgatacgagacgtagctcttctgcttccaagcgtttttgtgctgcaacaagttcatcctcacgtcctaccaaacgatccaaggcggcggcggaaccggcatcgtcttcgtcggcgagtgaggtgccgattgataatcaagcaccggtttcggatcctggatcaatatctggagacccggaacttagaacttctgatccgcagagtaacgatgcggagaggccagttactaccaccgatgtgccggcgatggagaccgacacaaatccagaacttgaaggcttggtgacgcctacacctgcaggtgaagtggtggtggaagctgagaaatcgaaatcctcaaagaagcggattgctaaggctccttgggccaagcttctttctcagtttcctcagaaccctcatcttgtcatgagaggctctgtgtttactgttggacggcgagcctgcgatttatgtatcagagatcattctatgcccaatgttctatgtgaactaaggcagtctgagcacggaggtccatcagttgcatcgctggagataatagggaatggagtacttgttcaggtcaatggcaagatttaccaaaggagtacttgtgttcatctacggggtggcgatgaaattatcttcaccacccctgggaaacatgcttatgtatccttttacaagttctttgaaaatgttcagatatttcagcctcttaaagatgaaaatctagctgctccagacagaacttcttccttgagcctttttgaagcgcagagtgcccctctgaaagggcttcacgttgagacaagagcaagagactcttcatctgttgatggaactgcctctttattggcgtctatatcaaagttacaaaatgtcccttttctaccacctactgctaaaagtgtcaaaaggcagcaaaattcagaggtccctgtgttaccttctagctgcgatgattttattctggatgttgacttgaacgatgctgatagtaataatgatcatgctgctattgcttcaatggagaaaactgttgcttcgacttcttgtgctgccaacgatgaccatgatgcagatgggaatggaatggatccttttcaagaacctgaggctggaaatattcctgatcctgcttatgaaattagaccaattttgagtttacttggggatccttctgaatttgatttaaggggtagcatttccaaaatactggtggatgaacgaagggaagtgagggaaatgccgaaagaatatgaacgtccatcagcttcggtattaactagacgtcaagcgcataaggatagtctgcgaggaggaatactcaatcctcaggacatagaagtttcttttgagaacttcccatatttcttaagtggcacaactaaggatgttttgatgatatccacatatgcccatataaagtatggaaaggaatatgcagagtatgcatcagatttgccaacagcgtgtccccgctctgagatatatcaggaaatgttagcaaaagcgcttgcgaaacaatgtggggccaaattgatgattgttgactctctcttgttacctgggggttcaacacccaaggaagcagatactaccaaagaaagttctaggcgtgaaagactgtccgtgcttgctaaacgagctgtacaagctgcacaagctgctgttttgcagcataagaaaccaatttcaagtgtagaggctggtataacaggtggatcaacattgagctctcaggctgttcggaggcaagaagtatcaactgcaacctctaaaagttacaccttcaaagcaggtgatcgagtaaggtttttaggcccttcaacttcttctcttgcttctctccgagctccacctaggggaccggcaacaggttttcaaggaaaagtactccttgcgtttgaaggcaatggatcttcaaaaatcggggttagatttgatagatcgataccagatggcaatgatcttggtggtctatgcgaagaagaccatgcgagttctcttcggttagaaagttcttccagtgacgatgctgataaacttgccattaatgaaatctttgaggtagcttttaatgaaagtgaaagagggtcattgatattgttcctcaaagacattgagaaatctgtgtcggggaacactgatgtgtatataactttgaagagcaagcttgagaatttaccggagaatattgttgtcatagcttcgcaaacccagttggacaaccgaaaggaaaaatcccaccctggaggtttcttgttcacaaagtttggcagcaaccagacagcactgctggaccttgcatttccggatacttttggtggtagactgcaggataggaacacagaaatgcctaaagcagtgaaacaaatcactaggctatttccaaacaaagtgaccatccaattacctgaggatgaagcttcgctggtcgactggaaggataaacttgaacgtgatactgagatcctgaaggctcaagctaatattacaagcatccgtgcggtccttagcaaaaatcagctagtctgccctgacattgaaatcttgtgcatcaaagatcaaacccttccttctgatagtgtggagaaagtggttggctttgctttcaatcaccatcttatgaactgctcagaacctacagtcaaggacaacaagcttatcatctcggcagaaagcatcacatatggcctgcagctgttgcatgagattcaaaacgaaaacaagagcacaaagaaatctctgaaagatgttgttacagagaatgaattcgagaaaaaactactatcagacgtcattcctccaagtgatatcggtgtttctttcagtgatattggggctttggaaaatgtgaaagataccttgaaggagttggtgatgcttcctcttcaaagacccgaattgtttggcaaaggtcaacttacaaagcctacaaagggtatactattgtttggaccgcctggtacggggaagacaatgctggcaaaagctgtagcaaccgaggctggggcaaactttatcaatatttcaatgtccagcattacttcaaagggagagaagtacgttaaagctgttttctctttagcaagtaagatagctccaagcgtcatttttgttgatgaggttgatagcatgctgggaagacgtgagaatccaggagaacatgaagctatgcgtaagatgaagaacgaattcatgataaactgggacggcttacgcacaaaggataaagaaagggttttagtattggctgctaccaacagaccatttgaccttgacgaagcagtaattagacggcttccccgaaggttgatggttaatctgccggattcagcaaacagatcgaagatcttgagcgtgattttggcgaaagaagagatggcagaagacgtagacttagaagcaatagcaaatatgacagatgggtactcagggagtgacttaaagaatctttgcgtgaccgcggcacatcttcctatccgagagattcttgaaaaagaaaagaaggagagaagtgtggctcaagccgaaaaccgagcaatgccacagctatatagcagtacagacgttagacccttgaacatgaatgatttcaaaaccgcacatgatcaggtatgtgcgagtgtggcgtctgattcatcgaacatgaatgagctccagcaatggaacgagctctatggagaaggaggctcgaggaagaagacatcactgagttacttcatgtaa

SEQ ID NO: 73537 - protein, 1240 aa, Arabidopsis thaliana
  peptide (1)..(1240): Ceres Seq. ID no. 4971814
MVDTRRSSSASKRFCAATSSSSRPTKRSKAAAEPASSSSASEVPIDNQAPVSDPGSISGDPELRTSDPQSNDAERPVTTTDVPAMETDTNPELEGLVTPTPAGEVVVEAEKSKSSKKRIAKAPWAKLLSQFPQNPHLVMRGSVFTVGRRACDLCIRDHSMPNVLCELRQSEHGGPSVASLEIIGNGVLVQVNGKIYQRSTCVHLRGGDEIIFTTPGKHAYVSFYKFFENVQIFQPLKDENLAAPDRTSSLSLFEAQSAPLKGLHVETRARDSSSVDGTASLLASISKLQNVPFLPPTAKSVKRQQNSEVPVLPSSCDDFILDVDLNDADSNNDHAAIASMEKTVASTSCAANDDHDADGNGMDPFQEPEAGNIPDPAYEIRPILSLLGDPSEFDLRGSISKILVDERREVREMPKEYERPSASVLTRRQAHKDSLRGGILNPQDIEVSFENFPYFLSGTTKDVLMISTYAHIKYGKEYAEYASDLPTACPRSEIYQEMLAKALAKQCGAKLMIVDSLLLPGGSTPKEADTTKESSRRERLSVLAKRAVQAAQAAVLQHKKPISSVEAGITGGSTLSSQAVRRQEVSTATSKSYTFKAGDRVRFLGPSTSSLASLRAPPRGPATGFQGKVLLAFEGNGSSKIGVRFDRSIPDGNDLGGLCEEDHASSLRLESSSSDDADKLAINEIFEVAFNESERGSLILFLKDIEKSVSGNTDVYITLKSKLENLPENIVVIASQTQLDNRKEKSHPGGFLFTKFGSNQTALLDLAFPDTFGGRLQDRNTEMPKAVKQITRLFPNKVTIQLPEDEASLVDWKDKLERDTEILKAQANITSIRAVLSKNQLVCPDIEILCIKDQTLPSDSVEKVVGFAFNHHLMNCSEPTVKDNKLIISAESITYGLQLLHEIQNENKSTKKSLKDVVTENEFEKKLLSDVIPPSDIGVSFSDIGALENVKDTLKELVMLPLQRPELFGKGQLTKPTKGILLFGPPGTGKTMLAKAVATEAGANFINISMSSITSKGEKYVKAVFSLASKIAPSVIFVDEVDSMLGRRENPGEHEAMRKMKNEFMINWDGLRTKDKERVLVLAATNRPFDLDEAVIRRLPRRLMVNLPDSANRSKILSVILAKEEMAEDVDLEAIANMTDGYSGSDLKNLCVTAAHLPIREILEKEKKERSVAQAENRAMPQLYSSTDVRPLNMNDFKTAHDQVCASVASDSSNMNELQQWNELYGEGGSRKKTSLSYFM

SEQ ID NO: 73538 - protein, 1156 aa, Arabidopsis thaliana
  peptide (1)..(1156): Ceres Seq. ID no. 4971815
METDTNPELEGLVTPTPAGEVVVEAEKSKSSKKRIAKAPWAKLLSQFPQNPHLVMRGSVFTVGRRACDLCIRDHSMPNVLCELRQSEHGGPSVASLEIIGNGVLVQVNGKIYQRSTCVHLRGGDEIIFTTPGKHAYVSFYKFFENVQIFQPLKDENLAAPDRTSSLSLFEAQSAPLKGLHVETRARDSSSVDGTASLLASISKLQNVPFLPPTAKSVKRQQNSEVPVLPSSCDDFILDVDLNDADSNNDHAAIASMEKTVASTSCAANDDHDADGNGMDPFQEPEAGNIPDPAYEIRPILSLLGDPSEFDLRGSISKILVDERREVREMPKEYERPSASVLTRRQAHKDSLRGGILNPQDIEVSFENFPYFLSGTTKDVLMISTYAHIKYGKEYAEYASDLPTACPRSEIYQEMLAKALAKQCGAKLMIVDSLLLPGGSTPKEADTTKESSRRERLSVLAKRAVQAAQAAVLQHKKPISSVEAGITGGSTLSSQAVRRQEVSTATSKSYTFKAGDRVRFLGPSTSSLASLRAPPRGPATGFQGKVLLAFEGNGSSKIGVRFDRSIPDGNDLGGLCEEDHASSLRLESSSSDDADKLAINEIFEVAFNESERGSLILFLKDIEKSVSGNTDVYITLKSKLENLPENIVVIASQTQLDNRKEKSHPGGFLFTKFGSNQTALLDLAFPDTFGGRLQDRNTEMPKAVKQITRLFPNKVTIQLPEDEASLVDWKDKLERDTEILKAQANITSIRAVLSKNQLVCPDIEILCIKDQTLPSDSVEKVVGFAFNHHLMNCSEPTVKDNKLIISAESITYGLQLLHEIQNENKSTKKSLKDVVTENEFEKKLLSDVIPPSDIGVSFSDIGALENVKDTLKELVMLPLQRPELFGKGQLTKPTKGILLFGPPGTGKTMLAKAVATEAGANFINISMSSITSKGEKYVKAVFSLASKIAPSVIFVDEVDSMLGRRENPGEHEAMRKMKNEFMINWDGLRTKDKERVLVLAATNRPFDLDEAVIRRLPRRLMVNLPDSANRSKILSVILAKEEMAEDVDLEAIANMTDGYSGSDLKNLCVTAAHLPIREILEKEKKERSVAQAENRAMPQLYSSTDVRPLNMNDFKTAHDQVCASVASDSSNMNELQQWNELYGEGGSRKKTSLSYFM

SEQ ID NO: 73539 - protein, 1102 aa, Arabidopsis thaliana
  peptide (1)..(1102): Ceres Seq. ID no. 4971816
MRGSVFTVGRRACDLCIRDHSMPNVLCELRQSEHGGPSVASLEIIGNGVLVQVNGKIYQRSTCVHLRGGDEIIFTTPGKHAYVSFYKFFENVQIFQPLKDENLAAPDRTSSLSLFEAQSAPLKGLHVETRARDSSSVDGTASLLASISKLQNVPFLPPTAKSVKRQQNSEVPVLPSSCDDFILDVDLNDADSNNDHAAIASMEKTVASTSCAANDDHDADGNGMDPFQEPEAGNIPDPAYEIRPILSLLGDPSEFDLRGSISKILVDERREVREMPKEYERPSASVLTRRQAHKDSLRGGILNPQDIEVSFENFPYFLSGTTKDVLMISTYAHIKYGKEYAEYASDLPTACPRSEIYQEMLAKALAKQCGAKLMIVDSLLLPGGSTPKEADTTKESSRRERLSVLAKRAVQAAQAAVLQHKKPISSVEAGITGGSTLSSQAVRRQEVSTATSKSYTFKAGDRVRFLGPSTSSLASLRAPPRGPATGFQGKVLLAFEGNGSSKIGVRFDRSIPDGNDLGGLCEEDHASSLRLESSSSDDADKLAINEIFEVAFNESERGSLILFLKDIEKSVSGNTDVYITLKSKLENLPENIVVIASQTQLDNRKEKSHPGGFLFTKFGSNQTALLDLAFPDTFGGRLQDRNTEMPKAVKQITRLFPNKVTIQLPEDEASLVDWKDKLERDTEILKAQANITSIRAVLSKNQLVCPDIEILCIKDQTLPSDSVEKVVGFAFNHHLMNCSEPTVKDNKLIISAESITYGLQLLHEIQNENKSTKKSLKDVVTENEFEKKLLSDVIPPSDIGVSFSDIGALENVKDTLKELVMLPLQRPELFGKGQLTKPTKGILLFGPPGTGKTMLAKAVATEAGANFINISMSSITSKGEKYVKAVFSLASKIAPSVIFVDEVDSMLGRRENPGEHEAMRKMKNEFMINWDGLRTKDKERVLVLAATNRPFDLDEAVIRRLPRRLMVNLPDSANRSKILSVILAKEEMAEDVDLEAIANMTDGYSGSDLKNLCVTAAHLPIREILEKEKKERSVAQAENRAMPQLYSSTDVRPLNMNDFKTAHDQVCASVASDSSNMNELQQWNELYGEGGSRKKTSLSYFM

SEQ ID NO: 73540 - DNA, 2706 bp, Arabidopsis thaliana
  misc_feature (1)..(2706): Ceres Seq. ID no. 4971924
  misc_feature (1)..(2706): Ortholog of  Ceres SEQ ID NO 13582534 as cited in SEQ ID NO 57409
atgattattgttggtgttcttttagttagtttcacacttttaagtcacatgaatcagttcttacatctttttgaaagtccaacctttgagatatatccggaactggggcgtgactcacagttaatgactgatccacttggttttcaatacttacacagcatttatacattttcactaaatccttgctctgaaacaaacacaaatatgaaggttgtcttcgttatcttctttttcttcctcttccaattttgtatctctgtggatacaattatgagaagacagtccttgagagatggtgaggttatactctccgcagggaagagattcgcgtttggattcttcagtcttggggattcagagctccggtatgttgggatttggtatgctcaaatctctcaacagactattgtttgggttgcaaacagagaccatcctattaatgacacctctgggatggtaaagttcagcaacagaggcaatctctctgtctatgcatctgacaatgaaacagagcttatctggtcaacaaatgtttcagatagtatgttggaaccaactttagttgctacactctctgatttaggcaaccttgttctgtttgatccagtcacagggagaagtttctgggagagctttgatcaccctacagacacgtttcttccgtttatgagattgggattcacacgaaaagacggtttggatcgctctctaacatcatggaagtctcatggtgaccctggttctggagacttaatactgcggatggaacgtagagggtttccacagttgattctgtacaaaggtgtaaccccatggtggcgtatggggtcatggaccgggcataggtggagcggggtgcctgaaatgccaatagggtacatcttcaataactcatttgtgaataatgaggacgaagtatccttcacttacggtgtgacagatgcttcggtcataacaagaaccatggtgaacgagactggaaccatgcaccggtttacatggattgcgagggacaagagatggaatgatttctggtcagttcctaaagagcagtgcgataactacgctcattgtggccctaacggttactgtgattcccctagctcaaaaacgtttgagtgcacatgcctacctggttttgagcccaagtttccccggcattggttcttgagggactcttctggcgggtgtacaaagaaaaagagagcttcaatatgcagtgagaaagacgggtttgtgaagttaaagcgcatgaagattcccgacacatcagatgcaagtgtggatatgaacataacattgaaggagtgcaaacagaggtgcttgaagaactgctcttgtgtcgcttacgcaagtgcttaccacgagagtaaaagaggagcaataggatgcttgaaatggcatggtggtatgttggatgcaaggacatacttgaactcgggacaagatttctacatacgtgtagacaaggaagacgcggtggaacagaaatggcttatcagggaagaggagagtccttctgattcttatcagtttgattgcagccgtaatgttactaactgtcattttgttctgtgttgtaagggagcgacgaatgcagagtcaaacaggcatagaagctcttcggcaaacttcgccccggtcccttttgattttgacgaatcatttagatttgaacaagacaaggcgagaaaccgggagttacctttatttgatcttaacacgatcgttgcagcaacaaataacttctcttcccaaaacaagcttggagcaggtggtttcggacctgtttataagggcgtgttacaaaaccgtatggagatagcggtgaagaggttgtcgagaaactcgggacaaggaatggaagagttcaagaacgaggtcaagctgatatcaaagttgcagcatcgaaatctcgtgaggatcttaggatgttgcgttgaattggaagagaagatgttggtatacgagtatttaccaaacaagagcctagactatttcatattccatgaagagcagagagcagagttggattggccaaaaagaatggagatagtccgagggattgctcgtggaatcttatatcttcatcaagattcaagactgagaatcatccacagagatctcaaggccagcaatatacttcttgacagtgaaatgatcccaaagatttcagatttcggcatggctagaatctttgggggcaaccaaatggaaggatgcacaagtagggtcgtcggaacattcggatatatggcaccggagtatgcaatggagggacagttctccattaaatccgacgtctatagctttggagtattgatgttagagatcataaccggaaagaaaaacagtgctttccacgaggaatcatctaacttagtcggacatatttgggatctatgggaaaacggtgaagcaacagagatcatagacaatttaatggaccaagagacttatgatgagagagaagtgatgaagtgcatacaaattgggttgctctgtgtgcaagaaaacgcttcggacagagtagacatgtcctctgttgtcatcatgttgggtcataacgccactaatcttccgaatccaaagcatcctgcgtttacttccgcgagaaggagaggcggtgaaaatggtgcttgtcttaagggacaaaccggtatttctgttaatgacgttaccttcagcgacattcaaggtcgttaa

SEQ ID NO: 73541 - protein, 901 aa, Arabidopsis thaliana
  peptide (1)..(901): Ceres Seq. ID no. 4971925
MIIVGVLLVSFTLLSHMNQFLHLFESPTFEIYPELGRDSQLMTDPLGFQYLHSIYTFSLNPCSETNTNMKVVFVIFFFFLFQFCISVDTIMRRQSLRDGEVILSAGKRFAFGFFSLGDSELRYVGIWYAQISQQTIVWVANRDHPINDTSGMVKFSNRGNLSVYASDNETELIWSTNVSDSMLEPTLVATLSDLGNLVLFDPVTGRSFWESFDHPTDTFLPFMRLGFTRKDGLDRSLTSWKSHGDPGSGDLILRMERRGFPQLILYKGVTPWWRMGSWTGHRWSGVPEMPIGYIFNNSFVNNEDEVSFTYGVTDASVITRTMVNETGTMHRFTWIARDKRWNDFWSVPKEQCDNYAHCGPNGYCDSPSSKTFECTCLPGFEPKFPRHWFLRDSSGGCTKKKRASICSEKDGFVKLKRMKIPDTSDASVDMNITLKECKQRCLKNCSCVAYASAYHESKRGAIGCLKWHGGMLDARTYLNSGQDFYIRVDKEDAVEQKWLIREEESPSDSYQFDCSRNVTNCHFVLCCKGATNAESNRHRSSSANFAPVPFDFDESFRFEQDKARNRELPLFDLNTIVAATNNFSSQNKLGAGGFGPVYKGVLQNRMEIAVKRLSRNSGQGMEEFKNEVKLISKLQHRNLVRILGCCVELEEKMLVYEYLPNKSLDYFIFHEEQRAELDWPKRMEIVRGIARGILYLHQDSRLRIIHRDLKASNILLDSEMIPKISDFGMARIFGGNQMEGCTSRVVGTFGYMAPEYAMEGQFSIKSDVYSFGVLMLEIITGKKNSAFHEESSNLVGHIWDLWENGEATEIIDNLMDQETYDEREVMKCIQIGLLCVQENASDRVDMSSVVIMLGHNATNLPNPKHPAFTSARRRGGENGACLKGQTGISVNDVTFSDIQGR

SEQ ID NO: 73542 - protein, 885 aa, Arabidopsis thaliana
  peptide (1)..(885): Ceres Seq. ID no. 4971926
MNQFLHLFESPTFEIYPELGRDSQLMTDPLGFQYLHSIYTFSLNPCSETNTNMKVVFVIFFFFLFQFCISVDTIMRRQSLRDGEVILSAGKRFAFGFFSLGDSELRYVGIWYAQISQQTIVWVANRDHPINDTSGMVKFSNRGNLSVYASDNETELIWSTNVSDSMLEPTLVATLSDLGNLVLFDPVTGRSFWESFDHPTDTFLPFMRLGFTRKDGLDRSLTSWKSHGDPGSGDLILRMERRGFPQLILYKGVTPWWRMGSWTGHRWSGVPEMPIGYIFNNSFVNNEDEVSFTYGVTDASVITRTMVNETGTMHRFTWIARDKRWNDFWSVPKEQCDNYAHCGPNGYCDSPSSKTFECTCLPGFEPKFPRHWFLRDSSGGCTKKKRASICSEKDGFVKLKRMKIPDTSDASVDMNITLKECKQRCLKNCSCVAYASAYHESKRGAIGCLKWHGGMLDARTYLNSGQDFYIRVDKEDAVEQKWLIREEESPSDSYQFDCSRNVTNCHFVLCCKGATNAESNRHRSSSANFAPVPFDFDESFRFEQDKARNRELPLFDLNTIVAATNNFSSQNKLGAGGFGPVYKGVLQNRMEIAVKRLSRNSGQGMEEFKNEVKLISKLQHRNLVRILGCCVELEEKMLVYEYLPNKSLDYFIFHEEQRAELDWPKRMEIVRGIARGILYLHQDSRLRIIHRDLKASNILLDSEMIPKISDFGMARIFGGNQMEGCTSRVVGTFGYMAPEYAMEGQFSIKSDVYSFGVLMLEIITGKKNSAFHEESSNLVGHIWDLWENGEATEIIDNLMDQETYDEREVMKCIQIGLLCVQENASDRVDMSSVVIMLGHNATNLPNPKHPAFTSARRRGGENGACLKGQTGISVNDVTFSDIQGR

SEQ ID NO: 73543 - protein, 860 aa, Arabidopsis thaliana
  peptide (1)..(860): Ceres Seq. ID no. 4971927
MTDPLGFQYLHSIYTFSLNPCSETNTNMKVVFVIFFFFLFQFCISVDTIMRRQSLRDGEVILSAGKRFAFGFFSLGDSELRYVGIWYAQISQQTIVWVANRDHPINDTSGMVKFSNRGNLSVYASDNETELIWSTNVSDSMLEPTLVATLSDLGNLVLFDPVTGRSFWESFDHPTDTFLPFMRLGFTRKDGLDRSLTSWKSHGDPGSGDLILRMERRGFPQLILYKGVTPWWRMGSWTGHRWSGVPEMPIGYIFNNSFVNNEDEVSFTYGVTDASVITRTMVNETGTMHRFTWIARDKRWNDFWSVPKEQCDNYAHCGPNGYCDSPSSKTFECTCLPGFEPKFPRHWFLRDSSGGCTKKKRASICSEKDGFVKLKRMKIPDTSDASVDMNITLKECKQRCLKNCSCVAYASAYHESKRGAIGCLKWHGGMLDARTYLNSGQDFYIRVDKEDAVEQKWLIREEESPSDSYQFDCSRNVTNCHFVLCCKGATNAESNRHRSSSANFAPVPFDFDESFRFEQDKARNRELPLFDLNTIVAATNNFSSQNKLGAGGFGPVYKGVLQNRMEIAVKRLSRNSGQGMEEFKNEVKLISKLQHRNLVRILGCCVELEEKMLVYEYLPNKSLDYFIFHEEQRAELDWPKRMEIVRGIARGILYLHQDSRLRIIHRDLKASNILLDSEMIPKISDFGMARIFGGNQMEGCTSRVVGTFGYMAPEYAMEGQFSIKSDVYSFGVLMLEIITGKKNSAFHEESSNLVGHIWDLWENGEATEIIDNLMDQETYDEREVMKCIQIGLLCVQENASDRVDMSSVVIMLGHNATNLPNPKHPAFTSARRRGGENGACLKGQTGISVNDVTFSDIQGR

SEQ ID NO: 73544 - DNA, 2523 bp, Arabidopsis thaliana
  misc_feature (1)..(2523): Ceres Seq. ID no. 4971928
  misc_feature (1)..(2523): Ortholog of  Ceres SEQ ID NO 13582534 as cited in SEQ ID NO 57409
  misc_feature (1)..(2523): Ortholog of  Ceres SEQ ID NO 13597268 as cited in SEQ ID NO 63929
  misc_feature (1)..(2523): Ortholog of  Ceres SEQ ID NO 14302384 as cited in SEQ ID NO 67177
  misc_feature (1)..(2523): Ortholog of  Ceres SEQ ID NO 13584744 as cited in SEQ ID NO 69137
atggtggtttcagtgaccatacgtcgtcgttttgttcttcttctacttgcatgcacttgtttgttgtctcggagactctgttttggtgaggacagaatcactttctcaagtcctatcaaagactcagagtcagagacccttctatgcaaaagtggtattttcaggtttggtttcttcactcctgttaattccactactcggttacgttatgttgggatttggtacgaaaagattccaatccaaactgtggtttgggttgctaacaaagactctcccatcaacgacacttccggtgttatctcgatctatcaagatggaaatctcgcggttaccgatggtcgaaatcgccttgtatggtcgacgaatgtctcagtaccagtagctccaaatgctacttgggttcagcttatggattctgggaatcttatgttacaagacaacagaaacaatggtgagattctttgggagagtttcaagcatccttatgattctttcatgccaagaatgactcttggcaccgacggtagaactggaggtaacctaaagcttacttcttggacaagccacgatgatccttcaacaggaaactacacagctggtattgctcctttcacgtttcctgagcttcttatctggaagaacaatgtcccaacgtggcgtagcggaccgtggaacggtcaggttttcatcggtttaccgaatatggattcacttctgtttcttgatgggtttaatcttaacagtgataatcaaggaacgatctcaatgtcttatgctaatgattcgttcatgtatcactttaacttggatcctgaaggaattatttatcagaaagattggagtacttctatgagaacttggaggataggtgtaaagtttccatacacagactgtgatgcatacggtagatgtggtcgattcgggagctgccatgccggggaaaacccgccttgtaaatgtgttaaagggtttgttccaaagaataacacagagtggaatggtggtaattggagtaatggatgtatgagaaaagctccattgcagtgtgaaagacagagaaatgtaagtaatggtggtggtggaggaaaagcagatggttttttgaaactgcagaagatgaaagtaccaatctctgcggaacggtctgaagctagtgaacaagtttgtcctaaagtatgcttagataactgttcttgcacagcttatgcatatgatagaggaattggatgcatgctttggagtggtgatttagttgatatgcaatcatttttgggaagtggcattgatctttttattcgtgttgctcattcagaactcaaaacacatagcaatctagcagttatgatcgcagcacctgtgataggcgttatgttaattgctgcggtctgcgttcttttagcatgccggaaatacaaaaagcgtccagcgaaagatagaagtgcagagctaatgtttaagagaatggaagcacttacaagtgataatgagtctgcttctaaccaaatcaagctcaaggagcttccactctttgagtttcaagtgttagctacatcaactgatagcttctctctaagaaacaagctcgggcaaggcgggtttggtcctgtttacaagggaaaattacctgaaggacaagaaattgcagtgaagaggctctcacggaaatcaggtcaaggactagaggaacttatgaacgaagtggttgtgatatctaagttgcaacatcggaatctagtgaagttacttggatgttgtattgaaggtgaagaaagaatgttagtatatgaatatatgccaaagaaaagcttggatgcatatctttttgacccaatgaagcaaaagattcttgattggaagactcggttcaacataatggaaggaatttgcagaggtcttttgtaccttcacagagattcaagactaaagatcatacacagagatttaaaagccagcaacattttgttagatgagaatctaaaccccaagatatctgattttggacttgcaagaattttccgagcgaatgaagatgaagctaacacaagaagggttgttggaacatacggctatatgtcaccggagtatgcaatggaaggtttcttttcagaaaaatcagatgttttcagcttgggggttatatttctcgagatcataagtgggagaagaaactctagttctcacaaggaagagaataatctcaaccttttggcttatgcttggaagctgtggaacgacggtgaggctgcttctctagcagatccagccgtctttgataagtgtttcgagaaagagatagagaaatgtgttcatattggactgttatgtgtgcaagaagttgcaaacgatagaccaaatgtttcaaacgtgatatggatgctaactaccgagaacatgagcctcgccgatccgaagcagccagcgtttatagtaagaagaggagcttctgaggctgaatcttctgaccagagtagtcaaaaggtatctatcaatgatgtgagcctcacagctgtaacaggacgttaa

SEQ ID NO: 73545 - protein, 840 aa, Arabidopsis thaliana
  peptide (1)..(840): Ceres Seq. ID no. 4971929
MVVSVTIRRRFVLLLLACTCLLSRRLCFGEDRITFSSPIKDSESETLLCKSGIFRFGFFTPVNSTTRLRYVGIWYEKIPIQTVVWVANKDSPINDTSGVISIYQDGNLAVTDGRNRLVWSTNVSVPVAPNATWVQLMDSGNLMLQDNRNNGEILWESFKHPYDSFMPRMTLGTDGRTGGNLKLTSWTSHDDPSTGNYTAGIAPFTFPELLIWKNNVPTWRSGPWNGQVFIGLPNMDSLLFLDGFNLNSDNQGTISMSYANDSFMYHFNLDPEGIIYQKDWSTSMRTWRIGVKFPYTDCDAYGRCGRFGSCHAGENPPCKCVKGFVPKNNTEWNGGNWSNGCMRKAPLQCERQRNVSNGGGGGKADGFLKLQKMKVPISAERSEASEQVCPKVCLDNCSCTAYAYDRGIGCMLWSGDLVDMQSFLGSGIDLFIRVAHSELKTHSNLAVMIAAPVIGVMLIAAVCVLLACRKYKKRPAKDRSAELMFKRMEALTSDNESASNQIKLKELPLFEFQVLATSTDSFSLRNKLGQGGFGPVYKGKLPEGQEIAVKRLSRKSGQGLEELMNEVVVISKLQHRNLVKLLGCCIEGEERMLVYEYMPKKSLDAYLFDPMKQKILDWKTRFNIMEGICRGLLYLHRDSRLKIIHRDLKASNILLDENLNPKISDFGLARIFRANEDEANTRRVVGTYGYMSPEYAMEGFFSEKSDVFSLGVIFLEIISGRRNSSSHKEENNLNLLAYAWKLWNDGEAASLADPAVFDKCFEKEIEKCVHIGLLCVQEVANDRPNVSNVIWMLTTENMSLADPKQPAFIVRRGASEAESSDQSSQKVSINDVSLTAVTGR

SEQ ID NO: 73546 - protein, 704 aa, Arabidopsis thaliana
  peptide (1)..(704): Ceres Seq. ID no. 4971930
MDSGNLMLQDNRNNGEILWESFKHPYDSFMPRMTLGTDGRTGGNLKLTSWTSHDDPSTGNYTAGIAPFTFPELLIWKNNVPTWRSGPWNGQVFIGLPNMDSLLFLDGFNLNSDNQGTISMSYANDSFMYHFNLDPEGIIYQKDWSTSMRTWRIGVKFPYTDCDAYGRCGRFGSCHAGENPPCKCVKGFVPKNNTEWNGGNWSNGCMRKAPLQCERQRNVSNGGGGGKADGFLKLQKMKVPISAERSEASEQVCPKVCLDNCSCTAYAYDRGIGCMLWSGDLVDMQSFLGSGIDLFIRVAHSELKTHSNLAVMIAAPVIGVMLIAAVCVLLACRKYKKRPAKDRSAELMFKRMEALTSDNESASNQIKLKELPLFEFQVLATSTDSFSLRNKLGQGGFGPVYKGKLPEGQEIAVKRLSRKSGQGLEELMNEVVVISKLQHRNLVKLLGCCIEGEERMLVYEYMPKKSLDAYLFDPMKQKILDWKTRFNIMEGICRGLLYLHRDSRLKIIHRDLKASNILLDENLNPKISDFGLARIFRANEDEANTRRVVGTYGYMSPEYAMEGFFSEKSDVFSLGVIFLEIISGRRNSSSHKEENNLNLLAYAWKLWNDGEAASLADPAVFDKCFEKEIEKCVHIGLLCVQEVANDRPNVSNVIWMLTTENMSLADPKQPAFIVRRGASEAESSDQSSQKVSINDVSLTAVTGR

SEQ ID NO: 73547 - protein, 698 aa, Arabidopsis thaliana
  peptide (1)..(698): Ceres Seq. ID no. 4971931
MLQDNRNNGEILWESFKHPYDSFMPRMTLGTDGRTGGNLKLTSWTSHDDPSTGNYTAGIAPFTFPELLIWKNNVPTWRSGPWNGQVFIGLPNMDSLLFLDGFNLNSDNQGTISMSYANDSFMYHFNLDPEGIIYQKDWSTSMRTWRIGVKFPYTDCDAYGRCGRFGSCHAGENPPCKCVKGFVPKNNTEWNGGNWSNGCMRKAPLQCERQRNVSNGGGGGKADGFLKLQKMKVPISAERSEASEQVCPKVCLDNCSCTAYAYDRGIGCMLWSGDLVDMQSFLGSGIDLFIRVAHSELKTHSNLAVMIAAPVIGVMLIAAVCVLLACRKYKKRPAKDRSAELMFKRMEALTSDNESASNQIKLKELPLFEFQVLATSTDSFSLRNKLGQGGFGPVYKGKLPEGQEIAVKRLSRKSGQGLEELMNEVVVISKLQHRNLVKLLGCCIEGEERMLVYEYMPKKSLDAYLFDPMKQKILDWKTRFNIMEGICRGLLYLHRDSRLKIIHRDLKASNILLDENLNPKISDFGLARIFRANEDEANTRRVVGTYGYMSPEYAMEGFFSEKSDVFSLGVIFLEIISGRRNSSSHKEENNLNLLAYAWKLWNDGEAASLADPAVFDKCFEKEIEKCVHIGLLCVQEVANDRPNVSNVIWMLTTENMSLADPKQPAFIVRRGASEAESSDQSSQKVSINDVSLTAVTGR

SEQ ID NO: 73548 - DNA, 4908 bp, Arabidopsis thaliana
  misc_feature (1)..(4908): Ceres Seq. ID no. 4971932
  misc_feature (1)..(4908): Ortholog of  Ceres SEQ ID NO 13582534 as cited in SEQ ID NO 57409
atgagacttcatgagagctcgagtccttttgtttgtattcttgtactgtcttgcttcttcttgagcgtgtctctggctcaggaaagagctttcttttctggcaagctcaatgattccgagacgattgtctctagctttcggacattcaggttcggtttcttcagccctgttaattccacaagtcgatatgctggtatatggtataacagtgtttctgtacaaactgtgatatgggttgctaacaaagataagccgatcaatgattcctctggagttatttcggtttctcaagatggaaatcttgtagttacggatggacagaggcgtgttctatggtcaactaacgtctctactcaagccagtgccaattctactgtcgctgagcttcttgattccgggaatctggtgctaaaagaggcgagtagtgacgcgtatctttgggagagcttcaagtatcctactgattcttggttgccaaatatgttggttgggacaaacgcaagaattggaggaggaaacgtcacgataacttcttggaaatccccttcggatccttcgcctgggagctacactgctgcactcgttcttgctgcatatccagagctcttcattatgaacaataataataataacagtacggtgtggcgaagtggcccgtggaatggccagatgtttaatggtttaccagatgtttatgcgggtgtttttctttatagattcatagttaatgatgacaccaatggatctgtcaccatgtcatatgctaatgattcaaccttgagatacttctacatggattatagaggatctgtgatccgaagagattggagtgagactaggagaaactggacggtcgggttacaagttccagcaaccgagtgtgacaactacaggcgatgtggcgaattcgctacttgcaatccacggaaaaacccgctttgttcttgcattagagggtttaggccaaggaacctaatagagtggaacaatggaaactggagtggtggatgcacaagaagggttcctttgcagtgtgaaagacagaacaataatgggagtgctgatgggtttttgaggctgcggcgaatgaaactgcctgactttgcaagaagatccgaagcaagcgaaccagaatgcttaaggacttgtttgcagacatgttcttgtatagctgctgctcatggcttaggatatggctgcatgatttggaatggaagcttagttgattcgcaggagttgtctgctagtggattggatctttatatccgtcttgcacattcagaaatcagcggtatttttgttgtggcagcttgtgttcttctggcacgacgaattgtcatgaagaaaagagcgaaaaagaaaggaagagatgcagagcagatttttgagagagtggaagccttagctggtggtaataaaggaaagttgaaagagctaccattgtttgagtttcaagtgctagcagcagcaactaataatttctcgctgagaaataagcttggacaaggtggctttggtcctgtttacaaagggaagttgcaagaggggcaagagattgctgtgaagaggctgtcacgagcatcaggacaagggcttgaggagcttgttaacgaagtggttgtaatttctaagttgcagcatcggaatctggtgaaattacttggttgttgcattgcaggagaagagaggatgttagtctatgagttcatgcccaagaaaagcttagactattatctctttgactcaaggagggcaaaacttcttgattggaagacccggtttaacataatcaatggaatatgtagaggtcttctgtaccttcacagagattctaggctgagaatcattcacagagacctgaaagctagtaacatcttgttagatgagaatctgattccgaaaatatctgatttcgggttggccagaatttttccagggaatgaagatgaagcaaataccagaagggtcgttggaacatatggctatatggcacctgaatatgcaatgggaggactgttttcagagaaatctgacgttttcagcttaggagtgatactcttagagattatcagtggaagaagaaactcaaattcgactcttttagcttatgtatggtcaatctggaacgaaggggagattaatagtctggtagatcctgagatctttgacctactctttgagaaagaaatacacaaatgcattcacattgggcttttgtgtgtgcaagaagctgctaacgataggccaagtgtttctacagtgtgttcgatgctcagcagcgagattgcagatattccagaaccaaaacagcctgcttttatatcaaggaacaatgttccagaagctgagtcctctgagaacagtgaccttaaagactctatcaacaatgtcaccatcaccgatgttacaggactttttcgtcttgagaggctgggactaaaagatatgagacttcatgagagcttgagtcctattgttcatgttctttcactgtcttgcttctttttaagcgtctctctagctcatgaaagagctttattttctggcacgctcaatgattccgagacgatagtctccagcttccgaacgttcaggttcggtttcttcagccctgttaattccaccaaccgatatgctggtatatggtataacagcattcctgtacaaactgtgatatgggttgctaacaaagatacgccgatcaatgactcctctggagtgatttcaatatctgaagatggaaatctggtagttactgatggtcagaggcgtgttttgtggtcaactaacgtttctactcgagccagtgccaattctactgtcgctgagcttttggagtccgggaacctcgtgctaaaagatgccaataccgatgcatatctttgggagagcttcaagtatcctactgattcttggttgccaaatatgttggttgggacaaacgcaagaaccggaggaggaaacatcacaataacttcttggacaaacccttcggatccttcgccggggagctacactgctgcactcgttcttgctccatatccagagctttttattttcaacaataatgacaacaatgctacggtgtggcgcagtggcccttggaacggactgatgtttaacggtttaccagatgtatatccggggctctttctttatagatttaaagttaatgatgacaccaatggttcagccaccatgtcatatgctaatgattcaactttgagacacctctacttggattatagaggatttgctatccggagagattggagtgaggctaggagaaactggacgttagggtcacaagttccggcaaccgagtgtgacatttacagccgatgtggtcaatacactacctgcaatcctcggaaaaacccgcattgttcttgcattaaagggtttaggccaaggaaccttatagagtggaacaatggaaactggagtggtggatgcataagaaagctccctttgcagtgtgaaagacagaacaataaggggagtgctgataggtttttgaagctgcagcgaatgaaaatgcctgactttgcaagaagatccgaagccagcgaaccagaatgctttatgacttgtttgcagtcatgttcttgtatagcttttgctcatggattaggatatggctgcatgatttggaatagaagcttagttgattcacaagtgttgtctgctagtggaatggatctttctatccgtcttgcacattcagaattcaaaacacaggacaggcgacctattttgatcggtacatcattggcaggaggcatttttgttgtggcgacttgtgtccttctggcacgacgtattgtcatgaagaaaagagctaaaaagaaaggaacagatgcagagcaaatttttaagagagtagaagctttagctggtggtagtagagaaaagttgaaagagctacctttgtttgagtttcaagtgttagctactgcaaccgataacttctctcttagcaataagctcggacaaggcggttttggtccggtttacaaggggatgttgctagaaggtcaagagattgctgtgaagagactgtcacaagcatcaggacaagggcttgaggaacttgtcactgaagtggttgtgatttctaagttgcaacatcgaaatctggtgaaattatttggttgctgcattgcaggggaagaaaggatgttagtctatgagttcatgcccaagaaaagcttagacttttatatatttgatccaagggaagcaaaacttcttgactggaacacgcggtttgaaataatcaatggaatatgtagaggtctcctgtaccttcacagagattctaggctgagaatcattcacagagatctgaaagcaagcaacatcttgctagatgagaatctgattccgaaaatatctgattttgggttggccaggatattcccggggaatgaagatgaagcaaacaccagaagggtcgttggaacatatggctatatggcacctgaatatgcaatgggaggactgttttcagagaaatctgatgttttcagcttaggagtgatactcttagagattatcagtggaagaagaaactcacattcaactcttttggctcatgtgtggtcaatctggaacgaaggggagattaatggtatggtagatcctgagatttttgaccaactttttgagaaagaaatacgaaaatgcgttcacattgcgcttttgtgtgtgcaagacgctgctaatgataggccaagtgtttctacagtgtgtatgatgcttagcagtgaggttgcagacattccagaaccgaaacagcctgcttttatgcctagaaacgttggtttagaagctgagttctctgagagcattgctcttaaagcctctatcaacaatgtcaccatcactgatgtctcaggacgttaa

SEQ ID NO: 73549 - protein, 1635 aa, Arabidopsis thaliana
  peptide (1)..(1635): Ceres Seq. ID no. 4971933
MRLHESSSPFVCILVLSCFFLSVSLAQERAFFSGKLNDSETIVSSFRTFRFGFFSPVNSTSRYAGIWYNSVSVQTVIWVANKDKPINDSSGVISVSQDGNLVVTDGQRRVLWSTNVSTQASANSTVAELLDSGNLVLKEASSDAYLWESFKYPTDSWLPNMLVGTNARIGGGNVTITSWKSPSDPSPGSYTAALVLAAYPELFIMNNNNNNSTVWRSGPWNGQMFNGLPDVYAGVFLYRFIVNDDTNGSVTMSYANDSTLRYFYMDYRGSVIRRDWSETRRNWTVGLQVPATECDNYRRCGEFATCNPRKNPLCSCIRGFRPRNLIEWNNGNWSGGCTRRVPLQCERQNNNGSADGFLRLRRMKLPDFARRSEASEPECLRTCLQTCSCIAAAHGLGYGCMIWNGSLVDSQELSASGLDLYIRLAHSEISGIFVVAACVLLARRIVMKKRAKKKGRDAEQIFERVEALAGGNKGKLKELPLFEFQVLAAATNNFSLRNKLGQGGFGPVYKGKLQEGQEIAVKRLSRASGQGLEELVNEVVVISKLQHRNLVKLLGCCIAGEERMLVYEFMPKKSLDYYLFDSRRAKLLDWKTRFNIINGICRGLLYLHRDSRLRIIHRDLKASNILLDENLIPKISDFGLARIFPGNEDEANTRRVVGTYGYMAPEYAMGGLFSEKSDVFSLGVILLEIISGRRNSNSTLLAYVWSIWNEGEINSLVDPEIFDLLFEKEIHKCIHIGLLCVQEAANDRPSVSTVCSMLSSEIADIPEPKQPAFISRNNVPEAESSENSDLKDSINNVTITDVTGLFRLERLGLKDMRLHESLSPIVHVLSLSCFFLSVSLAHERALFSGTLNDSETIVSSFRTFRFGFFSPVNSTNRYAGIWYNSIPVQTVIWVANKDTPINDSSGVISISEDGNLVVTDGQRRVLWSTNVSTRASANSTVAELLESGNLVLKDANTDAYLWESFKYPTDSWLPNMLVGTNARTGGGNITITSWTNPSDPSPGSYTAALVLAPYPELFIFNNNDNNATVWRSGPWNGLMFNGLPDVYPGLFLYRFKVNDDTNGSATMSYANDSTLRHLYLDYRGFAIRRDWSEARRNWTLGSQVPATECDIYSRCGQYTTCNPRKNPHCSCIKGFRPRNLIEWNNGNWSGGCIRKLPLQCERQNNKGSADRFLKLQRMKMPDFARRSEASEPECFMTCLQSCSCIAFAHGLGYGCMIWNRSLVDSQVLSASGMDLSIRLAHSEFKTQDRRPILIGTSLAGGIFVVATCVLLARRIVMKKRAKKKGTDAEQIFKRVEALAGGSREKLKELPLFEFQVLATATDNFSLSNKLGQGGFGPVYKGMLLEGQEIAVKRLSQASGQGLEELVTEVVVISKLQHRNLVKLFGCCIAGEERMLVYEFMPKKSLDFYIFDPREAKLLDWNTRFEIINGICRGLLYLHRDSRLRIIHRDLKASNILLDENLIPKISDFGLARIFPGNEDEANTRRVVGTYGYMAPEYAMGGLFSEKSDVFSLGVILLEIISGRRNSHSTLLAHVWSIWNEGEINGMVDPEIFDQLFEKEIRKCVHIALLCVQDAANDRPSVSTVCMMLSSEVADIPEPKQPAFMPRNVGLEAEFSESIALKASINNVTITDVSGR

SEQ ID NO: 73550 - protein, 1475 aa, Arabidopsis thaliana
  peptide (1)..(1475): Ceres Seq. ID no. 4971934
MLVGTNARIGGGNVTITSWKSPSDPSPGSYTAALVLAAYPELFIMNNNNNNSTVWRSGPWNGQMFNGLPDVYAGVFLYRFIVNDDTNGSVTMSYANDSTLRYFYMDYRGSVIRRDWSETRRNWTVGLQVPATECDNYRRCGEFATCNPRKNPLCSCIRGFRPRNLIEWNNGNWSGGCTRRVPLQCERQNNNGSADGFLRLRRMKLPDFARRSEASEPECLRTCLQTCSCIAAAHGLGYGCMIWNGSLVDSQELSASGLDLYIRLAHSEISGIFVVAACVLLARRIVMKKRAKKKGRDAEQIFERVEALAGGNKGKLKELPLFEFQVLAAATNNFSLRNKLGQGGFGPVYKGKLQEGQEIAVKRLSRASGQGLEELVNEVVVISKLQHRNLVKLLGCCIAGEERMLVYEFMPKKSLDYYLFDSRRAKLLDWKTRFNIINGICRGLLYLHRDSRLRIIHRDLKASNILLDENLIPKISDFGLARIFPGNEDEANTRRVVGTYGYMAPEYAMGGLFSEKSDVFSLGVILLEIISGRRNSNSTLLAYVWSIWNEGEINSLVDPEIFDLLFEKEIHKCIHIGLLCVQEAANDRPSVSTVCSMLSSEIADIPEPKQPAFISRNNVPEAESSENSDLKDSINNVTITDVTGLFRLERLGLKDMRLHESLSPIVHVLSLSCFFLSVSLAHERALFSGTLNDSETIVSSFRTFRFGFFSPVNSTNRYAGIWYNSIPVQTVIWVANKDTPINDSSGVISISEDGNLVVTDGQRRVLWSTNVSTRASANSTVAELLESGNLVLKDANTDAYLWESFKYPTDSWLPNMLVGTNARTGGGNITITSWTNPSDPSPGSYTAALVLAPYPELFIFNNNDNNATVWRSGPWNGLMFNGLPDVYPGLFLYRFKVNDDTNGSATMSYANDSTLRHLYLDYRGFAIRRDWSEARRNWTLGSQVPATECDIYSRCGQYTTCNPRKNPHCSCIKGFRPRNLIEWNNGNWSGGCIRKLPLQCERQNNKGSADRFLKLQRMKMPDFARRSEASEPECFMTCLQSCSCIAFAHGLGYGCMIWNRSLVDSQVLSASGMDLSIRLAHSEFKTQDRRPILIGTSLAGGIFVVATCVLLARRIVMKKRAKKKGTDAEQIFKRVEALAGGSREKLKELPLFEFQVLATATDNFSLSNKLGQGGFGPVYKGMLLEGQEIAVKRLSQASGQGLEELVTEVVVISKLQHRNLVKLFGCCIAGEERMLVYEFMPKKSLDFYIFDPREAKLLDWNTRFEIINGICRGLLYLHRDSRLRIIHRDLKASNILLDENLIPKISDFGLARIFPGNEDEANTRRVVGTYGYMAPEYAMGGLFSEKSDVFSLGVILLEIISGRRNSHSTLLAHVWSIWNEGEINGMVDPEIFDQLFEKEIRKCVHIALLCVQDAANDRPSVSTVCMMLSSEVADIPEPKQPAFMPRNVGLEAEFSESIALKASINNVTITDVSGR

SEQ ID NO: 73551 - protein, 1431 aa, Arabidopsis thaliana
  peptide (1)..(1431): Ceres Seq. ID no. 4971935
MNNNNNNSTVWRSGPWNGQMFNGLPDVYAGVFLYRFIVNDDTNGSVTMSYANDSTLRYFYMDYRGSVIRRDWSETRRNWTVGLQVPATECDNYRRCGEFATCNPRKNPLCSCIRGFRPRNLIEWNNGNWSGGCTRRVPLQCERQNNNGSADGFLRLRRMKLPDFARRSEASEPECLRTCLQTCSCIAAAHGLGYGCMIWNGSLVDSQELSASGLDLYIRLAHSEISGIFVVAACVLLARRIVMKKRAKKKGRDAEQIFERVEALAGGNKGKLKELPLFEFQVLAAATNNFSLRNKLGQGGFGPVYKGKLQEGQEIAVKRLSRASGQGLEELVNEVVVISKLQHRNLVKLLGCCIAGEERMLVYEFMPKKSLDYYLFDSRRAKLLDWKTRFNIINGICRGLLYLHRDSRLRIIHRDLKASNILLDENLIPKISDFGLARIFPGNEDEANTRRVVGTYGYMAPEYAMGGLFSEKSDVFSLGVILLEIISGRRNSNSTLLAYVWSIWNEGEINSLVDPEIFDLLFEKEIHKCIHIGLLCVQEAANDRPSVSTVCSMLSSEIADIPEPKQPAFISRNNVPEAESSENSDLKDSINNVTITDVTGLFRLERLGLKDMRLHESLSPIVHVLSLSCFFLSVSLAHERALFSGTLNDSETIVSSFRTFRFGFFSPVNSTNRYAGIWYNSIPVQTVIWVANKDTPINDSSGVISISEDGNLVVTDGQRRVLWSTNVSTRASANSTVAELLESGNLVLKDANTDAYLWESFKYPTDSWLPNMLVGTNARTGGGNITITSWTNPSDPSPGSYTAALVLAPYPELFIFNNNDNNATVWRSGPWNGLMFNGLPDVYPGLFLYRFKVNDDTNGSATMSYANDSTLRHLYLDYRGFAIRRDWSEARRNWTLGSQVPATECDIYSRCGQYTTCNPRKNPHCSCIKGFRPRNLIEWNNGNWSGGCIRKLPLQCERQNNKGSADRFLKLQRMKMPDFARRSEASEPECFMTCLQSCSCIAFAHGLGYGCMIWNRSLVDSQVLSASGMDLSIRLAHSEFKTQDRRPILIGTSLAGGIFVVATCVLLARRIVMKKRAKKKGTDAEQIFKRVEALAGGSREKLKELPLFEFQVLATATDNFSLSNKLGQGGFGPVYKGMLLEGQEIAVKRLSQASGQGLEELVTEVVVISKLQHRNLVKLFGCCIAGEERMLVYEFMPKKSLDFYIFDPREAKLLDWNTRFEIINGICRGLLYLHRDSRLRIIHRDLKASNILLDENLIPKISDFGLARIFPGNEDEANTRRVVGTYGYMAPEYAMGGLFSEKSDVFSLGVILLEIISGRRNSHSTLLAHVWSIWNEGEINGMVDPEIFDQLFEKEIRKCVHIALLCVQDAANDRPSVSTVCMMLSSEVADIPEPKQPAFMPRNVGLEAEFSESIALKASINNVTITDVSGR

SEQ ID NO: 73552 - DNA, 1065 bp, Arabidopsis thaliana
  misc_feature (1)..(1065): Ceres Seq. ID no. 4971947
  misc_feature (1)..(1065): Ortholog of  Ceres SEQ ID NO 14303604 as cited in SEQ ID NO 62525
atgtccgaggatgtctggttgacttgcctcactcacgcattatccaccgagaccgaagagatcatgggtctccttctcggcgacatcgagtactcaaaggacgggggaagtgccacagctatgatctggggagcatcgcctcagtcacggtctgatcggcagaaggatagaaatgacgatatcaacgggcagaactacacgggtcattggatggtaccactcccatcctcatattaccgttcttccttcccatatgttcgaacacaagctatgtatcagcttttagattctggttttattggcctcatcttttcctgttttagtgaagatgctaacaaggttggcagaatccaagttatcgctttccagtcttctgatggaaagccgaatagtattcctaaatcaatgagcctggttcttgcaaataaagattctgttatcgatttagaatcttcatttagttcttcggactcgatataccagagatcgtcttctgctcggggagacaatcctgagctcgacacaagtgatacagctacaacttccggatctaagggtggaggacgcgtttcagattttgaggctttctttgtgaacaatactgaggccaacaacaccagaagagatggaacaagtggaaactacagcagcacagcaatagaaattgactcgatggacatgtctgaaagtatgcaagaggcaatgcaccgctcaaatttagaaaccagtggtgtggggtatgttagaaaagaagtcccacttcatgttttgccgacttcatcccttcttcaactcaattcacctttagcatcttttaaaagcctgcaacgagtactctacgaggaggaacgagcagcgtaccaccaatccgtgcagcaaagcaagagcttgagtcctgccattaacgcacttcaagataggctgaaggagaacaagatccggttagcaatgctgatggatgaagctgaagttttggaagcacagaaactgaaaggagcagagacaagcgggggagcatctcgtctggttcacggttctggcagccgaagcagaagacgatcgtag

SEQ ID NO: 73553 - protein, 354 aa, Arabidopsis thaliana
  peptide (1)..(354): Ceres Seq. ID no. 4971948
MSEDVWLTCLTHALSTETEEIMGLLLGDIEYSKDGGSATAMIWGASPQSRSDRQKDRNDDINGQNYTGHWMVPLPSSYYRSSFPYVRTQAMYQLLDSGFIGLIFSCFSEDANKVGRIQVIAFQSSDGKPNSIPKSMSLVLANKDSVIDLESSFSSSDSIYQRSSSARGDNPELDTSDTATTSGSKGGGRVSDFEAFFVNNTEANNTRRDGTSGNYSSTAIEIDSMDMSESMQEAMHRSNLETSGVGYVRKEVPLHVLPTSSLLQLNSPLASFKSLQRVLYEEERAAYHQSVQQSKSLSPAINALQDRLKENKIRLAMLMDEAEVLEAQKLKGAETSGGASRLVHGSGSRSRRRS

SEQ ID NO: 73554 - protein, 333 aa, Arabidopsis thaliana
  peptide (1)..(333): Ceres Seq. ID no. 4971949
MGLLLGDIEYSKDGGSATAMIWGASPQSRSDRQKDRNDDINGQNYTGHWMVPLPSSYYRSSFPYVRTQAMYQLLDSGFIGLIFSCFSEDANKVGRIQVIAFQSSDGKPNSIPKSMSLVLANKDSVIDLESSFSSSDSIYQRSSSARGDNPELDTSDTATTSGSKGGGRVSDFEAFFVNNTEANNTRRDGTSGNYSSTAIEIDSMDMSESMQEAMHRSNLETSGVGYVRKEVPLHVLPTSSLLQLNSPLASFKSLQRVLYEEERAAYHQSVQQSKSLSPAINALQDRLKENKIRLAMLMDEAEVLEAQKLKGAETSGGASRLVHGSGSRSRRRS

SEQ ID NO: 73555 - protein, 314 aa, Arabidopsis thaliana
  peptide (1)..(314): Ceres Seq. ID no. 4971950
MIWGASPQSRSDRQKDRNDDINGQNYTGHWMVPLPSSYYRSSFPYVRTQAMYQLLDSGFIGLIFSCFSEDANKVGRIQVIAFQSSDGKPNSIPKSMSLVLANKDSVIDLESSFSSSDSIYQRSSSARGDNPELDTSDTATTSGSKGGGRVSDFEAFFVNNTEANNTRRDGTSGNYSSTAIEIDSMDMSESMQEAMHRSNLETSGVGYVRKEVPLHVLPTSSLLQLNSPLASFKSLQRVLYEEERAAYHQSVQQSKSLSPAINALQDRLKENKIRLAMLMDEAEVLEAQKLKGAETSGGASRLVHGSGSRSRRRS

SEQ ID NO: 73556 - DNA, 1002 bp, Arabidopsis thaliana
  misc_feature (1)..(1002): Ceres Seq. ID no. 4971971
  misc_feature (1)..(1002): Ortholog of  Ceres SEQ ID NO 13592803 as cited in SEQ ID NO 20481
atgctcccctttgtgaaaaattcaacgcctagaagcggtagtcaacggccttttaaagcgaaggagcatgacacgtgtctttcgtcattatccggcgatgccaaactcttcttcctcgatcgagagaacacagcaccgcttcgcttaaatcggacatttgagtcggaactgttgggattcaaagttcacttatgggaccaatctcttgttcctcttcatttcagcattcgaaaacgaaagaacacccctcgttatttgatttcttgcagtcagaagaaagatgtcactgttgttgatggaagttgtatggatgagatctatgataagttggcggaacgtcttgtccctacagcagcggcaatgtttagccccaatcttaaacgtttggtcggtttggctggtcctcctggtgccgggaaaagtacagtagcaaatgaagttgtgcgtcgtgtaaataagctatggcctcagaaagctgcttcttttgatgctgaggttaatccaccggatgttgctatagtacttcccatggatggtttccatttgtatcgttcgcaactcgatgctatggaggatcccaaagaagcccatgcgagaagaggggctccgtggacttttgatcctgcactactgcttaactgtttaaagaagctgaaaaacgagggctcagtttatgtgccatcatttgatcatggagttggggatccagttgaagatgatatctttgttagcctccagcataaagtggtaattgtagaaggaaactacatcttgttagaagaagggtcttggaaagacatctcagatatgtttgatgagaaatggttcatcgatgtgaatctcgatacagcaatgcaacgtgttgaaaaccggcatatctcaactggtaaacccccagatgttgctaaatggcgggtggattataatgaccgacccaacgcagagctgataataaagtcaaagacaaacgctgatctactgatcagatctatgaacatttga

SEQ ID NO: 73557 - protein, 333 aa, Arabidopsis thaliana
  peptide (1)..(333): Ceres Seq. ID no. 4971972
MLPFVKNSTPRSGSQRPFKAKEHDTCLSSLSGDAKLFFLDRENTAPLRLNRTFESELLGFKVHLWDQSLVPLHFSIRKRKNTPRYLISCSQKKDVTVVDGSCMDEIYDKLAERLVPTAAAMFSPNLKRLVGLAGPPGAGKSTVANEVVRRVNKLWPQKAASFDAEVNPPDVAIVLPMDGFHLYRSQLDAMEDPKEAHARRGAPWTFDPALLLNCLKKLKNEGSVYVPSFDHGVGDPVEDDIFVSLQHKVVIVEGNYILLEEGSWKDISDMFDEKWFIDVNLDTAMQRVENRHISTGKPPDVAKWRVDYNDRPNAELIIKSKTNADLLIRSMNI

SEQ ID NO: 73558 - protein, 231 aa, Arabidopsis thaliana; identical to SEQ ID NO: 20483
  peptide (1)..(231): Ceres Seq. ID no. 4971973

SEQ ID NO: 73559 - protein, 213 aa, Arabidopsis thaliana; identical to SEQ ID NO: 20484
  peptide (1)..(213): Ceres Seq. ID no. 4971974

SEQ ID NO: 73560 - DNA, 4671 bp, Arabidopsis thaliana
  misc_feature (1)..(4671): Ceres Seq. ID no. 4972001
  misc_feature (1)..(4671): Ortholog of  Ceres SEQ ID NO 14303434 as cited in SEQ ID NO 53963
atgatgaagaccggtgctgttgtttccaatccacgttcgagggtcaagtgggacgcattcctgagtttccaaagagacacgagccacaatttcacggatcgtctctatgaagcgcttgtcaaggaagagctccgggtttggaacgatgatttggaacgtgtggatcatgatcatgatcatgagctacgtccaagtctcgtggaggctatagaggactcggtggcttttgtcgtcgtcttatcccctaactacgctaactctcacctgcgcctcgaagaattagctaagctctgcgatctaaaatgtttgatggtaccgatcttttataaggttgaaccacgggaagttaaggaacagaacggtcctttcgaaaaggattttgaagagcattccaaaagatttggcgaggagaagatacaacgatggaagggagctatgactacggtcggaaatatctccggattcatttgcgggtatgagatccaattggagatggagactggcgttgttccgaataggctaaagtacagcgtctttctgagcttccgaggattcgacacgcgaaccaacttctgtgagcgtctgtatatcgctctcaacgaaaagcaaaatgtccgagtctttcgcgacaacgagggtatggaaaaaggtgataagatcgatccaagtctcttcgaagccattgaggactcggctgcctccgtcatcatcttatccactaactacgctaactcttcttggtgcctagatgaattagctttgctctgcgatcttagatcgtctctgaaacgtcccatgatacctatcttctatggagtcaatcccgaggatgtccgcaaacagagcggtgagttcaggaaagattttgaagagaaagcgaaaagttttgatgaggagacgattcagcgatggaagcgagctatgaatttagtcggaaatatccctggatatgtttgcacagcaaagactgttggagatgacaatgaaggcataaacagagagaaagtagatgacatgattgatctggtggtgaaaaaggttgtagctgctgtgaggaatagaccagagatagttgcagactacactgttggtctggaatcacctataaaggatttgatgaaactgttcaacactgaatccagttctggcatccaagtcatgggactttatggtatgggcggtattgggaagactacccttgcaaaagccttttataacaagatcattgttaacttcaaccgtcatcgagttttcatcgaaagcgttaggggaaaatcgtcagaccaagatggtttagtcaatctacaaaaaactctcatcaaggaacttttccgtttggtacctgaaatagaggatgttagcataggcctggaaaagataaaagagaatgttcatgagaagaagattattgtggttttggatgatgttgatcacatagaccaggttaatgcgctggttggtgaaacaagctggtatggtgaaggaagtcttatagtcatcactaccagagattctgagattctgagtaagctctcagtgaaccaacagtatgaggtcaagtgcttgactgaaccgcaggcgttgaagctctttagtttttattcactacgaaaagagaaaccaccaacacagggtttattggagttgtccaagaagattgccgaggtgacgggactgttgccactggctgttaaagtgtttggttctcatttttatgacaaggacgaaaacgaatggcaagttgaactagagaagctgaaaacccaacaagacaaacttcacggtgttctggctctgagtttcaaatctttagacgaagaagaaaagaagatattcctcgacattgcatgtctctttctcaaaatggatataacaaaagaagaagttgtcgacatactgaaaggatgtgggttaaacgccgaggctgctctccgtgttcttatacagaaatctctccttacaatcttgacagacgacactctgtggatgcatgatcagatcagagacatgggtaggcagatggttcataaagaaagcagcgatgatcctgagatgcggagtagactctgggatcgtggtgaaataatgaacgtattggactatatgaagggaacatcatccattcgaggaatcgtactagactttaataagaagtttgcgagggaccatactgcagatgaaattttctcgagtaatctacgcaacaatccgggtatctactctgtattcaattacctgaagaataagttagtaagatttccagcagaggaaaagccaaaaaggtctgaaatcaccattcccgtagaatcttttgcaccaatgaagaagttgagacttcttcagattaataacgtggaactggaaggagatcttaaacttctcccatctgaactcaagtggatacagtggaaaggtttcccattagaaaatctccctccggatattctttctaggcaacttggtgttcttgatctttcagagagtggagtaagacgagtcaagactttgccccgcaaaaggggggatgagaacttgaaagttgtaaatttgcgtggttgccacggcttagaagccattcctgatttatcaaaccataatgcactagaaaagcttgttcttgagcgatgcaaccttctggtgaaggttcctagatcagttggtaatctgggaaaattgcttcagctggaccttagaaggtgctcaagtctttctgaatttcttggggatgtttctggactgaagtgtcttgaaaaatttttcctctctggctgttcaaatctgagtgtgttaccagaaaacattggttccatgccatgtttgaaagagcttcttcttgatggaactgcgataagtaacttaccgtactctatttttcgcctccaaaagcttgaaaagcttagtctaatgggttgcaggtctattgaagagctaccttcgtgtgtaggatatttgacatcgctcgaagatttatatcttgatgatactgcattgcgaaaccttcctagttctattggagatctaaaaaatctccagaagctgcatctgatgcgctgcacgtccctttctacgattcctgagactataaataagctcatgtcattgaaggaattattcatcaatggaagcgcggtggaggagctacctatagaaaccggctcactcctatgtttgactgacctctctgcaggagattgcaaatttctgaaacaggttccgagttcaattggtggattaaattctcttctccaacttcagttggatagcaccccaattgaagctctaccagaagagattggagacttgcactttattcgacaacttgacttgagaaactgcaaatctctgaaggctctgcctaaaacaatcggaaagatggacacactctatagcttaaaccttgtaggctctaacattgaggaactgccggaagaatttggcaagctggaaaacctagttgaactgcgaatgaacaactgtaaaatgctcaaacggcttcctaaatcgtttggagacttgaaatctcttcaccgtctgtacatgcaggaaactttggtcgcggagttgccagaaagtttcggaaacctctcaaatttaatggtactggaaatgctgaagaagcctctttttagaatttctgagagtaatgttccaggtacaagcgaagaacctcgttttgtagaagtaccaaactctttctcaaagctcttgaagcttgaggaactagatgcttgcagctggagaatatcgggtaaaatccctgatgatcttgagaagctttcgtgtttgatgaaactgaatctggggaataattattttcatagtcttccgtctagcctcgtaaagttatcaaatctccaagaactttcattacgtgactgccgagagctcaagcgtcttccccctcttccatgtaaactggagcagctaaacctagcaaactgtttctcattggagagtgtatccgacctttcagagttaacgatcttgacggatctcaatctcacaaactgtgcgaaagtggttgatattccaggcctagagcacttgacggctctgaaaagattatacatgaccggatgtaactccaactactcccttgcagtaaagaaaagactttccaaggcttctttgaagatgatgcggaatctgagcttgcctggaaacagggtcccggactggttctcgcaaggccctgtcacattctcagctcaaccgaacagagagctcagaggtgtaatcattgctgttgttgtggctcttaatgatgaaaccgaagatgacgactatcagctgcctgatgtgatggaggttcaagcccaaattcataaacttgatcatcacaaatgcaccaacacattgcatctctccggagtgcctagaacaaataacgatcagcttcacatctgccgatactcagcttttcacccactggttacgatgttgaaagacgggtacaccatacaggtgatcaaacgaaacccaccaatcaaacaaggcgttgagctaaagatgcatggcattcatctcgtttacgagggggatgatgatttggaaggcagagaaaatacattacccgaggctcaacaaaccgtttctcagaaacttgccaattttttcagctcgtttgaagaaggtgaagccagcgcaaaaggtgattccactgttgcatga

SEQ ID NO: 73561 - protein, 1556 aa, Arabidopsis thaliana
  peptide (1)..(1556): Ceres Seq. ID no. 4972002
MMKTGAVVSNPRSRVKWDAFLSFQRDTSHNFTDRLYEALVKEELRVWNDDLERVDHDHDHELRPSLVEAIEDSVAFVVVLSPNYANSHLRLEELAKLCDLKCLMVPIFYKVEPREVKEQNGPFEKDFEEHSKRFGEEKIQRWKGAMTTVGNISGFICGYEIQLEMETGVVPNRLKYSVFLSFRGFDTRTNFCERLYIALNEKQNVRVFRDNEGMEKGDKIDPSLFEAIEDSAASVIILSTNYANSSWCLDELALLCDLRSSLKRPMIPIFYGVNPEDVRKQSGEFRKDFEEKAKSFDEETIQRWKRAMNLVGNIPGYVCTAKTVGDDNEGINREKVDDMIDLVVKKVVAAVRNRPEIVADYTVGLESPIKDLMKLFNTESSSGIQVMGLYGMGGIGKTTLAKAFYNKIIVNFNRHRVFIESVRGKSSDQDGLVNLQKTLIKELFRLVPEIEDVSIGLEKIKENVHEKKIIVVLDDVDHIDQVNALVGETSWYGEGSLIVITTRDSEILSKLSVNQQYEVKCLTEPQALKLFSFYSLRKEKPPTQGLLELSKKIAEVTGLLPLAVKVFGSHFYDKDENEWQVELEKLKTQQDKLHGVLALSFKSLDEEEKKIFLDIACLFLKMDITKEEVVDILKGCGLNAEAALRVLIQKSLLTILTDDTLWMHDQIRDMGRQMVHKESSDDPEMRSRLWDRGEIMNVLDYMKGTSSIRGIVLDFNKKFARDHTADEIFSSNLRNNPGIYSVFNYLKNKLVRFPAEEKPKRSEITIPVESFAPMKKLRLLQINNVELEGDLKLLPSELKWIQWKGFPLENLPPDILSRQLGVLDLSESGVRRVKTLPRKRGDENLKVVNLRGCHGLEAIPDLSNHNALEKLVLERCNLLVKVPRSVGNLGKLLQLDLRRCSSLSEFLGDVSGLKCLEKFFLSGCSNLSVLPENIGSMPCLKELLLDGTAISNLPYSIFRLQKLEKLSLMGCRSIEELPSCVGYLTSLEDLYLDDTALRNLPSSIGDLKNLQKLHLMRCTSLSTIPETINKLMSLKELFINGSAVEELPIETGSLLCLTDLSAGDCKFLKQVPSSIGGLNSLLQLQLDSTPIEALPEEIGDLHFIRQLDLRNCKSLKALPKTIGKMDTLYSLNLVGSNIEELPEEFGKLENLVELRMNNCKMLKRLPKSFGDLKSLHRLYMQETLVAELPESFGNLSNLMVLEMLKKPLFRISESNVPGTSEEPRFVEVPNSFSKLLKLEELDACSWRISGKIPDDLEKLSCLMKLNLGNNYFHSLPSSLVKLSNLQELSLRDCRELKRLPPLPCKLEQLNLANCFSLESVSDLSELTILTDLNLTNCAKVVDIPGLEHLTALKRLYMTGCNSNYSLAVKKRLSKASLKMMRNLSLPGNRVPDWFSQGPVTFSAQPNRELRGVIIAVVVALNDETEDDDYQLPDVMEVQAQIHKLDHHKCTNTLHLSGVPRTNNDQLHICRYSAFHPLVTMLKDGYTIQVIKRNPPIKQGVELKMHGIHLVYEGDDDLEGRENTLPEAQQTVSQKLANFFSSFEEGEASAKGDSTVA

SEQ ID NO: 73562 - protein, 1555 aa, Arabidopsis thaliana
  peptide (1)..(1555): Ceres Seq. ID no. 4972003
MKTGAVVSNPRSRVKWDAFLSFQRDTSHNFTDRLYEALVKEELRVWNDDLERVDHDHDHELRPSLVEAIEDSVAFVVVLSPNYANSHLRLEELAKLCDLKCLMVPIFYKVEPREVKEQNGPFEKDFEEHSKRFGEEKIQRWKGAMTTVGNISGFICGYEIQLEMETGVVPNRLKYSVFLSFRGFDTRTNFCERLYIALNEKQNVRVFRDNEGMEKGDKIDPSLFEAIEDSAASVIILSTNYANSSWCLDELALLCDLRSSLKRPMIPIFYGVNPEDVRKQSGEFRKDFEEKAKSFDEETIQRWKRAMNLVGNIPGYVCTAKTVGDDNEGINREKVDDMIDLVVKKVVAAVRNRPEIVADYTVGLESPIKDLMKLFNTESSSGIQVMGLYGMGGIGKTTLAKAFYNKIIVNFNRHRVFIESVRGKSSDQDGLVNLQKTLIKELFRLVPEIEDVSIGLEKIKENVHEKKIIVVLDDVDHIDQVNALVGETSWYGEGSLIVITTRDSEILSKLSVNQQYEVKCLTEPQALKLFSFYSLRKEKPPTQGLLELSKKIAEVTGLLPLAVKVFGSHFYDKDENEWQVELEKLKTQQDKLHGVLALSFKSLDEEEKKIFLDIACLFLKMDITKEEVVDILKGCGLNAEAALRVLIQKSLLTILTDDTLWMHDQIRDMGRQMVHKESSDDPEMRSRLWDRGEIMNVLDYMKGTSSIRGIVLDFNKKFARDHTADEIFSSNLRNNPGIYSVFNYLKNKLVRFPAEEKPKRSEITIPVESFAPMKKLRLLQINNVELEGDLKLLPSELKWIQWKGFPLENLPPDILSRQLGVLDLSESGVRRVKTLPRKRGDENLKVVNLRGCHGLEAIPDLSNHNALEKLVLERCNLLVKVPRSVGNLGKLLQLDLRRCSSLSEFLGDVSGLKCLEKFFLSGCSNLSVLPENIGSMPCLKELLLDGTAISNLPYSIFRLQKLEKLSLMGCRSIEELPSCVGYLTSLEDLYLDDTALRNLPSSIGDLKNLQKLHLMRCTSLSTIPETINKLMSLKELFINGSAVEELPIETGSLLCLTDLSAGDCKFLKQVPSSIGGLNSLLQLQLDSTPIEALPEEIGDLHFIRQLDLRNCKSLKALPKTIGKMDTLYSLNLVGSNIEELPEEFGKLENLVELRMNNCKMLKRLPKSFGDLKSLHRLYMQETLVAELPESFGNLSNLMVLEMLKKPLFRISESNVPGTSEEPRFVEVPNSFSKLLKLEELDACSWRISGKIPDDLEKLSCLMKLNLGNNYFHSLPSSLVKLSNLQELSLRDCRELKRLPPLPCKLEQLNLANCFSLESVSDLSELTILTDLNLTNCAKVVDIPGLEHLTALKRLYMTGCNSNYSLAVKKRLSKASLKMMRNLSLPGNRVPDWFSQGPVTFSAQPNRELRGVIIAVVVALNDETEDDDYQLPDVMEVQAQIHKLDHHKCTNTLHLSGVPRTNNDQLHICRYSAFHPLVTMLKDGYTIQVIKRNPPIKQGVELKMHGIHLVYEGDDDLEGRENTLPEAQQTVSQKLANFFSSFEEGEASAKGDSTVA

SEQ ID NO: 73563 - protein, 1453 aa, Arabidopsis thaliana
  peptide (1)..(1453): Ceres Seq. ID no. 4972004
MVPIFYKVEPREVKEQNGPFEKDFEEHSKRFGEEKIQRWKGAMTTVGNISGFICGYEIQLEMETGVVPNRLKYSVFLSFRGFDTRTNFCERLYIALNEKQNVRVFRDNEGMEKGDKIDPSLFEAIEDSAASVIILSTNYANSSWCLDELALLCDLRSSLKRPMIPIFYGVNPEDVRKQSGEFRKDFEEKAKSFDEETIQRWKRAMNLVGNIPGYVCTAKTVGDDNEGINREKVDDMIDLVVKKVVAAVRNRPEIVADYTVGLESPIKDLMKLFNTESSSGIQVMGLYGMGGIGKTTLAKAFYNKIIVNFNRHRVFIESVRGKSSDQDGLVNLQKTLIKELFRLVPEIEDVSIGLEKIKENVHEKKIIVVLDDVDHIDQVNALVGETSWYGEGSLIVITTRDSEILSKLSVNQQYEVKCLTEPQALKLFSFYSLRKEKPPTQGLLELSKKIAEVTGLLPLAVKVFGSHFYDKDENEWQVELEKLKTQQDKLHGVLALSFKSLDEEEKKIFLDIACLFLKMDITKEEVVDILKGCGLNAEAALRVLIQKSLLTILTDDTLWMHDQIRDMGRQMVHKESSDDPEMRSRLWDRGEIMNVLDYMKGTSSIRGIVLDFNKKFARDHTADEIFSSNLRNNPGIYSVFNYLKNKLVRFPAEEKPKRSEITIPVESFAPMKKLRLLQINNVELEGDLKLLPSELKWIQWKGFPLENLPPDILSRQLGVLDLSESGVRRVKTLPRKRGDENLKVVNLRGCHGLEAIPDLSNHNALEKLVLERCNLLVKVPRSVGNLGKLLQLDLRRCSSLSEFLGDVSGLKCLEKFFLSGCSNLSVLPENIGSMPCLKELLLDGTAISNLPYSIFRLQKLEKLSLMGCRSIEELPSCVGYLTSLEDLYLDDTALRNLPSSIGDLKNLQKLHLMRCTSLSTIPETINKLMSLKELFINGSAVEELPIETGSLLCLTDLSAGDCKFLKQVPSSIGGLNSLLQLQLDSTPIEALPEEIGDLHFIRQLDLRNCKSLKALPKTIGKMDTLYSLNLVGSNIEELPEEFGKLENLVELRMNNCKMLKRLPKSFGDLKSLHRLYMQETLVAELPESFGNLSNLMVLEMLKKPLFRISESNVPGTSEEPRFVEVPNSFSKLLKLEELDACSWRISGKIPDDLEKLSCLMKLNLGNNYFHSLPSSLVKLSNLQELSLRDCRELKRLPPLPCKLEQLNLANCFSLESVSDLSELTILTDLNLTNCAKVVDIPGLEHLTALKRLYMTGCNSNYSLAVKKRLSKASLKMMRNLSLPGNRVPDWFSQGPVTFSAQPNRELRGVIIAVVVALNDETEDDDYQLPDVMEVQAQIHKLDHHKCTNTLHLSGVPRTNNDQLHICRYSAFHPLVTMLKDGYTIQVIKRNPPIKQGVELKMHGIHLVYEGDDDLEGRENTLPEAQQTVSQKLANFFSSFEEGEASAKGDSTVA

SEQ ID NO: 73564 - DNA, 2781 bp, Arabidopsis thaliana
  misc_feature (1)..(2781): Ceres Seq. ID no. 4972094
  misc_feature (1)..(2781): Ortholog of  Ceres SEQ ID NO 14309727 as cited in SEQ ID NO 1030
  misc_feature (1)..(2781): Ortholog of  Ceres SEQ ID NO 13581686 as cited in SEQ ID NO 57695
atgaagttatcgcctctgagtttctctacgagttcgagtttcagtcacgccgatggaatcgacgacggtgttgagttaatatcatctccatttgccggcggcgcaatgctgccggtttttctcaacgatttgagtcgtaacagtggagaatccggaagcggtagtagctgggaaagagagctcgtggaggttacgttagagctcgacgtcggcgatgactccatactcgtctgcggaatgtctgaggcggcgtctgttgattctcgggcgagatcggtggatttggtaaccgcgaggttatcgaggaatttatcgaatgcgtctacgagaatccgccagaaactagggaagttactgaggtcggaatcgtggaaaacgacgacgtcttctaccgccggcgagagagatagagatcttgaacgtcagacggcggtgactttggggattctgacggcgagggataaacggaaagaagacgcgaaactacagcgatcaacgtcgagtgcgcaaagagcgttaaaaggattacagtttataaataaaaccacgagaggaaatagctgcgtctgcgattgggattgcgattgcgatcagatgtggaaaaaagttgaaaagcgattcgaatcgctttctaaaaatggattactcgcccgagacgattttggcgagtgcgttgggatggtggattcgaaggactttgcggtgagtgtattcgacgcgttggctaggagaagaagacagaaactggagaagataacgaaagatgaacttcatgatttctggttacagatttctgaccaaagcttcgacgcacgtcttcaaattttcttcgacatggctgatagtaacgaagacgggaagatcactagagaagaaatcaaagaacttctaatgctaagtgcatcagcaaacaagttagcaaaactcaaggaacaagctgaagagtacgcatctctgatcatggaagagcttgatcctgagaattttggatacattgagttatggcaactcgagacactcttacttcagagagacgcatacatgaattacagtagaccacttagcacaacaagcggtggagtaaataactggcaaagaagctgggttcttttagtgtgggtcatgcttatggccatcctctttgtctggaagtttctagagtacagagaaaaagctgcgtttaaggtcatggggtattgtttaaccactgctaaaggagctgcagagactcttaagctcaacatggctctggttttattacctgtctgtagaaacacattgacttggctaagatctacacgcgctcgagcttgtgttccttttgatgacaacatcaatttccataagattattgcttgtgccatagcgattgggatacttgttcatgctggtactcatttggcgtgtgatttcccccggattataaactcgagtccagaacaatttgtcttgatcgcttctgccttcaatggtactaagcctacattcaaagacctgatgacaggtgcagaaggaatcaccgggatctcgatggtgatcttgacaaccattgcattcacattagcatcaactcatttcaggagaaaccgtgtgaggcttccggcaccacttgatcggttgactggctttaacgcattctggtacactcatcaccttctagtggttgtctacatcatgctcattgtccacgggaccttcctgttctttgctgataagtggtatcagaaaacgacttggatgtacatctcggttcctttggtgctctacgtggcagaacgaagtctgcgagcttgtaggtcaaagcattactctgtcaaaatcctcaaggtttccatgctacctggagaagtactcagcttaatcatgtcaaagcctcctggattcaagtacaagagcggtcagtacatattcttgcagtgtccaactatctctcgatttgaatggcacccattttctattacctctgcaccaggagatgaccaacttagtgttcacatccgaacactcggagactggacagaggagctacgacgagttctaactgtgggcaaagatctttcaacatgcgtgattgggcgttcaaaattctctgcctattgcaatattgatatgataaaccgaccaaaattactagtagacggtccatatggagctccagcacaggactacagaagctatgatgtcttgctcctcattggactgggaataggagctactcctttcataagcatcctgaaggatctgctgaacaattcaagagacgaacaaacagacaatgaattcagcagatcggatttcagctggaatagctgtacatcttcatataccacagcaaccccaacttcaacacatggagggaaaaagaaagcagtgaaggctcacttttactgggtcacaagggagccaggatccgttgaatggtttagaggagtaatggaggaaatatcagacatggactgcagaggccagattgagttgcacaactaccttacaagcgtatatgatgaaggtgatgcaagatcaaccctgataaaaatggtccaggctttgaaccatgccaaacatggagttgatattctatccggaacacgggtgagaacacattttgcaaggcccaactggaaggaagtcttcagtagcatagcaagaaagcatccaaattcgacagtcggagtgttttactgcggcatacaaaccgtggcaaaggagttgaagaagcaagcacaagacatgagtcaaaaaacaaccacacggttcgagttccataaggagcatttctaa

SEQ ID NO: 73565 - protein, 926 aa, Arabidopsis thaliana
  peptide (1)..(926): Ceres Seq. ID no. 4972095
MKLSPLSFSTSSSFSHADGIDDGVELISSPFAGGAMLPVFLNDLSRNSGESGSGSSWERELVEVTLELDVGDDSILVCGMSEAASVDSRARSVDLVTARLSRNLSNASTRIRQKLGKLLRSESWKTTTSSTAGERDRDLERQTAVTLGILTARDKRKEDAKLQRSTSSAQRALKGLQFINKTTRGNSCVCDWDCDCDQMWKKVEKRFESLSKNGLLARDDFGECVGMVDSKDFAVSVFDALARRRRQKLEKITKDELHDFWLQISDQSFDARLQIFFDMADSNEDGKITREEIKELLMLSASANKLAKLKEQAEEYASLIMEELDPENFGYIELWQLETLLLQRDAYMNYSRPLSTTSGGVNNWQRSWVLLVWVMLMAILFVWKFLEYREKAAFKVMGYCLTTAKGAAETLKLNMALVLLPVCRNTLTWLRSTRARACVPFDDNINFHKIIACAIAIGILVHAGTHLACDFPRIINSSPEQFVLIASAFNGTKPTFKDLMTGAEGITGISMVILTTIAFTLASTHFRRNRVRLPAPLDRLTGFNAFWYTHHLLVVVYIMLIVHGTFLFFADKWYQKTTWMYISVPLVLYVAERSLRACRSKHYSVKILKVSMLPGEVLSLIMSKPPGFKYKSGQYIFLQCPTISRFEWHPFSITSAPGDDQLSVHIRTLGDWTEELRRVLTVGKDLSTCVIGRSKFSAYCNIDMINRPKLLVDGPYGAPAQDYRSYDVLLLIGLGIGATPFISILKDLLNNSRDEQTDNEFSRSDFSWNSCTSSYTTATPTSTHGGKKKAVKAHFYWVTREPGSVEWFRGVMEEISDMDCRGQIELHNYLTSVYDEGDARSTLIKMVQALNHAKHGVDILSGTRVRTHFARPNWKEVFSSIARKHPNSTVGVFYCGIQTVAKELKKQAQDMSQKTTTRFEFHKEHF

SEQ ID NO: 73566 - protein, 891 aa, Arabidopsis thaliana
  peptide (1)..(891): Ceres Seq. ID no. 4972096
MLPVFLNDLSRNSGESGSGSSWERELVEVTLELDVGDDSILVCGMSEAASVDSRARSVDLVTARLSRNLSNASTRIRQKLGKLLRSESWKTTTSSTAGERDRDLERQTAVTLGILTARDKRKEDAKLQRSTSSAQRALKGLQFINKTTRGNSCVCDWDCDCDQMWKKVEKRFESLSKNGLLARDDFGECVGMVDSKDFAVSVFDALARRRRQKLEKITKDELHDFWLQISDQSFDARLQIFFDMADSNEDGKITREEIKELLMLSASANKLAKLKEQAEEYASLIMEELDPENFGYIELWQLETLLLQRDAYMNYSRPLSTTSGGVNNWQRSWVLLVWVMLMAILFVWKFLEYREKAAFKVMGYCLTTAKGAAETLKLNMALVLLPVCRNTLTWLRSTRARACVPFDDNINFHKIIACAIAIGILVHAGTHLACDFPRIINSSPEQFVLIASAFNGTKPTFKDLMTGAEGITGISMVILTTIAFTLASTHFRRNRVRLPAPLDRLTGFNAFWYTHHLLVVVYIMLIVHGTFLFFADKWYQKTTWMYISVPLVLYVAERSLRACRSKHYSVKILKVSMLPGEVLSLIMSKPPGFKYKSGQYIFLQCPTISRFEWHPFSITSAPGDDQLSVHIRTLGDWTEELRRVLTVGKDLSTCVIGRSKFSAYCNIDMINRPKLLVDGPYGAPAQDYRSYDVLLLIGLGIGATPFISILKDLLNNSRDEQTDNEFSRSDFSWNSCTSSYTTATPTSTHGGKKKAVKAHFYWVTREPGSVEWFRGVMEEISDMDCRGQIELHNYLTSVYDEGDARSTLIKMVQALNHAKHGVDILSGTRVRTHFARPNWKEVFSSIARKHPNSTVGVFYCGIQTVAKELKKQAQDMSQKTTTRFEFHKEHF

SEQ ID NO: 73567 - protein, 847 aa, Arabidopsis thaliana
  peptide (1)..(847): Ceres Seq. ID no. 4972097
MSEAASVDSRARSVDLVTARLSRNLSNASTRIRQKLGKLLRSESWKTTTSSTAGERDRDLERQTAVTLGILTARDKRKEDAKLQRSTSSAQRALKGLQFINKTTRGNSCVCDWDCDCDQMWKKVEKRFESLSKNGLLARDDFGECVGMVDSKDFAVSVFDALARRRRQKLEKITKDELHDFWLQISDQSFDARLQIFFDMADSNEDGKITREEIKELLMLSASANKLAKLKEQAEEYASLIMEELDPENFGYIELWQLETLLLQRDAYMNYSRPLSTTSGGVNNWQRSWVLLVWVMLMAILFVWKFLEYREKAAFKVMGYCLTTAKGAAETLKLNMALVLLPVCRNTLTWLRSTRARACVPFDDNINFHKIIACAIAIGILVHAGTHLACDFPRIINSSPEQFVLIASAFNGTKPTFKDLMTGAEGITGISMVILTTIAFTLASTHFRRNRVRLPAPLDRLTGFNAFWYTHHLLVVVYIMLIVHGTFLFFADKWYQKTTWMYISVPLVLYVAERSLRACRSKHYSVKILKVSMLPGEVLSLIMSKPPGFKYKSGQYIFLQCPTISRFEWHPFSITSAPGDDQLSVHIRTLGDWTEELRRVLTVGKDLSTCVIGRSKFSAYCNIDMINRPKLLVDGPYGAPAQDYRSYDVLLLIGLGIGATPFISILKDLLNNSRDEQTDNEFSRSDFSWNSCTSSYTTATPTSTHGGKKKAVKAHFYWVTREPGSVEWFRGVMEEISDMDCRGQIELHNYLTSVYDEGDARSTLIKMVQALNHAKHGVDILSGTRVRTHFARPNWKEVFSSIARKHPNSTVGVFYCGIQTVAKELKKQAQDMSQKTTTRFEFHKEHF

SEQ ID NO: 73568 - DNA, 1497 bp, Arabidopsis thaliana
  misc_feature (1)..(1497): Ceres Seq. ID no. 4972102
  misc_feature (1)..(1497): Ortholog of  Ceres SEQ ID NO 14301554 as cited in SEQ ID NO 66183
atggcttctaactatgataagcttacttcttcgagagtagccatcatcggtgctggtgttagcggattagcagccgctaagaacttagttcatcacaacccgaccgtattcgaagcctcggattcagtcggaggtgtttggaggagctgcacttacgagacgactaaattacaatcggctcgagtcgattacgagttctccgactttccatggcccaataatagagatgacacaactttcccaccttaccttgagatattagattacttggaatcttatgccaaacattttgatcttctcaaattcatgaagtttggctctaaggtcatcgaagtaaggttcatcggtgatggcgaaactcctcagatggttgaccttggtgcttacggcaacttgttgcccggaaaacctgtatgggaattcgtggttgtgtgtaccgggaaatacggcgacgttccaagaataccagcttttccggcaaagaaagggccggagatgtttcaaggaaaagtaatgcattcgatggattactgcaagttagagaaagaagaagcttctactctcctcagtggcaaaaaagtagccgtcatcggcttcaagaaatccgccattgatttggctttagagtctgctttagctaatcaaggggaaggaggaaaagcttgcacaatggtggtgagaacaactcattgggggatcccacattattgggtgtggggcttaccattcttcttgttctactcttcgagagcttctcagttcctccatgataggcctaaccaaagcttccttagaactctcttttgcctcctcttctctcttctgctacctcttgagaaatatggtctaaaaccaaaccattctttcgaggaagactatgcttcttgtcaaatggcgatcataccggagaatttctttgaggaagcggataaagggatgatccggtttaagaaatcatcaaaatggtggttttatgaagaagggattgtgtttgaagatgggacgacattagaagctgatgttgtgatacttgctactggttatgatggcaagaagaagctcaaagctattgttcctgaacctttccgaacttggcttgagtttccaagcggtgtcatgcctttatacaggggaacaatccatccattgataccaaacatgggtttcgtaggatacgtccaaagcagctcgaacttacacacatcagagctacgttcaatgtggctaagccggctagtggatgagaaattcagattaccaagcaaagagaagatgttggatcaattcttaaaagaaatggaagtgacgagaaactcaagcagattctacaaacgtcattgcatttccacgttcagcatccaacatgctgatgatatgtgcaacgacatgggactcaatccttggcgtaaatccaacttcctccttgaagcttttagtccttatggttctcaagattaccgactcggtcaagaagaaaaagaagatatgactgcttaa

SEQ ID NO: 73569 - protein, 498 aa, Arabidopsis thaliana
  peptide (1)..(498): Ceres Seq. ID no. 4972103
MASNYDKLTSSRVAIIGAGVSGLAAAKNLVHHNPTVFEASDSVGGVWRSCTYETTKLQSARVDYEFSDFPWPNNRDDTTFPPYLEILDYLESYAKHFDLLKFMKFGSKVIEVRFIGDGETPQMVDLGAYGNLLPGKPVWEFVVVCTGKYGDVPRIPAFPAKKGPEMFQGKVMHSMDYCKLEKEEASTLLSGKKVAVIGFKKSAIDLALESALANQGEGGKACTMVVRTTHWGIPHYWVWGLPFFLFYSSRASQFLHDRPNQSFLRTLFCLLFSLLLPLEKYGLKPNHSFEEDYASCQMAIIPENFFEEADKGMIRFKKSSKWWFYEEGIVFEDGTTLEADVVILATGYDGKKKLKAIVPEPFRTWLEFPSGVMPLYRGTIHPLIPNMGFVGYVQSSSNLHTSELRSMWLSRLVDEKFRLPSKEKMLDQFLKEMEVTRNSSRFYKRHCISTFSIQHADDMCNDMGLNPWRKSNFLLEAFSPYGSQDYRLGQEEKEDMTA

SEQ ID NO: 73570 - protein, 396 aa, Arabidopsis thaliana
  peptide (1)..(396): Ceres Seq. ID no. 4972104
MKFGSKVIEVRFIGDGETPQMVDLGAYGNLLPGKPVWEFVVVCTGKYGDVPRIPAFPAKKGPEMFQGKVMHSMDYCKLEKEEASTLLSGKKVAVIGFKKSAIDLALESALANQGEGGKACTMVVRTTHWGIPHYWVWGLPFFLFYSSRASQFLHDRPNQSFLRTLFCLLFSLLLPLEKYGLKPNHSFEEDYASCQMAIIPENFFEEADKGMIRFKKSSKWWFYEEGIVFEDGTTLEADVVILATGYDGKKKLKAIVPEPFRTWLEFPSGVMPLYRGTIHPLIPNMGFVGYVQSSSNLHTSELRSMWLSRLVDEKFRLPSKEKMLDQFLKEMEVTRNSSRFYKRHCISTFSIQHADDMCNDMGLNPWRKSNFLLEAFSPYGSQDYRLGQEEKEDMTA

SEQ ID NO: 73571 - protein, 376 aa, Arabidopsis thaliana
  peptide (1)..(376): Ceres Seq. ID no. 4972105
MVDLGAYGNLLPGKPVWEFVVVCTGKYGDVPRIPAFPAKKGPEMFQGKVMHSMDYCKLEKEEASTLLSGKKVAVIGFKKSAIDLALESALANQGEGGKACTMVVRTTHWGIPHYWVWGLPFFLFYSSRASQFLHDRPNQSFLRTLFCLLFSLLLPLEKYGLKPNHSFEEDYASCQMAIIPENFFEEADKGMIRFKKSSKWWFYEEGIVFEDGTTLEADVVILATGYDGKKKLKAIVPEPFRTWLEFPSGVMPLYRGTIHPLIPNMGFVGYVQSSSNLHTSELRSMWLSRLVDEKFRLPSKEKMLDQFLKEMEVTRNSSRFYKRHCISTFSIQHADDMCNDMGLNPWRKSNFLLEAFSPYGSQDYRLGQEEKEDMTA

SEQ ID NO: 73572 - DNA, 693 bp, Arabidopsis thaliana
  misc_feature (1)..(693): Ceres Seq. ID no. 4972116
  misc_feature (1)..(693): Ortholog of  Ceres SEQ ID NO 13595658 as cited in SEQ ID NO 59888
  misc_feature (1)..(693): Ortholog of  Ceres SEQ ID NO 13661330 as cited in SEQ ID NO 61614
  misc_feature (1)..(693): Ortholog of  Ceres SEQ ID NO 13596025 as cited in SEQ ID NO 62024
  misc_feature (1)..(693): Ortholog of  Ceres SEQ ID NO 13662324 as cited in SEQ ID NO 62162
  misc_feature (1)..(693): Ortholog of  Ceres SEQ ID NO 12625713 as cited in SEQ ID NO 64160
atggcgattttctccacatcacatcttctcttcatctccttcatcatagccacatgtacaatttctgtctccggtacaaccttcaccttaacaaaccattgcggctccacaatctggcctggaatcctcaccgcaaacggcgcacaactcggcgacggcggatttgccttagcttcaggatcttccgtaaccttcaccgtttctccaggctcaggtaaatgcggtaccggggactgcggcagcaagttaaaatgcgccggcgcaggaggagctccaccagccacactcgccgaattcacaatcggctcctccggaaagaaaaacgccgtgcaagatttttacgacgtgagcctcgtagatggttataacgttcagatgaaaatcacaccgcaaggtggctcaggggattgtaaaaccgcgggatgcgtttcggacgtgaacgcgatttgtccaaaagagctacaagttacgggcccatcgggtgttgcagcgtgtaagagtgcttgtgaggcttttaacaagccggagtattgttgcaccggcgcgtatagtacaccggcgacttgtccgcccacgaattactcgaagatatttaaacaagcttgtccgagtgcgtatagctatgcatacgatgatgcttccagtacttttacttgtactaatgctaattatgagatcagtttctgttcttag

SEQ ID NO: 73573 - protein, 230 aa, Arabidopsis thaliana
  peptide (1)..(230): Ceres Seq. ID no. 4972117
MAIFSTSHLLFISFIIATCTISVSGTTFTLTNHCGSTIWPGILTANGAQLGDGGFALASGSSVTFTVSPGSGKCGTGDCGSKLKCAGAGGAPPATLAEFTIGSSGKKNAVQDFYDVSLVDGYNVQMKITPQGGSGDCKTAGCVSDVNAICPKELQVTGPSGVAACKSACEAFNKPEYCCTGAYSTPATCPPTNYSKIFKQACPSAYSYAYDDASSTFTCTNANYEISFCS

SEQ ID NO: 73574 - DNA, 1371 bp, Arabidopsis thaliana
  misc_feature (1)..(1371): Ceres Seq. ID no. 4972157
  misc_feature (1)..(1371): Ortholog of  Ceres SEQ ID NO 15180386 as cited in SEQ ID NO 0
atggggctggttgtggaatcatgtgggcctcgttttaggaaaatatggcttgagatggtccatcgaactctggaaagagcaggtcctgcttttatcaaatggggtcaatgggcagccacgcgacctgatctattccccaaggatttgtgttcacagctctcaaagcttcacagtaatgctcctgagcatagcttcgcctacactaagaaaactatcgagaaggcatttggtcgtaaactttctgagatatttgaggagtttgatgaggtgccagtggcatctgggagtattgcccaagtacatagagcttctttaaggtttcagtatccaggacaaaagtccaagtcttcgctggttgcggttaaagttagacatccgggtgttggtgaatcgattaggagagattttgtgataattaatttggtggcaaagatatcgactttaattccagctttgaaatggttgagattggacgagagtgtgcaacagtttggtgtcttcatgttgtctcaagttgatctcgcgagggaagcttcacatttgagtcggttcatatataacttccgtagatggaaggatgtctctttccctaaacctgtgtatcctcttgtacatcctgctgttttggtggagacatatgagcatggagaaagtgtggcacgttatgttgatggaatggaaggacatgaatggattaagactagattggctcacatcgggacccatgccctcttgaagatgctcttggttgataactttattcacgctgacatgcatccgggaaatatccttgtccggaaaaaggcttcccgtggaggccttttcaaaacgaagaagcctcacattgttttccttgatgtgggaatgactgcagaacttgcaaagaatgaccgagagaacttacttgactttttcaaggcggttgcgcgtagagatggccggactgctgctgaacgaacacttaaattatcaagaaagcagaattgtcccaatccagaggcttttatcgaggaagtagaggaagcattcaaattctggggaacccctgagggagatttagtacatccagcagattgtatgcacgaattacttgagaaagtaagacgtcatagagtaaatattgatgggaatgtgtgcactgttatggtgacaacattagttctcgagaaagctaagcttattatagaaccagagcttaaagctgtagccattaaaactgtttttagcttagagaatggtttctatagccttggttggcaacggaaacttgacccaggatatgatgtgatgcacacgttgcaaacaatggtgttgaaaaccgactgggctaagtctctttcttatacggtggatggtctgatggcgccgtag

SEQ ID NO: 73575 - protein, 456 aa, Arabidopsis thaliana
  peptide (1)..(456): Ceres Seq. ID no. 4972158
MGLVVESCGPRFRKIWLEMVHRTLERAGPAFIKWGQWAATRPDLFPKDLCSQLSKLHSNAPEHSFAYTKKTIEKAFGRKLSEIFEEFDEVPVASGSIAQVHRASLRFQYPGQKSKSSLVAVKVRHPGVGESIRRDFVIINLVAKISTLIPALKWLRLDESVQQFGVFMLSQVDLAREASHLSRFIYNFRRWKDVSFPKPVYPLVHPAVLVETYEHGESVARYVDGMEGHEWIKTRLAHIGTHALLKMLLVDNFIHADMHPGNILVRKKASRGGLFKTKKPHIVFLDVGMTAELAKNDRENLLDFFKAVARRDGRTAAERTLKLSRKQNCPNPEAFIEEVEEAFKFWGTPEGDLVHPADCMHELLEKVRRHRVNIDGNVCTVMVTTLVLEKAKLIIEPELKAVAIKTVFSLENGFYSLGWQRKLDPGYDVMHTLQTMVLKTDWAKSLSYTVDGLMAP

SEQ ID NO: 73576 - protein, 438 aa, Arabidopsis thaliana
  peptide (1)..(438): Ceres Seq. ID no. 4972159
MVHRTLERAGPAFIKWGQWAATRPDLFPKDLCSQLSKLHSNAPEHSFAYTKKTIEKAFGRKLSEIFEEFDEVPVASGSIAQVHRASLRFQYPGQKSKSSLVAVKVRHPGVGESIRRDFVIINLVAKISTLIPALKWLRLDESVQQFGVFMLSQVDLAREASHLSRFIYNFRRWKDVSFPKPVYPLVHPAVLVETYEHGESVARYVDGMEGHEWIKTRLAHIGTHALLKMLLVDNFIHADMHPGNILVRKKASRGGLFKTKKPHIVFLDVGMTAELAKNDRENLLDFFKAVARRDGRTAAERTLKLSRKQNCPNPEAFIEEVEEAFKFWGTPEGDLVHPADCMHELLEKVRRHRVNIDGNVCTVMVTTLVLEKAKLIIEPELKAVAIKTVFSLENGFYSLGWQRKLDPGYDVMHTLQTMVLKTDWAKSLSYTVDGLMAP

SEQ ID NO: 73577 - protein, 289 aa, Arabidopsis thaliana
  peptide (1)..(289): Ceres Seq. ID no. 4972160
MLSQVDLAREASHLSRFIYNFRRWKDVSFPKPVYPLVHPAVLVETYEHGESVARYVDGMEGHEWIKTRLAHIGTHALLKMLLVDNFIHADMHPGNILVRKKASRGGLFKTKKPHIVFLDVGMTAELAKNDRENLLDFFKAVARRDGRTAAERTLKLSRKQNCPNPEAFIEEVEEAFKFWGTPEGDLVHPADCMHELLEKVRRHRVNIDGNVCTVMVTTLVLEKAKLIIEPELKAVAIKTVFSLENGFYSLGWQRKLDPGYDVMHTLQTMVLKTDWAKSLSYTVDGLMAP

SEQ ID NO: 73578 - DNA, 2523 bp, Arabidopsis thaliana
  misc_feature (1)..(2523): Ceres Seq. ID no. 4972161
  misc_feature (1)..(2523): Ortholog of  Ceres SEQ ID NO 13582534 as cited in SEQ ID NO 57409
  misc_feature (1)..(2523): Ortholog of  Ceres SEQ ID NO 13660544 as cited in SEQ ID NO 67401
atgaagttcttctttatctttttcattttcttgttctccttcttgattcaatcttgttactctgacaacacaatcttgagaagtcagtctttgaaagatggtgatgttatatactctgaaggaaagagatttgcttttggattcttcagcttggggaattcaaagctcaggtatgttgggatttggtatgctcaagtctctgagcagactattgtatgggttgcaaatagagatcatcctattaatgacacatctggtctgataaagttcagtaccagagggaatctttgtgtgtatgcatctggcaatggaacagagcctatttggtctactgatgttattgatatgatccaagaacctgctttagttgcgaagctatctgatttaggcaaccttgttctacttgatcctgtcacagggaaaagtttctgggagagctttaatcatcctacaaacactttgcttccctttatgaagtttggattcactcgtcaaagcggtgtggatcgtattatgacgtcttggagatctcctggtgacccgggttctggaaacattacataccggatagaacgtagagggtttccgcagatgatgatgtacaagggtctgactctttggtggcgtactgggtcatggacagggcaaagatggagtggtgtgcctgaaatgacaaacaagtttatcttcaatatctcgtttgtgaataatccagatgaagtatcaatcacttatggagtgttagatgcttcggttacaacaagaatggtgctaaacgagacaggaactctgcaacggtttcgctggaacgggagagataagaaatggatcgggttctggtcagctcccgaagataagtgtgacatctacaaccactgtggctttaacggttactgtgattccaccagtacagagaagtttgagtgctcttgcttaccggggtacgagcctaagacacctcgagattggttcttgagagatgcttcggatgggtgcacgaggataaaagcagattcgatatgtaatgggaaagaagggtttgcaaagttgaagcgagtgaagattcccaatacatcagctgttaatgtggatatgaacataacactgaaggaatgtgaacagaggtgcttgaagaactgctcatgtgttgcttatgcgagtgcttaccacgagagtcaagatggagctaaagggtgcttgacatggcacggcaatatgttggatactaggacatacttgagctcaggacaggatttctatttacgcgtagataagtcagacgcggtggaatggaaatggcgcatcggggaagaagagacttgttttaattctcatcagtttgattgcagtcgtgatgttactactgatcagttttcactgttatttaaggaagcgaagacaacgaacacgcttagaaaagctccatcaagcttcgctccgagctcttttgatcttgaagactcattcatacttgaagagcttgaggacaaatcaagaagccgggagttgcctctctttgagcttagcacgattgctacagcaacgaataattttgcttttcaaaacaagcttggagcaggtggttttggacctgtttataaaggtgtgttacaaaatggtatggaaatagcagtgaagaggttgtcaaaaagctcaggtcaaggaatggaagagttcaagaacgaggtcaagttgatatcgaagctgcagcatcgaaatctcgtgaggatcttaggatgttgtgttgaatttgaagagaagatgttggtatacgagtatttaccaaacaagagcctagactatttcatattccatgaagagcaaagagcagagttggattggccaaaaagaatggggataatccgcgggattggtcgtggaatcttataccttcatcaagattcaaggctgaggatcatccacagagaccttaaggccagcaatgtacttcttgacaatgaaatgataccgaagattgcggatttcggcctggctagaatcttcggaggcaaccaaatcgaaggaagcacaaatcgagtcgtcggaacatatggatacatgtcaccagagtatgcaatggacggccagttctctattaaatccgatgtatacagctttggagtattgatcttagagatcataaccggaaagagaaacagtgctttttatgaggaatctttgaatctagtcaaacatatttgggatcgatgggaaaatggtgaagctatagagatcatagacaaattaatgggtgaagagacgtatgatgagggcgaagtaatgaagtgcttacacattgggttactttgcgtgcaagaaaactcttcagacagaccagacatgtcctctgttgtcttcatgttaggtcataacgccattgatcttccatctccgaagcatcctgcatttacggcgggaaggaggagaaacaccaaaactggcggcagctcagataattggcccagcggagaaaccagcagtactattaacgacgttactctcaccgatgttcaaggtcgttaa

SEQ ID NO: 73579 - protein, 840 aa, Arabidopsis thaliana
  peptide (1)..(840): Ceres Seq. ID no. 4972162
MKFFFIFFIFLFSFLIQSCYSDNTILRSQSLKDGDVIYSEGKRFAFGFFSLGNSKLRYVGIWYAQVSEQTIVWVANRDHPINDTSGLIKFSTRGNLCVYASGNGTEPIWSTDVIDMIQEPALVAKLSDLGNLVLLDPVTGKSFWESFNHPTNTLLPFMKFGFTRQSGVDRIMTSWRSPGDPGSGNITYRIERRGFPQMMMYKGLTLWWRTGSWTGQRWSGVPEMTNKFIFNISFVNNPDEVSITYGVLDASVTTRMVLNETGTLQRFRWNGRDKKWIGFWSAPEDKCDIYNHCGFNGYCDSTSTEKFECSCLPGYEPKTPRDWFLRDASDGCTRIKADSICNGKEGFAKLKRVKIPNTSAVNVDMNITLKECEQRCLKNCSCVAYASAYHESQDGAKGCLTWHGNMLDTRTYLSSGQDFYLRVDKSDAVEWKWRIGEEETCFNSHQFDCSRDVTTDQFSLLFKEAKTTNTLRKAPSSFAPSSFDLEDSFILEELEDKSRSRELPLFELSTIATATNNFAFQNKLGAGGFGPVYKGVLQNGMEIAVKRLSKSSGQGMEEFKNEVKLISKLQHRNLVRILGCCVEFEEKMLVYEYLPNKSLDYFIFHEEQRAELDWPKRMGIIRGIGRGILYLHQDSRLRIIHRDLKASNVLLDNEMIPKIADFGLARIFGGNQIEGSTNRVVGTYGYMSPEYAMDGQFSIKSDVYSFGVLILEIITGKRNSAFYEESLNLVKHIWDRWENGEAIEIIDKLMGEETYDEGEVMKCLHIGLLCVQENSSDRPDMSSVVFMLGHNAIDLPSPKHPAFTAGRRRNTKTGGSSDNWPSGETSSTINDVTLTDVQGR

SEQ ID NO: 73580 - protein, 725 aa, Arabidopsis thaliana
  peptide (1)..(725): Ceres Seq. ID no. 4972163
MIQEPALVAKLSDLGNLVLLDPVTGKSFWESFNHPTNTLLPFMKFGFTRQSGVDRIMTSWRSPGDPGSGNITYRIERRGFPQMMMYKGLTLWWRTGSWTGQRWSGVPEMTNKFIFNISFVNNPDEVSITYGVLDASVTTRMVLNETGTLQRFRWNGRDKKWIGFWSAPEDKCDIYNHCGFNGYCDSTSTEKFECSCLPGYEPKTPRDWFLRDASDGCTRIKADSICNGKEGFAKLKRVKIPNTSAVNVDMNITLKECEQRCLKNCSCVAYASAYHESQDGAKGCLTWHGNMLDTRTYLSSGQDFYLRVDKSDAVEWKWRIGEEETCFNSHQFDCSRDVTTDQFSLLFKEAKTTNTLRKAPSSFAPSSFDLEDSFILEELEDKSRSRELPLFELSTIATATNNFAFQNKLGAGGFGPVYKGVLQNGMEIAVKRLSKSSGQGMEEFKNEVKLISKLQHRNLVRILGCCVEFEEKMLVYEYLPNKSLDYFIFHEEQRAELDWPKRMGIIRGIGRGILYLHQDSRLRIIHRDLKASNVLLDNEMIPKIADFGLARIFGGNQIEGSTNRVVGTYGYMSPEYAMDGQFSIKSDVYSFGVLILEIITGKRNSAFYEESLNLVKHIWDRWENGEAIEIIDKLMGEETYDEGEVMKCLHIGLLCVQENSSDRPDMSSVVFMLGHNAIDLPSPKHPAFTAGRRRNTKTGGSSDNWPSGETSSTINDVTLTDVQGR

SEQ ID NO: 73581 - protein, 683 aa, Arabidopsis thaliana
  peptide (1)..(683): Ceres Seq. ID no. 4972164
MKFGFTRQSGVDRIMTSWRSPGDPGSGNITYRIERRGFPQMMMYKGLTLWWRTGSWTGQRWSGVPEMTNKFIFNISFVNNPDEVSITYGVLDASVTTRMVLNETGTLQRFRWNGRDKKWIGFWSAPEDKCDIYNHCGFNGYCDSTSTEKFECSCLPGYEPKTPRDWFLRDASDGCTRIKADSICNGKEGFAKLKRVKIPNTSAVNVDMNITLKECEQRCLKNCSCVAYASAYHESQDGAKGCLTWHGNMLDTRTYLSSGQDFYLRVDKSDAVEWKWRIGEEETCFNSHQFDCSRDVTTDQFSLLFKEAKTTNTLRKAPSSFAPSSFDLEDSFILEELEDKSRSRELPLFELSTIATATNNFAFQNKLGAGGFGPVYKGVLQNGMEIAVKRLSKSSGQGMEEFKNEVKLISKLQHRNLVRILGCCVEFEEKMLVYEYLPNKSLDYFIFHEEQRAELDWPKRMGIIRGIGRGILYLHQDSRLRIIHRDLKASNVLLDNEMIPKIADFGLARIFGGNQIEGSTNRVVGTYGYMSPEYAMDGQFSIKSDVYSFGVLILEIITGKRNSAFYEESLNLVKHIWDRWENGEAIEIIDKLMGEETYDEGEVMKCLHIGLLCVQENSSDRPDMSSVVFMLGHNAIDLPSPKHPAFTAGRRRNTKTGGSSDNWPSGETSSTINDVTLTDVQGR

SEQ ID NO: 73582 - DNA, 1704 bp, Arabidopsis thaliana
  misc_feature (1)..(1704): Ceres Seq. ID no. 4972268
  misc_feature (1)..(1704): Ortholog of  Ceres SEQ ID NO 13659971 as cited in SEQ ID NO 67565
  misc_feature (1)..(1704): Ortholog of  Ceres SEQ ID NO 13500385 as cited in SEQ ID NO 67583
atgggtaattgtatcgcctgcgtcaagtttgacccagacaactcaaaaccaaaccagaagaagaaacctccacggggacggcaacgaaacccatacgacgatcccgatggtttaagaactcacgcaccgttacgtgtgattcctatgagccatcaatctcagatcagcgacaagtacatcttaggacgagaactcggtcgcggcgaattcggaatcacgtatctttgtacagatagagagactcgtgaagctttagcttgcaaatcaatctccaagagaaagctccgaaccgccgtcgatgtggaagacgtccgtcgtgaagtcacgatcatgtcaactttaccggaacacccaaacgttgtgaaacttaaagcgacttatgaggataacgagaacgtgcatcttgtgatggagctttgtgaaggaggtgagctttttgatcggattgttgccagaggacattatacagagcgtgcggcggctaccgtcgcgagaacgatcgcggaggttgtgaggatgtgtcatgtcaatggtgttatgcatagagatttgaagcctgagaatttcttgtttgctaacaagaaggagaattctgcacttaaggctattgattttggtttatctgttctctttaaacctggagagaggtttacagagattgttggaagtccttattatatggctccagaagtgttgaagagaaattatggaccagaggttgatgtgtggagtgctggagttatcctctacatcttgctttgtggtgttcctccgttttgggcagagactgaacaaggtgtggctcttgccatcttgaggggagttcttgattttaagagagatccttggtcgcagatatcagagagcgcaaagagccttgtgaagcagatgttggaacctgattcaactaagcgtttgactgctcagcaagttcttggtaataatgctgttcttgtgtcacttatggagaaaatggcatttaaagtgaaaacggtttctgtttccttctttgcagatcacccttggatacagaatgcaaagaaagctccaaatgttcctttaggggatattgttaggtcaaggttgaagcaattctccatgatgaatagattgaaaaagaaagctctgcgtgttatcgccgaacacttgtctattcaagaagttgaagtgatcagaaacatgtttacgctgatggatgatgacaacgacggtaaaatatcatatctagaactcagagctggactccggaaagtcggttcacaactgggtgaaccagagatcaaattgttaatggaagtggcggatgttaatggaaatggatgcttggactatggagagtttgtagcagtgataattcacttgcagaagatggagaatgatgagcatttcagacaagcttttatgttctttgacaaagatggaagtggatacatcgaatcagaagaactacgtgaagctttaaccgacgagttaggtgaaccagacaacagtgttataatcgatataatgcgtgaagtcgacactgacaaggacggaaaaataaactatgatgagtttgtggtgatgatgaaagctggaactgattggagaaaggcatcaagacaatactcaagagagaggtttaaaagcttaagcttaaacttgatgaaagacgggtcaatgcatctacacgacgcactcactggacaatctattgcagtttga

SEQ ID NO: 73583 - protein, 567 aa, Arabidopsis thaliana
  peptide (1)..(567): Ceres Seq. ID no. 4972269
MGNCIACVKFDPDNSKPNQKKKPPRGRQRNPYDDPDGLRTHAPLRVIPMSHQSQISDKYILGRELGRGEFGITYLCTDRETREALACKSISKRKLRTAVDVEDVRREVTIMSTLPEHPNVVKLKATYEDNENVHLVMELCEGGELFDRIVARGHYTERAAATVARTIAEVVRMCHVNGVMHRDLKPENFLFANKKENSALKAIDFGLSVLFKPGERFTEIVGSPYYMAPEVLKRNYGPEVDVWSAGVILYILLCGVPPFWAETEQGVALAILRGVLDFKRDPWSQISESAKSLVKQMLEPDSTKRLTAQQVLGNNAVLVSLMEKMAFKVKTVSVSFFADHPWIQNAKKAPNVPLGDIVRSRLKQFSMMNRLKKKALRVIAEHLSIQEVEVIRNMFTLMDDDNDGKISYLELRAGLRKVGSQLGEPEIKLLMEVADVNGNGCLDYGEFVAVIIHLQKMENDEHFRQAFMFFDKDGSGYIESEELREALTDELGEPDNSVIIDIMREVDTDKDGKINYDEFVVMMKAGTDWRKASRQYSRERFKSLSLNLMKDGSMHLHDALTGQSIAV

SEQ ID NO: 73584 - protein, 519 aa, Arabidopsis thaliana
  peptide (1)..(519): Ceres Seq. ID no. 4972270
MSHQSQISDKYILGRELGRGEFGITYLCTDRETREALACKSISKRKLRTAVDVEDVRREVTIMSTLPEHPNVVKLKATYEDNENVHLVMELCEGGELFDRIVARGHYTERAAATVARTIAEVVRMCHVNGVMHRDLKPENFLFANKKENSALKAIDFGLSVLFKPGERFTEIVGSPYYMAPEVLKRNYGPEVDVWSAGVILYILLCGVPPFWAETEQGVALAILRGVLDFKRDPWSQISESAKSLVKQMLEPDSTKRLTAQQVLGNNAVLVSLMEKMAFKVKTVSVSFFADHPWIQNAKKAPNVPLGDIVRSRLKQFSMMNRLKKKALRVIAEHLSIQEVEVIRNMFTLMDDDNDGKISYLELRAGLRKVGSQLGEPEIKLLMEVADVNGNGCLDYGEFVAVIIHLQKMENDEHFRQAFMFFDKDGSGYIESEELREALTDELGEPDNSVIIDIMREVDTDKDGKINYDEFVVMMKAGTDWRKASRQYSRERFKSLSLNLMKDGSMHLHDALTGQSIAV

SEQ ID NO: 73585 - protein, 457 aa, Arabidopsis thaliana
  peptide (1)..(457): Ceres Seq. ID no. 4972271
MSTLPEHPNVVKLKATYEDNENVHLVMELCEGGELFDRIVARGHYTERAAATVARTIAEVVRMCHVNGVMHRDLKPENFLFANKKENSALKAIDFGLSVLFKPGERFTEIVGSPYYMAPEVLKRNYGPEVDVWSAGVILYILLCGVPPFWAETEQGVALAILRGVLDFKRDPWSQISESAKSLVKQMLEPDSTKRLTAQQVLGNNAVLVSLMEKMAFKVKTVSVSFFADHPWIQNAKKAPNVPLGDIVRSRLKQFSMMNRLKKKALRVIAEHLSIQEVEVIRNMFTLMDDDNDGKISYLELRAGLRKVGSQLGEPEIKLLMEVADVNGNGCLDYGEFVAVIIHLQKMENDEHFRQAFMFFDKDGSGYIESEELREALTDELGEPDNSVIIDIMREVDTDKDGKINYDEFVVMMKAGTDWRKASRQYSRERFKSLSLNLMKDGSMHLHDALTGQSIAV

SEQ ID NO: 73586 - DNA, 2097 bp, Arabidopsis thaliana
  misc_feature (1)..(2097): Ceres Seq. ID no. 4972347
  misc_feature (1)..(2097): Ortholog of  Ceres SEQ ID NO 14311609 as cited in SEQ ID NO 58341
atgaaaaatcttgttcaagaaatgatcaaagctgttaaggctgttgttaagtgcggatctttcccaaccaagaggaagatcccattcacgagccatgctgttgcatctgcggcgaggaagctcgaagctgacgaaggatatgacaagaaggttgcaacggtgtttcattatttgaagaagaaatatggagccattaggaaatctgtgacgacaatctcattcaatagcaagtacatacagaagaagaagggtggaaagaatgaaaaggtggagggatcaccgagaagtcctcgacctgaaaccatagataaagaagagaaatttgggaggagaagtttggattctttatctggtaatgatctcttactcggtagaagaatatatgcaagtgaagtttccaaggctcaaggatctaagcatgatcaaagcagtggtagtagcaacaaattttggaagaagcaacattcatggcttcgtaggaactttaagtcgatagttttgatgatctcagtcaccggtttcattttctgtatggattccattatggtttcgatctttcattccgatagtagagccgtggtgcaagacatttcaaggttgagcaatatgactttgcataagaatggagcagtagatgcttcaccagttcaaatgtatagccgtcttctaaacttagcttcggattctcttgcaaagaatgaattcaaacccgatacaccaaacttccgggaggaaagatcttcaaagtcatcacagtggaagccttgtgcagataataacaaagcagctgtggcattagagaggtctagagaattaagcaatggttacatcatggttagtgcaaatggaggccttaatcaacagcgcgtggctatctgtaacgctgttgcggttgctgctctgctcaacgcgactctagttcttcctcggtttctttacagcaatgtatggaaagatcctagccaatttggtgatatataccaagaggatcattttatcgagtatctgaaagatgaggtgaatatagtgaagaatcttcctcaacatctaaaatctactgataacaagaatctcagcttggttactgatacggagcttgtaaaagaggcaacaccagtcgattacatcgaacatgttcttcctttgttaaagaagtatggaatggttcatcttttcggatacgggaatcgcctcgggtttgatccattgccttttgacgttcagagattacgatgtaaatgcaactttcacgcgctgaaattcgcgcccaagattcaagaagcgggatctctgttggtgaaacggataagaagattcaaaacatcgcgtagcagattggaagaagcattacttggtgaatccatggtgaaaagtactgttaaaggagaagaagaaccgttgaagtatcttgctttgcatctaaggtttgaagaagacatggttgcttattctctatgcgattttggaggaggagaagccgagcgcaaagagcttcaagcttaccgtgaagatcatttccctcttctactcaaacgtttgaagaaatcaaagccagtgtccccagaagagttaagaaaaacgggcaagtgtccactaacaccagaggaagcaactctggttcttgctggtcttggattcaagagaaaaacatatatttacttagctggatctcaaatctatggaggctcttctcgtatgcttcctttaacaagactgtacccgaatatcgcgaccaaagaaactctccttacacctcaagaacttgcgccattcaagaacttctcttctcagctagctgcactagatttcatagcttgtatagcatcagatgtctttgcaatgactgattctgggagtcaactatcatccttagtgtctggatttagaaactactacggaaacggtcaggcaccaacattgagacctaacaagaagaggcttgcagcaatcttatcagacagtgaaacaataaagtggaagatttttgaagatcgtgtgagaaaaatggtagaggaaggccaaaagcttcgtactaggccttatggacgcagcatttatagacaaccgagatgtcctgagtgtatgtgtaaattttga

SEQ ID NO: 73587 - protein, 698 aa, Arabidopsis thaliana
  peptide (1)..(698): Ceres Seq. ID no. 4972348
MKNLVQEMIKAVKAVVKCGSFPTKRKIPFTSHAVASAARKLEADEGYDKKVATVFHYLKKKYGAIRKSVTTISFNSKYIQKKKGGKNEKVEGSPRSPRPETIDKEEKFGRRSLDSLSGNDLLLGRRIYASEVSKAQGSKHDQSSGSSNKFWKKQHSWLRRNFKSIVLMISVTGFIFCMDSIMVSIFHSDSRAVVQDISRLSNMTLHKNGAVDASPVQMYSRLLNLASDSLAKNEFKPDTPNFREERSSKSSQWKPCADNNKAAVALERSRELSNGYIMVSANGGLNQQRVAICNAVAVAALLNATLVLPRFLYSNVWKDPSQFGDIYQEDHFIEYLKDEVNIVKNLPQHLKSTDNKNLSLVTDTELVKEATPVDYIEHVLPLLKKYGMVHLFGYGNRLGFDPLPFDVQRLRCKCNFHALKFAPKIQEAGSLLVKRIRRFKTSRSRLEEALLGESMVKSTVKGEEEPLKYLALHLRFEEDMVAYSLCDFGGGEAERKELQAYREDHFPLLLKRLKKSKPVSPEELRKTGKCPLTPEEATLVLAGLGFKRKTYIYLAGSQIYGGSSRMLPLTRLYPNIATKETLLTPQELAPFKNFSSQLAALDFIACIASDVFAMTDSGSQLSSLVSGFRNYYGNGQAPTLRPNKKRLAAILSDSETIKWKIFEDRVRKMVEEGQKLRTRPYGRSIYRQPRCPECMCKF

SEQ ID NO: 73588 - protein, 691 aa, Arabidopsis thaliana
  peptide (1)..(691): Ceres Seq. ID no. 4972349
MIKAVKAVVKCGSFPTKRKIPFTSHAVASAARKLEADEGYDKKVATVFHYLKKKYGAIRKSVTTISFNSKYIQKKKGGKNEKVEGSPRSPRPETIDKEEKFGRRSLDSLSGNDLLLGRRIYASEVSKAQGSKHDQSSGSSNKFWKKQHSWLRRNFKSIVLMISVTGFIFCMDSIMVSIFHSDSRAVVQDISRLSNMTLHKNGAVDASPVQMYSRLLNLASDSLAKNEFKPDTPNFREERSSKSSQWKPCADNNKAAVALERSRELSNGYIMVSANGGLNQQRVAICNAVAVAALLNATLVLPRFLYSNVWKDPSQFGDIYQEDHFIEYLKDEVNIVKNLPQHLKSTDNKNLSLVTDTELVKEATPVDYIEHVLPLLKKYGMVHLFGYGNRLGFDPLPFDVQRLRCKCNFHALKFAPKIQEAGSLLVKRIRRFKTSRSRLEEALLGESMVKSTVKGEEEPLKYLALHLRFEEDMVAYSLCDFGGGEAERKELQAYREDHFPLLLKRLKKSKPVSPEELRKTGKCPLTPEEATLVLAGLGFKRKTYIYLAGSQIYGGSSRMLPLTRLYPNIATKETLLTPQELAPFKNFSSQLAALDFIACIASDVFAMTDSGSQLSSLVSGFRNYYGNGQAPTLRPNKKRLAAILSDSETIKWKIFEDRVRKMVEEGQKLRTRPYGRSIYRQPRCPECMCKF

SEQ ID NO: 73589 - protein, 531 aa, Arabidopsis thaliana
  peptide (1)..(531): Ceres Seq. ID no. 4972350
MISVTGFIFCMDSIMVSIFHSDSRAVVQDISRLSNMTLHKNGAVDASPVQMYSRLLNLASDSLAKNEFKPDTPNFREERSSKSSQWKPCADNNKAAVALERSRELSNGYIMVSANGGLNQQRVAICNAVAVAALLNATLVLPRFLYSNVWKDPSQFGDIYQEDHFIEYLKDEVNIVKNLPQHLKSTDNKNLSLVTDTELVKEATPVDYIEHVLPLLKKYGMVHLFGYGNRLGFDPLPFDVQRLRCKCNFHALKFAPKIQEAGSLLVKRIRRFKTSRSRLEEALLGESMVKSTVKGEEEPLKYLALHLRFEEDMVAYSLCDFGGGEAERKELQAYREDHFPLLLKRLKKSKPVSPEELRKTGKCPLTPEEATLVLAGLGFKRKTYIYLAGSQIYGGSSRMLPLTRLYPNIATKETLLTPQELAPFKNFSSQLAALDFIACIASDVFAMTDSGSQLSSLVSGFRNYYGNGQAPTLRPNKKRLAAILSDSETIKWKIFEDRVRKMVEEGQKLRTRPYGRSIYRQPRCPECMCKF

SEQ ID NO: 73590 - DNA, 1653 bp, Arabidopsis thaliana
  misc_feature (1)..(1653): Ceres Seq. ID no. 4972355
  misc_feature (1)..(1653): Ortholog of  Ceres SEQ ID NO 13648571 as cited in SEQ ID NO 197
  misc_feature (1)..(1653): Ortholog of  Ceres SEQ ID NO 15171446 as cited in SEQ ID NO 51590
atggcgtatcctgagagatctctcattgttgatcctagaagtggtttctgcaaatcaaactctacattctatagcaagcgccaaccattaagtctcccgccaaatctttcgcgtgacgtcaccacattcatctcctctcagccacaccgtggcaaaaccgcctttatcgacgctgccacaggccagtgcttaaccttctccgatctctggagagccgtcgatcgcgtcgccgactgtctatatcatgaagtcggaatacgaagaggcgacgtcgtcctcatcctttctccaaactccatcttcattcccgttgtttgcctctccgtcatgtctctcggcgccgttttcaccaccgccaacactctcaatacttccggtgaaatctccaaacagattgccgacagtaatccaactctcgtcttcactacgcgccagctggcaccaaaactccccgtcgctatctccgtcgttctcaccgacgacgaagtttaccaggagctcactagcgcaatcagagtcgttgggattttaagcgagatggtgaagaaagaaccgagtgggcaacgagtcagggaccgagtcaaccaggacgacacggcgatgatgctttactcgtcgggaaccacgggaccgagcaaaggagtgatctcgtctcaccggaatttaacagctcacgtggctagattcatatcggataatttgaaacgagacgatattttcatctgtaccgtcccgatgttccacacctacggtttattgaccttcgctatgggcaccgtagcattgggttcaacggtggtgatcctccggagatttcagctccacgatatgatggatgcggtggagaagcaccgagccacagctctggctttggcgccacctgttttggtagctatgattaacgacgcagatctgatcaaggctaagtacgatctgagctcactgaaaacggtgaggtgtggtggagcgccgttgagcaaggaggtgacggaagggtttctagagaaatatccgacggttgatatactgcaggggtatgctttgacggaatccaacggcggaggggctttcacgaattcagcggaggagagccggagatatggcacggcggggacgttgacgtctgatgtggaggcgaggatcgtggatccgaatacgggtcggttcatgggaattaaccaaacgggagagctctggctcaagggcccttctatttctaaaggttattttaaaaaccaagaagctacaaatgaaaccattaatttagagggatggctaaaaactggagatctttgctacatcgatgaagatgggtttctttttgttgtggatcgattgaaagaactgataaaatacaaaggctatcaggtgcctccagctgaactagaagctcttctgattactcatccggacattctcgatgccgccgttattccttttccggacaaagaagcaggacaatatccaatggcttacgtggttcgaaaacacgagagcaatctctctgagaaacaagtcattgacttcatctctaagcaggtagcaccatataagaagataagaaaggtctcatttataaactccataccaaaaactgcatccggtaagacgcttcgcaaggatctaatcaaattggctacttctaaactttga

SEQ ID NO: 73591 - protein, 550 aa, Arabidopsis thaliana
  peptide (1)..(550): Ceres Seq. ID no. 4972356
MAYPERSLIVDPRSGFCKSNSTFYSKRQPLSLPPNLSRDVTTFISSQPHRGKTAFIDAATGQCLTFSDLWRAVDRVADCLYHEVGIRRGDVVLILSPNSIFIPVVCLSVMSLGAVFTTANTLNTSGEISKQIADSNPTLVFTTRQLAPKLPVAISVVLTDDEVYQELTSAIRVVGILSEMVKKEPSGQRVRDRVNQDDTAMMLYSSGTTGPSKGVISSHRNLTAHVARFISDNLKRDDIFICTVPMFHTYGLLTFAMGTVALGSTVVILRRFQLHDMMDAVEKHRATALALAPPVLVAMINDADLIKAKYDLSSLKTVRCGGAPLSKEVTEGFLEKYPTVDILQGYALTESNGGGAFTNSAEESRRYGTAGTLTSDVEARIVDPNTGRFMGINQTGELWLKGPSISKGYFKNQEATNETINLEGWLKTGDLCYIDEDGFLFVVDRLKELIKYKGYQVPPAELEALLITHPDILDAAVIPFPDKEAGQYPMAYVVRKHESNLSEKQVIDFISKQVAPYKKIRKVSFINSIPKTASGKTLRKDLIKLATSKL

SEQ ID NO: 73592 - protein, 441 aa, Arabidopsis thaliana
  peptide (1)..(441): Ceres Seq. ID no. 4972357
MSLGAVFTTANTLNTSGEISKQIADSNPTLVFTTRQLAPKLPVAISVVLTDDEVYQELTSAIRVVGILSEMVKKEPSGQRVRDRVNQDDTAMMLYSSGTTGPSKGVISSHRNLTAHVARFISDNLKRDDIFICTVPMFHTYGLLTFAMGTVALGSTVVILRRFQLHDMMDAVEKHRATALALAPPVLVAMINDADLIKAKYDLSSLKTVRCGGAPLSKEVTEGFLEKYPTVDILQGYALTESNGGGAFTNSAEESRRYGTAGTLTSDVEARIVDPNTGRFMGINQTGELWLKGPSISKGYFKNQEATNETINLEGWLKTGDLCYIDEDGFLFVVDRLKELIKYKGYQVPPAELEALLITHPDILDAAVIPFPDKEAGQYPMAYVVRKHESNLSEKQVIDFISKQVAPYKKIRKVSFINSIPKTASGKTLRKDLIKLATSKL

SEQ ID NO: 73593 - protein, 371 aa, Arabidopsis thaliana
  peptide (1)..(371): Ceres Seq. ID no. 4972358
MVKKEPSGQRVRDRVNQDDTAMMLYSSGTTGPSKGVISSHRNLTAHVARFISDNLKRDDIFICTVPMFHTYGLLTFAMGTVALGSTVVILRRFQLHDMMDAVEKHRATALALAPPVLVAMINDADLIKAKYDLSSLKTVRCGGAPLSKEVTEGFLEKYPTVDILQGYALTESNGGGAFTNSAEESRRYGTAGTLTSDVEARIVDPNTGRFMGINQTGELWLKGPSISKGYFKNQEATNETINLEGWLKTGDLCYIDEDGFLFVVDRLKELIKYKGYQVPPAELEALLITHPDILDAAVIPFPDKEAGQYPMAYVVRKHESNLSEKQVIDFISKQVAPYKKIRKVSFINSIPKTASGKTLRKDLIKLATSKL

SEQ ID NO: 73594 - DNA, 1593 bp, Arabidopsis thaliana
  misc_feature (1)..(1593): Ceres Seq. ID no. 4972359
  misc_feature (1)..(1593): Ortholog of  Ceres SEQ ID NO 13648571 as cited in SEQ ID NO 197
atggcgtatcctgagagagatctcattgttgatcctagaagcggtttctgcaaatcaaactctacattctatagcaagcgaaacccattatgtctcccgccaaatccgtcgcttgacgtcacaactttcatatcatctcaaccgcaacgcggcaccaccgccttcatcgacgcctccacgggccaccgcttaaccttctccgatctctggagagtcgttgatcgcgtcgctgactgtctatatcatgaagtcggaatacgaagaggcgacgtcgtcctcatcctctctccaaattcaatctacattcccgtcgtttgcctctccgtcatgtctctcggcgccgtcgtcaccaccgccaacactctcaacacctccggcgaaatctccaaacagatcgcccaaagtaatccaactctcgtcttcaccacgagccagctggcacccaaactcgcagccgcaatctccgtcgtcctcaccgacgaagaagacgagaagcgagtggagctcactagtggagtcagagtcgttgggattttgagcgagatgatgaagaaagaaacgagtggtcaacgagtcagagaccgagtcaaccaggacgacacggcgatgatgctttactcgtcgggaaccacagggacgagcaaaggagtgatctcgtctcaccggaatttaacagcttacgttgcgaaatacatcgacgataaatggaaacgagacgagatattcgtatgtaccgtgccgatgttccactccttcgggttattggcgttcgcaatgggctccgtagcatcgggttcaacggtggtgattctccggagattcgggctcgacgatatgatgcaagcggtggagaagtacaaagccacgattctgagtttggctccaccggttttggtagctatgattaacggtgcagatcagctcaaggccaagtacgatttgacctccctgagaaaggttaggtgtggtggagcaccgttgagcaaggaggttatggatagcttcctagagaaatatccaacggttaatatttttcaaggatatgcgttgactgagtcgcacggttcaggagcttcgacggaatctgtggaggagagtctgaaatacggtgcggttgggttgttgtcgtccggtattgaagcgaggattgtggatccggatacgggtcgggtcatgggtgtgaaccaacccggtgagctctggctcaagggtccttctatttctaaagatctctgctatatcgatgaagatgggtttctatttgttgtggatcgactgaaagaattgatcaaatacaaaggctatcaggtgcctccagctgaactagaggctcttttgatcgctcatccacacattcttgatgctgctgttattccgtttccggatagagaagccggacaatatccgatggcttatgtagcccgaaagcccgagagcaatctctccgaaaaagaagttattgacttcatctctaatcaggtggcaccgtataagaaaataagaaaggttgcattcataagttccataccaaagactgcatccggcaaaacacttcgcaaagatctaatcaaactatcaacttccaaactttga

SEQ ID NO: 73595 - protein, 530 aa, Arabidopsis thaliana
  peptide (1)..(530): Ceres Seq. ID no. 4972360
MAYPERDLIVDPRSGFCKSNSTFYSKRNPLCLPPNPSLDVTTFISSQPQRGTTAFIDASTGHRLTFSDLWRVVDRVADCLYHEVGIRRGDVVLILSPNSIYIPVVCLSVMSLGAVVTTANTLNTSGEISKQIAQSNPTLVFTTSQLAPKLAAAISVVLTDEEDEKRVELTSGVRVVGILSEMMKKETSGQRVRDRVNQDDTAMMLYSSGTTGTSKGVISSHRNLTAYVAKYIDDKWKRDEIFVCTVPMFHSFGLLAFAMGSVASGSTVVILRRFGLDDMMQAVEKYKATILSLAPPVLVAMINGADQLKAKYDLTSLRKVRCGGAPLSKEVMDSFLEKYPTVNIFQGYALTESHGSGASTESVEESLKYGAVGLLSSGIEARIVDPDTGRVMGVNQPGELWLKGPSISKDLCYIDEDGFLFVVDRLKELIKYKGYQVPPAELEALLIAHPHILDAAVIPFPDREAGQYPMAYVARKPESNLSEKEVIDFISNQVAPYKKIRKVAFISSIPKTASGKTLRKDLIKLSTSKL

SEQ ID NO: 73596 - protein, 421 aa, Arabidopsis thaliana
  peptide (1)..(421): Ceres Seq. ID no. 4972361
MSLGAVVTTANTLNTSGEISKQIAQSNPTLVFTTSQLAPKLAAAISVVLTDEEDEKRVELTSGVRVVGILSEMMKKETSGQRVRDRVNQDDTAMMLYSSGTTGTSKGVISSHRNLTAYVAKYIDDKWKRDEIFVCTVPMFHSFGLLAFAMGSVASGSTVVILRRFGLDDMMQAVEKYKATILSLAPPVLVAMINGADQLKAKYDLTSLRKVRCGGAPLSKEVMDSFLEKYPTVNIFQGYALTESHGSGASTESVEESLKYGAVGLLSSGIEARIVDPDTGRVMGVNQPGELWLKGPSISKDLCYIDEDGFLFVVDRLKELIKYKGYQVPPAELEALLIAHPHILDAAVIPFPDREAGQYPMAYVARKPESNLSEKEVIDFISNQVAPYKKIRKVAFISSIPKTASGKTLRKDLIKLSTSKL

SEQ ID NO: 73597 - protein, 349 aa, Arabidopsis thaliana
  peptide (1)..(349): Ceres Seq. ID no. 4972362
MMKKETSGQRVRDRVNQDDTAMMLYSSGTTGTSKGVISSHRNLTAYVAKYIDDKWKRDEIFVCTVPMFHSFGLLAFAMGSVASGSTVVILRRFGLDDMMQAVEKYKATILSLAPPVLVAMINGADQLKAKYDLTSLRKVRCGGAPLSKEVMDSFLEKYPTVNIFQGYALTESHGSGASTESVEESLKYGAVGLLSSGIEARIVDPDTGRVMGVNQPGELWLKGPSISKDLCYIDEDGFLFVVDRLKELIKYKGYQVPPAELEALLIAHPHILDAAVIPFPDREAGQYPMAYVARKPESNLSEKEVIDFISNQVAPYKKIRKVAFISSIPKTASGKTLRKDLIKLSTSKL

SEQ ID NO: 73598 - DNA, 5376 bp, Arabidopsis thaliana
  misc_feature (1)..(5376): Ceres Seq. ID no. 4972407
  misc_feature (1)..(5376): Ortholog of  Ceres SEQ ID NO 14310053 as cited in SEQ ID NO 221
  misc_feature (1)..(5376): Ortholog of  Ceres SEQ ID NO 13623325 as cited in SEQ ID NO 357
  misc_feature (1)..(5376): Ortholog of  Ceres SEQ ID NO 13635680 as cited in SEQ ID NO 578
  misc_feature (1)..(5376): Ortholog of  Ceres SEQ ID NO 13624195 as cited in SEQ ID NO 1018
atggcaggggccaacgtagaaacccccccgctgccgggttccagctcgcaaactcccctagccgagcagaacccgccagttcgtcggaatacggaccaggaggaacgacgcgttactgacggaacctatgtcgggcccggaggactactccagaacatcctcgaccacttaagtcgacaggaggccagaacggaagcacgattcgccaccctagccgctgcacaagcacattcgatggacgaaatcaatcgtctacaaaccagccgaacttcagtccataggccagtgtttgaaagcatcgagcatcgtcctcaagtccgtatcgccggtcccaccaacgatgtcgcaagagacgcagaagtcgccgacctcagacgcactatatctgaaatgagctccaagatccaccgcgcaacaagcacggcgcccgagctcgaccgcgttctggaggagactcagcaaaccccctttactcgacgaataactaacgtctcgatcagaggagcccaaaaaatcaagctggaaagttacaacggtagaaacgacccgaaagagttcctaacatcgttcaacgtcgccataaaccgggccgagctcacgatcgacaactttgatgccgggaggtgtcaaatattcatcgaacatctgaccggaccagctcacaactggttttcacgtctaaaacccaattccatcgacagcttccatcagctcacctcgtccttcctcaaacattacgcgcctctaattgaaaatcaaacatcgaacgccgacctatggtccatctctcagggagctaaagaatcacttcgatctttcgttgatcgtttcaaactggtagtcacaaatatcactgtgcccgacgaagctgcaatagttgcgctacgaaatgcagtatggtacgactccagattccgggatgacataacattacacgctccgagcaccctagaggacgccctgcatcgggcatccaggttcatcgaacttgaagaggagaagctcattctggcaagaaaacacaactcgaccaaaacccccgcatgtaaagacgcagtggttattaaggtcggacctgacgactcaaacgagccgcgacagcacctcgatcgcaatcccagtgcgggccgaaaaccaacttcattcttagtaagcaccgaaactcccgacgctaaaccttggaacaaatatattcgcgacgccgattccccagcagcagggccgatgtactgcgaataccacaaaagcagagcgcattcgaccgagaattgccgtttcctgcagggcctcctgatggccaagtataagagcggcggaataacaatcgaatgcgaccgacccccgataaataacaaaaatcaacgacgtaacgaaactacggcccgacaatatttgaacgatcaaaccaaaccaccgaccccagcagaacaagggataattacctcggctgacgatccggcagccaaaagacagcgaaacggaaaggctatcgccgcggaaccagtcgtggttagacaagttcacgtgataatggggggactccagaattgcagcgattcagtgcgctcaattaagcaataccgaaagaaagccgagatggtggtagcttggccctcatccacaagcacgacaagaaatccgaaccaaagcgctccgatctcattcaccgacgtcgacctagaaggtttggataccccgcacaacgacccgctcgttgtcgagttgatcataagcgatagcagagtaacaagggttctgattgacaccgggagctcggtagacttgattttcaaagatgttttaaccgcgatgaacataacggatcgtcagattaagccagtctcaaaacctctcgccggtttcgatggagatttcgtcatgacaataggcacgattaaactaccaatctttgtcggaggattaatcgcctgggtgaagttcgtcgtgattggcaaaccagcggtctacaacgttatcctcggcaccccctggattcaccaaatgcaagccatcccgtccacttatcatcagtgcgttaagttcccaacgcacaacggcatcttcactctccgagcgccgaaggaagccaagaccccgagtaggtcttacgaggagtccgagttgtgccgcaccgagatggtaaacatagatgagtccgacccgacaaggtgcgttggtgttggggcagagatttcaccatcaattcggctcgaactcattgcactacttaaacgaaattccaaaaccttcgcatggagcatcgaagatatgaagggaatcgacccggcaatcaccgcacacgaacttaacgtagatccaactttcaagccggtaaaacagaaacgaaggaaactcggcccggagcgtgcacgagcagtaaatgaagaggtggaaaaactccttaaggcggggcaaatcatcgaggtgaaataccctgaatggctagcaaatcccgtcgtcgtcaaaaagaagaacggaaagtggcgcgtctgtgtcgattataccgacctcaacaaagcctgcccaaaggatagttatccactaccgcacatcgaccggctcgtcgaagcaacttcagggaatggtctcctctccttcatggacgctttctcaggctacaaccagatcctgatgcacaaggacgatcaagaaaagacatcattcgttaccgaccgcggcacgtattgttacaaggtgatgtccttcgggcttaaaaacgccggggcaacataccagcggttcgtcaataaaatgttagccgaccagatcgggagaaccgtcgaggtgtacatcgacgacatgctcgtaaagtcattgaagcccgaagaccatgtcgagcatctgagcaaatgcttcgacgtcctcaatacatacggaatgaagctaaatccaaccaagtgcaccttcggagtaacatcgggagagtttcttgggtatgtcgtcactaaaagaggaatagaagcaaacccaaaacaaattcgcgctatcctcgaactaccatcaccgcggaacgcccgagaagtgcaaaggctcacaggacgaattgccgccctcaatcgattcatctcacgatcaacggacaagtgcctaccattctacaacctgctcaagcgccgggcccaattcgattgggataaggatagcgaggaagctttcgaaaagctaaaggactacctttccacaccaccgatcctggtaaagcccgaagtcggcgaaactttgtatctctatatcgcagtatcggatcacgcagtaagtagcgtactagtacgagaagaccgaggcgagcaaaggccgatcttctatacgagcaaatcactagtcgaagccgaaacacgatacccggtaatagaaaaagccgcgctggcagtcgtcacgtcggcacgaaaactgcgaccatacttccaatcacatacaatagccgtcctgaccgatcaacctctaagagtcgccctacacagcccaagtcagtcaggacggatgacaaagtgggctgtggagttaagcgaatacgacatcgattttcgaccacgccccgcaatgaaatcacaggtcctggctgacttcctcatcgaactaccgttacagtcagcagaacgtgcggtcagtggaaaccgcggtgaagagtggagtctgtacgtggacggttcatcttcagctcgcggatcggggataggaattcgcctcgtctccccaaccgccgaggtgctagaacagtcctttcgtctccgattcgtcgcaacaaacaacgtggccgagtacgaggtcctaattgccgggctccgcctcgccgcggggatgcagataaccacgatccacgcattcaccgactcgcaactcatcgccgggcagctcagtggggagtacgaagcaaagaacgagaaaatggacgcctatctcaagatcgtccaactgatgacgaaagatttcgaaaactttaaactctcaaaaattccccgaggtgacaacgcaccggcagatgcgctcgccgccttagcgttaacttccgactccgacttgcgacgaatcatcccggtggaaagtattgataaaccaagtatcgattcgaccgacgccgtggaaatcgtaaataccatccgaagctcgaacgcccccgacccagcggatccgaccgattggcgagtagaaattcgcgattacctctccgatggaacattgccaagtgataagtggacagcgcggcgtctacgaatcaaagcggccaagtataccctcatgaaggagcatctccttaaggtcagcgcgttcggagcaatgctgaactgcctccacggaaccgagatcaatgaaataatgaaggaaactcacgaaggagcagccggaaaccactccggaggacgagctctcgcacttaagctcaaaaagttaggattttactggccaacaatgatttctgactgcaagaccttcacggccaagtgtgaacaatgtcaaagacacgcgcccaccatccatcaacccacggaactgctacgagccggagtcgcaccatacccctttatgcgatgggcaatggacatcgtcggcccgatgcctgcttcacgacagaaacggttcatccttgtaatgaccgattacttcacgaagtgggtcgaagccgaatcatacgcgacgatccgagccaatgatgtccaaaactttgtctggaaattcatcatctgccggcacggtctcccttatgaaatcataaccgataacggttcgcagttcatctcgctgtctttcgaaaatttctgcgccagctggaaaatacgactcaataagtccacgccacggtacccacaggggaatggccaggccgaggccacaaacaagacaattctctccggtctgaagaaaagactagacgaaaagaaaggagcttgggcagacgagctggatggtgtcctatggtcctaccgaacgacgccccgaagtgcaacggatcaaactccattcgcacacgcatacggaatggaggccatggcccctgccgaggtaggatactccagtcttcgaagatccatgatggtgaaaaaccccgaactcaacgacagaatgatgctcgatcgactcgacgacctggaagaaatacggaacgccgccctctgccgcattcagaactaccaactcgccgccgccaaacactataaccaaaaggtccacaatcgccacttcgacgtcggagatctcgttctccggaaagttttcgaaaatacagccgagatcaacgccggcaaactgggagcgaactgggaaggatcataccaagtatcgaaaatcgtccgacccggagactacgaactcctaacaatgagcggcaccgcggtgcctcgcacctggaactcaatgcacctgaagagatactattactaa

SEQ ID NO: 73599 - protein, 1791 aa, Arabidopsis thaliana
  peptide (1)..(1791): Ceres Seq. ID no. 4972408
MAGANVETPPLPGSSSQTPLAEQNPPVRRNTDQEERRVTDGTYVGPGGLLQNILDHLSRQEARTEARFATLAAAQAHSMDEINRLQTSRTSVHRPVFESIEHRPQVRIAGPTNDVARDAEVADLRRTISEMSSKIHRATSTAPELDRVLEETQQTPFTRRITNVSIRGAQKIKLESYNGRNDPKEFLTSFNVAINRAELTIDNFDAGRCQIFIEHLTGPAHNWFSRLKPNSIDSFHQLTSSFLKHYAPLIENQTSNADLWSISQGAKESLRSFVDRFKLVVTNITVPDEAAIVALRNAVWYDSRFRDDITLHAPSTLEDALHRASRFIELEEEKLILARKHNSTKTPACKDAVVIKVGPDDSNEPRQHLDRNPSAGRKPTSFLVSTETPDAKPWNKYIRDADSPAAGPMYCEYHKSRAHSTENCRFLQGLLMAKYKSGGITIECDRPPINNKNQRRNETTARQYLNDQTKPPTPAEQGIITSADDPAAKRQRNGKAIAAEPVVVRQVHVIMGGLQNCSDSVRSIKQYRKKAEMVVAWPSSTSTTRNPNQSAPISFTDVDLEGLDTPHNDPLVVELIISDSRVTRVLIDTGSSVDLIFKDVLTAMNITDRQIKPVSKPLAGFDGDFVMTIGTIKLPIFVGGLIAWVKFVVIGKPAVYNVILGTPWIHQMQAIPSTYHQCVKFPTHNGIFTLRAPKEAKTPSRSYEESELCRTEMVNIDESDPTRCVGVGAEISPSIRLELIALLKRNSKTFAWSIEDMKGIDPAITAHELNVDPTFKPVKQKRRKLGPERARAVNEEVEKLLKAGQIIEVKYPEWLANPVVVKKKNGKWRVCVDYTDLNKACPKDSYPLPHIDRLVEATSGNGLLSFMDAFSGYNQILMHKDDQEKTSFVTDRGTYCYKVMSFGLKNAGATYQRFVNKMLADQIGRTVEVYIDDMLVKSLKPEDHVEHLSKCFDVLNTYGMKLNPTKCTFGVTSGEFLGYVVTKRGIEANPKQIRAILELPSPRNAREVQRLTGRIAALNRFISRSTDKCLPFYNLLKRRAQFDWDKDSEEAFEKLKDYLSTPPILVKPEVGETLYLYIAVSDHAVSSVLVREDRGEQRPIFYTSKSLVEAETRYPVIEKAALAVVTSARKLRPYFQSHTIAVLTDQPLRVALHSPSQSGRMTKWAVELSEYDIDFRPRPAMKSQVLADFLIELPLQSAERAVSGNRGEEWSLYVDGSSSARGSGIGIRLVSPTAEVLEQSFRLRFVATNNVAEYEVLIAGLRLAAGMQITTIHAFTDSQLIAGQLSGEYEAKNEKMDAYLKIVQLMTKDFENFKLSKIPRGDNAPADALAALALTSDSDLRRIIPVESIDKPSIDSTDAVEIVNTIRSSNAPDPADPTDWRVEIRDYLSDGTLPSDKWTARRLRIKAAKYTLMKEHLLKVSAFGAMLNCLHGTEINEIMKETHEGAAGNHSGGRALALKLKKLGFYWPTMISDCKTFTAKCEQCQRHAPTIHQPTELLRAGVAPYPFMRWAMDIVGPMPASRQKRFILVMTDYFTKWVEAESYATIRANDVQNFVWKFIICRHGLPYEIITDNGSQFISLSFENFCASWKIRLNKSTPRYPQGNGQAEATNKTILSGLKKRLDEKKGAWADELDGVLWSYRTTPRSATDQTPFAHAYGMEAMAPAEVGYSSLRRSMMVKNPELNDRMMLDRLDDLEEIRNAALCRIQNYQLAAAKHYNQKVHNRHFDVGDLVLRKVFENTAEINAGKLGANWEGSYQVSKIVRPGDYELLTMSGTAVPRTWNSMHLKRYYY

SEQ ID NO: 73600 - protein, 1713 aa, Arabidopsis thaliana
  peptide (1)..(1713): Ceres Seq. ID no. 4972409
MDEINRLQTSRTSVHRPVFESIEHRPQVRIAGPTNDVARDAEVADLRRTISEMSSKIHRATSTAPELDRVLEETQQTPFTRRITNVSIRGAQKIKLESYNGRNDPKEFLTSFNVAINRAELTIDNFDAGRCQIFIEHLTGPAHNWFSRLKPNSIDSFHQLTSSFLKHYAPLIENQTSNADLWSISQGAKESLRSFVDRFKLVVTNITVPDEAAIVALRNAVWYDSRFRDDITLHAPSTLEDALHRASRFIELEEEKLILARKHNSTKTPACKDAVVIKVGPDDSNEPRQHLDRNPSAGRKPTSFLVSTETPDAKPWNKYIRDADSPAAGPMYCEYHKSRAHSTENCRFLQGLLMAKYKSGGITIECDRPPINNKNQRRNETTARQYLNDQTKPPTPAEQGIITSADDPAAKRQRNGKAIAAEPVVVRQVHVIMGGLQNCSDSVRSIKQYRKKAEMVVAWPSSTSTTRNPNQSAPISFTDVDLEGLDTPHNDPLVVELIISDSRVTRVLIDTGSSVDLIFKDVLTAMNITDRQIKPVSKPLAGFDGDFVMTIGTIKLPIFVGGLIAWVKFVVIGKPAVYNVILGTPWIHQMQAIPSTYHQCVKFPTHNGIFTLRAPKEAKTPSRSYEESELCRTEMVNIDESDPTRCVGVGAEISPSIRLELIALLKRNSKTFAWSIEDMKGIDPAITAHELNVDPTFKPVKQKRRKLGPERARAVNEEVEKLLKAGQIIEVKYPEWLANPVVVKKKNGKWRVCVDYTDLNKACPKDSYPLPHIDRLVEATSGNGLLSFMDAFSGYNQILMHKDDQEKTSFVTDRGTYCYKVMSFGLKNAGATYQRFVNKMLADQIGRTVEVYIDDMLVKSLKPEDHVEHLSKCFDVLNTYGMKLNPTKCTFGVTSGEFLGYVVTKRGIEANPKQIRAILELPSPRNAREVQRLTGRIAALNRFISRSTDKCLPFYNLLKRRAQFDWDKDSEEAFEKLKDYLSTPPILVKPEVGETLYLYIAVSDHAVSSVLVREDRGEQRPIFYTSKSLVEAETRYPVIEKAALAVVTSARKLRPYFQSHTIAVLTDQPLRVALHSPSQSGRMTKWAVELSEYDIDFRPRPAMKSQVLADFLIELPLQSAERAVSGNRGEEWSLYVDGSSSARGSGIGIRLVSPTAEVLEQSFRLRFVATNNVAEYEVLIAGLRLAAGMQITTIHAFTDSQLIAGQLSGEYEAKNEKMDAYLKIVQLMTKDFENFKLSKIPRGDNAPADALAALALTSDSDLRRIIPVESIDKPSIDSTDAVEIVNTIRSSNAPDPADPTDWRVEIRDYLSDGTLPSDKWTARRLRIKAAKYTLMKEHLLKVSAFGAMLNCLHGTEINEIMKETHEGAAGNHSGGRALALKLKKLGFYWPTMISDCKTFTAKCEQCQRHAPTIHQPTELLRAGVAPYPFMRWAMDIVGPMPASRQKRFILVMTDYFTKWVEAESYATIRANDVQNFVWKFIICRHGLPYEIITDNGSQFISLSFENFCASWKIRLNKSTPRYPQGNGQAEATNKTILSGLKKRLDEKKGAWADELDGVLWSYRTTPRSATDQTPFAHAYGMEAMAPAEVGYSSLRRSMMVKNPELNDRMMLDRLDDLEEIRNAALCRIQNYQLAAAKHYNQKVHNRHFDVGDLVLRKVFENTAEINAGKLGANWEGSYQVSKIVRPGDYELLTMSGTAVPRTWNSMHLKRYYY

SEQ ID NO: 73601 - protein, 1661 aa, Arabidopsis thaliana
  peptide (1)..(1661): Ceres Seq. ID no. 4972410
MSSKIHRATSTAPELDRVLEETQQTPFTRRITNVSIRGAQKIKLESYNGRNDPKEFLTSFNVAINRAELTIDNFDAGRCQIFIEHLTGPAHNWFSRLKPNSIDSFHQLTSSFLKHYAPLIENQTSNADLWSISQGAKESLRSFVDRFKLVVTNITVPDEAAIVALRNAVWYDSRFRDDITLHAPSTLEDALHRASRFIELEEEKLILARKHNSTKTPACKDAVVIKVGPDDSNEPRQHLDRNPSAGRKPTSFLVSTETPDAKPWNKYIRDADSPAAGPMYCEYHKSRAHSTENCRFLQGLLMAKYKSGGITIECDRPPINNKNQRRNETTARQYLNDQTKPPTPAEQGIITSADDPAAKRQRNGKAIAAEPVVVRQVHVIMGGLQNCSDSVRSIKQYRKKAEMVVAWPSSTSTTRNPNQSAPISFTDVDLEGLDTPHNDPLVVELIISDSRVTRVLIDTGSSVDLIFKDVLTAMNITDRQIKPVSKPLAGFDGDFVMTIGTIKLPIFVGGLIAWVKFVVIGKPAVYNVILGTPWIHQMQAIPSTYHQCVKFPTHNGIFTLRAPKEAKTPSRSYEESELCRTEMVNIDESDPTRCVGVGAEISPSIRLELIALLKRNSKTFAWSIEDMKGIDPAITAHELNVDPTFKPVKQKRRKLGPERARAVNEEVEKLLKAGQIIEVKYPEWLANPVVVKKKNGKWRVCVDYTDLNKACPKDSYPLPHIDRLVEATSGNGLLSFMDAFSGYNQILMHKDDQEKTSFVTDRGTYCYKVMSFGLKNAGATYQRFVNKMLADQIGRTVEVYIDDMLVKSLKPEDHVEHLSKCFDVLNTYGMKLNPTKCTFGVTSGEFLGYVVTKRGIEANPKQIRAILELPSPRNAREVQRLTGRIAALNRFISRSTDKCLPFYNLLKRRAQFDWDKDSEEAFEKLKDYLSTPPILVKPEVGETLYLYIAVSDHAVSSVLVREDRGEQRPIFYTSKSLVEAETRYPVIEKAALAVVTSARKLRPYFQSHTIAVLTDQPLRVALHSPSQSGRMTKWAVELSEYDIDFRPRPAMKSQVLADFLIELPLQSAERAVSGNRGEEWSLYVDGSSSARGSGIGIRLVSPTAEVLEQSFRLRFVATNNVAEYEVLIAGLRLAAGMQITTIHAFTDSQLIAGQLSGEYEAKNEKMDAYLKIVQLMTKDFENFKLSKIPRGDNAPADALAALALTSDSDLRRIIPVESIDKPSIDSTDAVEIVNTIRSSNAPDPADPTDWRVEIRDYLSDGTLPSDKWTARRLRIKAAKYTLMKEHLLKVSAFGAMLNCLHGTEINEIMKETHEGAAGNHSGGRALALKLKKLGFYWPTMISDCKTFTAKCEQCQRHAPTIHQPTELLRAGVAPYPFMRWAMDIVGPMPASRQKRFILVMTDYFTKWVEAESYATIRANDVQNFVWKFIICRHGLPYEIITDNGSQFISLSFENFCASWKIRLNKSTPRYPQGNGQAEATNKTILSGLKKRLDEKKGAWADELDGVLWSYRTTPRSATDQTPFAHAYGMEAMAPAEVGYSSLRRSMMVKNPELNDRMMLDRLDDLEEIRNAALCRIQNYQLAAAKHYNQKVHNRHFDVGDLVLRKVFENTAEINAGKLGANWEGSYQVSKIVRPGDYELLTMSGTAVPRTWNSMHLKRYYY

SEQ ID NO: 73602 - DNA, 1590 bp, Arabidopsis thaliana
  misc_feature (1)..(1590): Ceres Seq. ID no. 4972411
  misc_feature (1)..(1590): Ortholog of  Ceres SEQ ID NO 14311609 as cited in SEQ ID NO 58341
atggcttttcaacggcggcgcaacaattactacaaccgtctccgtcgtcttcttcctttcatttgcgctgtctctggagctcttctcatcctcttcgctcttctctccattctttcccctcctcctgatgattccgatcgccgcatctccaagcatattaactatggagccaatgatgagaagaagaacacaccagtggttttcacagttccggttaggcagagaggtggaggaagatcggatcgtgatatctggcgttcatggaatgctgaattcttttatggttgttgtaatgcaagcagcaagttcccaaatgctaaagcaattactagaaatgatcgatacttggcgattgccactagtggcggtttaaaccaacaacggactggtattgtagatgctgttgttgctgcaaggattctaaacgctacgcttgttattccgaagttggaccagaaatcctactggaaagatgccagtgacttctcgaacattttcgatgttgattggtttatgtcatttctctcaaaagatgtcaaaatcattgagaaacttccacagaaaggagggcaaacatggagccctcgcagaatgcgtgtaccgagaaaatgcaatgagaaatgctatatcaatcgggtgttacctgttcttcagaaaaggcatgcagttcaattgaataaatttgattacagactctcaaacaagttgagagatgatttgcagaagctgaggtttgaacctgatatgctcgccttctctggatgttactatggtggtggtgagaaggagaagaaagagttaggaacaatcagaaggagatggaaaactttgcatgtaaataaccctgaaaagcaaaggagacaaggaagatgtccacttacaccagaagaagttggattaatgcttagagctttgggatatggaagtgatgttcatatatatgttgcatcaggtgaagtttatggaggagaaaaatcattggctcctttgaaagcactttttccacatttctattcaaaagacaccatagctacaaaaatggagttaaaaccattttcttcttattcttcacgaatggctgcactcgatttccttgtgtgtgacgaaagcgatgttttcgttaccaacaataacggaaacatggcgagaatattagcaggtcgaaggagatactttggacataaaccaacaattagaccgaatgcgaaaaagctatacaagttgtttatgagcaaagagaatactacttgggaggagtttgcttcaagagtgagaacatttcagaaaggattcatgggagaaccaaaggaggtaagagccggaaaaggtgagtttcatgagaatccagcggcttgtatatgcgaagatactgatgctaaagtaaaagcgggaaagatggattcgagaaaattcgggaagaaagagcagaaagaagatgaagatgcagagttgtcgtcgtcagagacagattatgaggaagaccaaactgatttacaggacagaggcttgtataatggtacgaggttagattatgatgatgcgttatcggtttcagaagagcctgagctagaagaaatgctatcagattga

SEQ ID NO: 73603 - protein, 529 aa, Arabidopsis thaliana
  peptide (1)..(529): Ceres Seq. ID no. 4972412
MAFQRRRNNYYNRLRRLLPFICAVSGALLILFALLSILSPPPDDSDRRISKHINYGANDEKKNTPVVFTVPVRQRGGGRSDRDIWRSWNAEFFYGCCNASSKFPNAKAITRNDRYLAIATSGGLNQQRTGIVDAVVAARILNATLVIPKLDQKSYWKDASDFSNIFDVDWFMSFLSKDVKIIEKLPQKGGQTWSPRRMRVPRKCNEKCYINRVLPVLQKRHAVQLNKFDYRLSNKLRDDLQKLRFEPDMLAFSGCYYGGGEKEKKELGTIRRRWKTLHVNNPEKQRRQGRCPLTPEEVGLMLRALGYGSDVHIYVASGEVYGGEKSLAPLKALFPHFYSKDTIATKMELKPFSSYSSRMAALDFLVCDESDVFVTNNNGNMARILAGRRRYFGHKPTIRPNAKKLYKLFMSKENTTWEEFASRVRTFQKGFMGEPKEVRAGKGEFHENPAACICEDTDAKVKAGKMDSRKFGKKEQKEDEDAELSSSETDYEEDQTDLQDRGLYNGTRLDYDDALSVSEEPELEEMLSD

SEQ ID NO: 73604 - protein, 358 aa, Arabidopsis thaliana
  peptide (1)..(358): Ceres Seq. ID no. 4972413
MSFLSKDVKIIEKLPQKGGQTWSPRRMRVPRKCNEKCYINRVLPVLQKRHAVQLNKFDYRLSNKLRDDLQKLRFEPDMLAFSGCYYGGGEKEKKELGTIRRRWKTLHVNNPEKQRRQGRCPLTPEEVGLMLRALGYGSDVHIYVASGEVYGGEKSLAPLKALFPHFYSKDTIATKMELKPFSSYSSRMAALDFLVCDESDVFVTNNNGNMARILAGRRRYFGHKPTIRPNAKKLYKLFMSKENTTWEEFASRVRTFQKGFMGEPKEVRAGKGEFHENPAACICEDTDAKVKAGKMDSRKFGKKEQKEDEDAELSSSETDYEEDQTDLQDRGLYNGTRLDYDDALSVSEEPELEEMLSD

SEQ ID NO: 73605 - protein, 332 aa, Arabidopsis thaliana
  peptide (1)..(332): Ceres Seq. ID no. 4972414
MRVPRKCNEKCYINRVLPVLQKRHAVQLNKFDYRLSNKLRDDLQKLRFEPDMLAFSGCYYGGGEKEKKELGTIRRRWKTLHVNNPEKQRRQGRCPLTPEEVGLMLRALGYGSDVHIYVASGEVYGGEKSLAPLKALFPHFYSKDTIATKMELKPFSSYSSRMAALDFLVCDESDVFVTNNNGNMARILAGRRRYFGHKPTIRPNAKKLYKLFMSKENTTWEEFASRVRTFQKGFMGEPKEVRAGKGEFHENPAACICEDTDAKVKAGKMDSRKFGKKEQKEDEDAELSSSETDYEEDQTDLQDRGLYNGTRLDYDDALSVSEEPELEEMLSD

SEQ ID NO: 73606 - DNA, 3189 bp, Arabidopsis thaliana
  misc_feature (1)..(3189): Ceres Seq. ID no. 4972446
  misc_feature (1)..(3189): Ortholog of  Ceres SEQ ID NO 15180350 as cited in SEQ ID NO 0
atggcacgtcttactctgtttctgtcttttctttctctagctttagtctctgttgtaaactgtcgtgttttaagttctgtgtctgaagataacaactcctccatcttggtctccgatggagtccaagacagatccagcaacgactttctcagtcttaatccgccaaatctttccgagagtgcttgtgttcatgtctacgggtttcttccatgtgcagacaatattgaaggatatgtcttccaagttttctcctttggttgtctattgataatcggtgaatactttttgtctaaaggaaggtctaagctctttgtcatcttcgaggtcggtttctttggcggaattatcttccctctacttacaatgttcccaagaattgcccttattctatccactggactgataggaagccgtgaaatagcaaactcgatgacgggtaataatgttgcagttactgttggatactctgtctttgctttgacaatgcaatggggagcttgtgttgtctttggcttgtctggtttgagatcagatgatcagtccataacttgtgacataagtagtccaagaagacaagttaagaagagcattaatctattgaagaacctagctggagctagcattagagcagatcctaagaacaagaaagcggcagggattatgctcctgactttattgcctttcgtcttagtcacattttcagagacatttcacataaaatcttgggatgacaatatggttttggtcacactcatattctctggttctgcaactgttctctactttgtttatttgtattttgataaagcggaccaagtgaagagcctagaatacgcgaagtttgagctcatgtcagaagttcataagcacttgcagaatttttcgcctcaaagccttataagaaatggacaactatgtcaagagagcttgaaaagtttgttcaaaaagtttgatgtcaacaaagacggaaagatccaagtatcagagttaaaagatctgacagtggactttggggtattagggagagtgaagtgtgatataaatgagcttgccactactttgcttgctgatttcgacagtaatagagatggtgagatagatgagactgaattcgccattggtatcgaaaaatggctgaaacagtacaaatttagcttcaatggcaccgagtcacaaggagaggacatagccgaggatgatggagttttgaaggtggaacaattactaaagggatgtctttttactaagttgcttacaaagagaaccttgaaagctgtcattgaagtcattatagggattactattgtcagctttcttgcaatgcctttcatgatgaatatcgaacttttgtcggtatcagctggagtgccttccttctatgttgtctttgcagtgatccctttggcaagaaacctaaagaacgctttgtctgctcacttctgtcgcaagaaagagaaagcaaaaattacatctgacacattttctgagatttatagagatgttacattgaacaatctgctggggataacaattatattggcgattgtgtacatcagaggattgacttgggattattcaacagaagttctcattattgtgatcgttggtctcataatagctttgatctctgttgtgaactgtcgtgttttaagttctttatctgagaaagactcaatcttggtctccgatggagttcaagacgggtccagctacgagtttctgagtcttgatccgccaaatgacattaccaagaatatgtgcgtacatgtctacgattttcttccatgtgcagacaatgttgcaggatatgtcttccaagttttctcgtttggttgcatcttgatcatcggtgaatacttcttgactaaaggaaggactaagctctttctcatattcgaggtcggtttttatggcggaatcatctttcctctccttactatgttcccacgaatcgcgcttattctctcgactggactggtgggaagccgcgaaatggcaagctcgagggttggtaatatcattggagttactgtgggatactctgtctttgctttgacaatacaatggggagcttgtattctctttggcttgtctggtactaaaccagaacagcccatagatttatctgcagctagtgtagaagcagatataacgaacaagaaatcggcagggattatgctcttgactatactacctttcatattggttttctttgtgaaaaactcgcagtattttgatagagacgaccaagcgaagagtttagatcacgcgaggtttgagctcatgtcagaagttcataagcatttacagattttttcacccaaaagccttataagagatggacaactaaatcaagagagcttgaaaagattgtttcaaaaaatcgatgcaaacggagatggaaagatccaagttgcagagttgaaagatcttacggtggagtttgggatgatagggagagtcaagtgtcacatagataagcttgtccatacattggttgatgatttcgacagggatggagatcgtgagatcgatgaggctgaattcgagattgggatcaaaaaatggctgaatcagtacaaattcagcttcgataccaccgtgccaccaagagaggaccaagctgagggagtaccaattctgaaggtagaaaagccagagcagagtcttgttaagaagctgctctcatggagaaccttgagagcttcccttgaagtcattttagggatgctagttgtcatctatcttgcaagacctttcatgatgaacatccaacttttgtcggaatcagctggagttccttctttctatgttgtctttgtagtcattcctttggcaagaaacctaaagaacaccttgtcagctcacttctgtcgcaagaaagacaaagcgaaaatcacatctgacacattttctgagatctacaaggatgttacaatgaacaatctcatgggaatttcaattatattggcaattgtgtacgcaagagaactagtttgggattacacaacagaagttctcattatagtgatcgttggtctcttaataggcttaccggcttatgtgagaacgacttatccattttggatatgtctcttggcctttgctctctacttcatctctcttgtcgtagtgtatttccatttcatgtctctcgaaaagggcacaactgtcacctttaacaaataa

SEQ ID NO: 73607 - protein, 1062 aa, Arabidopsis thaliana
  peptide (1)..(1062): Ceres Seq. ID no. 4972447
MARLTLFLSFLSLALVSVVNCRVLSSVSEDNNSSILVSDGVQDRSSNDFLSLNPPNLSESACVHVYGFLPCADNIEGYVFQVFSFGCLLIIGEYFLSKGRSKLFVIFEVGFFGGIIFPLLTMFPRIALILSTGLIGSREIANSMTGNNVAVTVGYSVFALTMQWGACVVFGLSGLRSDDQSITCDISSPRRQVKKSINLLKNLAGASIRADPKNKKAAGIMLLTLLPFVLVTFSETFHIKSWDDNMVLVTLIFSGSATVLYFVYLYFDKADQVKSLEYAKFELMSEVHKHLQNFSPQSLIRNGQLCQESLKSLFKKFDVNKDGKIQVSELKDLTVDFGVLGRVKCDINELATTLLADFDSNRDGEIDETEFAIGIEKWLKQYKFSFNGTESQGEDIAEDDGVLKVEQLLKGCLFTKLLTKRTLKAVIEVIIGITIVSFLAMPFMMNIELLSVSAGVPSFYVVFAVIPLARNLKNALSAHFCRKKEKAKITSDTFSEIYRDVTLNNLLGITIILAIVYIRGLTWDYSTEVLIIVIVGLIIALISVVNCRVLSSLSEKDSILVSDGVQDGSSYEFLSLDPPNDITKNMCVHVYDFLPCADNVAGYVFQVFSFGCILIIGEYFLTKGRTKLFLIFEVGFYGGIIFPLLTMFPRIALILSTGLVGSREMASSRVGNIIGVTVGYSVFALTIQWGACILFGLSGTKPEQPIDLSAASVEADITNKKSAGIMLLTILPFILVFFVKNSQYFDRDDQAKSLDHARFELMSEVHKHLQIFSPKSLIRDGQLNQESLKRLFQKIDANGDGKIQVAELKDLTVEFGMIGRVKCHIDKLVHTLVDDFDRDGDREIDEAEFEIGIKKWLNQYKFSFDTTVPPREDQAEGVPILKVEKPEQSLVKKLLSWRTLRASLEVILGMLVVIYLARPFMMNIQLLSESAGVPSFYVVFVVIPLARNLKNTLSAHFCRKKDKAKITSDTFSEIYKDVTMNNLMGISIILAIVYARELVWDYTTEVLIIVIVGLLIGLPAYVRTTYPFWICLLAFALYFISLVVVYFHFMSLEKGTTVTFNK

SEQ ID NO: 73608 - protein, 941 aa, Arabidopsis thaliana
  peptide (1)..(941): Ceres Seq. ID no. 4972448
MFPRIALILSTGLIGSREIANSMTGNNVAVTVGYSVFALTMQWGACVVFGLSGLRSDDQSITCDISSPRRQVKKSINLLKNLAGASIRADPKNKKAAGIMLLTLLPFVLVTFSETFHIKSWDDNMVLVTLIFSGSATVLYFVYLYFDKADQVKSLEYAKFELMSEVHKHLQNFSPQSLIRNGQLCQESLKSLFKKFDVNKDGKIQVSELKDLTVDFGVLGRVKCDINELATTLLADFDSNRDGEIDETEFAIGIEKWLKQYKFSFNGTESQGEDIAEDDGVLKVEQLLKGCLFTKLLTKRTLKAVIEVIIGITIVSFLAMPFMMNIELLSVSAGVPSFYVVFAVIPLARNLKNALSAHFCRKKEKAKITSDTFSEIYRDVTLNNLLGITIILAIVYIRGLTWDYSTEVLIIVIVGLIIALISVVNCRVLSSLSEKDSILVSDGVQDGSSYEFLSLDPPNDITKNMCVHVYDFLPCADNVAGYVFQVFSFGCILIIGEYFLTKGRTKLFLIFEVGFYGGIIFPLLTMFPRIALILSTGLVGSREMASSRVGNIIGVTVGYSVFALTIQWGACILFGLSGTKPEQPIDLSAASVEADITNKKSAGIMLLTILPFILVFFVKNSQYFDRDDQAKSLDHARFELMSEVHKHLQIFSPKSLIRDGQLNQESLKRLFQKIDANGDGKIQVAELKDLTVEFGMIGRVKCHIDKLVHTLVDDFDRDGDREIDEAEFEIGIKKWLNQYKFSFDTTVPPREDQAEGVPILKVEKPEQSLVKKLLSWRTLRASLEVILGMLVVIYLARPFMMNIQLLSESAGVPSFYVVFVVIPLARNLKNTLSAHFCRKKDKAKITSDTFSEIYKDVTMNNLMGISIILAIVYARELVWDYTTEVLIIVIVGLLIGLPAYVRTTYPFWICLLAFALYFISLVVVYFHFMSLEKGTTVTFNK

SEQ ID NO: 73609 - protein, 919 aa, Arabidopsis thaliana
  peptide (1)..(919): Ceres Seq. ID no. 4972449
MTGNNVAVTVGYSVFALTMQWGACVVFGLSGLRSDDQSITCDISSPRRQVKKSINLLKNLAGASIRADPKNKKAAGIMLLTLLPFVLVTFSETFHIKSWDDNMVLVTLIFSGSATVLYFVYLYFDKADQVKSLEYAKFELMSEVHKHLQNFSPQSLIRNGQLCQESLKSLFKKFDVNKDGKIQVSELKDLTVDFGVLGRVKCDINELATTLLADFDSNRDGEIDETEFAIGIEKWLKQYKFSFNGTESQGEDIAEDDGVLKVEQLLKGCLFTKLLTKRTLKAVIEVIIGITIVSFLAMPFMMNIELLSVSAGVPSFYVVFAVIPLARNLKNALSAHFCRKKEKAKITSDTFSEIYRDVTLNNLLGITIILAIVYIRGLTWDYSTEVLIIVIVGLIIALISVVNCRVLSSLSEKDSILVSDGVQDGSSYEFLSLDPPNDITKNMCVHVYDFLPCADNVAGYVFQVFSFGCILIIGEYFLTKGRTKLFLIFEVGFYGGIIFPLLTMFPRIALILSTGLVGSREMASSRVGNIIGVTVGYSVFALTIQWGACILFGLSGTKPEQPIDLSAASVEADITNKKSAGIMLLTILPFILVFFVKNSQYFDRDDQAKSLDHARFELMSEVHKHLQIFSPKSLIRDGQLNQESLKRLFQKIDANGDGKIQVAELKDLTVEFGMIGRVKCHIDKLVHTLVDDFDRDGDREIDEAEFEIGIKKWLNQYKFSFDTTVPPREDQAEGVPILKVEKPEQSLVKKLLSWRTLRASLEVILGMLVVIYLARPFMMNIQLLSESAGVPSFYVVFVVIPLARNLKNTLSAHFCRKKDKAKITSDTFSEIYKDVTMNNLMGISIILAIVYARELVWDYTTEVLIIVIVGLLIGLPAYVRTTYPFWICLLAFALYFISLVVVYFHFMSLEKGTTVTFNK

SEQ ID NO: 73610 - DNA, 3867 bp, Arabidopsis thaliana
  misc_feature (1)..(3867): Ceres Seq. ID no. 4972526
  misc_feature (1)..(3867): Ortholog of  Ceres SEQ ID NO 12586556 as cited in SEQ ID NO 64667
  misc_feature (1)..(3867): Ortholog of  Ceres SEQ ID NO 13660894 as cited in SEQ ID NO 67475
atgggttataccttgcaacagatactgaggagcatctgctccaacacggattggaactacgccgtgttctggaaacttaatcaccactcgccaatggttcttactttggaggatgtgtactgtgttaatcatgagcgcggtttgatgccggaaagcttgcatggagggcgccatgctcatgaccctcttgggttagctgtggctaagatgtcatatcatgttcacaacggttgggagagtcaaatttctgctggaattaagacaattcttatagtagctgttggttcttgcggagttgtgcagcttggctctttgtgtaaagttgaagaagacccggctttggtgactcatatcaggcatttatttttggcacttacggatccactagcagaccatgcatcaaatttaatgcaatgtgatattaacagtccatcggatcggccaaaaataccttccaaatgcttacatgaggcatcccctgatttctcaggagaatttgacaaagctatggatatggaagggttaaatattgtatctcaaaacacaagtaatagaagtaacgaccttccatacaatttcactccaacatattttcacatggagaggactgctcaagtaattggtgggcttgaagcagtccaaccttccatgtttggaagcaatgattgtgttacaagtggtttttcagttggtgtggttgatactaaacacaagaatcaagtggatataagtgatatgagtaaggtgatttatgatgaggaaacaggtggataccgatactcaagagaattagatcccaatttccaacactactcgaggaatcatgtgcgtaatagtggaggcacatctgctttagctatggagagtgataggctaaaagcaggttcatcatatccacaacttgattcaactgtacttactgcgttgaaaacagataaagattattctcgtcgaaatgaggttttccaaccatctgagagccaaggaagtatatttgtgaaagatacagaacataggcaggaggaaaaaagtgagtcaagtcagttggatgctttaactgcatctttgtgttctttttctggcagtgagctgttagaggcattagggccagcgttcagtaaaacaagcactgattatggggagctagcaaagtttgaatctgctgcagctataagacgaacaaatgatatgagccatagtcacctgacatttgaatccagctccgagaatcttctagatgccgttgttgctagtatgagtaatggtgatggtaatgtcaggcgtgaaatatcttcaagcaggtcaacacagtcattgcttacaactgctgaaatggcacaggcagaaccttttggtcataataagcaaaatattgttagcacagttgatagtgtgattagccagccgcctctagcagatgggcttatccaacagaatccatcaaatatctgcggagcattttcttccattgggttttcatcaacatgtctcagttcatccagcgaccagtttccgacgtccctggaaattcccaagaagaacaaaaagagagctaaacctggtgaaagttctcggcctcgtccaagggacaggcaacttattcaggatcgtatcaaagaactaagggagcttgtgcctaatggatctaagtgcagtattgattccttgctagagtgcacgatcaagcacatgctcttcctgcagagtgtctctcagcatgctgacaagctcactaaaagtgcaagttcaaagatgcaacacaaggataccggcaccctaggaatatcaagcactgaacaaggttcgagctgggcagtggagattggaggccatctgcaagtgtgctcaatcatggtggagaatctggacaaagaaggagtgatgcttattgagatgctatgcgaagaatgtagccactttctcgagatagcgaacgtgataaggagcttggaactcatcatcctcagaggcaccactgagaaacaaggcgagaaaacatggatatgttttgtagtggagggacaaaacaacaaagtaatgcacaggatggacatcctgtggtctcttgtgcaaatatttcaacccaaggctacaaacagtctgcatctttatcgacaatctcaaattctttacatgaatgctttcgccaatgtgcatagtcttcgggtaccttctcaccatcttcgagatttctcagcgtcactctctctggctcctccaaatttaaagaaaatcatcaagcaatgctcgacgcccaagcttctggagtctgctttagccgccatgatcaagacgagcctaaaccaagactgtcgcttaatgaaccaattcatcactgcctgcacttcctttaaacgtcttgacctcgcagtttccaccatgacccagatgcaggaacctaatgttttcgtctacaacgcgttgtttaaaggcttcgttacttgttctcacccgattcgatctctggaattgtatgttcgtatgctcagggactcggtttctccatcaagctacacgtactcttcactagtaaaggcgtcttctttcgcttctaggtttggggaatcactccaggcgcacatctggaaatttggatttggtttccatgttaaaattcagacgactcttattgatttttattcagccactggtagaatcagggaagccaggaaagtgtttgatgaaatgcctgaaagagatgatattgcttggaccacaatggtttctgcttatcgtcgggttttggatatggactctgcgaattctttagctaaccaaatgtcggagaagaatgaggctacgtcgaactgtttgattaatggatatatgggattaggcaatctggaacaagcagagtcattgtttaatcagatgcctgtgaaggacataatctcatggaccactatgatcaagggttactcgcagaataaaagatatagagaagcaattgcagtgttctacaaaatgatggaggagggcatcattcctgatgaggttactatgtcaactgttatttcagcttgtgcccatctcggcgtgctggaaataggtaaggaggttcatatgtacacgttacagaacggttttgttcttgatgtctacattggttctgcactggtagatatgtattccaaatgtggtagcttagagcgggcgcttctggtgttcttcaatttgcccaaaaagaatctattttgttggaattcgatcattgaaggactggcggctcatggttttgcacaagaagcactgaaaatgtttgccaagatggagatggagtcggtgaaacctaacgcagtcacttttgtgagtgtttttactgcgtgtactcacgcaggtcttgttgacgaaggtcggaggatatatcgcagcatgattgatgactattccattgtctctaatgttgaacattacggaggcatggttcatctattcagcaaagctgggttgatctatgaggctcttgaattgattggaaatatggaatttgaaccaaatgcggttatctggggggccttgcttgatgggtgcagaattcacaagaatctcgtgatagctgaaatagcgtttaacaaactgatggttttggagccgatgaatagtgggtattatttccttttagttagcatgtatgcagaacaaaacaggtggagagatgttgcagagattaggggaaggatgagagagttgggtatagaaaagatatgtcctgggacaagttcgattcggatagataaacgagaccatctgtttgctgcagctgataagtctcactcagcttcagatgaggtttgcttgctgcttgatgagatatatgatcagatgggattagctggatatgtgcaggaaactgagaatgtatattaa

SEQ ID NO: 73611 - protein, 1288 aa, Arabidopsis thaliana
  peptide (1)..(1288): Ceres Seq. ID no. 4972527
MGYTLQQILRSICSNTDWNYAVFWKLNHHSPMVLTLEDVYCVNHERGLMPESLHGGRHAHDPLGLAVAKMSYHVHNGWESQISAGIKTILIVAVGSCGVVQLGSLCKVEEDPALVTHIRHLFLALTDPLADHASNLMQCDINSPSDRPKIPSKCLHEASPDFSGEFDKAMDMEGLNIVSQNTSNRSNDLPYNFTPTYFHMERTAQVIGGLEAVQPSMFGSNDCVTSGFSVGVVDTKHKNQVDISDMSKVIYDEETGGYRYSRELDPNFQHYSRNHVRNSGGTSALAMESDRLKAGSSYPQLDSTVLTALKTDKDYSRRNEVFQPSESQGSIFVKDTEHRQEEKSESSQLDALTASLCSFSGSELLEALGPAFSKTSTDYGELAKFESAAAIRRTNDMSHSHLTFESSSENLLDAVVASMSNGDGNVRREISSSRSTQSLLTTAEMAQAEPFGHNKQNIVSTVDSVISQPPLADGLIQQNPSNICGAFSSIGFSSTCLSSSSDQFPTSLEIPKKNKKRAKPGESSRPRPRDRQLIQDRIKELRELVPNGSKCSIDSLLECTIKHMLFLQSVSQHADKLTKSASSKMQHKDTGTLGISSTEQGSSWAVEIGGHLQVCSIMVENLDKEGVMLIEMLCEECSHFLEIANVIRSLELIILRGTTEKQGEKTWICFVVEGQNNKVMHRMDILWSLVQIFQPKATNSLHLYRQSQILYMNAFANVHSLRVPSHHLRDFSASLSLAPPNLKKIIKQCSTPKLLESALAAMIKTSLNQDCRLMNQFITACTSFKRLDLAVSTMTQMQEPNVFVYNALFKGFVTCSHPIRSLELYVRMLRDSVSPSSYTYSSLVKASSFASRFGESLQAHIWKFGFGFHVKIQTTLIDFYSATGRIREARKVFDEMPERDDIAWTTMVSAYRRVLDMDSANSLANQMSEKNEATSNCLINGYMGLGNLEQAESLFNQMPVKDIISWTTMIKGYSQNKRYREAIAVFYKMMEEGIIPDEVTMSTVISACAHLGVLEIGKEVHMYTLQNGFVLDVYIGSALVDMYSKCGSLERALLVFFNLPKKNLFCWNSIIEGLAAHGFAQEALKMFAKMEMESVKPNAVTFVSVFTACTHAGLVDEGRRIYRSMIDDYSIVSNVEHYGGMVHLFSKAGLIYEALELIGNMEFEPNAVIWGALLDGCRIHKNLVIAEIAFNKLMVLEPMNSGYYFLLVSMYAEQNRWRDVAEIRGRMRELGIEKICPGTSSIRIDKRDHLFAAADKSHSASDEVCLLLDEIYDQMGLAGYVQETENVY

SEQ ID NO: 73612 - protein, 1257 aa, Arabidopsis thaliana
  peptide (1)..(1257): Ceres Seq. ID no. 4972528
MVLTLEDVYCVNHERGLMPESLHGGRHAHDPLGLAVAKMSYHVHNGWESQISAGIKTILIVAVGSCGVVQLGSLCKVEEDPALVTHIRHLFLALTDPLADHASNLMQCDINSPSDRPKIPSKCLHEASPDFSGEFDKAMDMEGLNIVSQNTSNRSNDLPYNFTPTYFHMERTAQVIGGLEAVQPSMFGSNDCVTSGFSVGVVDTKHKNQVDISDMSKVIYDEETGGYRYSRELDPNFQHYSRNHVRNSGGTSALAMESDRLKAGSSYPQLDSTVLTALKTDKDYSRRNEVFQPSESQGSIFVKDTEHRQEEKSESSQLDALTASLCSFSGSELLEALGPAFSKTSTDYGELAKFESAAAIRRTNDMSHSHLTFESSSENLLDAVVASMSNGDGNVRREISSSRSTQSLLTTAEMAQAEPFGHNKQNIVSTVDSVISQPPLADGLIQQNPSNICGAFSSIGFSSTCLSSSSDQFPTSLEIPKKNKKRAKPGESSRPRPRDRQLIQDRIKELRELVPNGSKCSIDSLLECTIKHMLFLQSVSQHADKLTKSASSKMQHKDTGTLGISSTEQGSSWAVEIGGHLQVCSIMVENLDKEGVMLIEMLCEECSHFLEIANVIRSLELIILRGTTEKQGEKTWICFVVEGQNNKVMHRMDILWSLVQIFQPKATNSLHLYRQSQILYMNAFANVHSLRVPSHHLRDFSASLSLAPPNLKKIIKQCSTPKLLESALAAMIKTSLNQDCRLMNQFITACTSFKRLDLAVSTMTQMQEPNVFVYNALFKGFVTCSHPIRSLELYVRMLRDSVSPSSYTYSSLVKASSFASRFGESLQAHIWKFGFGFHVKIQTTLIDFYSATGRIREARKVFDEMPERDDIAWTTMVSAYRRVLDMDSANSLANQMSEKNEATSNCLINGYMGLGNLEQAESLFNQMPVKDIISWTTMIKGYSQNKRYREAIAVFYKMMEEGIIPDEVTMSTVISACAHLGVLEIGKEVHMYTLQNGFVLDVYIGSALVDMYSKCGSLERALLVFFNLPKKNLFCWNSIIEGLAAHGFAQEALKMFAKMEMESVKPNAVTFVSVFTACTHAGLVDEGRRIYRSMIDDYSIVSNVEHYGGMVHLFSKAGLIYEALELIGNMEFEPNAVIWGALLDGCRIHKNLVIAEIAFNKLMVLEPMNSGYYFLLVSMYAEQNRWRDVAEIRGRMRELGIEKICPGTSSIRIDKRDHLFAAADKSHSASDEVCLLLDEIYDQMGLAGYVQETENVY

SEQ ID NO: 73613 - protein, 1240 aa, Arabidopsis thaliana
  peptide (1)..(1240): Ceres Seq. ID no. 4972529
MPESLHGGRHAHDPLGLAVAKMSYHVHNGWESQISAGIKTILIVAVGSCGVVQLGSLCKVEEDPALVTHIRHLFLALTDPLADHASNLMQCDINSPSDRPKIPSKCLHEASPDFSGEFDKAMDMEGLNIVSQNTSNRSNDLPYNFTPTYFHMERTAQVIGGLEAVQPSMFGSNDCVTSGFSVGVVDTKHKNQVDISDMSKVIYDEETGGYRYSRELDPNFQHYSRNHVRNSGGTSALAMESDRLKAGSSYPQLDSTVLTALKTDKDYSRRNEVFQPSESQGSIFVKDTEHRQEEKSESSQLDALTASLCSFSGSELLEALGPAFSKTSTDYGELAKFESAAAIRRTNDMSHSHLTFESSSENLLDAVVASMSNGDGNVRREISSSRSTQSLLTTAEMAQAEPFGHNKQNIVSTVDSVISQPPLADGLIQQNPSNICGAFSSIGFSSTCLSSSSDQFPTSLEIPKKNKKRAKPGESSRPRPRDRQLIQDRIKELRELVPNGSKCSIDSLLECTIKHMLFLQSVSQHADKLTKSASSKMQHKDTGTLGISSTEQGSSWAVEIGGHLQVCSIMVENLDKEGVMLIEMLCEECSHFLEIANVIRSLELIILRGTTEKQGEKTWICFVVEGQNNKVMHRMDILWSLVQIFQPKATNSLHLYRQSQILYMNAFANVHSLRVPSHHLRDFSASLSLAPPNLKKIIKQCSTPKLLESALAAMIKTSLNQDCRLMNQFITACTSFKRLDLAVSTMTQMQEPNVFVYNALFKGFVTCSHPIRSLELYVRMLRDSVSPSSYTYSSLVKASSFASRFGESLQAHIWKFGFGFHVKIQTTLIDFYSATGRIREARKVFDEMPERDDIAWTTMVSAYRRVLDMDSANSLANQMSEKNEATSNCLINGYMGLGNLEQAESLFNQMPVKDIISWTTMIKGYSQNKRYREAIAVFYKMMEEGIIPDEVTMSTVISACAHLGVLEIGKEVHMYTLQNGFVLDVYIGSALVDMYSKCGSLERALLVFFNLPKKNLFCWNSIIEGLAAHGFAQEALKMFAKMEMESVKPNAVTFVSVFTACTHAGLVDEGRRIYRSMIDDYSIVSNVEHYGGMVHLFSKAGLIYEALELIGNMEFEPNAVIWGALLDGCRIHKNLVIAEIAFNKLMVLEPMNSGYYFLLVSMYAEQNRWRDVAEIRGRMRELGIEKICPGTSSIRIDKRDHLFAAADKSHSASDEVCLLLDEIYDQMGLAGYVQETENVY

SEQ ID NO: 73614 - DNA, 1068 bp, Arabidopsis thaliana
  misc_feature (1)..(1068): Ceres Seq. ID no. 4972719
  misc_feature (1)..(1068): Ortholog of  Ceres SEQ ID NO 13579918 as cited in SEQ ID NO 64644
  misc_feature (1)..(1068): Ortholog of  Ceres SEQ ID NO 13654122 as cited in SEQ ID NO 68192
atgactaaatctcatgtcattttctctgcctccatcgctctctttctcctactctccatctcgcatttcccgggagctctctctcaatccaataaagattgccaatcaaaatccaactactcatgtatagacaaaaacaaagcattagatctcaaactcttatcaatcttctcaattctcatcactagtctaatcggtgtttgcctcccgttctttgcccgatcaattcccgctttccaacccgagaaatctcacttcctcatcgtaaaatctttcgcctccggaatcatcctttccactggtttcatgcatgtcttgcctgattctttcgagatgctttcatctccttgtcttaacgataacccctggcacaagtttcctttcgccggctttgtagccatgatgtctgccgtgttcacgctcatggttgactctattaccaccagcgtcttcaccaagtcaggaaggaaagatctacgtgctgacgtagcatccgttgagactcctgaccaagagatagggcacgtacaggttcatggccatgttcatagccatactcttcctcacaatcttcatggagagaatgataaagagcttggttcttatttacagcttctgcggtatcgtattcttgcaatctcgatagtgataggactatcggtaggagacactaacaatacttgcaccatcaaaggactcgtcgctgcgctttgcttccatcaaatgttcgaaggcatgggtctcggcggttgcatccttcaggcggagtacgggtgggttaaaaaggcggtgatggctttcttttttgcggtgacgacgccttttggagtggttctagggatggcactatctaaaacatacaaagagaatagccctgaatcgcttataacagttgggttgctcaacgcttcctcggcaggactactcatctacatggctttagttgaccttctagctgccgattttatgggtcaaaaaatgcaaaggagcatcaagcttcaattaaagtcatatgctgccgttttgcttggtgctggtggcatgtccgtcatggccaagtgggcttga

SEQ ID NO: 73615 - protein, 355 aa, Arabidopsis thaliana
  peptide (1)..(355): Ceres Seq. ID no. 4972720
MTKSHVIFSASIALFLLLSISHFPGALSQSNKDCQSKSNYSCIDKNKALDLKLLSIFSILITSLIGVCLPFFARSIPAFQPEKSHFLIVKSFASGIILSTGFMHVLPDSFEMLSSPCLNDNPWHKFPFAGFVAMMSAVFTLMVDSITTSVFTKSGRKDLRADVASVETPDQEIGHVQVHGHVHSHTLPHNLHGENDKELGSYLQLLRYRILAISIVIGLSVGDTNNTCTIKGLVAALCFHQMFEGMGLGGCILQAEYGWVKKAVMAFFFAVTTPFGVVLGMALSKTYKENSPESLITVGLLNASSAGLLIYMALVDLLAADFMGQKMQRSIKLQLKSYAAVLLGAGGMSVMAKWA

SEQ ID NO: 73616 - protein, 253 aa, Arabidopsis thaliana
  peptide (1)..(253): Ceres Seq. ID no. 4972721
MHVLPDSFEMLSSPCLNDNPWHKFPFAGFVAMMSAVFTLMVDSITTSVFTKSGRKDLRADVASVETPDQEIGHVQVHGHVHSHTLPHNLHGENDKELGSYLQLLRYRILAISIVIGLSVGDTNNTCTIKGLVAALCFHQMFEGMGLGGCILQAEYGWVKKAVMAFFFAVTTPFGVVLGMALSKTYKENSPESLITVGLLNASSAGLLIYMALVDLLAADFMGQKMQRSIKLQLKSYAAVLLGAGGMSVMAKWA

SEQ ID NO: 73617 - protein, 244 aa, Arabidopsis thaliana
  peptide (1)..(244): Ceres Seq. ID no. 4972722
MLSSPCLNDNPWHKFPFAGFVAMMSAVFTLMVDSITTSVFTKSGRKDLRADVASVETPDQEIGHVQVHGHVHSHTLPHNLHGENDKELGSYLQLLRYRILAISIVIGLSVGDTNNTCTIKGLVAALCFHQMFEGMGLGGCILQAEYGWVKKAVMAFFFAVTTPFGVVLGMALSKTYKENSPESLITVGLLNASSAGLLIYMALVDLLAADFMGQKMQRSIKLQLKSYAAVLLGAGGMSVMAKWA

SEQ ID NO: 73618 - DNA, 753 bp, Arabidopsis thaliana
  misc_feature (1)..(753): Ceres Seq. ID no. 4972785
  misc_feature (1)..(753): Ortholog of  Ceres SEQ ID NO 14303831 as cited in SEQ ID NO 52976
  misc_feature (1)..(753): Ortholog of  Ceres SEQ ID NO 12619453 as cited in SEQ ID NO 65952
atgaatgttctgggggtttcatctttcaaggcttcttctattattccgtttcttcaagggtcgaaatggattaagaatccaccggtgattgatgacgtggataaaggaggaacagtttgtgatgatgatgatgataaggaatcgaggaatggaggaagtggatgggttaataagcttttgagtgtttgttctgaggatgctaaggctgctttcacggcggttactgtttctatcctttttagatcagctcttgcggagccaaagtcgattccttcaacgtctatgtaccctaccttggacaagggtgatcgcgttatggcggagaaggtctcatactttttcaggaagccagaggtttcagatatagtaatcttcaaggctcctccaattttgctggaatatccggaatatggctacagttccaatgatgtattcataaaaaggatagtggcaagtgaaggtgactgggttgaagttcgtgatgggaagctctttgtgaatgacattgtgcaagaagaagattttgtcttagaaccaatgtcatatgaaatggaaccaatgtttgtccccaaaggttatgtctttgtccttggtgataaccgcaacaaaagctttgactctcataactggggtccacttccaatagagaacatcgttggaagatctgtgttccggtactggccaccgagcaaagtatcagacaccatataccacgaccaagctatcacaaggggacctgttgcagtttcatga

SEQ ID NO: 73619 - protein, 250 aa, Arabidopsis thaliana
  peptide (1)..(250): Ceres Seq. ID no. 4972786
MNVLGVSSFKASSIIPFLQGSKWIKNPPVIDDVDKGGTVCDDDDDKESRNGGSGWVNKLLSVCSEDAKAAFTAVTVSILFRSALAEPKSIPSTSMYPTLDKGDRVMAEKVSYFFRKPEVSDIVIFKAPPILLEYPEYGYSSNDVFIKRIVASEGDWVEVRDGKLFVNDIVQEEDFVLEPMSYEMEPMFVPKGYVFVLGDNRNKSFDSHNWGPLPIENIVGRSVFRYWPPSKVSDTIYHDQAITRGPVAVS

SEQ ID NO: 73620 - protein, 156 aa, Arabidopsis thaliana
  peptide (1)..(156): Ceres Seq. ID no. 4972787
MYPTLDKGDRVMAEKVSYFFRKPEVSDIVIFKAPPILLEYPEYGYSSNDVFIKRIVASEGDWVEVRDGKLFVNDIVQEEDFVLEPMSYEMEPMFVPKGYVFVLGDNRNKSFDSHNWGPLPIENIVGRSVFRYWPPSKVSDTIYHDQAITRGPVAVS

SEQ ID NO: 73621 - protein, 145 aa, Arabidopsis thaliana
  peptide (1)..(145): Ceres Seq. ID no. 4972788
MAEKVSYFFRKPEVSDIVIFKAPPILLEYPEYGYSSNDVFIKRIVASEGDWVEVRDGKLFVNDIVQEEDFVLEPMSYEMEPMFVPKGYVFVLGDNRNKSFDSHNWGPLPIENIVGRSVFRYWPPSKVSDTIYHDQAITRGPVAVS

SEQ ID NO: 73622 - DNA, 906 bp, Arabidopsis thaliana
  misc_feature (1)..(906): Ceres Seq. ID no. 4972958
  misc_feature (1)..(906): Ortholog of  Ceres SEQ ID NO 14308776 as cited in SEQ ID NO 55124
atgttggaaacagaccttgaagctcggatgcaaatcctgcgtgagtctggttttcaagaaagccaaggagatgatgatacctttgctcaacgagctgaatggttttaccagggacgacctttgcttctctcactttgtctggacctgtacaacggctacgtcactctcttgggtcgttcttctcatcagaccagacttaaacccactacttctcttccgaaccagcttctccaagatgatgatgactgcatttcggacattgattccgttagtgaggtcagttctgaagttgagagcaccttatcctttcaacagatgaaagatcctactgcggtttctgagaaagtcgatgagcttgtatcccaacttgtgacagcaagcttggacaaagagattctgaaacacgagttacttcacaaggaccaacagtttcatgaagcctccaagactatagagctgttgaagaagtttgtcatgttgctggagatggagaaagaagtggctgtggaggaaaacgctaatcttggctacaaactcacttctctcttggaggagaacagagagctagccactgaggcattgttcatgaagaacgaagctgttgggcttgctaggtgtgtgcttaagatgagagatgaccactttcacaaggtctgcattctccagaaccgcatctactcgcttcaggcatctaggaactcagagcccgtctctgataaggtctcatacggatgctttggcctggataagcataagaccaaaaagaagaaggagaacaaaaccgaagagaagaagcctggattcaagtggttgaagaaactgaacaccattaacctgtttacaaagtgcagccttaacccatcggctgctgctccatcatgctgcactttcgacttgccttattag

SEQ ID NO: 73623 - protein, 301 aa, Arabidopsis thaliana; identical to SEQ ID NO: 70116
  peptide (1)..(301): Ceres Seq. ID no. 4972959

SEQ ID NO: 73624 - protein, 292 aa, Arabidopsis thaliana; identical to SEQ ID NO: 70117
  peptide (1)..(292): Ceres Seq. ID no. 4972960

SEQ ID NO: 73625 - protein, 196 aa, Arabidopsis thaliana
  peptide (1)..(196): Ceres Seq. ID no. 4972961
MKDPTAVSEKVDELVSQLVTASLDKEILKHELLHKDQQFHEASKTIELLKKFVMLLEMEKEVAVEENANLGYKLTSLLEENRELATEALFMKNEAVGLARCVLKMRDDHFHKVCILQNRIYSLQASRNSEPVSDKVSYGCFGLDKHKTKKKKENKTEEKKPGFKWLKKLNTINLFTKCSLNPSAAAPSCCTFDLPY

SEQ ID NO: 73626 - DNA, 1482 bp, Arabidopsis thaliana
  misc_feature (1)..(1482): Ceres Seq. ID no. 4972986
  misc_feature (1)..(1482): Ortholog of  Ceres SEQ ID NO 13639663 as cited in SEQ ID NO 57850
atggctgcaatggctcgctgtgctttgattccatctataaacccagctcatagcttccgtcatcagtttccgcaacccaatgcgtcattctatttacctcccactcttccgattttttcgcgtgttcggagatttggaatttccggcggatatcgccgccgtgtgatcaccatggccgccggaactgatcactactcgactttgaatgtgaaccgcaatgccaccttgcaggagatcaagagctcgtatagaaaactcgctcgcaagtatcacccagatatgaacaagaaccctggtgcagaagataagttcaaacagataagtgctgcttacgaggtattatctgatgaggagaagagatctgcctatgatcggttcggcgaggctggtttagaaggtgattttaatggatcacaggatacttcaccaggggtggatccatttgacttgtacagtgcattctttggaggttctgatggattctttgggggaatgggtgaatcaggagggatgggttttgatttcatgaataagagaagcctagaccttgacattcgatatgacctgcggttgagctttgaagaggcagtttttggagtaaaacgggagattgaggtttcttatttagaaacatgtgatggttgtggaggaactggtgctaaatccagtaactccattaaacagtgtagtagttgtgatggtaaaggacgtgtgatgaattctcagagaacaccctttggaatcatgtctcaggtgtccacttgctccaaatgtggtggtgaaggaaaaactatcactgataagtgtcgaaagtgcattggcaacgggagactacgggctaggaaaaagatggatgttgtagtccctcctggtgtcagcgatagagccacaatgcgaattcaaggagaaggtaacatggacaagagaagtggaagagctggtgacttgttcatcgtacttcaagttgatgagaagcgtggaattcggcgggaagggcttaatttatactccaatatcaacatagatttcacagatgctatacttggggcgaccacaaaggtagaaacggttgagggatcaatggatcttcggattccgccaggaactcaacctggcgacaccgtaaaattacctaggaaaggagttccagacacggatagaccttcaatccggggagaccattgctttgtagtgaaaatttcgatccccaaaaaactgagggagcgcaagttggtagaggaattctcgtcgctcagaagatctagtagtagtactggacctactgagcccagaaaagaaccatctttgtggcataaaatgaagaatttcataagaagattcaagaacgaaatttgggactatgagcttaaacccatcattaccattacgaagaatgaaagtgtcagagacttcaattgctttttcagtcttggctctgtgcgttataacctcggctgttgcattggtacagaagaagggtaa

SEQ ID NO: 73627 - protein, 493 aa, Arabidopsis thaliana
  peptide (1)..(493): Ceres Seq. ID no. 4972987
MAAMARCALIPSINPAHSFRHQFPQPNASFYLPPTLPIFSRVRRFGISGGYRRRVITMAAGTDHYSTLNVNRNATLQEIKSSYRKLARKYHPDMNKNPGAEDKFKQISAAYEVLSDEEKRSAYDRFGEAGLEGDFNGSQDTSPGVDPFDLYSAFFGGSDGFFGGMGESGGMGFDFMNKRSLDLDIRYDLRLSFEEAVFGVKREIEVSYLETCDGCGGTGAKSSNSIKQCSSCDGKGRVMNSQRTPFGIMSQVSTCSKCGGEGKTITDKCRKCIGNGRLRARKKMDVVVPPGVSDRATMRIQGEGNMDKRSGRAGDLFIVLQVDEKRGIRREGLNLYSNINIDFTDAILGATTKVETVEGSMDLRIPPGTQPGDTVKLPRKGVPDTDRPSIRGDHCFVVKISIPKKLRERKLVEEFSSLRRSSSSTGPTEPRKEPSLWHKMKNFIRRFKNEIWDYELKPIITITKNESVRDFNCFFSLGSVRYNLGCCIGTEEG

SEQ ID NO: 73628 - protein, 490 aa, Arabidopsis thaliana
  peptide (1)..(490): Ceres Seq. ID no. 4972988
MARCALIPSINPAHSFRHQFPQPNASFYLPPTLPIFSRVRRFGISGGYRRRVITMAAGTDHYSTLNVNRNATLQEIKSSYRKLARKYHPDMNKNPGAEDKFKQISAAYEVLSDEEKRSAYDRFGEAGLEGDFNGSQDTSPGVDPFDLYSAFFGGSDGFFGGMGESGGMGFDFMNKRSLDLDIRYDLRLSFEEAVFGVKREIEVSYLETCDGCGGTGAKSSNSIKQCSSCDGKGRVMNSQRTPFGIMSQVSTCSKCGGEGKTITDKCRKCIGNGRLRARKKMDVVVPPGVSDRATMRIQGEGNMDKRSGRAGDLFIVLQVDEKRGIRREGLNLYSNINIDFTDAILGATTKVETVEGSMDLRIPPGTQPGDTVKLPRKGVPDTDRPSIRGDHCFVVKISIPKKLRERKLVEEFSSLRRSSSSTGPTEPRKEPSLWHKMKNFIRRFKNEIWDYELKPIITITKNESVRDFNCFFSLGSVRYNLGCCIGTEEG

SEQ ID NO: 73629 - protein, 436 aa, Arabidopsis thaliana
  peptide (1)..(436): Ceres Seq. ID no. 4972989
MAAGTDHYSTLNVNRNATLQEIKSSYRKLARKYHPDMNKNPGAEDKFKQISAAYEVLSDEEKRSAYDRFGEAGLEGDFNGSQDTSPGVDPFDLYSAFFGGSDGFFGGMGESGGMGFDFMNKRSLDLDIRYDLRLSFEEAVFGVKREIEVSYLETCDGCGGTGAKSSNSIKQCSSCDGKGRVMNSQRTPFGIMSQVSTCSKCGGEGKTITDKCRKCIGNGRLRARKKMDVVVPPGVSDRATMRIQGEGNMDKRSGRAGDLFIVLQVDEKRGIRREGLNLYSNINIDFTDAILGATTKVETVEGSMDLRIPPGTQPGDTVKLPRKGVPDTDRPSIRGDHCFVVKISIPKKLRERKLVEEFSSLRRSSSSTGPTEPRKEPSLWHKMKNFIRRFKNEIWDYELKPIITITKNESVRDFNCFFSLGSVRYNLGCCIGTEEG

SEQ ID NO: 73630 - DNA, 2103 bp, Arabidopsis thaliana
  misc_feature (1)..(2103): Ceres Seq. ID no. 4973092
  misc_feature (1)..(2103): Ortholog of  Ceres SEQ ID NO 13654989 as cited in SEQ ID NO 63117
  misc_feature (1)..(2103): Ortholog of  Ceres SEQ ID NO 13584744 as cited in SEQ ID NO 69137
atggcggaggggcaatccccggagaattcaccgccgtcccctacaccaccatctccgtcatcatccgacaatcaacaacaatcctctcctccgccttctgattcctcctctccttcaccaccagctcctcctccgcccgatgattcctcaaatggttcacctcaaccgccttcttcagactcacaatcaccaccatctccgcaaggaaacaataacaatgatggcaacaatggtaataacaacaatgacaacaacaacaacaacaatggtaataacaacaacgacaacaacaatgggaataacaaagacaacaacaacaatggcaataacaacaatggtaataacaacaatggaaatgacaacaatggcaataacaacaatgggaataacaatgacaacaacaaccaaaacaatggcggaggaagcaacaatcgttcacctccgcctccttccagaaactctgaccgtaactctccttccccaccaagagcgctggctcctcctagatcaagcggtggtggttccaactcctccggcaacaatgaaccaaacacggctgctatcgtaggaattgtggctggtgctggattgttgtttcttgttatgatattgttctgcgtctgttgctgtcgtaagaaaaaaaagaagcatcaaatgccctattatgcaggaaacggctacgccaccggcaaaggtgatcaataccaacagcagcaatacaataaccagagcgatcacgtaatgaatctgtctcagcagtatcctggatccaacgggaataataactggatgaattcaccgcctccaccaccaccaggaagctggcaaccatcgccgcctccaccaccaccgccagtctcaggcggtatgaatggaaacagtagcgactttagctcaaactactcaggaccacatggtccgtcggtaccaccacctcacccttcagtggctctaggtttcaacaagagcacattcacctacgacgagctagccgctgcaactcaaggcttctcccaatcaagattgttaggtcaaggcgggttcggatatgttcacaagggaatacttcccaatgggaaagagattgcggtgaagagtctgaaagcgggaagcgggcaaggagagcgcgagtttcaggctgaggttgacatcattagccgagttcatcatcggtttcttgtgtctcttgttggatattgtattgcaggaggacagaggatgttggtttatgagttcttacctaatgacacacttgagttccatctccatggtaaaagtggcaaggttcttgactggcctacaagactcaagattgctttgggatcagctaaaggacttgcttacttacatgaagactgtcatccgagaatcattcatagagacattaaagcttcaaacattcttcttgatgaatcctttgaggctaaggttgcagacttcgggttagcgaagctatctcaagacaatgttacgcatgtctccactcgtatcatgggaactttcgggtacttggctccagagtatgcgtcaagcgggaaactgacagaccgatcagatgttttctcctttggagtgatgcttcttgagctagttaccggacgcagacctgttgatctcactggtgaaatggaagacagtttggtcgattgggcaagacccatatgcttaaacgcagctcaggatggagattacagtgaactagttgatccacgtctcgaaaaccaatacgagcctcatgagatggcacaaatggttgcttgtgccgctgcagccgtcaggcactcagctagacgcaggcctaagatgagccagattgttcgggctctggagggagatgcaacgctagacgatctaagcgaaggagggaaagcgggacaaagctcattcctcgggaggggttcaagctcggactatgactcaagcacttacagtgcggatatgaagaagttcaggaaagtggcattggatagtcatgagtacggtgcaagcagcgagtacgggaacacgagcgaatacgggcttgacccgtcttcctcgagcagcgaggagattcgtagaggaggagctaacaacaacaaaaccactcctagccgagaccattga

SEQ ID NO: 73631 - protein, 700 aa, Arabidopsis thaliana
  peptide (1)..(700): Ceres Seq. ID no. 4973093
MAEGQSPENSPPSPTPPSPSSSDNQQQSSPPPSDSSSPSPPAPPPPDDSSNGSPQPPSSDSQSPPSPQGNNNNDGNNGNNNNDNNNNNNGNNNNDNNNGNNKDNNNNGNNNNGNNNNGNDNNGNNNNGNNNDNNNQNNGGGSNNRSPPPPSRNSDRNSPSPPRALAPPRSSGGGSNSSGNNEPNTAAIVGIVAGAGLLFLVMILFCVCCCRKKKKKHQMPYYAGNGYATGKGDQYQQQQYNNQSDHVMNLSQQYPGSNGNNNWMNSPPPPPPGSWQPSPPPPPPPVSGGMNGNSSDFSSNYSGPHGPSVPPPHPSVALGFNKSTFTYDELAAATQGFSQSRLLGQGGFGYVHKGILPNGKEIAVKSLKAGSGQGEREFQAEVDIISRVHHRFLVSLVGYCIAGGQRMLVYEFLPNDTLEFHLHGKSGKVLDWPTRLKIALGSAKGLAYLHEDCHPRIIHRDIKASNILLDESFEAKVADFGLAKLSQDNVTHVSTRIMGTFGYLAPEYASSGKLTDRSDVFSFGVMLLELVTGRRPVDLTGEMEDSLVDWARPICLNAAQDGDYSELVDPRLENQYEPHEMAQMVACAAAAVRHSARRRPKMSQIVRALEGDATLDDLSEGGKAGQSSFLGRGSSSDYDSSTYSADMKKFRKVALDSHEYGASSEYGNTSEYGLDPSSSSSEEIRRGGANNNKTTPSRDH

SEQ ID NO: 73632 - protein, 499 aa, Arabidopsis thaliana
  peptide (1)..(499): Ceres Seq. ID no. 4973094
MILFCVCCCRKKKKKHQMPYYAGNGYATGKGDQYQQQQYNNQSDHVMNLSQQYPGSNGNNNWMNSPPPPPPGSWQPSPPPPPPPVSGGMNGNSSDFSSNYSGPHGPSVPPPHPSVALGFNKSTFTYDELAAATQGFSQSRLLGQGGFGYVHKGILPNGKEIAVKSLKAGSGQGEREFQAEVDIISRVHHRFLVSLVGYCIAGGQRMLVYEFLPNDTLEFHLHGKSGKVLDWPTRLKIALGSAKGLAYLHEDCHPRIIHRDIKASNILLDESFEAKVADFGLAKLSQDNVTHVSTRIMGTFGYLAPEYASSGKLTDRSDVFSFGVMLLELVTGRRPVDLTGEMEDSLVDWARPICLNAAQDGDYSELVDPRLENQYEPHEMAQMVACAAAAVRHSARRRPKMSQIVRALEGDATLDDLSEGGKAGQSSFLGRGSSSDYDSSTYSADMKKFRKVALDSHEYGASSEYGNTSEYGLDPSSSSSEEIRRGGANNNKTTPSRDH

SEQ ID NO: 73633 - protein, 482 aa, Arabidopsis thaliana
  peptide (1)..(482): Ceres Seq. ID no. 4973095
MPYYAGNGYATGKGDQYQQQQYNNQSDHVMNLSQQYPGSNGNNNWMNSPPPPPPGSWQPSPPPPPPPVSGGMNGNSSDFSSNYSGPHGPSVPPPHPSVALGFNKSTFTYDELAAATQGFSQSRLLGQGGFGYVHKGILPNGKEIAVKSLKAGSGQGEREFQAEVDIISRVHHRFLVSLVGYCIAGGQRMLVYEFLPNDTLEFHLHGKSGKVLDWPTRLKIALGSAKGLAYLHEDCHPRIIHRDIKASNILLDESFEAKVADFGLAKLSQDNVTHVSTRIMGTFGYLAPEYASSGKLTDRSDVFSFGVMLLELVTGRRPVDLTGEMEDSLVDWARPICLNAAQDGDYSELVDPRLENQYEPHEMAQMVACAAAAVRHSARRRPKMSQIVRALEGDATLDDLSEGGKAGQSSFLGRGSSSDYDSSTYSADMKKFRKVALDSHEYGASSEYGNTSEYGLDPSSSSSEEIRRGGANNNKTTPSRDH

SEQ ID NO: 73634 - DNA, 1320 bp, Arabidopsis thaliana
  misc_feature (1)..(1320): Ceres Seq. ID no. 4973202
  misc_feature (1)..(1320): Ortholog of  Ceres SEQ ID NO 13595870 as cited in SEQ ID NO 62101
  misc_feature (1)..(1320): Ortholog of  Ceres SEQ ID NO 13590241 as cited in SEQ ID NO 63878
  misc_feature (1)..(1320): Ortholog of  Ceres SEQ ID NO 13660597 as cited in SEQ ID NO 67655
atgaacctagtccctcctaaggaagaagagaacctcatagtattcaacaaacaacttggagaagatagaagaattgtgatgtcacggagcaatttaaatgagctacttaaggcgcttgaggaaaacgagttattgtgcactgacttgtaccaagtgaacaccgatggcgtgatattgacaaagcaaagagcggagaaagttatcggttgggccagaaaccactatttatcttcttgtcctagcccatcgattaaagagggccgcctgattctcccccgtgaaagcattgagatttcagttaaaaggttaaaggcacaagaagatatttctcgaaagcccacacaaaacttgaagagatttttgtttttgcagaatattgcgaaggatgagtttgaaaccaattttgtctcagccgtggttgctcctggagaaattggggtaaagtttgacgacattggtgctcttgaacatgtgaaaaagacactaaatgagttagttattcttcccatgagaaggccagagcttttcacccgtggaaatctcttgcggccatgtaaaggcatattgctttttggtcctccgggtacgggtaaaacgctgcttgccaaggcgcttgcaacagaagctggggcaaacttcattagcataactggctcaacgcttacctcaaagtggtttggagatgcagagaagctcacgaaggctttgttctcttttgcaagcaaactagcccccgtcattatatttgttgatgaggttgacagtttgttgggtgctcgtggtggtgcttttgagcacgaggcaacacgaagaatgagaaatgagtttatggcagcttgggatggactcagatcaaaagatagccaaaggattctcattctcggtgccaccaaccgaccttttgatcttgatgacgctgtcattcgtaggctaccaagacggatatatgtggatttaccagatgcggaaaaccggttgaagatattgaagatatttctgacaccagaaaatcttgaaactggtttcgagtttgataaacttgcaaaggaaaccgaaggatattcaggaagcgatctaaagaatctatgcatagcagctgcatacagacctgttcaagaattgttacaagaagaaaacaaggactcggtaacaaatgcgtcccctgatctacgaccactgagtttggacgacttcattcaatccaaagctaaggtaagtccgtcagtggcatacgacgcgacgacaatgaacgaattgagaaaatggaacgagcaatacggtgaaggagggacccgaactaagtctcctttcggcttctaa

SEQ ID NO: 73635 - protein, 439 aa, Arabidopsis thaliana
  peptide (1)..(439): Ceres Seq. ID no. 4973203
MNLVPPKEEENLIVFNKQLGEDRRIVMSRSNLNELLKALEENELLCTDLYQVNTDGVILTKQRAEKVIGWARNHYLSSCPSPSIKEGRLILPRESIEISVKRLKAQEDISRKPTQNLKRFLFLQNIAKDEFETNFVSAVVAPGEIGVKFDDIGALEHVKKTLNELVILPMRRPELFTRGNLLRPCKGILLFGPPGTGKTLLAKALATEAGANFISITGSTLTSKWFGDAEKLTKALFSFASKLAPVIIFVDEVDSLLGARGGAFEHEATRRMRNEFMAAWDGLRSKDSQRILILGATNRPFDLDDAVIRRLPRRIYVDLPDAENRLKILKIFLTPENLETGFEFDKLAKETEGYSGSDLKNLCIAAAYRPVQELLQEENKDSVTNASPDLRPLSLDDFIQSKAKVSPSVAYDATTMNELRKWNEQYGEGGTRTKSPFGF

SEQ ID NO: 73636 - protein, 413 aa, Arabidopsis thaliana
  peptide (1)..(413): Ceres Seq. ID no. 4973204
MSRSNLNELLKALEENELLCTDLYQVNTDGVILTKQRAEKVIGWARNHYLSSCPSPSIKEGRLILPRESIEISVKRLKAQEDISRKPTQNLKRFLFLQNIAKDEFETNFVSAVVAPGEIGVKFDDIGALEHVKKTLNELVILPMRRPELFTRGNLLRPCKGILLFGPPGTGKTLLAKALATEAGANFISITGSTLTSKWFGDAEKLTKALFSFASKLAPVIIFVDEVDSLLGARGGAFEHEATRRMRNEFMAAWDGLRSKDSQRILILGATNRPFDLDDAVIRRLPRRIYVDLPDAENRLKILKIFLTPENLETGFEFDKLAKETEGYSGSDLKNLCIAAAYRPVQELLQEENKDSVTNASPDLRPLSLDDFIQSKAKVSPSVAYDATTMNELRKWNEQYGEGGTRTKSPFGF

SEQ ID NO: 73637 - protein, 270 aa, Arabidopsis thaliana
  peptide (1)..(270): Ceres Seq. ID no. 4973205
MRRPELFTRGNLLRPCKGILLFGPPGTGKTLLAKALATEAGANFISITGSTLTSKWFGDAEKLTKALFSFASKLAPVIIFVDEVDSLLGARGGAFEHEATRRMRNEFMAAWDGLRSKDSQRILILGATNRPFDLDDAVIRRLPRRIYVDLPDAENRLKILKIFLTPENLETGFEFDKLAKETEGYSGSDLKNLCIAAAYRPVQELLQEENKDSVTNASPDLRPLSLDDFIQSKAKVSPSVAYDATTMNELRKWNEQYGEGGTRTKSPFGF

SEQ ID NO: 73638 - DNA, 540 bp, Arabidopsis thaliana
  misc_feature (1)..(540): Ceres Seq. ID no. 4973596
  misc_feature (1)..(540): Ortholog of  Ceres SEQ ID NO 14314759 as cited in SEQ ID NO 59915
  misc_feature (1)..(540): Ortholog of  Ceres SEQ ID NO 13661769 as cited in SEQ ID NO 61435
  misc_feature (1)..(540): Ortholog of  Ceres SEQ ID NO 13600585 as cited in SEQ ID NO 0
atgcaagactcttcctctcacgaatcgcaacgtaacctccggtcaccggtgccggagaaaaccggaaagagttctaagactaaaaatgagcaaaaaggtgtttctaaacaaccaaattttcgtggggtcagaatgagacaatggggaaaatgggtgtctgaaattagagaaccaagaaagaaatcaagaatatggctcggtactttctctacgccggagatggcggcgcgtgcacacgacgtggcggctttagccatcaaaggtggctctgcccaccttaatttcccggagctagcttaccatttgccgagaccggctagcgcggaccctaaagacattcaagaagccgccgccgcagcagctgccgttgactggaaagcaccggagtctccgtctagcaccgtgacgtcatctccagtcgccgacgacgctttctccgatcttcctgatcttttgcttgacgtgaatgatcacaacaaaaacgatggattctgggactcgtttccgtacgaagatcctttcttcttggaaaattactag

SEQ ID NO: 73639 - protein, 179 aa, Arabidopsis thaliana; identical to SEQ ID NO: 70194
  peptide (1)..(179): Ceres Seq. ID no. 4973597

SEQ ID NO: 73640 - protein, 135 aa, Arabidopsis thaliana; identical to SEQ ID NO: 70195
  peptide (1)..(135): Ceres Seq. ID no. 4973598

SEQ ID NO: 73641 - protein, 106 aa, Arabidopsis thaliana
  peptide (1)..(106): Ceres Seq. ID no. 4973599
MAARAHDVAALAIKGGSAHLNFPELAYHLPRPASADPKDIQEAAAAAAAVDWKAPESPSSTVTSSPVADDAFSDLPDLLLDVNDHNKNDGFWDSFPYEDPFFLENY

SEQ ID NO: 73642 - DNA, 2640 bp, Arabidopsis thaliana
  misc_feature (1)..(2640): Ceres Seq. ID no. 4973674
  misc_feature (1)..(2640): Ortholog of  Ceres SEQ ID NO 13654989 as cited in SEQ ID NO 63117
  misc_feature (1)..(2640): Ortholog of  Ceres SEQ ID NO 13584744 as cited in SEQ ID NO 69137
atgctcttttgggttttgctcagtagtttctgtgtgttttgtttctccagtccagatggtttcttgagcttatcatgtggcggctcaagttacaccgctgcttataacatctcatgggtttcagacaacgattatatcgaaacaggtaacactaccacggttacttacgccgaggggaattctacttccagtgttcccatcagattattcccggatcctcaaggtcgccaatgttacaagttacctgtgaggaaagacttgtcttcagttctgattcgtgctacattcgtttatagaaactatgatagccagaatagtcctccagcatttcatgtctctcttggaaggagaatcactagtactgttgatcttagaaccaatgatccttggattgaagagttagtttggccagtcaacaatgattctcttttgctttgcttgcttgcggttaaaggaagaggtattccggttatctcttctctagaagtacggccacttcctttaggttcttacaaatacagcctggagggttcaccagatataattctcaggagaagttaccgaatcaatagcggatacacaaatgggactatccggtatccttcagatccatttgatcgaatatgggatccggatcaaagttattcaccgtttcacgcctcttggagcttcaatggactcacaaaattgaattccttcaatattactgagaatccaccagcttctgttcttaagacagcaagaattcttgctcgcaaagaaagtctttcatatactctttctctacatacaccaggggactactacattatcctctactttgctgggatactctcactctccccttcttttagtgtgacgatcaatgatgaagtcaaacaatctgattacaccgtaactagctcagaagctggtaccttgtactttacgcaaaaaggaatcagtaagttaaacatcaccctcagaaaaatcaagttcaatcctcaagtgagtgctcttgaggtatatgaaatcctccaaatccctcctgaagcttcttctaccacagtttcggcacttaaagtcatagagcaatttaccgggcaagaccttggatggcaagacgacccatgcacaccgcttccttggaaccacatcgaatgtgaaggaaaccgtgttacatcattgttcctttcaaaaatcaacctgaggtccattagtccaacattcggagacttgctcgatctcaaaacactcgacttgcataatacatcacttacaggagcaatacagaatgtaggcagccttaaggatctccagaaactgaatttgagcttcaatcagttagaatcttttggctccgagctggaagatctggttaaccttgaagttctggacctgcaaaacaacagcttacaaggatcagttcctgaaacattaggaaagctgaagaaacttcgtctcctgaatctggaaaacaataacttagtaggtcccttgccacagtctcttaacataacgggtctggaagtcaggataacgggaaatccatgcctttcgttctcttcaatatcatgcaacaatgtgtcttcaacaattgacacaccacaagtcactatccctatcaataagaaacaaagaaaacagaaccgtatagcgatcttgcttggagtttctggtggagccttgtttgccacctttcttgtctttgttttcatgtcgatcttcacgaggagacagagaaacaaagagagagatataaccagagcacaactgaaaatgcagaactggaacgcttcaagaatcttttctcacaaagagatcaagtcagctactagaaatttcaaggaagtgattggtcgtggaagttttggagctgtataccgtggaaaactaccagatggaaaacaagttgcggtcaaagtgcaccttttgtctcagatccgccaccaaaatctagtttcatttgagggcttctgctatgaaccaaaacgtcaaatactggtgtatgagtatctgtctggtggatccttagctgatcacctttacggtccacgtagcaaaaggcattcattgaactgggtttcaagactaaaagttgctgttgatgctgcaaaaggattggactacctgcataatggaagtgagccgagaattatacatcgggatgtaaagagcagtaacatacttttagacaaggatatgaacgcgaaagtttctgattttggcctgtcaaaacaatttacaaaagcagatgcatctcatattactactgttgttaaaggcaccgcaggctaccttgaccccgaatattactctaccctgcagctgacagagaaaagtgatgtctatagctttggtgtggttctgttggagcttatctgtggaagagaacccttaagtcactcaggatcaccagattcgtttaacttggtcttatgggctaggccaaacttacaagcaggagcttttgagattgtggatgatatcttgaaggagacatttgatccagcgagcatgaaaaaagctgcttcgattgctataagatgtgtgggaagagatgcatctggaagaccgtctatcgccgaagttttgactaaactgaaagaagcgtacagtcttcaactctcatatctagctgcttcagcacatacagactga

SEQ ID NO: 73643 - protein, 879 aa, Arabidopsis thaliana
  peptide (1)..(879): Ceres Seq. ID no. 4973675
MLFWVLLSSFCVFCFSSPDGFLSLSCGGSSYTAAYNISWVSDNDYIETGNTTTVTYAEGNSTSSVPIRLFPDPQGRQCYKLPVRKDLSSVLIRATFVYRNYDSQNSPPAFHVSLGRRITSTVDLRTNDPWIEELVWPVNNDSLLLCLLAVKGRGIPVISSLEVRPLPLGSYKYSLEGSPDIILRRSYRINSGYTNGTIRYPSDPFDRIWDPDQSYSPFHASWSFNGLTKLNSFNITENPPASVLKTARILARKESLSYTLSLHTPGDYYIILYFAGILSLSPSFSVTINDEVKQSDYTVTSSEAGTLYFTQKGISKLNITLRKIKFNPQVSALEVYEILQIPPEASSTTVSALKVIEQFTGQDLGWQDDPCTPLPWNHIECEGNRVTSLFLSKINLRSISPTFGDLLDLKTLDLHNTSLTGAIQNVGSLKDLQKLNLSFNQLESFGSELEDLVNLEVLDLQNNSLQGSVPETLGKLKKLRLLNLENNNLVGPLPQSLNITGLEVRITGNPCLSFSSISCNNVSSTIDTPQVTIPINKKQRKQNRIAILLGVSGGALFATFLVFVFMSIFTRRQRNKERDITRAQLKMQNWNASRIFSHKEIKSATRNFKEVIGRGSFGAVYRGKLPDGKQVAVKVHLLSQIRHQNLVSFEGFCYEPKRQILVYEYLSGGSLADHLYGPRSKRHSLNWVSRLKVAVDAAKGLDYLHNGSEPRIIHRDVKSSNILLDKDMNAKVSDFGLSKQFTKADASHITTVVKGTAGYLDPEYYSTLQLTEKSDVYSFGVVLLELICGREPLSHSGSPDSFNLVLWARPNLQAGAFEIVDDILKETFDPASMKKAASIAIRCVGRDASGRPSIAEVLTKLKEAYSLQLSYLAASAHTD

SEQ ID NO: 73644 - DNA, 981 bp, Arabidopsis thaliana
  misc_feature (1)..(981): Ceres Seq. ID no. 4973692
  misc_feature (1)..(981): Ortholog of  Ceres SEQ ID NO 13593855 as cited in SEQ ID NO 53838
  misc_feature (1)..(981): Ortholog of  Ceres SEQ ID NO 14302247 as cited in SEQ ID NO 62154
  misc_feature (1)..(981): Ortholog of  Ceres SEQ ID NO 13539874 as cited in SEQ ID NO 64069
atgaacagagacgaaatattgtccaaattcatttcttacagtaacaaacaggaaaaaaagatggagagaagcttgaagaagacgaagaacaattataacaactccataaagagcaatcttatgaaagatgatgaattgtttcatgtgattcacaaagttccctgtggagacactccttatgtcagagccaaacatgctcagttgatagagaagaacccggagatggcaatagtgtggttttggaaagccatcaacactggagacagagtagacagtgccctcaaggacatggctgttgtaatgaaacaacttgaccgttctgaagaagctattgaagctatcaaatctttccgtcctcgttgttccaagaattcccaagattcccttgacaatgtcctcatcgacttatacaagaaatgtgggagaatggaggagcaagttgagttgttgaagaggaaattaaggcagatctatcaaggagaagctttcaatggtaaacctaccaaaaccgctcgctcccacggaaaaaagtttcaagtgactgttcaacaagaaatctcaagattactgggtaacttggggtgggcatatatgcaacaagccaagtacttatcggccgaagcggtatacagaaaagcccagatggttgagccagatgctaacaaatcgtgcaaccttgcgatgtgccttatcaaacaaggcaggtttgaggagggaagattggttcttgacgatgttctcgagtatagggttttgggtgcggatgattgtagaacaaggcaacgggccgaagagcttctgagtgaattagagtcttcgctgccacggatgcgagatgctgagatggaggatgtcttgggaaatatcttagacgatgactttgttcttgggcttgaagagatgacatccactagttttaaatctaagagactcccaatcttcgaacagatctcgtcttttagaaatacattagtttgctag

SEQ ID NO: 73645 - protein, 326 aa, Arabidopsis thaliana
  peptide (1)..(326): Ceres Seq. ID no. 4973693
MNRDEILSKFISYSNKQEKKMERSLKKTKNNYNNSIKSNLMKDDELFHVIHKVPCGDTPYVRAKHAQLIEKNPEMAIVWFWKAINTGDRVDSALKDMAVVMKQLDRSEEAIEAIKSFRPRCSKNSQDSLDNVLIDLYKKCGRMEEQVELLKRKLRQIYQGEAFNGKPTKTARSHGKKFQVTVQQEISRLLGNLGWAYMQQAKYLSAEAVYRKAQMVEPDANKSCNLAMCLIKQGRFEEGRLVLDDVLEYRVLGADDCRTRQRAEELLSELESSLPRMRDAEMEDVLGNILDDDFVLGLEEMTSTSFKSKRLPIFEQISSFRNTLVC

SEQ ID NO: 73646 - protein, 306 aa, Arabidopsis thaliana; identical to SEQ ID NO: 71121
  peptide (1)..(306): Ceres Seq. ID no. 4973694

SEQ ID NO: 73647 - protein, 286 aa, Arabidopsis thaliana; identical to SEQ ID NO: 71122
  peptide (1)..(286): Ceres Seq. ID no. 4973695

SEQ ID NO: 73648 - DNA, 663 bp, Arabidopsis thaliana
  misc_feature (1)..(663): Ceres Seq. ID no. 4973726
  misc_feature (1)..(663): Ortholog of  Ceres SEQ ID NO 14307843 as cited in SEQ ID NO 20508
atggagtttatgggtactataaacttgcaacaatatagcaacaagcaaaaaatacttttggtcggagaaggagacttttcgttttctttgtctctagccagagtttttggttctgccacaaacatcactgcgacctctcttgacactcgagaggagctagggattaagtacactgatggaaaagcaaatgtggaagggttggagttgtttgggtgcacagtggtccacggtgttaacgtccactccatgtcctcagactatcgcttaggtcgatacgatagaatcatctttaattttccccattcaggattaggttttggttcagagcacgacatcttcttcattatgttacaccaaggactcgtcagaggatttctggagagtgcaagaaagatgctgaaagatgaagatggagagattcatgtgacacataagacaacagacccatttaacaggtgggggattgagactctagctggagaaaagggtttgcgtctaatcggggagatcgaatttcacaaatgggcatttccaggttactccaacaagaaaggaggtggaagtaactgtaactctacctttctgttaagaaggatactttccttactagattatcatgtatattctagtgtatattcctttagaatatacatgataatctag

SEQ ID NO: 73649 - protein, 220 aa, Arabidopsis thaliana
  peptide (1)..(220): Ceres Seq. ID no. 4973727
MEFMGTINLQQYSNKQKILLVGEGDFSFSLSLARVFGSATNITATSLDTREELGIKYTDGKANVEGLELFGCTVVHGVNVHSMSSDYRLGRYDRIIFNFPHSGLGFGSEHDIFFIMLHQGLVRGFLESARKMLKDEDGEIHVTHKTTDPFNRWGIETLAGEKGLRLIGEIEFHKWAFPGYSNKKGGGSNCNSTFLLRRILSLLDYHVYSSVYSFRIYMII

SEQ ID NO: 73650 - protein, 217 aa, Arabidopsis thaliana
  peptide (1)..(217): Ceres Seq. ID no. 4973728
MGTINLQQYSNKQKILLVGEGDFSFSLSLARVFGSATNITATSLDTREELGIKYTDGKANVEGLELFGCTVVHGVNVHSMSSDYRLGRYDRIIFNFPHSGLGFGSEHDIFFIMLHQGLVRGFLESARKMLKDEDGEIHVTHKTTDPFNRWGIETLAGEKGLRLIGEIEFHKWAFPGYSNKKGGGSNCNSTFLLRRILSLLDYHVYSSVYSFRIYMII

SEQ ID NO: 73651 - protein, 138 aa, Arabidopsis thaliana
  peptide (1)..(138): Ceres Seq. ID no. 4973729
MSSDYRLGRYDRIIFNFPHSGLGFGSEHDIFFIMLHQGLVRGFLESARKMLKDEDGEIHVTHKTTDPFNRWGIETLAGEKGLRLIGEIEFHKWAFPGYSNKKGGGSNCNSTFLLRRILSLLDYHVYSSVYSFRIYMII

SEQ ID NO: 73652 - DNA, 663 bp, Arabidopsis thaliana
  misc_feature (1)..(663): Ceres Seq. ID no. 4973949
  misc_feature (1)..(663): Ortholog of  Ceres SEQ ID NO 15170792 as cited in SEQ ID NO 52707
atgtctgccatggtctcggccttgacacaggtggtttctgctcgctctcagactgaggctgaaggtgctcactctcagactgaggctgaaggtgctcactcttcttcctcttcggctggacataaaagaggatggcttggaatcgattctgctcctattccctcatcatttgctcgtgtagactcttcacataatccgatcgaggaagcaagggagaaaaaaaggaggtacagaggagtaaggcagagaccatggggcaaatgggcagctgagatacgtgatccacatagagccgctagggtttggctcgggacgtttgatacagcggaggccgcggctagagcctacgacgaggctgcactccggttccgtggaaataaagcaaagctaaatttcccagaggatgtaaggattcttcctcctccccctcctcttcttcgttcaccagctgacacggtggcgaataaagcagaagaggatctgataaattattggagttatacaaagttgttgcaaagttcaggccaacggtcatttctcgagcgaggacaagaagagagtagtaacatatttgaacattcaccaatggaacaacctctgcctccttcaagttctggtccaagttcctctaattttcctgcaccttctctacctaatacatag

SEQ ID NO: 73653 - protein, 220 aa, Arabidopsis thaliana
  peptide (1)..(220): Ceres Seq. ID no. 4973950
MSAMVSALTQVVSARSQTEAEGAHSQTEAEGAHSSSSSAGHKRGWLGIDSAPIPSSFARVDSSHNPIEEAREKKRRYRGVRQRPWGKWAAEIRDPHRAARVWLGTFDTAEAAARAYDEAALRFRGNKAKLNFPEDVRILPPPPPLLRSPADTVANKAEEDLINYWSYTKLLQSSGQRSFLERGQEESSNIFEHSPMEQPLPPSSSGPSSSNFPAPSLPNT

SEQ ID NO: 73654 - protein, 217 aa, Arabidopsis thaliana
  peptide (1)..(217): Ceres Seq. ID no. 4973951
MVSALTQVVSARSQTEAEGAHSQTEAEGAHSSSSSAGHKRGWLGIDSAPIPSSFARVDSSHNPIEEAREKKRRYRGVRQRPWGKWAAEIRDPHRAARVWLGTFDTAEAAARAYDEAALRFRGNKAKLNFPEDVRILPPPPPLLRSPADTVANKAEEDLINYWSYTKLLQSSGQRSFLERGQEESSNIFEHSPMEQPLPPSSSGPSSSNFPAPSLPNT

SEQ ID NO: 73655 - DNA, 810 bp, Arabidopsis thaliana
  misc_feature (1)..(810): Ceres Seq. ID no. 4973980
  misc_feature (1)..(810): Ortholog of  Ceres SEQ ID NO 12623816 as cited in SEQ ID NO 61298
atgaacacgaacacacaaacagaacaacagatcatcagagaagaaactagaattgacaaaattattaaaaagcgaaaaaagaaaatgagagctcaggttttattatgtccaacaataacagcttatggtcgtctctattgtgcgccacgtagacttcaccgctacaattcatcatcatcatcatctcagtttctgaatctcaatctctctcgcttctccggtgctctcttcttccacatggaggtatgttctcttgccaggaatctctgcttcagtttattctcaacacataagacgatttttaatatgttgatggtgttagcaattccagagtggaactggctcgagcggcaagagagggatggtggaaaatttgaagcgcttatgtttgtaggaaccgggtacttgactggctgttttgctttgatggttggagctgagggacgtgttgttggcgtggatcatatccctgaattggttgatatgtctatcaagaatatcgaaaagagtgttgctgcttcctttcttaagaaaggatctctctccttacatgttggggatggaagaaaaggttggcaagagtttgcaccgtatgatgcaatacacgtaggagcagcggcatcagaaatccctcagccccttttggatcagctaaaacccggtggacgaatggtgattccactaggaacctattttcaagagctcaaggtaatcgacaaaaacgaggatggttcaatcaaggtacataccgaaacttcagtccggtatgtgcccctcactagccgtgtcgaacagttaggaggattttga

SEQ ID NO: 73656 - protein, 269 aa, Arabidopsis thaliana
  peptide (1)..(269): Ceres Seq. ID no. 4973981
MNTNTQTEQQIIREETRIDKIIKKRKKKMRAQVLLCPTITAYGRLYCAPRRLHRYNSSSSSSQFLNLNLSRFSGALFFHMEVCSLARNLCFSLFSTHKTIFNMLMVLAIPEWNWLERQERDGGKFEALMFVGTGYLTGCFALMVGAEGRVVGVDHIPELVDMSIKNIEKSVAASFLKKGSLSLHVGDGRKGWQEFAPYDAIHVGAAASEIPQPLLDQLKPGGRMVIPLGTYFQELKVIDKNEDGSIKVHTETSVRYVPLTSRVEQLGGF

SEQ ID NO: 73657 - protein, 241 aa, Arabidopsis thaliana
  peptide (1)..(241): Ceres Seq. ID no. 4973982
MRAQVLLCPTITAYGRLYCAPRRLHRYNSSSSSSQFLNLNLSRFSGALFFHMEVCSLARNLCFSLFSTHKTIFNMLMVLAIPEWNWLERQERDGGKFEALMFVGTGYLTGCFALMVGAEGRVVGVDHIPELVDMSIKNIEKSVAASFLKKGSLSLHVGDGRKGWQEFAPYDAIHVGAAASEIPQPLLDQLKPGGRMVIPLGTYFQELKVIDKNEDGSIKVHTETSVRYVPLTSRVEQLGGF

SEQ ID NO: 73658 - protein, 190 aa, Arabidopsis thaliana
  peptide (1)..(190): Ceres Seq. ID no. 4973983
MEVCSLARNLCFSLFSTHKTIFNMLMVLAIPEWNWLERQERDGGKFEALMFVGTGYLTGCFALMVGAEGRVVGVDHIPELVDMSIKNIEKSVAASFLKKGSLSLHVGDGRKGWQEFAPYDAIHVGAAASEIPQPLLDQLKPGGRMVIPLGTYFQELKVIDKNEDGSIKVHTETSVRYVPLTSRVEQLGGF

SEQ ID NO: 73659 - DNA, 1434 bp, Arabidopsis thaliana
  misc_feature (1)..(1434): Ceres Seq. ID no. 4974020
  misc_feature (1)..(1434): Ortholog of  Ceres SEQ ID NO 14303627 as cited in SEQ ID NO 62070
  misc_feature (1)..(1434): Ortholog of  Ceres SEQ ID NO 13597546 as cited in SEQ ID NO 65017
  misc_feature (1)..(1434): Ortholog of  Ceres SEQ ID NO 13654353 as cited in SEQ ID NO 68318
atgtacatggcaatcatgattatcctcttccttagctccattcttctttctctcctattgctccttagaaaacatttgtcacacttctcctatcccaaccttcctcccggaaataccggccttcccttaatcggagagagtttctccttcctctctgctggccgtcaaggccatccagagaagttcatcactgaccgagttcgtcgtttctcctcctcctcctcatgtgtcttcaagacccacctctttgggtctcccaccgcggtggtgactggtgcatctgggaacaagtttctattcactaacgagaacaagcttgtggtctcgtggtggccagattccgttaataagatcttcccttcttcaatgcagacgagctccaaagaagaagccaggaagctgaggatgcttctttcgcagttcatgaagcccgaggctttgaggaggtatgttggtgttatggatgagattgctcaaagacattttgagacggaatgggccaatcaagatcaagtcattgtcttccctcttaccaaaaagttcacgttttcaatagcatgccgttcgttcctgagcatggaagatcccgcaagagtaaggcaactagaagagcaattcaatacggtagcggtagggatcttctcaatcccaatagacttgccaggaacacggtttaaccgagccatcaaggcgtcgaggttactcagaaaagaggtttccgctatcgtaaggcagaggaaagaagagctcaaagccgggaaagcattagaggagcacgacatattatctcacatgttgatgaatataggagagaccaaagacgaggatttggctgataaaattattggattgttaatcggaggacatgacacagctagtatcgtatgcactttcgttgtcaattatcttgctgaattccctcatgtctaccaacgtgtgctacaagagcaaaaggagatactaaaggagaaaaaagaaaaggaaggattaaggtgggaggacattgagaaaatgagatattcatggaatgttgcatgtgaagtgatgagaattgttcctcctctttctggcacttttcgtgaggccattgatcacttctcttttaagggtttttacattcccaaaggatggaagttatattggagtgccaccgcgacacatatgaatccagactacttcccagaaccagagagatttgagccaaaccgtttcgaaggaagtggtccgaagccttatacctatgttccatttggaggaggaccaagaatgtgtccagggaaagagtatgctcgtctagagattcttatattcatgcacaatcttgttaatagatttaagtgggaaaaagtgtttccaaatgaaaataaaatagttgttgatcccttaccaataccagacaaaggtctccctataagaatttttcctcaatcttga

SEQ ID NO: 73660 - protein, 477 aa, Arabidopsis thaliana
  peptide (1)..(477): Ceres Seq. ID no. 4974021
MYMAIMIILFLSSILLSLLLLLRKHLSHFSYPNLPPGNTGLPLIGESFSFLSAGRQGHPEKFITDRVRRFSSSSSCVFKTHLFGSPTAVVTGASGNKFLFTNENKLVVSWWPDSVNKIFPSSMQTSSKEEARKLRMLLSQFMKPEALRRYVGVMDEIAQRHFETEWANQDQVIVFPLTKKFTFSIACRSFLSMEDPARVRQLEEQFNTVAVGIFSIPIDLPGTRFNRAIKASRLLRKEVSAIVRQRKEELKAGKALEEHDILSHMLMNIGETKDEDLADKIIGLLIGGHDTASIVCTFVVNYLAEFPHVYQRVLQEQKEILKEKKEKEGLRWEDIEKMRYSWNVACEVMRIVPPLSGTFREAIDHFSFKGFYIPKGWKLYWSATATHMNPDYFPEPERFEPNRFEGSGPKPYTYVPFGGGPRMCPGKEYARLEILIFMHNLVNRFKWEKVFPNENKIVVDPLPIPDKGLPIRIFPQS

SEQ ID NO: 73661 - protein, 475 aa, Arabidopsis thaliana
  peptide (1)..(475): Ceres Seq. ID no. 4974022
MAIMIILFLSSILLSLLLLLRKHLSHFSYPNLPPGNTGLPLIGESFSFLSAGRQGHPEKFITDRVRRFSSSSSCVFKTHLFGSPTAVVTGASGNKFLFTNENKLVVSWWPDSVNKIFPSSMQTSSKEEARKLRMLLSQFMKPEALRRYVGVMDEIAQRHFETEWANQDQVIVFPLTKKFTFSIACRSFLSMEDPARVRQLEEQFNTVAVGIFSIPIDLPGTRFNRAIKASRLLRKEVSAIVRQRKEELKAGKALEEHDILSHMLMNIGETKDEDLADKIIGLLIGGHDTASIVCTFVVNYLAEFPHVYQRVLQEQKEILKEKKEKEGLRWEDIEKMRYSWNVACEVMRIVPPLSGTFREAIDHFSFKGFYIPKGWKLYWSATATHMNPDYFPEPERFEPNRFEGSGPKPYTYVPFGGGPRMCPGKEYARLEILIFMHNLVNRFKWEKVFPNENKIVVDPLPIPDKGLPIRIFPQS

SEQ ID NO: 73662 - protein, 472 aa, Arabidopsis thaliana
  peptide (1)..(472): Ceres Seq. ID no. 4974023
MIILFLSSILLSLLLLLRKHLSHFSYPNLPPGNTGLPLIGESFSFLSAGRQGHPEKFITDRVRRFSSSSSCVFKTHLFGSPTAVVTGASGNKFLFTNENKLVVSWWPDSVNKIFPSSMQTSSKEEARKLRMLLSQFMKPEALRRYVGVMDEIAQRHFETEWANQDQVIVFPLTKKFTFSIACRSFLSMEDPARVRQLEEQFNTVAVGIFSIPIDLPGTRFNRAIKASRLLRKEVSAIVRQRKEELKAGKALEEHDILSHMLMNIGETKDEDLADKIIGLLIGGHDTASIVCTFVVNYLAEFPHVYQRVLQEQKEILKEKKEKEGLRWEDIEKMRYSWNVACEVMRIVPPLSGTFREAIDHFSFKGFYIPKGWKLYWSATATHMNPDYFPEPERFEPNRFEGSGPKPYTYVPFGGGPRMCPGKEYARLEILIFMHNLVNRFKWEKVFPNENKIVVDPLPIPDKGLPIRIFPQS

SEQ ID NO: 73663 - DNA, 1317 bp, Arabidopsis thaliana
  misc_feature (1)..(1317): Ceres Seq. ID no. 4974092
  misc_feature (1)..(1317): Ortholog of  Ceres SEQ ID NO 14310295 as cited in SEQ ID NO 233
  misc_feature (1)..(1317): Ortholog of  Ceres SEQ ID NO 15179412 as cited in SEQ ID NO 0
atggattcagatgcatgggaaattatccatatacctgaaaagccttcattgtcacctgaccatcagcccactgtgaaggtatatgctagcctaatcaaacccagatttgccaatacgatagtgaggcatttatgtaagattgctcctctagaagatcttcgtcatgttaaaagggtgaagaagaagattctgccagattgcggtgaaactcagttgactgtcatcttatgtctagcacctgagcacaacgatcagttgagtgacatgccacctgatgtgcagagactcgttgatccctatgagttgagtccttttattacacaagtaggttatttttctcttatctcaccactatttgcttcaagggtttttgattcatttagcttccaagtatgcaaatatgctgcggtatccaaagaagagtgggaagaacaaacaatatatgtctttgtttatagtgcaacagtcaatgattttttactttttgcatttggcaatgatagcaatatagatggcatcggtgggttcagcgaggaggaaacacaatcaatctgcaagttcatgagagttgttattgatatggcagtatctggtcatacaccacttgtgaatgctgcagtgatagttgatccttcagttaggcgaataatagctagtgaaactgatcaagtatatgcatcatctgctcctcgtgacatgactagcgcagagaccaggcccttcgaggaaacaggggaaatatgtttaaatgacacacttgaaaaacagaatggttcattgtctgctctttcttgtctgaatccctggcaatggagtttgcagccgcatgacactgaaaattgtagccagtggcatcctcttaggcatgcttccatggttgccattgaatcctcttctgccagagatagaaatctgtttcccaatccatccaagatttttgatcaggatcatgttccgccctcaaatacagattctccggctaaaaagcagaaaacaagcagtcagagtccagacgtccaaaatgacagcagagaagagactgttagagatccttcaatggaaaggccgtacctctgcactggttatgacattttcctcctgttggagccttgtacaattcgtgatatgttcccaaggtgtgctatggcgcttgtgcatcaaagaataaaacggattttctatgcttttccaaacaccacggcaggtggtctcgggagtgttcatagacttcaaggggaaaagagtttgaaccatcattatgcagtgtttagagttttgctgcctgatgacgcacttagacaaatgaccacggtctaa

SEQ ID NO: 73664 - protein, 438 aa, Arabidopsis thaliana
  peptide (1)..(438): Ceres Seq. ID no. 4974093
MDSDAWEIIHIPEKPSLSPDHQPTVKVYASLIKPRFANTIVRHLCKIAPLEDLRHVKRVKKKILPDCGETQLTVILCLAPEHNDQLSDMPPDVQRLVDPYELSPFITQVGYFSLISPLFASRVFDSFSFQVCKYAAVSKEEWEEQTIYVFVYSATVNDFLLFAFGNDSNIDGIGGFSEEETQSICKFMRVVIDMAVSGHTPLVNAAVIVDPSVRRIIASETDQVYASSAPRDMTSAETRPFEETGEICLNDTLEKQNGSLSALSCLNPWQWSLQPHDTENCSQWHPLRHASMVAIESSSARDRNLFPNPSKIFDQDHVPPSNTDSPAKKQKTSSQSPDVQNDSREETVRDPSMERPYLCTGYDIFLLLEPCTIRDMFPRCAMALVHQRIKRIFYAFPNTTAGGLGSVHRLQGEKSLNHHYAVFRVLLPDDALRQMTTV

SEQ ID NO: 73665 - protein, 350 aa, Arabidopsis thaliana
  peptide (1)..(350): Ceres Seq. ID no. 4974094
MPPDVQRLVDPYELSPFITQVGYFSLISPLFASRVFDSFSFQVCKYAAVSKEEWEEQTIYVFVYSATVNDFLLFAFGNDSNIDGIGGFSEEETQSICKFMRVVIDMAVSGHTPLVNAAVIVDPSVRRIIASETDQVYASSAPRDMTSAETRPFEETGEICLNDTLEKQNGSLSALSCLNPWQWSLQPHDTENCSQWHPLRHASMVAIESSSARDRNLFPNPSKIFDQDHVPPSNTDSPAKKQKTSSQSPDVQNDSREETVRDPSMERPYLCTGYDIFLLLEPCTIRDMFPRCAMALVHQRIKRIFYAFPNTTAGGLGSVHRLQGEKSLNHHYAVFRVLLPDDALRQMTTV

SEQ ID NO: 73666 - protein, 251 aa, Arabidopsis thaliana
  peptide (1)..(251): Ceres Seq. ID no. 4974095
MRVVIDMAVSGHTPLVNAAVIVDPSVRRIIASETDQVYASSAPRDMTSAETRPFEETGEICLNDTLEKQNGSLSALSCLNPWQWSLQPHDTENCSQWHPLRHASMVAIESSSARDRNLFPNPSKIFDQDHVPPSNTDSPAKKQKTSSQSPDVQNDSREETVRDPSMERPYLCTGYDIFLLLEPCTIRDMFPRCAMALVHQRIKRIFYAFPNTTAGGLGSVHRLQGEKSLNHHYAVFRVLLPDDALRQMTTV

SEQ ID NO: 73667 - DNA, 1008 bp, Arabidopsis thaliana
  misc_feature (1)..(1008): Ceres Seq. ID no. 4974111
  misc_feature (1)..(1008): Ortholog of  Ceres SEQ ID NO 14301538 as cited in SEQ ID NO 62856
atgaaaatcttgatcttgattctatcctttgtgacactctttgagatttgcgttgtggacgcatgtcgatcatactgtggaaacataaccgttgattatccgtttgggatccgaaacggatgtgggcatccagggtatagagatctattgttttgtatgaacgatgtgttgatgtttcacataagttcaggttcttatagagttttggacatcgattacgcatatcagtccataacactgcatgatcctcacatgtcgaactgcgaaaccatcgtgctcggtggcaaaggcaatggctttgaagctgaggattggagaactccatatttcaatcctacctcagataatgtctttatgttgatcggatgttctcctaaatctcctatatttcaaggcttcccggaaaagaaagtgccgtgccgcaacatctctggaatgagctgcgaagaatacatgtcatgtccagcttgggacatggtcggatacagacaaccgggtatacattccgggtcaggtccacccatgtgttgtggggtcgggttcgaatccgtaaaagcgattaatctaagtaagttggagtgtgaaggatacagtagtgcgtataatctagcacccttgaaacttagaggaccctctgattgggcttatgggatacgtgttaagtatgaactccaaggaagtgatgcgttttgtcgtgcgtgtgttgcaacttctgggacttgtggctatgaacctgctgatggtggagggcttagacatgtttgcatgtgtgacaaccataattccactacaaactgtgattcagttatatcaccaaccggtgcatcatcaagtgttcgaccaaaagctatcggatgtaagtttcaaaatgcatttacgtgtactctagtttttgtacagatttatttgactttaaccgtacctaaattactaccctttttttttgttgcagcactgatcatctacttcatagctatgaacataggctttcagagaagacagcgatga

SEQ ID NO: 73668 - protein, 335 aa, Arabidopsis thaliana
  peptide (1)..(335): Ceres Seq. ID no. 4974112
MKILILILSFVTLFEICVVDACRSYCGNITVDYPFGIRNGCGHPGYRDLLFCMNDVLMFHISSGSYRVLDIDYAYQSITLHDPHMSNCETIVLGGKGNGFEAEDWRTPYFNPTSDNVFMLIGCSPKSPIFQGFPEKKVPCRNISGMSCEEYMSCPAWDMVGYRQPGIHSGSGPPMCCGVGFESVKAINLSKLECEGYSSAYNLAPLKLRGPSDWAYGIRVKYELQGSDAFCRACVATSGTCGYEPADGGGLRHVCMCDNHNSTTNCDSVISPTGASSSVRPKAIGCKFQNAFTCTLVFVQIYLTLTVPKLLPFFFVAALIIYFIAMNIGFQRRQR

SEQ ID NO: 73669 - protein, 283 aa, Arabidopsis thaliana
  peptide (1)..(283): Ceres Seq. ID no. 4974113
MNDVLMFHISSGSYRVLDIDYAYQSITLHDPHMSNCETIVLGGKGNGFEAEDWRTPYFNPTSDNVFMLIGCSPKSPIFQGFPEKKVPCRNISGMSCEEYMSCPAWDMVGYRQPGIHSGSGPPMCCGVGFESVKAINLSKLECEGYSSAYNLAPLKLRGPSDWAYGIRVKYELQGSDAFCRACVATSGTCGYEPADGGGLRHVCMCDNHNSTTNCDSVISPTGASSSVRPKAIGCKFQNAFTCTLVFVQIYLTLTVPKLLPFFFVAALIIYFIAMNIGFQRRQR

SEQ ID NO: 73670 - protein, 278 aa, Arabidopsis thaliana
  peptide (1)..(278): Ceres Seq. ID no. 4974114
MFHISSGSYRVLDIDYAYQSITLHDPHMSNCETIVLGGKGNGFEAEDWRTPYFNPTSDNVFMLIGCSPKSPIFQGFPEKKVPCRNISGMSCEEYMSCPAWDMVGYRQPGIHSGSGPPMCCGVGFESVKAINLSKLECEGYSSAYNLAPLKLRGPSDWAYGIRVKYELQGSDAFCRACVATSGTCGYEPADGGGLRHVCMCDNHNSTTNCDSVISPTGASSSVRPKAIGCKFQNAFTCTLVFVQIYLTLTVPKLLPFFFVAALIIYFIAMNIGFQRRQR

SEQ ID NO: 73671 - DNA, 1914 bp, Arabidopsis thaliana
  misc_feature (1)..(1914): Ceres Seq. ID no. 4974139
  misc_feature (1)..(1914): Ortholog of  Ceres SEQ ID NO 13598865 as cited in SEQ ID NO 0
atgttacttatcttctcaagcttcgataaccgtttatcaaatatcaaaaccgcgatgacgaaccaggaagagaatcaaaacgacgctcttgtggcgcgtttagaggctgcagaatcggttattcatcggtgggatggtggtaatgattcttctcgtcactcgtcttcgtcttctggtaactatcgttcctcttcgttttctctttcgtttgatgaatctccggaggaagctaccgagtttctttcagctgttgatgagattatctctttgcttgaggatctttcgtctgagaataagcctgatatggtggatagagctgatagtgctttgcagatggctatgtctcagcttgaagatgaatttagacggattttgattcgtaacactgttcctttagacgctgagcgactctatggctcgatgcggcgtgtttcgttgtcctttgctgatggtgatgttgttgaggattttgagaattttggtttggttgctgatggagatggtagtgggagtaggaggaggttgtttcatgagagaggagggagtatagggtgtgatctttgggttgatttgattaatccaactgctgttgaagatttgaaggagattgcagagcggatgattcgcgctggttatgagaaggagtgtgttcaggtttatagttcggttaggcgtgatgctttggatgattgtttgatgattcttggtgttgagaagctgagtatagaagaagttcagaagattgattggaagtctatggatgagaagatgaagaagtggattcaagctgtgaagattactgttagggttcttcttgttggtgagaaaaagatatgtgatgagatctttagcagttcggagtcgagtaaagaggtttgctttaacgagacaactaaaagctgtgtgatgcagttgttgaatttcggagaggctgtggcgattggtagaagatcatcagagaagttgtttaggattctggacatgtatgatgcgttggctaatgtgttgcagactttagaggtgatggtcactgactgttttgtgtgtaatgagaccaagggggtgttggaagcactgggtgatgctgcgagggggacttttgttgagtttgagaataatgttcggaatgagacatcaaagagaccgacgacaaatggtgaggttcatccaatgatacgttatgtgatgaattacatgaaattgattgtggattatgcggtgaccttaaattcgcttctggagagtaatgagtcaagtggcgtatctggtgatgatagtacagaagagatgtctcctcttgcgaaaagaatattggggttgattacgtcgttggaatcaaatcttgaagataaatcaaagttgtatgaagatggtgggctgcaacatgtgttcatgatgaacaacatttactacatagttcagaaggtgaaggattctgagcttggtaaactcttgggtgatgattgggttagaaaacgaagagggcagatacgtcaatatgctaccggttacctcagggcttcctggagcagggtgctatctgctttgagggacgaaagtatgggtggaagttcaagtggtagtccgagttatggacaaagaagcaacaattcttccaagatggcgttaaaagagagattcagaggttttaatgccagctttgaagagttatacaggctgcaaacggcttggaaggtcccggatcctcaacttcgtgaagaactgagaatatctatatcagagaaagtaatcccggcttaccgggctttcttcggaaggaataggagtcaactagaaggtggtaggcatgctggaaagtacataaagtacacaccagatgacctggagagttacttaccagacctatttgaaggaaatcaattggttattcaccacccgagaaggaaaagttaa

SEQ ID NO: 73672 - protein, 637 aa, Arabidopsis thaliana; identical to SEQ ID NO: 70035
  peptide (1)..(637): Ceres Seq. ID no. 4974140

SEQ ID NO: 73673 - protein, 619 aa, Arabidopsis thaliana
  peptide (1)..(619): Ceres Seq. ID no. 4974141
MTNQEENQNDALVARLEAAESVIHRWDGGNDSSRHSSSSSGNYRSSSFSLSFDESPEEATEFLSAVDEIISLLEDLSSENKPDMVDRADSALQMAMSQLEDEFRRILIRNTVPLDAERLYGSMRRVSLSFADGDVVEDFENFGLVADGDGSGSRRRLFHERGGSIGCDLWVDLINPTAVEDLKEIAERMIRAGYEKECVQVYSSVRRDALDDCLMILGVEKLSIEEVQKIDWKSMDEKMKKWIQAVKITVRVLLVGEKKICDEIFSSSESSKEVCFNETTKSCVMQLLNFGEAVAIGRRSSEKLFRILDMYDALANVLQTLEVMVTDCFVCNETKGVLEALGDAARGTFVEFENNVRNETSKRPTTNGEVHPMIRYVMNYMKLIVDYAVTLNSLLESNESSGVSGDDSTEEMSPLAKRILGLITSLESNLEDKSKLYEDGGLQHVFMMNNIYYIVQKVKDSELGKLLGDDWVRKRRGQIRQYATGYLRASWSRVLSALRDESMGGSSSGSPSYGQRSNNSSKMALKERFRGFNASFEELYRLQTAWKVPDPQLREELRISISEKVIPAYRAFFGRNRSQLEGGRHAGKYIKYTPDDLESYLPDLFEGNQLVIHHPRRKS

SEQ ID NO: 73674 - protein, 536 aa, Arabidopsis thaliana
  peptide (1)..(536): Ceres Seq. ID no. 4974142
MVDRADSALQMAMSQLEDEFRRILIRNTVPLDAERLYGSMRRVSLSFADGDVVEDFENFGLVADGDGSGSRRRLFHERGGSIGCDLWVDLINPTAVEDLKEIAERMIRAGYEKECVQVYSSVRRDALDDCLMILGVEKLSIEEVQKIDWKSMDEKMKKWIQAVKITVRVLLVGEKKICDEIFSSSESSKEVCFNETTKSCVMQLLNFGEAVAIGRRSSEKLFRILDMYDALANVLQTLEVMVTDCFVCNETKGVLEALGDAARGTFVEFENNVRNETSKRPTTNGEVHPMIRYVMNYMKLIVDYAVTLNSLLESNESSGVSGDDSTEEMSPLAKRILGLITSLESNLEDKSKLYEDGGLQHVFMMNNIYYIVQKVKDSELGKLLGDDWVRKRRGQIRQYATGYLRASWSRVLSALRDESMGGSSSGSPSYGQRSNNSSKMALKERFRGFNASFEELYRLQTAWKVPDPQLREELRISISEKVIPAYRAFFGRNRSQLEGGRHAGKYIKYTPDDLESYLPDLFEGNQLVIHHPRRKS

SEQ ID NO: 73675 - DNA, 1029 bp, Arabidopsis thaliana
  misc_feature (1)..(1029): Ceres Seq. ID no. 4974190
  misc_feature (1)..(1029): Ortholog of  Ceres SEQ ID NO 14311477 as cited in SEQ ID NO 51390
  misc_feature (1)..(1029): Ortholog of  Ceres SEQ ID NO 14302840 as cited in SEQ ID NO 62295
  misc_feature (1)..(1029): Ortholog of  Ceres SEQ ID NO 13596892 as cited in SEQ ID NO 62900
atggattcaatcaacaagatcatcaacttcttgtttcctctcttaaccttgtatgcacttcttgtcttctacccaacttaccagaggctcaaatccgccgtctccatctgccggaatctgttctcggaaaatgtcgccggaaaagttgttgtcatcaccggagcagcttctggcatcggcgaggctttagcgtatgagtacgggaagaggggagcgtatttagcacttgttgacataagaggagaacctctcttccatgtagcggctctcgctgagctctatggctcccctgaagtcttgcccttagtagccgatgtttccaaactccaagactgcgagcgttttatccgagccacggttcttcattttggacgattggatcatctagtgacaaatgcaggagttgctccactctatttttttgcagacatcgaagatgtctctaaggcttcgccggctatggacatcaacttttggggatctgtgtattgcacattttttgcttctccatacctaaagaagtttagaggaaggattgtggtgattgcttctggatgtggatacattgcttcacctagactaagcttttactgtgcgagtaaagctgctgtgatcgccttttatgaaacactaagaactgagtttggatcagatattggggttaccattgtagcaccggggatcgtcgattcggaaatgagccgaggcaagttcatgacaaaggacggtaaacttgtcgtcgataaagagctcagagatgtgcaaatgagcgtattgccagtagaatcagccgagaggtgtgcgaaagcaataatgcggagcgtatgtagaggagataggtacttgttggaacccgactggataggttgtgtcatattgttgaaggttttttgttctgaggcaacagagtgggtagcccggtggctgctgatagccagaccaaaatttccaatgatggaggctcttagcaacaagatccttgatgtagcccatgcctttaattctttcttctcttttcctcattattag

SEQ ID NO: 73676 - protein, 342 aa, Arabidopsis thaliana
  peptide (1)..(342): Ceres Seq. ID no. 4974191
MDSINKIINFLFPLLTLYALLVFYPTYQRLKSAVSICRNLFSENVAGKVVVITGAASGIGEALAYEYGKRGAYLALVDIRGEPLFHVAALAELYGSPEVLPLVADVSKLQDCERFIRATVLHFGRLDHLVTNAGVAPLYFFADIEDVSKASPAMDINFWGSVYCTFFASPYLKKFRGRIVVIASGCGYIASPRLSFYCASKAAVIAFYETLRTEFGSDIGVTIVAPGIVDSEMSRGKFMTKDGKLVVDKELRDVQMSVLPVESAERCAKAIMRSVCRGDRYLLEPDWIGCVILLKVFCSEATEWVARWLLIARPKFPMMEALSNKILDVAHAFNSFFSFPHY

SEQ ID NO: 73677 - protein, 189 aa, Arabidopsis thaliana
  peptide (1)..(189): Ceres Seq. ID no. 4974192
MDINFWGSVYCTFFASPYLKKFRGRIVVIASGCGYIASPRLSFYCASKAAVIAFYETLRTEFGSDIGVTIVAPGIVDSEMSRGKFMTKDGKLVVDKELRDVQMSVLPVESAERCAKAIMRSVCRGDRYLLEPDWIGCVILLKVFCSEATEWVARWLLIARPKFPMMEALSNKILDVAHAFNSFFSFPHY

SEQ ID NO: 73678 - DNA, 1083 bp, Arabidopsis thaliana
  misc_feature (1)..(1083): Ceres Seq. ID no. 4974326
  misc_feature (1)..(1083): Ortholog of  Ceres SEQ ID NO 13595351 as cited in SEQ ID NO 55934
  misc_feature (1)..(1083): Ortholog of  Ceres SEQ ID NO 13639645 as cited in SEQ ID NO 57488
atggcagctccggcgatcctaaacggcggcgatgcgacggagagagaaacacgaatggctcactctgcaatgacattggttcaggtcataaatggaggataccatgtggttacgaaagtagctcttaacgttggtgtaaatcagctcgttttttgtgtctttcgcgatcttcttgctctctccattctcgcacctctcgcttttttccgtgaaaggatatttgggaaccagttactatttcttatgggtttatcttacacgaatccaacttatgctgctgctatacaaccatcaatccctgtctttacatttctcttggctgtcttgatgggtacagaaaaagtgaacttgttgaaagtcgagggccaaacgaaagttggaggtactcttgtttgtgtttcgggtgctatagcgatggctttgtttcgtggtccagccttgtttggaggtaaagatgcagcagattcagtgaaaagtgtaattattgatagaagtcaaccagagcttaatgggtggttagtctctagttttcttggtcttgggtttgatcaatggcacattggagttttatgtttgattggaaactgtatgtgtatggctgcttttctcgctgtccaagcaccggttttgaagaagtatcctgcctacctttcggttgctgcgtattcatacttcttcggtgcatcaataatgatcacaacagctatcttgtttgttagagagcctaaagattggagcttaacacaatctgaggttcttgctgttatattcgcaggagtgtttgcctcagctctaaactatggactcttgacttggtccaataaaattcttggagctgctttggtttccctatacaatcctcttcagcctgcaacatcggcctttttatcgacaattttcctcggcagcccgatctatcttggaagcgttttgggtggaatcctcatcatttgcgggctttatatggttacttgggcatcttacagagagcaacaaacaacatcagctgggaatgagattgcttcttctagtgatgtaagaatctcggaacctttcatttacagagatgagactggtaaataa

SEQ ID NO: 73679 - protein, 360 aa, Arabidopsis thaliana
  peptide (1)..(360): Ceres Seq. ID no. 4974327
MAAPAILNGGDATERETRMAHSAMTLVQVINGGYHVVTKVALNVGVNQLVFCVFRDLLALSILAPLAFFRERIFGNQLLFLMGLSYTNPTYAAAIQPSIPVFTFLLAVLMGTEKVNLLKVEGQTKVGGTLVCVSGAIAMALFRGPALFGGKDAADSVKSVIIDRSQPELNGWLVSSFLGLGFDQWHIGVLCLIGNCMCMAAFLAVQAPVLKKYPAYLSVAAYSYFFGASIMITTAILFVREPKDWSLTQSEVLAVIFAGVFASALNYGLLTWSNKILGAALVSLYNPLQPATSAFLSTIFLGSPIYLGSVLGGILIICGLYMVTWASYREQQTTSAGNEIASSSDVRISEPFIYRDETGK

SEQ ID NO: 73680 - protein, 342 aa, Arabidopsis thaliana
  peptide (1)..(342): Ceres Seq. ID no. 4974328
MAHSAMTLVQVINGGYHVVTKVALNVGVNQLVFCVFRDLLALSILAPLAFFRERIFGNQLLFLMGLSYTNPTYAAAIQPSIPVFTFLLAVLMGTEKVNLLKVEGQTKVGGTLVCVSGAIAMALFRGPALFGGKDAADSVKSVIIDRSQPELNGWLVSSFLGLGFDQWHIGVLCLIGNCMCMAAFLAVQAPVLKKYPAYLSVAAYSYFFGASIMITTAILFVREPKDWSLTQSEVLAVIFAGVFASALNYGLLTWSNKILGAALVSLYNPLQPATSAFLSTIFLGSPIYLGSVLGGILIICGLYMVTWASYREQQTTSAGNEIASSSDVRISEPFIYRDETGK

SEQ ID NO: 73681 - protein, 337 aa, Arabidopsis thaliana
  peptide (1)..(337): Ceres Seq. ID no. 4974329
MTLVQVINGGYHVVTKVALNVGVNQLVFCVFRDLLALSILAPLAFFRERIFGNQLLFLMGLSYTNPTYAAAIQPSIPVFTFLLAVLMGTEKVNLLKVEGQTKVGGTLVCVSGAIAMALFRGPALFGGKDAADSVKSVIIDRSQPELNGWLVSSFLGLGFDQWHIGVLCLIGNCMCMAAFLAVQAPVLKKYPAYLSVAAYSYFFGASIMITTAILFVREPKDWSLTQSEVLAVIFAGVFASALNYGLLTWSNKILGAALVSLYNPLQPATSAFLSTIFLGSPIYLGSVLGGILIICGLYMVTWASYREQQTTSAGNEIASSSDVRISEPFIYRDETGK

SEQ ID NO: 73682 - DNA, 939 bp, Arabidopsis thaliana
  misc_feature (1)..(939): Ceres Seq. ID no. 4974638
  misc_feature (1)..(939): Ortholog of  Ceres SEQ ID NO 13654989 as cited in SEQ ID NO 63117
atgggaaactgtctaaagcatttcaaacaacaacttccttcaattgctcccaagcctctcattatccctccaatattttcagccagaaaacgagaatctgagagtcttcagattcgcggattgaagaaagcgacaaagaaattcagacaagacagggtcgtagaatgcgaggattactctgttcgaaaattctacaagggctacatagatgaaaccacatttgcaccatcaagagctggaaccggaatcgctgtttctgtcatggaatgtgatagttcacgctctttacaagactggatggcagtagtgaggtctcttggacagttgtctcatcagaatttggtcaatttcttgggttactgttgtgaagacaacaaaccattcttcttggtatttgaatactcgcacaaaggaagtttggacagtcacattttcggaaaagaagaagaggcattgccatgggaaatacgggttaagatagccattggaacagctcaaggtctcgcgtttcttcactcgatcaagaacagccccctaaaccgagaactcaggatgcataacattatgcttgacgaggtgcaatacaatgcaaaaactgttctatctcgaaccaaccaaacgaagcttggtattttggatatgacgaccgatgtttacatttttggtatgatcttgcttgaacttttaatgggttccaaggatagaaaaaagattaaggaagagcaaggcttagtagattactggacctcatctttcttgccagataattataagattgaggaaataatcgatccccgacttgggagcgattattctgcgaatgcggcgacacagatgggcacactcatcaaccgatgcacagcgcataatacaaagaaacggccattgatgcaacaagtattggatggtcttaatcatattgcagagattaaggactaa

SEQ ID NO: 73683 - protein, 312 aa, Arabidopsis thaliana
  peptide (1)..(312): Ceres Seq. ID no. 4974639
MGNCLKHFKQQLPSIAPKPLIIPPIFSARKRESESLQIRGLKKATKKFRQDRVVECEDYSVRKFYKGYIDETTFAPSRAGTGIAVSVMECDSSRSLQDWMAVVRSLGQLSHQNLVNFLGYCCEDNKPFFLVFEYSHKGSLDSHIFGKEEEALPWEIRVKIAIGTAQGLAFLHSIKNSPLNRELRMHNIMLDEVQYNAKTVLSRTNQTKLGILDMTTDVYIFGMILLELLMGSKDRKKIKEEQGLVDYWTSSFLPDNYKIEEIIDPRLGSDYSANAATQMGTLINRCTAHNTKKRPLMQQVLDGLNHIAEIKD

SEQ ID NO: 73684 - protein, 225 aa, Arabidopsis thaliana
  peptide (1)..(225): Ceres Seq. ID no. 4974640
MECDSSRSLQDWMAVVRSLGQLSHQNLVNFLGYCCEDNKPFFLVFEYSHKGSLDSHIFGKEEEALPWEIRVKIAIGTAQGLAFLHSIKNSPLNRELRMHNIMLDEVQYNAKTVLSRTNQTKLGILDMTTDVYIFGMILLELLMGSKDRKKIKEEQGLVDYWTSSFLPDNYKIEEIIDPRLGSDYSANAATQMGTLINRCTAHNTKKRPLMQQVLDGLNHIAEIKD

SEQ ID NO: 73685 - protein, 213 aa, Arabidopsis thaliana
  peptide (1)..(213): Ceres Seq. ID no. 4974641
MAVVRSLGQLSHQNLVNFLGYCCEDNKPFFLVFEYSHKGSLDSHIFGKEEEALPWEIRVKIAIGTAQGLAFLHSIKNSPLNRELRMHNIMLDEVQYNAKTVLSRTNQTKLGILDMTTDVYIFGMILLELLMGSKDRKKIKEEQGLVDYWTSSFLPDNYKIEEIIDPRLGSDYSANAATQMGTLINRCTAHNTKKRPLMQQVLDGLNHIAEIKD

SEQ ID NO: 73686 - DNA, 1281 bp, Arabidopsis thaliana
  misc_feature (1)..(1281): Ceres Seq. ID no. 4974703
  misc_feature (1)..(1281): Ortholog of  Ceres SEQ ID NO 14312212 as cited in SEQ ID NO 54399
  misc_feature (1)..(1281): Ortholog of  Ceres SEQ ID NO 13653980 as cited in SEQ ID NO 69253
atggagtcacgcgtgctgttacgcgccaccgcgaatgtcgttggaattccgaaattgagacgaccaatcggagcgatccaccgtcaattcagcactgcatcgtcttcctcgttctcggttaaaccaatcggaggaatcggagagggagcgaatctgatctccggtcgtcagcttcgtccaattcttcttctcgattcgtcggcgatcaacggaggagagaaaagagaaattctcaaaccggttaaagccgccgctgctgaaggtggagataccgctggggatgctaaagttggattcctcgccaagtatccatggctagtcactggattcttcttcttcatgtggtacttcttgaatgtgattttcaacatccttaacaagaagatctataattacttcccttatccctattttgtatcggtgatacacttgttcgtgggagttgtttactgcttgatcagctggtccgtgggtcttcctaaacgtgccccgattgactcgaacctcctcaaggtattgataccagtcgcagtctgtcacgccttaggccatgtcactagcaatgtctctttcgctgcggttgctgtctccttcactcacaccatcaaagcacttgagccattcttcaatgcggctgcttctcaattcattatgggacaatccatccccataacactatggttgtctctagctcctgttgttcttggtgttgcaatggcttcactaactgagctatcattcaactggctcggtttcatcagtgctatgatatcaaacatttctttcacttaccgaagcatcttctccaagaaagccatgactgatatggacagtacaaatgtctacgcttacatctccatcatcgcactcttcgtctgcattcctcctgccatcatcgttgaaggtcctaaactacttaaccatggtttcgccgacgcgattgctaaagttggaatgactaaattcatctctgatctcttctgggttggaatgttttaccatctctacaatcagctggctaccaataccttggagagggttgcaccgctgactcacgcggttggaaacgttctgaaacgtgtgttcgtgatcggtttctccatcgttatcttcggaaacaagatatcgacacagacaggtataggaacaggaatagccattgctggagttgcaatgtactctatcattaaggccaagatcgaagaagagaaacgggtcagttcattattcgcattagctcaattttcattacatagcttaagaaattttgcttactattaa

SEQ ID NO: 73687 - protein, 426 aa, Arabidopsis thaliana
  peptide (1)..(426): Ceres Seq. ID no. 4974704
MESRVLLRATANVVGIPKLRRPIGAIHRQFSTASSSSFSVKPIGGIGEGANLISGRQLRPILLLDSSAINGGEKREILKPVKAAAAEGGDTAGDAKVGFLAKYPWLVTGFFFFMWYFLNVIFNILNKKIYNYFPYPYFVSVIHLFVGVVYCLISWSVGLPKRAPIDSNLLKVLIPVAVCHALGHVTSNVSFAAVAVSFTHTIKALEPFFNAAASQFIMGQSIPITLWLSLAPVVLGVAMASLTELSFNWLGFISAMISNISFTYRSIFSKKAMTDMDSTNVYAYISIIALFVCIPPAIIVEGPKLLNHGFADAIAKVGMTKFISDLFWVGMFYHLYNQLATNTLERVAPLTHAVGNVLKRVFVIGFSIVIFGNKISTQTGIGTGIAIAGVAMYSIIKAKIEEEKRVSSLFALAQFSLHSLRNFAYY

SEQ ID NO: 73688 - protein, 313 aa, Arabidopsis thaliana
  peptide (1)..(313): Ceres Seq. ID no. 4974705
MWYFLNVIFNILNKKIYNYFPYPYFVSVIHLFVGVVYCLISWSVGLPKRAPIDSNLLKVLIPVAVCHALGHVTSNVSFAAVAVSFTHTIKALEPFFNAAASQFIMGQSIPITLWLSLAPVVLGVAMASLTELSFNWLGFISAMISNISFTYRSIFSKKAMTDMDSTNVYAYISIIALFVCIPPAIIVEGPKLLNHGFADAIAKVGMTKFISDLFWVGMFYHLYNQLATNTLERVAPLTHAVGNVLKRVFVIGFSIVIFGNKISTQTGIGTGIAIAGVAMYSIIKAKIEEEKRVSSLFALAQFSLHSLRNFAYY

SEQ ID NO: 73689 - DNA, 4167 bp, Arabidopsis thaliana
  misc_feature (1)..(4167): Ceres Seq. ID no. 4974769
  misc_feature (1)..(4167): Ortholog of  Ceres SEQ ID NO 14306420 as cited in SEQ ID NO 53854
  misc_feature (1)..(4167): Ortholog of  Ceres SEQ ID NO 14306410 as cited in SEQ ID NO 53870
  misc_feature (1)..(4167): Ortholog of  Ceres SEQ ID NO 12586556 as cited in SEQ ID NO 64667
  misc_feature (1)..(4167): Ortholog of  Ceres SEQ ID NO 13660894 as cited in SEQ ID NO 67475
atgtccaccgttaatcatcactgcctcctcaattttcctcatatcccaccttcaattcctccgaatcatcgtcccaaacttctttcttctctctccctctatcgaaaaccagaacgcctctttgctctctctgcgtctctgtctctttcaccagcaacaatccatgaatgttcttcttcctcatcttcttcttcttcatcgttcgataaagaagaaacggaagacattgaatctgttattgatgggtttttctatctgcttcgattgtctgctcaataccacgacgtcgaggtaacaaaagctgtgcacgcttcgtttcttaagctcagagaagaaaaaacccgtcttggaaatgcccttatctctacttatctcaaacttggtttccctcgtgaagctattctcgtcttcgtgtctctgtcttcgccaacggtggtttcttacacagctcttatctcgggtttctcaaggttaaaccttgaaattgaggctcttaaggttttcttcaggatgagaaaagcaggtcttgttcagccgaatgagtatacttttgtagcgattttgactgcttgcgtgagagtttcccgattctcgcttgggattcagattcatggattgatagttaaatcagggtttttgaattctgtgtttgttagtaattcgctgatgagtttgtatgataaggattctgggtcttcgtgtgatgatgtgcttaagttgttcgatgaaattcctcagagagatgtggcgtcttggaacactgtggtttcgagtttagtgaaagagggcaagtctcataaagctttcgatttgttttatgagatgaatagagtcgaaggatttggagttgatagttttacgctttcaacgcttttgagctcttgtactgattctagtgtcttattgagaggtagagaactccatggtcgtgcaattaggatagggttgatgcaggagttgagtgtgaacaacgctctgattgggttttattctaaattttgggatatgaaaaaggtagagagtttatacgagatgatgatggcgcaagatgctgttactttcacggagatgatcacagcttacatgtcatttggaatggtggattccgctgttgagatattcgcgaatgtaactgaaaaaaacactattacgtataatgcgctcatggctgggttctgtagaaatggccatggcttgaaggcactaaaattattcactgatatgctgcagagaggtgttgagttgacggattttagtttaacaagcgctgttgatgcttgtggtttagtttcagagaagaaagtaagcgaacagattcacgggttttgtattaagtttggaactgctttcaacccttgtatccagactgcattgcttgatatgtgcacaaggtgtgaaaggatggcagatgctgaggagatgtttgaccaatggccttctaatctcgatagctcgaaagcaacgacgtctataatcggtggttacgctcggaatggcttacctgataaggctgtatcgctattccatcgcactctctgtgaacagaagttgtttttagatgaagtttcgttgactttgattcttgcggtctgcgggacattaggttttcgggaaatgggttatcagatccattgctatgctcttaaagctgggtacttttctgatataagcttgggaaattctttgattagcatgtacgcgaaatgttgtgactcagatgatgccataaagattttcaacactatgcgagaacatgatgttatttcttggaacagcttgatttcttgctacatccttcaaagaaatggtgatgaggcactggctctatggtcgaggatgaatgagaaagagatcaagcctgacataatcaccctcactcttgttatttctgcatttcggtatacagagtcaaataagcttagtagctgccgtgatctgtttctctccatgaagactatctatgacattgaaccaacgactgaacattacactgcattcgtccgtgttcttggtcattggggtcttcttgaagaagcggaagacacaataaactcaatgccggttcagcccgaggtctctgttttgagagctctgcttgatagctgcagaatacattcaaacacaagcgttgcgaaacgagtagcaaagcttatactatctacaaagccagaaaccccgtctgagtacatcctcaaatccaacatctactcagcttccggattctggcatcgctctgaaatgataagagaggaaatgcgggaaagaggttaccggaaacatcctgctaaaagctggataatccatgagaacaaaatacattcctttcacgcgcgtgacacatcccacccgcaagagaaagacatatacaggggattggagatactgataatggaatgtctgaaagttggatacgaaccaaacacagagtatgttcttcaggaggttgatgagtttatgaagaagagtttcttgtttcaccacagcgcgaaactcgcagtgacttatggaattctctcgagcaatactcggggcaagccggttcgggttatgaagaacgtaatgctctgtggtgattgccacgagttcttcaagtatatttcagttgtgatcatgggagatgaagatgttgatgggaagtgtaaaaacatgtctgcatgttcctcaacgacgtcgtattcaactaaactctttctattcatggttcctcttgttgtcatttctggtttcgtctttgtaaatattggtcctaaagattcaacttctttattaacctctctgtccactactacttctcatcttcctcctccgtttctgtctacggctccggcaccggcgccatctcctctgctaccggagatacttccctcgttgccagcatcatctttatcgactaaagtggaatctattcagggtgattataatcgcacaattcaactgaatatgatcaacgttactgcaacgagtaataacgtctcttctacggcatcattggaaccaaagaaaagaagagttcttagcaatttagagaagatagaattcaagctacaaaaagctcgagcctccattaaagccgcttcgatggatgatcccgtggacgacccggactatgttcctcttggtcctatgtattggaacgctaaggtctttcatcggagttacttggagatggagaaacaattcaagatatatgtatacaaagaaggcgagccaccgttgttccatgacggtccatgcaaaagcatctactctatggaaggaagtttcatctatgagatagaaaccgatacacgttttcggaccaataatcccgacaaggctcatgttttttatctaccatttagtgtcgtcaagatggtaagatacgtgtatgaacgaaattcccgcgatttcagccccatccgaaatacagtcaaggattacatcaatcttgtgggtgataaatacccatattggaaccgcagcatcggagccgatcatttcatactttcttgtcacgattggggtcctgaggcaagcttctctcatccacatctaggacataattcgattagagctttgtgcaatgccaacacgtcagagagattcaaaccaagaaaagatgtgtcgataccggagatcaatctaaggacgggatccttaactggattggtcggtggaccgtcaccttccagccgtcccatcctcgccttctttgcagggggtgtacacggaccggtaaggccagtcttgctccagcattgggagaacaaagataatgacattagagtccacaagtatctccctagaggaacgtcttattctgacatgatgcggaacagcaagttctgcatttgtcctagcggttatgaggttgcgagcccgaggatcgtggaggcactctactcgggttgcgtcccggttttgataaactcaggatatgttcctccgttcagcgatgtactgaactggagatcgttctcggtgatcgtttcagtggaagacataccgaatttgaaaacgatattgacatctatatcgccgagacagtacttaaggatgtacagaagagtgttgaaggtaaggagacattttgaggtgaattctccggctaagaggtttgatgtgtttcatatgattcttcattcgatttgggtgaggagattgaatgtgaagattcgtgaagtctaa

SEQ ID NO: 73690 - protein, 1388 aa, Arabidopsis thaliana
  peptide (1)..(1388): Ceres Seq. ID no. 4974770
MSTVNHHCLLNFPHIPPSIPPNHRPKLLSSLSLYRKPERLFALSASLSLSPATIHECSSSSSSSSSSFDKEETEDIESVIDGFFYLLRLSAQYHDVEVTKAVHASFLKLREEKTRLGNALISTYLKLGFPREAILVFVSLSSPTVVSYTALISGFSRLNLEIEALKVFFRMRKAGLVQPNEYTFVAILTACVRVSRFSLGIQIHGLIVKSGFLNSVFVSNSLMSLYDKDSGSSCDDVLKLFDEIPQRDVASWNTVVSSLVKEGKSHKAFDLFYEMNRVEGFGVDSFTLSTLLSSCTDSSVLLRGRELHGRAIRIGLMQELSVNNALIGFYSKFWDMKKVESLYEMMMAQDAVTFTEMITAYMSFGMVDSAVEIFANVTEKNTITYNALMAGFCRNGHGLKALKLFTDMLQRGVELTDFSLTSAVDACGLVSEKKVSEQIHGFCIKFGTAFNPCIQTALLDMCTRCERMADAEEMFDQWPSNLDSSKATTSIIGGYARNGLPDKAVSLFHRTLCEQKLFLDEVSLTLILAVCGTLGFREMGYQIHCYALKAGYFSDISLGNSLISMYAKCCDSDDAIKIFNTMREHDVISWNSLISCYILQRNGDEALALWSRMNEKEIKPDIITLTLVISAFRYTESNKLSSCRDLFLSMKTIYDIEPTTEHYTAFVRVLGHWGLLEEAEDTINSMPVQPEVSVLRALLDSCRIHSNTSVAKRVAKLILSTKPETPSEYILKSNIYSASGFWHRSEMIREEMRERGYRKHPAKSWIIHENKIHSFHARDTSHPQEKDIYRGLEILIMECLKVGYEPNTEYVLQEVDEFMKKSFLFHHSAKLAVTYGILSSNTRGKPVRVMKNVMLCGDCHEFFKYISVVIMGDEDVDGKCKNMSACSSTTSYSTKLFLFMVPLVVISGFVFVNIGPKDSTSLLTSLSTTTSHLPPPFLSTAPAPAPSPLLPEILPSLPASSLSTKVESIQGDYNRTIQLNMINVTATSNNVSSTASLEPKKRRVLSNLEKIEFKLQKARASIKAASMDDPVDDPDYVPLGPMYWNAKVFHRSYLEMEKQFKIYVYKEGEPPLFHDGPCKSIYSMEGSFIYEIETDTRFRTNNPDKAHVFYLPFSVVKMVRYVYERNSRDFSPIRNTVKDYINLVGDKYPYWNRSIGADHFILSCHDWGPEASFSHPHLGHNSIRALCNANTSERFKPRKDVSIPEINLRTGSLTGLVGGPSPSSRPILAFFAGGVHGPVRPVLLQHWENKDNDIRVHKYLPRGTSYSDMMRNSKFCICPSGYEVASPRIVEALYSGCVPVLINSGYVPPFSDVLNWRSFSVIVSVEDIPNLKTILTSISPRQYLRMYRRVLKVRRHFEVNSPAKRFDVFHMILHSIWVRRLNVKIREV

SEQ ID NO: 73691 - protein, 1218 aa, Arabidopsis thaliana
  peptide (1)..(1218): Ceres Seq. ID no. 4974771
MRKAGLVQPNEYTFVAILTACVRVSRFSLGIQIHGLIVKSGFLNSVFVSNSLMSLYDKDSGSSCDDVLKLFDEIPQRDVASWNTVVSSLVKEGKSHKAFDLFYEMNRVEGFGVDSFTLSTLLSSCTDSSVLLRGRELHGRAIRIGLMQELSVNNALIGFYSKFWDMKKVESLYEMMMAQDAVTFTEMITAYMSFGMVDSAVEIFANVTEKNTITYNALMAGFCRNGHGLKALKLFTDMLQRGVELTDFSLTSAVDACGLVSEKKVSEQIHGFCIKFGTAFNPCIQTALLDMCTRCERMADAEEMFDQWPSNLDSSKATTSIIGGYARNGLPDKAVSLFHRTLCEQKLFLDEVSLTLILAVCGTLGFREMGYQIHCYALKAGYFSDISLGNSLISMYAKCCDSDDAIKIFNTMREHDVISWNSLISCYILQRNGDEALALWSRMNEKEIKPDIITLTLVISAFRYTESNKLSSCRDLFLSMKTIYDIEPTTEHYTAFVRVLGHWGLLEEAEDTINSMPVQPEVSVLRALLDSCRIHSNTSVAKRVAKLILSTKPETPSEYILKSNIYSASGFWHRSEMIREEMRERGYRKHPAKSWIIHENKIHSFHARDTSHPQEKDIYRGLEILIMECLKVGYEPNTEYVLQEVDEFMKKSFLFHHSAKLAVTYGILSSNTRGKPVRVMKNVMLCGDCHEFFKYISVVIMGDEDVDGKCKNMSACSSTTSYSTKLFLFMVPLVVISGFVFVNIGPKDSTSLLTSLSTTTSHLPPPFLSTAPAPAPSPLLPEILPSLPASSLSTKVESIQGDYNRTIQLNMINVTATSNNVSSTASLEPKKRRVLSNLEKIEFKLQKARASIKAASMDDPVDDPDYVPLGPMYWNAKVFHRSYLEMEKQFKIYVYKEGEPPLFHDGPCKSIYSMEGSFIYEIETDTRFRTNNPDKAHVFYLPFSVVKMVRYVYERNSRDFSPIRNTVKDYINLVGDKYPYWNRSIGADHFILSCHDWGPEASFSHPHLGHNSIRALCNANTSERFKPRKDVSIPEINLRTGSLTGLVGGPSPSSRPILAFFAGGVHGPVRPVLLQHWENKDNDIRVHKYLPRGTSYSDMMRNSKFCICPSGYEVASPRIVEALYSGCVPVLINSGYVPPFSDVLNWRSFSVIVSVEDIPNLKTILTSISPRQYLRMYRRVLKVRRHFEVNSPAKRFDVFHMILHSIWVRRLNVKIREV

SEQ ID NO: 73692 - protein, 1166 aa, Arabidopsis thaliana
  peptide (1)..(1166): Ceres Seq. ID no. 4974772
MSLYDKDSGSSCDDVLKLFDEIPQRDVASWNTVVSSLVKEGKSHKAFDLFYEMNRVEGFGVDSFTLSTLLSSCTDSSVLLRGRELHGRAIRIGLMQELSVNNALIGFYSKFWDMKKVESLYEMMMAQDAVTFTEMITAYMSFGMVDSAVEIFANVTEKNTITYNALMAGFCRNGHGLKALKLFTDMLQRGVELTDFSLTSAVDACGLVSEKKVSEQIHGFCIKFGTAFNPCIQTALLDMCTRCERMADAEEMFDQWPSNLDSSKATTSIIGGYARNGLPDKAVSLFHRTLCEQKLFLDEVSLTLILAVCGTLGFREMGYQIHCYALKAGYFSDISLGNSLISMYAKCCDSDDAIKIFNTMREHDVISWNSLISCYILQRNGDEALALWSRMNEKEIKPDIITLTLVISAFRYTESNKLSSCRDLFLSMKTIYDIEPTTEHYTAFVRVLGHWGLLEEAEDTINSMPVQPEVSVLRALLDSCRIHSNTSVAKRVAKLILSTKPETPSEYILKSNIYSASGFWHRSEMIREEMRERGYRKHPAKSWIIHENKIHSFHARDTSHPQEKDIYRGLEILIMECLKVGYEPNTEYVLQEVDEFMKKSFLFHHSAKLAVTYGILSSNTRGKPVRVMKNVMLCGDCHEFFKYISVVIMGDEDVDGKCKNMSACSSTTSYSTKLFLFMVPLVVISGFVFVNIGPKDSTSLLTSLSTTTSHLPPPFLSTAPAPAPSPLLPEILPSLPASSLSTKVESIQGDYNRTIQLNMINVTATSNNVSSTASLEPKKRRVLSNLEKIEFKLQKARASIKAASMDDPVDDPDYVPLGPMYWNAKVFHRSYLEMEKQFKIYVYKEGEPPLFHDGPCKSIYSMEGSFIYEIETDTRFRTNNPDKAHVFYLPFSVVKMVRYVYERNSRDFSPIRNTVKDYINLVGDKYPYWNRSIGADHFILSCHDWGPEASFSHPHLGHNSIRALCNANTSERFKPRKDVSIPEINLRTGSLTGLVGGPSPSSRPILAFFAGGVHGPVRPVLLQHWENKDNDIRVHKYLPRGTSYSDMMRNSKFCICPSGYEVASPRIVEALYSGCVPVLINSGYVPPFSDVLNWRSFSVIVSVEDIPNLKTILTSISPRQYLRMYRRVLKVRRHFEVNSPAKRFDVFHMILHSIWVRRLNVKIREV

SEQ ID NO: 73693 - DNA, 711 bp, Arabidopsis thaliana
  misc_feature (1)..(711): Ceres Seq. ID no. 4974845
  misc_feature (1)..(711): Ortholog of  Ceres SEQ ID NO 14310390 as cited in SEQ ID NO 59715
atggcagtccctcttcttgtttctaaagctttggagctgtttttacaagacttgtgtaatcacacgtatgatgtaactctaagccgaggtgctaaaactgtcaacgcctttcatttgaagcagtgtgtgcaagcgactaatgtctttgattttctaagagacactgtcgctaaagttcctgatttgggtggctcagacactgaagaccaatcagctaccaaaagaaggaaagttgttgatggaagtagttgcaacgatgaagatatgataaagaccactcaaatgcatgaggtcaaacatactagctgtggcagaggaaggcgaggtagaggccgcggacgaagtagtggaagaacaggaagtgggctgtctctaaaatttgaagaagatttagaagacggttctcccgaaagcagcaggaccccgtctcccgaaaacgggagcctttctcacgacgatacatcttggaagaaagttgcatcacacaacaatcatcatagtagtaactcagaggtaaaagtaaggaacttcgatcttaatgttgaattagatgagaatggagacaatgctacatggctggaaacacagctagagagaagtccagattacccgttggagattaacgaaatgaaaatagatcctgatgatcaacaacaggctagtgctagtgacgaggaagattatgatgaagaaagcatagaccaagagtga

SEQ ID NO: 73694 - protein, 236 aa, Arabidopsis thaliana
  peptide (1)..(236): Ceres Seq. ID no. 4974846
MAVPLLVSKALELFLQDLCNHTYDVTLSRGAKTVNAFHLKQCVQATNVFDFLRDTVAKVPDLGGSDTEDQSATKRRKVVDGSSCNDEDMIKTTQMHEVKHTSCGRGRRGRGRGRSSGRTGSGLSLKFEEDLEDGSPESSRTPSPENGSLSHDDTSWKKVASHNNHHSSNSEVKVRNFDLNVELDENGDNATWLETQLERSPDYPLEINEMKIDPDDQQQASASDEEDYDEESIDQE

SEQ ID NO: 73695 - protein, 148 aa, Arabidopsis thaliana
  peptide (1)..(148): Ceres Seq. ID no. 4974847
MIKTTQMHEVKHTSCGRGRRGRGRGRSSGRTGSGLSLKFEEDLEDGSPESSRTPSPENGSLSHDDTSWKKVASHNNHHSSNSEVKVRNFDLNVELDENGDNATWLETQLERSPDYPLEINEMKIDPDDQQQASASDEEDYDEESIDQE

SEQ ID NO: 73696 - protein, 142 aa, Arabidopsis thaliana
  peptide (1)..(142): Ceres Seq. ID no. 4974848
MHEVKHTSCGRGRRGRGRGRSSGRTGSGLSLKFEEDLEDGSPESSRTPSPENGSLSHDDTSWKKVASHNNHHSSNSEVKVRNFDLNVELDENGDNATWLETQLERSPDYPLEINEMKIDPDDQQQASASDEEDYDEESIDQE

SEQ ID NO: 73697 - DNA, 1890 bp, Arabidopsis thaliana
  misc_feature (1)..(1890): Ceres Seq. ID no. 4974863
  misc_feature (1)..(1890): Ortholog of  Ceres SEQ ID NO 13639419 as cited in SEQ ID NO 54220
  misc_feature (1)..(1890): Ortholog of  Ceres SEQ ID NO 13593967 as cited in SEQ ID NO 56966
atgatctcttttggttttctgactcgcttgcaactttggagtgtgatatcttcttggtttacaatttgtcattcttttctgttttgtgtcagaaatggatctccggatgttcctaagaaggtgtctcctcgagctgctcggccactgaagatcgcagcgctagagcctgaatcttcttcatctcctatctcagctactaacagaacaccaaaggataagagtccaaacgttctaaatcgtaggtctcctcgaagccctgtctctgagaagaagaggccgagtagaataacggagctagagttgctagtctcgcagcttcaggaggagctaaaaaaggcgaaagatcaaatctcagtgtctgaaacatcaaagaagcaagcagaacaagaagcagaggagtccaggaaacagctccaagaagtttcttctaagcttgaggagagccagaatcagtttgtggaaacttcagccttggaagaagaaaccgataaaaccggttctcttgtttttcaaagtgtatctcaggagtgtgattgggagtttagtgctactgctggtgaaagagcaggattagctgctgttgctcatgagatccgacaactcaagcttcagattgagatggtggcttcttctgaagctggtcatgtgaaacaagctgagttgtataactcagaggttcaacttttgagaggaaacttaatggacacgcttttccacgtcgagaatttcaggaaccaacttaaggactgtgagatatcagaagctgaaaccgaggctttagccactgaaactcttaggcaattggagaatgcgaaaaaggcagtagaagaactgaagtcagatggcacaaaagctgttgagagttacaagaagatggctgtggagcttgaacagtcaaaatcaaggatggtatggcttgaagctcttgtgaataaacttcagaacaatccagcagatttggaaaaccacgaaatcctgcttaaagactatgaaagtttgagacgtggggaatcaaatgagatggatgaagaagtatcttccttaagatgtgaggtagagcgactgagagcagctctagaagcttctgataaaaaagaccaagaaggtaatgtagaggcttcttctcggttacggatacaagctgaactccagtctgaattaaagattgctaaatctgagatagacgagctaaaggcgaggttgatggacaaagaaacagaattacagtttatttcagaggaaagagataactttagcatgaaactgatgaagaaccagaaagaaatagatgttgaagctgagctgaagaaactaagggaggcgatcgagaatttaaaggcggatttgatggataaagaaacagaactccagatcgtttcagatgagaacgagacattgaagtcagatatccacaagagcgagacagatgtacaagacgcgttcctgaagctagggattgcaatggaagaggctgacaagagtagcaagaaagcggttagagtcaccgagcaactagaggctactcaagcttcaaactcagaaatggaaacagaactcaggaagctcaaagttcaatcaaaccaatggagaaaagctgctgaagcagctactgccatgctctctgctggaaacaacgggaaattcgctgagaactataatcaaacgaactccccgtactctgaggatatcgatgatgaactgacaaagaagaaaaatgggaatgtgctcaagaagattggagttttgtggaagaagcctcagaaatatgtctctctcaattcgcttaagaaactaacttttgctttccccaacacggtttctgcttctcaggtatcgtcgacttggagttggattataagagcaactcatgtgacttcggtatcgatgtga

SEQ ID NO: 73698 - protein, 629 aa, Arabidopsis thaliana
  peptide (1)..(629): Ceres Seq. ID no. 4974864
MISFGFLTRLQLWSVISSWFTICHSFLFCVRNGSPDVPKKVSPRAARPLKIAALEPESSSSPISATNRTPKDKSPNVLNRRSPRSPVSEKKRPSRITELELLVSQLQEELKKAKDQISVSETSKKQAEQEAEESRKQLQEVSSKLEESQNQFVETSALEEETDKTGSLVFQSVSQECDWEFSATAGERAGLAAVAHEIRQLKLQIEMVASSEAGHVKQAELYNSEVQLLRGNLMDTLFHVENFRNQLKDCEISEAETEALATETLRQLENAKKAVEELKSDGTKAVESYKKMAVELEQSKSRMVWLEALVNKLQNNPADLENHEILLKDYESLRRGESNEMDEEVSSLRCEVERLRAALEASDKKDQEGNVEASSRLRIQAELQSELKIAKSEIDELKARLMDKETELQFISEERDNFSMKLMKNQKEIDVEAELKKLREAIENLKADLMDKETELQIVSDENETLKSDIHKSETDVQDAFLKLGIAMEEADKSSKKAVRVTEQLEATQASNSEMETELRKLKVQSNQWRKAAEAATAMLSAGNNGKFAENYNQTNSPYSEDIDDELTKKKNGNVLKKIGVLWKKPQKYVSLNSLKKLTFAFPNTVSASQVSSTWSWIIRATHVTSVSM

SEQ ID NO: 73699 - protein, 423 aa, Arabidopsis thaliana
  peptide (1)..(423): Ceres Seq. ID no. 4974865
MVASSEAGHVKQAELYNSEVQLLRGNLMDTLFHVENFRNQLKDCEISEAETEALATETLRQLENAKKAVEELKSDGTKAVESYKKMAVELEQSKSRMVWLEALVNKLQNNPADLENHEILLKDYESLRRGESNEMDEEVSSLRCEVERLRAALEASDKKDQEGNVEASSRLRIQAELQSELKIAKSEIDELKARLMDKETELQFISEERDNFSMKLMKNQKEIDVEAELKKLREAIENLKADLMDKETELQIVSDENETLKSDIHKSETDVQDAFLKLGIAMEEADKSSKKAVRVTEQLEATQASNSEMETELRKLKVQSNQWRKAAEAATAMLSAGNNGKFAENYNQTNSPYSEDIDDELTKKKNGNVLKKIGVLWKKPQKYVSLNSLKKLTFAFPNTVSASQVSSTWSWIIRATHVTSVSM

SEQ ID NO: 73700 - protein, 396 aa, Arabidopsis thaliana
  peptide (1)..(396): Ceres Seq. ID no. 4974866
MDTLFHVENFRNQLKDCEISEAETEALATETLRQLENAKKAVEELKSDGTKAVESYKKMAVELEQSKSRMVWLEALVNKLQNNPADLENHEILLKDYESLRRGESNEMDEEVSSLRCEVERLRAALEASDKKDQEGNVEASSRLRIQAELQSELKIAKSEIDELKARLMDKETELQFISEERDNFSMKLMKNQKEIDVEAELKKLREAIENLKADLMDKETELQIVSDENETLKSDIHKSETDVQDAFLKLGIAMEEADKSSKKAVRVTEQLEATQASNSEMETELRKLKVQSNQWRKAAEAATAMLSAGNNGKFAENYNQTNSPYSEDIDDELTKKKNGNVLKKIGVLWKKPQKYVSLNSLKKLTFAFPNTVSASQVSSTWSWIIRATHVTSVSM

SEQ ID NO: 73701 - DNA, 984 bp, Arabidopsis thaliana
  misc_feature (1)..(984): Ceres Seq. ID no. 4974867
  misc_feature (1)..(984): Ortholog of  Ceres SEQ ID NO 15177991 as cited in SEQ ID NO 53915
  misc_feature (1)..(984): Ortholog of  Ceres SEQ ID NO 15174347 as cited in SEQ ID NO 58577
  misc_feature (1)..(984): Ortholog of  Ceres SEQ ID NO 13596609 as cited in SEQ ID NO 63070
  misc_feature (1)..(984): Ortholog of  Ceres SEQ ID NO 12616895 as cited in SEQ ID NO 63909
  misc_feature (1)..(984): Ortholog of  Ceres SEQ ID NO 13598574 as cited in SEQ ID NO 69083
atgagatcgagaagtaaccttataggtctcataaacttcttcactttcctcctgtcgattcctatcctcggcggtggaatatggcttagcagccgagctaactcaaccgattgcctcagattcctccagtggccactcattatcatcggaatatcaatcatggtcatatctttagccggaatcgccggagcttgttaccaaaacaagttcctcatgtggctttaccttttcaccatgttctttgtaatcgctgctcttataggattcacaatcttcgcttacgtagttactgataaaggctcaggccggtttgtgatgaaccgtcggtatcttgattattatctcaatgattattccggttggttaaaggaccgtgtcacagataatggatattggagagatatcggatcgtgtgttagagattctggagtttgtaagaagattggaagagatttaaatggtgttccagaaactgctcatatgttttacttcagaaatctttctcctgttgagtccggatgttgcaagccgccaacagattgtggctatacgtacgtgaacgagacagtgtggattccgggaggagaaatggtgggaccgaacccggactgtatgttgtggaacaatgaccagagactactctgttaccaatgcagctcttgtaaagccggtgttcttggtagcttgaaaaagagttggagaaaagtctcggtgatcaacatcgtggttgtgatcatacttgttatcttctatgtcatcgcgtgtgcggcttaccagaatgttaagaggatgtataatgacgaaccggtcggtgaggctaggatgaccaatctcatcctagtcattttcaaatttaaggagattttggtacagtttttcttcggaattgtgtttttattactctttaatggtttaatggtctgttgttgtaatgataaatttgcttttagtgttttcttctttggatatgttacatatgcatga

SEQ ID NO: 73702 - protein, 327 aa, Arabidopsis thaliana
  peptide (1)..(327): Ceres Seq. ID no. 4974868
MRSRSNLIGLINFFTFLLSIPILGGGIWLSSRANSTDCLRFLQWPLIIIGISIMVISLAGIAGACYQNKFLMWLYLFTMFFVIAALIGFTIFAYVVTDKGSGRFVMNRRYLDYYLNDYSGWLKDRVTDNGYWRDIGSCVRDSGVCKKIGRDLNGVPETAHMFYFRNLSPVESGCCKPPTDCGYTYVNETVWIPGGEMVGPNPDCMLWNNDQRLLCYQCSSCKAGVLGSLKKSWRKVSVINIVVVIILVIFYVIACAAYQNVKRMYNDEPVGEARMTNLILVIFKFKEILVQFFFGIVFLLLFNGLMVCCCNDKFAFSVFFFGYVTYA

SEQ ID NO: 73703 - protein, 274 aa, Arabidopsis thaliana
  peptide (1)..(274): Ceres Seq. ID no. 4974869
MVISLAGIAGACYQNKFLMWLYLFTMFFVIAALIGFTIFAYVVTDKGSGRFVMNRRYLDYYLNDYSGWLKDRVTDNGYWRDIGSCVRDSGVCKKIGRDLNGVPETAHMFYFRNLSPVESGCCKPPTDCGYTYVNETVWIPGGEMVGPNPDCMLWNNDQRLLCYQCSSCKAGVLGSLKKSWRKVSVINIVVVIILVIFYVIACAAYQNVKRMYNDEPVGEARMTNLILVIFKFKEILVQFFFGIVFLLLFNGLMVCCCNDKFAFSVFFFGYVTYA

SEQ ID NO: 73704 - protein, 256 aa, Arabidopsis thaliana
  peptide (1)..(256): Ceres Seq. ID no. 4974870
MWLYLFTMFFVIAALIGFTIFAYVVTDKGSGRFVMNRRYLDYYLNDYSGWLKDRVTDNGYWRDIGSCVRDSGVCKKIGRDLNGVPETAHMFYFRNLSPVESGCCKPPTDCGYTYVNETVWIPGGEMVGPNPDCMLWNNDQRLLCYQCSSCKAGVLGSLKKSWRKVSVINIVVVIILVIFYVIACAAYQNVKRMYNDEPVGEARMTNLILVIFKFKEILVQFFFGIVFLLLFNGLMVCCCNDKFAFSVFFFGYVTYA

SEQ ID NO: 73705 - DNA, 576 bp, Arabidopsis thaliana
  misc_feature (1)..(576): Ceres Seq. ID no. 4974936
  misc_feature (1)..(576): Ortholog of  Ceres SEQ ID NO 13528157 as cited in SEQ ID NO 60102
atggttgtcttgtacaacgagtgccttaaaaaccacgcggtcagtctcggaggccacgctcttgacggctgcggtgagttcacaccaaagtcaaccaccatcctcacggaccctccgtcccttaggtgcgatgcttgtggctgccatcgcaacttccaccgtcgtagtccttctgacggcttcagtcagcaccggtcaccaccgtctccgttacagctgcagccactcgcccctgttccgaacttgcttctctctcttagctccggtttctttggaccctcggatcaagaagtcaagaacaaatttacggtggaaagggatgttaggaagactgcgatgattaagaaacataagaggacgaaattcacggcggagcagaaggtgaagatgagaggtttcgcggagagagcggggtggaagattaacggctgggatgagaagtgggtgagagagttttgtagtgaagttggaatagagagaaaagttcttaaggtttggatccacaacaataagtactttaacaacgggaggagcagagacacgacgtcctctatgtctttgaatttgaagttgtag

SEQ ID NO: 73706 - protein, 191 aa, Arabidopsis thaliana; identical to SEQ ID NO: 70023
  peptide (1)..(191): Ceres Seq. ID no. 4974937

SEQ ID NO: 73707 - protein, 112 aa, Arabidopsis thaliana
  peptide (1)..(112): Ceres Seq. ID no. 4974938
WLSCTTSALKTTRSVSEATLLTAAVSSHQSQPPSSRTLRPLGAMLVAAIATSTVVVLLTASVSTGHHRLRYSCSHSPLFRTCFSLLAPVSLDPRIKKSRTNLRWKGMLGRLR

SEQ ID NO: 73708 - DNA, 1131 bp, Arabidopsis thaliana
  misc_feature (1)..(1131): Ceres Seq. ID no. 4975114
  misc_feature (1)..(1131): Ortholog of  Ceres SEQ ID NO 14314526 as cited in SEQ ID NO 52420
atgtatttctatgctcaaatgccaaatcatctaaattcgtatttaaacctgcttagggacttgacaattctcatagcacaaactgttttttttatgaatgtgggttggtttcaggtagctgatgcggaattggtgaaatctgacaagtttccggtagtggtgagtacttggcctttccttgaagctgttagagctgcttggagagcagttgataatgggagctctgcagtggaagctgttgttgaaggttgttctgcttgtgaagaacttcgttgtgacggtacagttgggcctggaggaagtccggatgagaatggtgagaccatgattgatgctttagtcatggatggggtgactatggaggttggagctgttgctgcaatgcggtatgttaaagacggtataagagctgcacatctagtgatgaaatactctcaacacacgttgcttgccggagaaggagcatcagcatttgcaatctccatgggtctccccggacccatgaacctaagctcccctgaatctgtaaagaagtggtcggactggaaagagaatcagtgtcaacccaatttcaggaagaatgtagtccccgcaaatgactgtggaccttacaagccaaacaatagtgctatgaatgtttttgtagacaaaagcactgaatcttgcgagatgggggcgattgagtataaacctcctcttgttggtcctcacaatcacgatacgatatcgatggctgtcattgacagaatggggcatatagctgttgggacatcgaccaatggagccacatataaaattcctggaagggttggtgatgggcctatcgtcggttcatcagcctacgctgatgatgaagtaggtggatgtggtgcaactggagatggtgacaccatgatgcgcttcctcccttgttaccaagttgtggagagcatgagacaaggaatgaaaccagaagaagctgctaaagatgcaatctcgagaatcgcaaggaagtttccagatttcgtgggagcagttgtggctgttgacaagaacggatctcacgcaggagcttgctatggctggacgtttcagtactcagtccaaaaccctgacatgaacgatgttcaagtctttacagttcttccatga

SEQ ID NO: 73709 - protein, 376 aa, Arabidopsis thaliana
  peptide (1)..(376): Ceres Seq. ID no. 4975115
MYFYAQMPNHLNSYLNLLRDLTILIAQTVFFMNVGWFQVADAELVKSDKFPVVVSTWPFLEAVRAAWRAVDNGSSAVEAVVEGCSACEELRCDGTVGPGGSPDENGETMIDALVMDGVTMEVGAVAAMRYVKDGIRAAHLVMKYSQHTLLAGEGASAFAISMGLPGPMNLSSPESVKKWSDWKENQCQPNFRKNVVPANDCGPYKPNNSAMNVFVDKSTESCEMGAIEYKPPLVGPHNHDTISMAVIDRMGHIAVGTSTNGATYKIPGRVGDGPIVGSSAYADDEVGGCGATGDGDTMMRFLPCYQVVESMRQGMKPEEAAKDAISRIARKFPDFVGAVVAVDKNGSHAGACYGWTFQYSVQNPDMNDVQVFTVLP

SEQ ID NO: 73710 - protein, 370 aa, Arabidopsis thaliana
  peptide (1)..(370): Ceres Seq. ID no. 4975116
MPNHLNSYLNLLRDLTILIAQTVFFMNVGWFQVADAELVKSDKFPVVVSTWPFLEAVRAAWRAVDNGSSAVEAVVEGCSACEELRCDGTVGPGGSPDENGETMIDALVMDGVTMEVGAVAAMRYVKDGIRAAHLVMKYSQHTLLAGEGASAFAISMGLPGPMNLSSPESVKKWSDWKENQCQPNFRKNVVPANDCGPYKPNNSAMNVFVDKSTESCEMGAIEYKPPLVGPHNHDTISMAVIDRMGHIAVGTSTNGATYKIPGRVGDGPIVGSSAYADDEVGGCGATGDGDTMMRFLPCYQVVESMRQGMKPEEAAKDAISRIARKFPDFVGAVVAVDKNGSHAGACYGWTFQYSVQNPDMNDVQVFTVLP

SEQ ID NO: 73711 - protein, 345 aa, Arabidopsis thaliana
  peptide (1)..(345): Ceres Seq. ID no. 4975117
MNVGWFQVADAELVKSDKFPVVVSTWPFLEAVRAAWRAVDNGSSAVEAVVEGCSACEELRCDGTVGPGGSPDENGETMIDALVMDGVTMEVGAVAAMRYVKDGIRAAHLVMKYSQHTLLAGEGASAFAISMGLPGPMNLSSPESVKKWSDWKENQCQPNFRKNVVPANDCGPYKPNNSAMNVFVDKSTESCEMGAIEYKPPLVGPHNHDTISMAVIDRMGHIAVGTSTNGATYKIPGRVGDGPIVGSSAYADDEVGGCGATGDGDTMMRFLPCYQVVESMRQGMKPEEAAKDAISRIARKFPDFVGAVVAVDKNGSHAGACYGWTFQYSVQNPDMNDVQVFTVLP

SEQ ID NO: 73712 - DNA, 929 bp, Arabidopsis thaliana
  misc_feature (1)..(929): Ceres Seq. ID no. 4975441
  misc_feature (1)..(929): Ortholog of  Ceres SEQ ID NO 15178042 as cited in SEQ ID NO 54787
  misc_feature (1)..(929): Ortholog of  Ceres SEQ ID NO 13597899 as cited in SEQ ID NO 64374
ctctccaaatttcttcttcttctccggcgaagaaatcgaaaagtcattaccctaagagtcccagagtcgtcagaaggaacagcttttgaaatggacggtgtcacctaccaaagattcccaacggtgaagatccgtgagcttaaagatgactacgccaagttcgagcttcgtgaaaccgacgtttcaatggccaacgctctccgtcgcgtaatgatctccgaagtccccaccatggcaatccatctcgtcaaaatcgaggttaattcctctgttctcaacgacgagttcattgctcaacgacttagtctcatccctctcactagcgagcgtgctatgagcatgcggttctgtcaagattgtgaagattgtaatggagatgaacattgcgagttctgctctgttgagtttccccttagtgctaagtgtgttactgaccaaaccctagatgttactagtagggatctctacagtgctgatcctactgttactcctgttgatttcactagtaactcatctacttctgattcaagcgagcacaagggaattatcattgcgaaactacgcaggggacaagagttgaagcttaaagcattagctaggaaaggaattgggaaagatcatgcgaaatggtctcctgcagctactgttacgtatatgtatgagcctgacattattatcaatgaagagatgatgaacactttgacagatgaggaaaaaattgacttgattgagagcagtcctaccaaagtgtttggcattgacccagtcaccggacaggttaatttcgatgttctgtaagaataacatctatacaagtttatagctttgagacttcaatatgattgtactactttataggctaccatgctttgaaatatatgtatgtgatgtggtgtatgaattttctttaagtgtttagtgcgtttagc

SEQ ID NO: 73713 - protein, 265 aa, Arabidopsis thaliana
  peptide (1)..(265): Ceres Seq. ID no. 4975442
LSKFLLLLRRRNRKVITLRVPESSEGTAFEMDGVTYQRFPTVKIRELKDDYAKFELRETDVSMANALRRVMISEVPTMAIHLVKIEVNSSVLNDEFIAQRLSLIPLTSERAMSMRFCQDCEDCNGDEHCEFCSVEFPLSAKCVTDQTLDVTSRDLYSADPTVTPVDFTSNSSTSDSSEHKGIIIAKLRRGQELKLKALARKGIGKDHAKWSPAATVTYMYEPDIIINEEMMNTLTDEEKIDLIESSPTKVFGIDPVTGQVNFDVL

SEQ ID NO: 73714 - protein, 235 aa, Arabidopsis thaliana
  peptide (1)..(235): Ceres Seq. ID no. 4975443
MDGVTYQRFPTVKIRELKDDYAKFELRETDVSMANALRRVMISEVPTMAIHLVKIEVNSSVLNDEFIAQRLSLIPLTSERAMSMRFCQDCEDCNGDEHCEFCSVEFPLSAKCVTDQTLDVTSRDLYSADPTVTPVDFTSNSSTSDSSEHKGIIIAKLRRGQELKLKALARKGIGKDHAKWSPAATVTYMYEPDIIINEEMMNTLTDEEKIDLIESSPTKVFGIDPVTGQVNFDVL

SEQ ID NO: 73715 - protein, 203 aa, Arabidopsis thaliana
  peptide (1)..(203): Ceres Seq. ID no. 4975444
MANALRRVMISEVPTMAIHLVKIEVNSSVLNDEFIAQRLSLIPLTSERAMSMRFCQDCEDCNGDEHCEFCSVEFPLSAKCVTDQTLDVTSRDLYSADPTVTPVDFTSNSSTSDSSEHKGIIIAKLRRGQELKLKALARKGIGKDHAKWSPAATVTYMYEPDIIINEEMMNTLTDEEKIDLIESSPTKVFGIDPVTGQVNFDVL

SEQ ID NO: 73716 - DNA, 1127 bp, Arabidopsis thaliana
  misc_feature (1)..(1127): Ceres Seq. ID no. 4975592
  misc_feature (1)..(1127): Ortholog of  Ceres SEQ ID NO 12610385 as cited in SEQ ID NO 55938
  misc_feature (1)..(1127): Ortholog of  Ceres SEQ ID NO 13661939 as cited in SEQ ID NO 61170
  misc_feature (1)..(1127): Ortholog of  Ceres SEQ ID NO 15178805 as cited in SEQ ID NO 0
atcgatcactgaatcttcttcttcttcttcttccttctctcaagaacaggtaaaactctctcctcttctccttctttttctctcctctctcttctctcttttaacaaaaaaaaactgtcttttcttcatttctgttctttttttggttgccgagaaaaacagaggataattttccgatatctgttttttttttctcggtgaccagaatcggttggttctgttttttttttttttttccttctttgttattgttatcttattaatgaatcttttttgttgttataatttacagattttttttaaacgagcttgatcaataaattctctcaagatctatggcggaagagcatcgatgtcagacaccagaaagcaaccgtctctgtgttaacaactgtggcttcctcggcagctccgccaccatgaatctctgttctaattgttacggcgatctttgtctcaaacaacaacaacaatcctcctccatcaaatccaccgttgaatcttccctctctgtatctcctccgtcgtcatcatcatcggagatctcttctccgatcatccctcctctccttaaaaatccatcagtcaagctagaggtaccggagaaaaaggcggtgatttcgctgccgacgacggagcagaatcagcaacagaggccgaatcggtgcacgacgtgtaggaaacgggtcgggttaaccggattcaagtgccggtgcggtacgatgttttgcggggttcataggtacccggagatccatggatgcagctacgatttcaaatcggccggacgtgaagagatcgcgaaagcgaatccgttggtgaaagcagcgaagcttcagaagatatgatcagagccgttcgatgcgttgacttttcctctcgtaagtcttcatttctacgcgtatgtgtgtcctccgtcccccgagaaatacggatggtgtcgatttgattgatctcagccgttggatcaaaaatggtttattattgtaaaagattgattatgtatttatcaaagggacacgtgtcacgtggttttaggatggagacgctttcgctttttctccttcattttattttctttttcctttcagaaagaaataagattattcgcgttggctttttctttt

SEQ ID NO: 73717 - protein, 170 aa, Arabidopsis thaliana; identical to SEQ ID NO: 48223
  peptide (1)..(170): Ceres Seq. ID no. 4975593

SEQ ID NO: 73718 - protein, 142 aa, Arabidopsis thaliana; identical to SEQ ID NO: 29088
  peptide (1)..(142): Ceres Seq. ID no. 4975594

SEQ ID NO: 73719 - DNA, 603 bp, Arabidopsis thaliana
  misc_feature (1)..(603): Ceres Seq. ID no. 4975943
  misc_feature (1)..(603): Ortholog of  Ceres SEQ ID NO 14315878 as cited in SEQ ID NO 60086
atgtcgtttgggtctctcgtgcttccatctccaccttcctccttgtctgcaaatgtcaagcatttcaatggctacggtaggcttaatcgtaatctcgtgcgagcttcttcgtccgatgttcccgatttcctctctgccgattggttggagagccgtaggaaacgaccttttggccccagacttgattttagtgcagaagacgctgttcgacatcagcttgatgcattgaagtataatgaccatcctcgtgatgattatggcattgaggtcatgtatcggtttgctggattcgatccatttgagagatccacctatttcggtcctttctttgatcttggacagtttgaaaggtttaggcgtatttttcatcactcgtcttaccgtgtgttgcttggtcacaaggatagaaaacttttaagcagtttgttcgtggaggagaatcgtttcaagcagaggatctggattcagggaaatcgacctgaagaggaagagatatttgaattcacaatgttccagcgaataggcggttcatgggatggatattggttgacagaaagcttgcttcatgacggagatgtgttttcaggagggatggcttactga

SEQ ID NO: 73720 - protein, 200 aa, Arabidopsis thaliana
  peptide (1)..(200): Ceres Seq. ID no. 4975944
MSFGSLVLPSPPSSLSANVKHFNGYGRLNRNLVRASSSDVPDFLSADWLESRRKRPFGPRLDFSAEDAVRHQLDALKYNDHPRDDYGIEVMYRFAGFDPFERSTYFGPFFDLGQFERFRRIFHHSSYRVLLGHKDRKLLSSLFVEENRFKQRIWIQGNRPEEEEIFEFTMFQRIGGSWDGYWLTESLLHDGDVFSGGMAY

SEQ ID NO: 73721 - protein, 110 aa, Arabidopsis thaliana
  peptide (1)..(110): Ceres Seq. ID no. 4975945
MYRFAGFDPFERSTYFGPFFDLGQFERFRRIFHHSSYRVLLGHKDRKLLSSLFVEENRFKQRIWIQGNRPEEEEIFEFTMFQRIGGSWDGYWLTESLLHDGDVFSGGMAY

SEQ ID NO: 73722 - DNA, 1488 bp, Arabidopsis thaliana
  misc_feature (1)..(1488): Ceres Seq. ID no. 4976003
  misc_feature (1)..(1488): Ortholog of  Ceres SEQ ID NO 12586556 as cited in SEQ ID NO 64667
  misc_feature (1)..(1488): Ortholog of  Ceres SEQ ID NO 13660894 as cited in SEQ ID NO 67475
atgacccagatgcaggaacctaatgttttcgtctacaacgcgttgtttaaaggcttcgttacttgttctcacccgattcgatctctggaattgtatgttcgtatgctcagggactcggtttctccatcaagctacacgtactcttcactagtaaaggcgtcttctttcgcttctaggtttggggaatcactccaggcgcacatctggaaatttggatttggtttccatgttaaaattcagacgactcttattgatttttattcagccactggtagaatcagggaagccaggaaagtgtttgatgaaatgcctgaaagagatgatattgcttggaccacaatggtttctgcttatcgtcgggttttggatatggactctgcgaattctttagctaaccaaatgtcggagaagaatgaggctacgtcgaactgtttgattaatggatatatgggattaggcaatctggaacaagcagagtcattgtttaatcagatgcctgtgaaggacataatctcatggaccactatgatcaagggttactcgcagaataaaagatatagagaagcaattgcagtgttctacaaaatgatggaggagggcatcattcctgatgaggttactatgtcaactgttatttcagcttgtgcccatctcggcgtgctggaaataggtaaggaggttcatatgtacacgttacagaacggttttgttcttgatgtctacattggttctgcactggtagatatgtattccaaatgtggtagcttagagcgggcgcttctggtgttcttcaatttgcccaaaaagaatctattttgttggaattcgatcattgaaggactggcggctcatggttttgcacaagaagcactgaaaatgtttgccaagatggagatggagtcggtgaaacctaacgcagtcacttttgtgagtgtttttactgcgtgtactcacgcaggtcttgttgacgaaggtcggaggatatatcgcagcatgattgatgactattccattgtctctaatgttgaacattacggaggcatggttcatctattcagcaaagctgggttgatctatgaggctcttgaattgattggaaatatggaatttgaaccaaatgcggttatctggggggccttgcttgatgggtgcagaattcacaagaatctcgtgatagctgaaatagcgtttaacaaactgatggttttggagccgatgaatagtgggtattatttccttttagttagcatgtatgcagaacaaaacaggtggagagatgttgcagagattaggggaaggatgagagagttgggtatagaaaagatatgtcctgggacaagttcgattcggatagataaacgagaccatctgtttgctgcagctgataagtctcactcagcttcagatgaggtttgcttgctgcttgatgagatatatgatcagatgggattagctggatatgtgcaggaaactgagaatgtatattaa

SEQ ID NO: 73723 - protein, 495 aa, Arabidopsis thaliana
  peptide (1)..(495): Ceres Seq. ID no. 4976004
MTQMQEPNVFVYNALFKGFVTCSHPIRSLELYVRMLRDSVSPSSYTYSSLVKASSFASRFGESLQAHIWKFGFGFHVKIQTTLIDFYSATGRIREARKVFDEMPERDDIAWTTMVSAYRRVLDMDSANSLANQMSEKNEATSNCLINGYMGLGNLEQAESLFNQMPVKDIISWTTMIKGYSQNKRYREAIAVFYKMMEEGIIPDEVTMSTVISACAHLGVLEIGKEVHMYTLQNGFVLDVYIGSALVDMYSKCGSLERALLVFFNLPKKNLFCWNSIIEGLAAHGFAQEALKMFAKMEMESVKPNAVTFVSVFTACTHAGLVDEGRRIYRSMIDDYSIVSNVEHYGGMVHLFSKAGLIYEALELIGNMEFEPNAVIWGALLDGCRIHKNLVIAEIAFNKLMVLEPMNSGYYFLLVSMYAEQNRWRDVAEIRGRMRELGIEKICPGTSSIRIDKRDHLFAAADKSHSASDEVCLLLDEIYDQMGLAGYVQETENVY

SEQ ID NO: 73724 - protein, 492 aa, Arabidopsis thaliana
  peptide (1)..(492): Ceres Seq. ID no. 4976005
MQEPNVFVYNALFKGFVTCSHPIRSLELYVRMLRDSVSPSSYTYSSLVKASSFASRFGESLQAHIWKFGFGFHVKIQTTLIDFYSATGRIREARKVFDEMPERDDIAWTTMVSAYRRVLDMDSANSLANQMSEKNEATSNCLINGYMGLGNLEQAESLFNQMPVKDIISWTTMIKGYSQNKRYREAIAVFYKMMEEGIIPDEVTMSTVISACAHLGVLEIGKEVHMYTLQNGFVLDVYIGSALVDMYSKCGSLERALLVFFNLPKKNLFCWNSIIEGLAAHGFAQEALKMFAKMEMESVKPNAVTFVSVFTACTHAGLVDEGRRIYRSMIDDYSIVSNVEHYGGMVHLFSKAGLIYEALELIGNMEFEPNAVIWGALLDGCRIHKNLVIAEIAFNKLMVLEPMNSGYYFLLVSMYAEQNRWRDVAEIRGRMRELGIEKICPGTSSIRIDKRDHLFAAADKSHSASDEVCLLLDEIYDQMGLAGYVQETENVY

SEQ ID NO: 73725 - protein, 461 aa, Arabidopsis thaliana
  peptide (1)..(461): Ceres Seq. ID no. 4976006
MLRDSVSPSSYTYSSLVKASSFASRFGESLQAHIWKFGFGFHVKIQTTLIDFYSATGRIREARKVFDEMPERDDIAWTTMVSAYRRVLDMDSANSLANQMSEKNEATSNCLINGYMGLGNLEQAESLFNQMPVKDIISWTTMIKGYSQNKRYREAIAVFYKMMEEGIIPDEVTMSTVISACAHLGVLEIGKEVHMYTLQNGFVLDVYIGSALVDMYSKCGSLERALLVFFNLPKKNLFCWNSIIEGLAAHGFAQEALKMFAKMEMESVKPNAVTFVSVFTACTHAGLVDEGRRIYRSMIDDYSIVSNVEHYGGMVHLFSKAGLIYEALELIGNMEFEPNAVIWGALLDGCRIHKNLVIAEIAFNKLMVLEPMNSGYYFLLVSMYAEQNRWRDVAEIRGRMRELGIEKICPGTSSIRIDKRDHLFAAADKSHSASDEVCLLLDEIYDQMGLAGYVQETENVY

SEQ ID NO: 73726 - DNA, 921 bp, Arabidopsis thaliana
  misc_feature (1)..(921): Ceres Seq. ID no. 4976097
  misc_feature (1)..(921): Ortholog of  Ceres SEQ ID NO 15170458 as cited in SEQ ID NO 52842
  misc_feature (1)..(921): Ortholog of  Ceres SEQ ID NO 13597679 as cited in SEQ ID NO 65073
atggctaaagtagaacagagcagatggattcttcaaggcatgaccgctcttgtcaccggcggaacgaaagacattgggtttgtcttccatcatcactttccaaaaatggctaagacaggggaaagcttgagagacaaacctagatggagtcttgtaggcatgaccgctcttgtcaccggtggctcaaaaggcatcggagaagctgtggttgaggaactagctacgttaggggcaagaatccacacatgtgccagagacgaaactcagcttcaagaaagcttacgtaagtggcaagcaaaagggtttcaggttaccacttctgtctgcgacgtttcttctcgtgataaacgagagaagctcatggaaaccgtttccactatcttcgaaggaaaactcaacatacttgtcaacaatgtgggaacgtgtatagtcaaaccgaccttacaacatacagccgaagatttctcatttacaatggcaacgaatctcgagtcagcttttcatctctcgcagctcgcgcatcctttgttgaaagcttctggttcagggagcatcgtgctcatctcctccgtatctggagttgtacatgtcaatggtgcatccatatatggagtatctaaaggagctatgaatcagctaggaagaaacttagcgtgcgagtgggcaagtgacaacataaggactaactctgtgtgtccatggttcatagaaactcctttagttaccgaaagtcttagtaatgaggagtttagaaaagaagtggagagtagaccaccaatgggacgtgttggagaagtaaatgaagtatcatcgcttgtggcatttctttgtcttcctgcagcttcttatattacaggtcaaaccatttgtgttgatggaggtttcactgttaatggtttctctttcaagcctctgccttaa

SEQ ID NO: 73727 - protein, 306 aa, Arabidopsis thaliana
  peptide (1)..(306): Ceres Seq. ID no. 4976098
MAKVEQSRWILQGMTALVTGGTKDIGFVFHHHFPKMAKTGESLRDKPRWSLVGMTALVTGGSKGIGEAVVEELATLGARIHTCARDETQLQESLRKWQAKGFQVTTSVCDVSSRDKREKLMETVSTIFEGKLNILVNNVGTCIVKPTLQHTAEDFSFTMATNLESAFHLSQLAHPLLKASGSGSIVLISSVSGVVHVNGASIYGVSKGAMNQLGRNLACEWASDNIRTNSVCPWFIETPLVTESLSNEEFRKEVESRPPMGRVGEVNEVSSLVAFLCLPAASYITGQTICVDGGFTVNGFSFKPLP

SEQ ID NO: 73728 - protein, 293 aa, Arabidopsis thaliana
  peptide (1)..(293): Ceres Seq. ID no. 4976099
MTALVTGGTKDIGFVFHHHFPKMAKTGESLRDKPRWSLVGMTALVTGGSKGIGEAVVEELATLGARIHTCARDETQLQESLRKWQAKGFQVTTSVCDVSSRDKREKLMETVSTIFEGKLNILVNNVGTCIVKPTLQHTAEDFSFTMATNLESAFHLSQLAHPLLKASGSGSIVLISSVSGVVHVNGASIYGVSKGAMNQLGRNLACEWASDNIRTNSVCPWFIETPLVTESLSNEEFRKEVESRPPMGRVGEVNEVSSLVAFLCLPAASYITGQTICVDGGFTVNGFSFKPLP

SEQ ID NO: 73729 - protein, 271 aa, Arabidopsis thaliana; identical to SEQ ID NO: 26384
  peptide (1)..(271): Ceres Seq. ID no. 4976100

SEQ ID NO: 73730 - DNA, 1368 bp, Arabidopsis thaliana
  misc_feature (1)..(1368): Ceres Seq. ID no. 4976157
  misc_feature (1)..(1368): Ortholog of  Ceres SEQ ID NO 14304479 as cited in SEQ ID NO 53547
atgagatcttcagcgggaaagcttctctcccattctctacggagaaaccgcgggaaacttggtgatggattttggattccggctacgaggtctcagaagatgtggaattcgacggtaccgtcagatgaaaatcctgatcaaaattcgatcgatgcaggatcttcaatgcggaaaccaattagcttatggcctggaatgtatcattctccggtgactaatgcgctttgggaagctcgtcgtaatatgttcgaaattcctaccggagacgacgcttctcagtcaaaattgacggctaaatctccgtctcgaagccgaacgtcaattctctataagttttcttctgattttgttcttcgagaacaatataggaatccttggaatgagattcgtactggtaaattggttgaagatcttgacgctcttgctggaaccatctccttcaagcattgtggtggtgacagcagtgcgagatcgatgattttggtgactgcttcagtggataggattatcatgaaaagacctattcgtgtagatactgaccttagtatagttggtgctgttacatgggttggtagatcatccatggagatgcaattacaagtactccaaattcaagataccaacaactcctctgagtcggttgcccttgaagcaaactttacattcgtggctcgggatgctcagacaggcaagtcagctccaattaaccaagtcgtgccagaaactgagcatgaaaaatttctgtggaaagaggcagaagagaggaacaaactacgaaaacaaaagagagcacagggtaaagaagagcatgagaagttgaaggacttagagaggctaaatgagttattagcagaaggacgagtattcctggacatgccagctcttgcagatcggaacagcatcctaattaaggatacttcccatgaaaactcattgatctgccagccacagcaacgaaatattcatggcagaatttttggaggcttcttgatgcgcaaagcttttgagttggctttctccaatgcttacaccttcgctggggtttcaccacgttttctcgaagttgatcgcgtcgattttatcaaaccagtggatgttggaaatttccttcgtttcaagtcacgcgtattgtacacagaagcaaccagttcagctgaaccgctgataaacatcgaggttgtagctcatgttacaagtccagagctcagatccagcgaagtctccaacaggttttacttcaccttcagtgtgagacctgaggccatgaaagatggattgaaaataagaaatgtggttccagcaacagaagaagaagctagaagagtgatcgagcgcatggacgcagagagacccatctcattgccttga

SEQ ID NO: 73731 - protein, 455 aa, Arabidopsis thaliana
  peptide (1)..(455): Ceres Seq. ID no. 4976158
MRSSAGKLLSHSLRRNRGKLGDGFWIPATRSQKMWNSTVPSDENPDQNSIDAGSSMRKPISLWPGMYHSPVTNALWEARRNMFEIPTGDDASQSKLTAKSPSRSRTSILYKFSSDFVLREQYRNPWNEIRTGKLVEDLDALAGTISFKHCGGDSSARSMILVTASVDRIIMKRPIRVDTDLSIVGAVTWVGRSSMEMQLQVLQIQDTNNSSESVALEANFTFVARDAQTGKSAPINQVVPETEHEKFLWKEAEERNKLRKQKRAQGKEEHEKLKDLERLNELLAEGRVFLDMPALADRNSILIKDTSHENSLICQPQQRNIHGRIFGGFLMRKAFELAFSNAYTFAGVSPRFLEVDRVDFIKPVDVGNFLRFKSRVLYTEATSSAEPLINIEVVAHVTSPELRSSEVSNRFYFTFSVRPEAMKDGLKIRNVVPATEEEARRVIERMDAERPISLP

SEQ ID NO: 73732 - protein, 422 aa, Arabidopsis thaliana
  peptide (1)..(422): Ceres Seq. ID no. 4976159
MWNSTVPSDENPDQNSIDAGSSMRKPISLWPGMYHSPVTNALWEARRNMFEIPTGDDASQSKLTAKSPSRSRTSILYKFSSDFVLREQYRNPWNEIRTGKLVEDLDALAGTISFKHCGGDSSARSMILVTASVDRIIMKRPIRVDTDLSIVGAVTWVGRSSMEMQLQVLQIQDTNNSSESVALEANFTFVARDAQTGKSAPINQVVPETEHEKFLWKEAEERNKLRKQKRAQGKEEHEKLKDLERLNELLAEGRVFLDMPALADRNSILIKDTSHENSLICQPQQRNIHGRIFGGFLMRKAFELAFSNAYTFAGVSPRFLEVDRVDFIKPVDVGNFLRFKSRVLYTEATSSAEPLINIEVVAHVTSPELRSSEVSNRFYFTFSVRPEAMKDGLKIRNVVPATEEEARRVIERMDAERPISLP

SEQ ID NO: 73733 - protein, 400 aa, Arabidopsis thaliana
  peptide (1)..(400): Ceres Seq. ID no. 4976160
MRKPISLWPGMYHSPVTNALWEARRNMFEIPTGDDASQSKLTAKSPSRSRTSILYKFSSDFVLREQYRNPWNEIRTGKLVEDLDALAGTISFKHCGGDSSARSMILVTASVDRIIMKRPIRVDTDLSIVGAVTWVGRSSMEMQLQVLQIQDTNNSSESVALEANFTFVARDAQTGKSAPINQVVPETEHEKFLWKEAEERNKLRKQKRAQGKEEHEKLKDLERLNELLAEGRVFLDMPALADRNSILIKDTSHENSLICQPQQRNIHGRIFGGFLMRKAFELAFSNAYTFAGVSPRFLEVDRVDFIKPVDVGNFLRFKSRVLYTEATSSAEPLINIEVVAHVTSPELRSSEVSNRFYFTFSVRPEAMKDGLKIRNVVPATEEEARRVIERMDAERPISLP

SEQ ID NO: 73734 - DNA, 480 bp, Arabidopsis thaliana
  misc_feature (1)..(480): Ceres Seq. ID no. 4976172
  misc_feature (1)..(480): Ortholog of  Ceres SEQ ID NO 15170517 as cited in SEQ ID NO 52861
atggataaaggcttcagattagtaaccagtcttcttcttctctccttcttcttctcaggtacaaaagcaattactgaaccaatagaagaagaaaaagacataaccacaccattagccacaaacccaaccaccacaccaacaaccgtggtccctaactccgactctgacgcttccgcggtggccacaacgccactaacgattccatcgtcaccacacggtgtagcctacccaggtgatcagagctggtgcgttgctagagagaacgttgcaaaaatggcgttacaagcggctttggactatgcatgtgggattggtggagcagactgctctgagatacaagaaggaggaaattgttataaccccaactcgttgagagcacatgcctcttttgccttcaatagttattaccagaagaatccaatccctagtagttgcaattttgatggaactgctatcactatcagtgctgacccaagttag

SEQ ID NO: 73735 - protein, 159 aa, Arabidopsis thaliana
  peptide (1)..(159): Ceres Seq. ID no. 4976173
MDKGFRLVTSLLLLSFFFSGTKAITEPIEEEKDITTPLATNPTTTPTTVVPNSDSDASAVATTPLTIPSSPHGVAYPGDQSWCVARENVAKMALQAALDYACGIGGADCSEIQEGGNCYNPNSLRAHASFAFNSYYQKNPIPSSCNFDGTAITISADPS

SEQ ID NO: 73736 - DNA, 1179 bp, Arabidopsis thaliana
  misc_feature (1)..(1179): Ceres Seq. ID no. 4976203
  misc_feature (1)..(1179): Ortholog of  Ceres SEQ ID NO 13596474 as cited in SEQ ID NO 62169
  misc_feature (1)..(1179): Ortholog of  Ceres SEQ ID NO 13598714 as cited in SEQ ID NO 62656
  misc_feature (1)..(1179): Ortholog of  Ceres SEQ ID NO 13596969 as cited in SEQ ID NO 63375
  misc_feature (1)..(1179): Ortholog of  Ceres SEQ ID NO 13584480 as cited in SEQ ID NO 64751
  misc_feature (1)..(1179): Ortholog of  Ceres SEQ ID NO 13597519 as cited in SEQ ID NO 64759
  misc_feature (1)..(1179): Ortholog of  Ceres SEQ ID NO 15170183 as cited in SEQ ID NO 65667
  misc_feature (1)..(1179): Ortholog of  Ceres SEQ ID NO 13596362 as cited in SEQ ID NO 67877
  misc_feature (1)..(1179): Ortholog of  Ceres SEQ ID NO 13587054 as cited in SEQ ID NO 0
aatatagtaccaactccattgaatgttaaaactcagaagaaagtggagtgatcatataacgacaatgaagaatctctttaacttgttccttatgtttttctttgcaatgccaattctttcactctccgagaatccaaccaatttcagcgagagttgcgaagacgggagtggagaaaccggttcaagctttggcatagggttcgatttggttcttgattttggtttataccggaatagctgccccgaagcagagtctatcgtctactcgtgggtggaaaccacggtgttagaggatccaagaatggctgcttctcttctccgtcttcatttccacgactgttttgtcaatggatgtgatgcttcggtgttgttagatgacacagaaggactggttggtgaaaaaacggcgcctcctaatctaaattctctacgagggttcgaagtgattgattcgataaagtctgatattgaatctgtatgtccagagaccgtctcatgcgcagacattcttgccatggctgctagagattcagtcgttgtgtcgggtggaccaaggtgggaggtggaagtaggaagaaaagacagtagaacagcaagcaaacaggcagcaacaaatggcttaccctcaccaaactcaaccgtatcaactctcatctctactttccagaatcttggcctttcacaaaccgacatggtcgctctttccggtggacatacattgggaaaggcacggtgcacttcgtttacagctcggttgcagccactgcaaactggacaaccagctaaccacggagacaaccttgagttcctcgagtcactgcaacagttatgctcgactgttgggcccagtgtaggtatcactcagcttgacttggtgactccatcaacatttgacaaccagtactatgtaaacctcctctcgggtgagggattgcttccatcagaccaggctttagcggttcaagacccagggacaagggcgattgttgagacctacgcaacagatcagtcggttttctttgaggattttaagaacgctatggttaaaatgggagggatacccggtggtagtaatagcgagattaggaagaattgtagaatgattaactaaaaataaaagcccgacttattgaatgatatctaattatctatataaaaattaaagaagtccacctacgt

SEQ ID NO: 73737 - protein, 362 aa, Arabidopsis thaliana
  peptide (1)..(362): Ceres Seq. ID no. 4976204
MLKLRRKWSDHITTMKNLFNLFLMFFFAMPILSLSENPTNFSESCEDGSGETGSSFGIGFDLVLDFGLYRNSCPEAESIVYSWVETTVLEDPRMAASLLRLHFHDCFVNGCDASVLLDDTEGLVGEKTAPPNLNSLRGFEVIDSIKSDIESVCPETVSCADILAMAARDSVVVSGGPRWEVEVGRKDSRTASKQAATNGLPSPNSTVSTLISTFQNLGLSQTDMVALSGGHTLGKARCTSFTARLQPLQTGQPANHGDNLEFLESLQQLCSTVGPSVGITQLDLVTPSTFDNQYYVNLLSGEGLLPSDQALAVQDPGTRAIVETYATDQSVFFEDFKNAMVKMGGIPGGSNSEIRKNCRMIN

SEQ ID NO: 73738 - protein, 348 aa, Arabidopsis thaliana
  peptide (1)..(348): Ceres Seq. ID no. 4976205
MKNLFNLFLMFFFAMPILSLSENPTNFSESCEDGSGETGSSFGIGFDLVLDFGLYRNSCPEAESIVYSWVETTVLEDPRMAASLLRLHFHDCFVNGCDASVLLDDTEGLVGEKTAPPNLNSLRGFEVIDSIKSDIESVCPETVSCADILAMAARDSVVVSGGPRWEVEVGRKDSRTASKQAATNGLPSPNSTVSTLISTFQNLGLSQTDMVALSGGHTLGKARCTSFTARLQPLQTGQPANHGDNLEFLESLQQLCSTVGPSVGITQLDLVTPSTFDNQYYVNLLSGEGLLPSDQALAVQDPGTRAIVETYATDQSVFFEDFKNAMVKMGGIPGGSNSEIRKNCRMIN

SEQ ID NO: 73739 - protein, 339 aa, Arabidopsis thaliana
  peptide (1)..(339): Ceres Seq. ID no. 4976206
MFFFAMPILSLSENPTNFSESCEDGSGETGSSFGIGFDLVLDFGLYRNSCPEAESIVYSWVETTVLEDPRMAASLLRLHFHDCFVNGCDASVLLDDTEGLVGEKTAPPNLNSLRGFEVIDSIKSDIESVCPETVSCADILAMAARDSVVVSGGPRWEVEVGRKDSRTASKQAATNGLPSPNSTVSTLISTFQNLGLSQTDMVALSGGHTLGKARCTSFTARLQPLQTGQPANHGDNLEFLESLQQLCSTVGPSVGITQLDLVTPSTFDNQYYVNLLSGEGLLPSDQALAVQDPGTRAIVETYATDQSVFFEDFKNAMVKMGGIPGGSNSEIRKNCRMIN

SEQ ID NO: 73740 - DNA, 1455 bp, Arabidopsis thaliana
  misc_feature (1)..(1455): Ceres Seq. ID no. 4976645
  misc_feature (1)..(1455): Ortholog of  Ceres SEQ ID NO 14311313 as cited in SEQ ID NO 53503
  misc_feature (1)..(1455): Ortholog of  Ceres SEQ ID NO 14311625 as cited in SEQ ID NO 55184
  misc_feature (1)..(1455): Ortholog of  Ceres SEQ ID NO 14310588 as cited in SEQ ID NO 58770
atgaaaaagggaaaagacatggcgaaagaggagcaagaaacagcggcaatagagccacttagcccggtttcacagttgtttgtttcgccgagtctctactgcttcattattttcactttagggttccaaactagatgcaacccatccaccattgttgaaggtgtcaagaacacatggatcaagctccctcgcttctctagcaaagtggagataaagaaaaatggaaaagcgtcttgggttcctgttagtgttcgagtagaagatcatgttgttgttccagatcttgattattccaacattgaaaatcctgatcaatttatagaagactatacttcgaaattagctaatactccgatggacatgtcccgacctttatgggaacttcatttacttaatataaagacatcaaatgcagaatctttagctataggaaaatttcatcattctcttggcgatgggatgtctcttatatctcttctattagctagttcacggaaaacatcagatcctgacgctttgcctactaccgcggctacaagaaagcatgccagttccaataaaaagagttggtggttggttggaagattttggtttatgataagaatcattttcactactgttgttgaattgtttaagtatttgcttacactatgttttatgcgggacactaaaactcccctaatgggtaaaacgggtgatgcaatacgatctagaaaggttatacatcggatagtaagctttgatgatgtcaagttggtgaagaacaacatggatatgaaagtgaatgatgttcttcttggaatgacacaggcaggtctctcaagatatttgagcaggaaatatgatgaagatatggtggtcgagaagaaaaaaaacttggagaaaatccgtcttcgtggtacagtattcgtaaatttaagagcagacacaaaactcgaggatttggcgaatatgatggcaaaaggttcaaagtgtagatggggaaacttcgtaggtgttattatatttcctttatgggtgagatccgaagatgatccgttggaatacgttcgacgagccaaatctactatggatatcaaaaaactgtccatagaatcacttatttgctatggactcatcaaacttaccagaaaaatactcgggggaaaggtagtagaaactcttgttaggagactatttgatcatacgacattgacattttctaatgtgatgggtccagacgaagatataagtttttttgaccatccaatgtcttacgtagcagcaagcgcattaggtggaccacaagctcttattatccattacgtaacctatgtaaacaagattgtcatcaatctagcagtagacacatcagtgattcgagaccctcatctactatgtgatgatttggtagaatcgctcgatatcatcaaacttgctgccatggagaaaggagttcataaaatggaggtttga

SEQ ID NO: 73741 - protein, 484 aa, Arabidopsis thaliana
  peptide (1)..(484): Ceres Seq. ID no. 4976646
MKKGKDMAKEEQETAAIEPLSPVSQLFVSPSLYCFIIFTLGFQTRCNPSTIVEGVKNTWIKLPRFSSKVEIKKNGKASWVPVSVRVEDHVVVPDLDYSNIENPDQFIEDYTSKLANTPMDMSRPLWELHLLNIKTSNAESLAIGKFHHSLGDGMSLISLLLASSRKTSDPDALPTTAATRKHASSNKKSWWLVGRFWFMIRIIFTTVVELFKYLLTLCFMRDTKTPLMGKTGDAIRSRKVIHRIVSFDDVKLVKNNMDMKVNDVLLGMTQAGLSRYLSRKYDEDMVVEKKKNLEKIRLRGTVFVNLRADTKLEDLANMMAKGSKCRWGNFVGVIIFPLWVRSEDDPLEYVRRAKSTMDIKKLSIESLICYGLIKLTRKILGGKVVETLVRRLFDHTTLTFSNVMGPDEDISFFDHPMSYVAASALGGPQALIIHYVTYVNKIVINLAVDTSVIRDPHLLCDDLVESLDIIKLAAMEKGVHKMEV

SEQ ID NO: 73742 - protein, 478 aa, Arabidopsis thaliana
  peptide (1)..(478): Ceres Seq. ID no. 4976647
MAKEEQETAAIEPLSPVSQLFVSPSLYCFIIFTLGFQTRCNPSTIVEGVKNTWIKLPRFSSKVEIKKNGKASWVPVSVRVEDHVVVPDLDYSNIENPDQFIEDYTSKLANTPMDMSRPLWELHLLNIKTSNAESLAIGKFHHSLGDGMSLISLLLASSRKTSDPDALPTTAATRKHASSNKKSWWLVGRFWFMIRIIFTTVVELFKYLLTLCFMRDTKTPLMGKTGDAIRSRKVIHRIVSFDDVKLVKNNMDMKVNDVLLGMTQAGLSRYLSRKYDEDMVVEKKKNLEKIRLRGTVFVNLRADTKLEDLANMMAKGSKCRWGNFVGVIIFPLWVRSEDDPLEYVRRAKSTMDIKKLSIESLICYGLIKLTRKILGGKVVETLVRRLFDHTTLTFSNVMGPDEDISFFDHPMSYVAASALGGPQALIIHYVTYVNKIVINLAVDTSVIRDPHLLCDDLVESLDIIKLAAMEKGVHKMEV

SEQ ID NO: 73743 - protein, 366 aa, Arabidopsis thaliana
  peptide (1)..(366): Ceres Seq. ID no. 4976648
MDMSRPLWELHLLNIKTSNAESLAIGKFHHSLGDGMSLISLLLASSRKTSDPDALPTTAATRKHASSNKKSWWLVGRFWFMIRIIFTTVVELFKYLLTLCFMRDTKTPLMGKTGDAIRSRKVIHRIVSFDDVKLVKNNMDMKVNDVLLGMTQAGLSRYLSRKYDEDMVVEKKKNLEKIRLRGTVFVNLRADTKLEDLANMMAKGSKCRWGNFVGVIIFPLWVRSEDDPLEYVRRAKSTMDIKKLSIESLICYGLIKLTRKILGGKVVETLVRRLFDHTTLTFSNVMGPDEDISFFDHPMSYVAASALGGPQALIIHYVTYVNKIVINLAVDTSVIRDPHLLCDDLVESLDIIKLAAMEKGVHKMEV

SEQ ID NO: 73744 - DNA, 1698 bp, Arabidopsis thaliana
  misc_feature (1)..(1698): Ceres Seq. ID no. 4976799
  misc_feature (1)..(1698): Ortholog of  Ceres SEQ ID NO 14311609 as cited in SEQ ID NO 58341
atggcttttcaacggcggcgcaacaattactacaaccgtctccgtcgtcttcttcctttcatttgcgctgtctctggagctcttctcatcctcttcgctcttctctccattctttcccctcctcctgatgattccgatcgccgcatctccaagcatattaactatggagccaatgatgagaagaagaacacaccagtggttttcacagttccgcagagaggtggaggaagatcggatcgtgatatctggcgttcatggaatgctgaattcttttatggttgttgtaatgcaagcagcaagttcccaaatgctaaagcaattactagaaatgatcgatacttggcgattgccactagtggcggtttaaaccaacaacggactggtattgtagatgctgttgttgctgcaaggattctaaacgctacgcttgttattccgaagttggaccagaaatcctactggaaagatgccagtgacttctcgaacattttcgatgttgattggtttatgtcatttctctcaaaagatgtcaaaatcattgagaaacttccacagaaaggagggcaaacatggagccctcgcagaatgcgtgtaccgagaaaatgcaatgagaaatgctatatcaatcgggtgttacctgttcttcagaaaaggcatgcagttcaattgaataaatttgattacagactctcaaacaagttgagagatgatttgcagaagctgaggtgtagagtaaactatcatgcgcttaagtttactgatccaattcttgaaatgggtaacgaattggtcagaagaatgcggaaaaggagcaaacacttcattgctttacatcttaggtttgaacctgatatgctcgccttctctggatgttactatggtggtggtgagaaggagaagaaagagttaggaacaatcagaaggagatggaaaactttgcatgtaaataaccctgaaaagcaaaggagacaaggaagatgtccacttacaccagaagaagttggattaatgcttagagctttgggatatggaagtgatgttcatatatatgttgcatcaggtgaagtttatggaggagaaaaatcattggctcctttgaaagcactttttccacatttctattcaaaagacaccatagctacaaaaatggagttaaaaccattttcttcttattcttcacgaatggctgcactcgatttccttgtgtgtgacgaaagcgatgttttcgttaccaacaataacggaaacatggcgagaatattagcaggtcgaaggagatactttggacataaaccaacaattagaccgaatgcgaaaaagctatacaagttgtttatgagcaaagagaatactacttgggaggagtttgcttcaagagtgagaacatttcagaaaggattcatgggagaaccaaaggaggtaagagccggaaaaggtgagtttcatgagaatccagcggcttgtatatgcgaagatactgatgctaaagtaaaagcgggaaagatggattcgagaaaattcgggaagaaagagcagaaagaagatgaagatgcagagttgtcgtcgtcagagacagattatgaggaagaccaaactgatttacaggacagaggcttgtataatggtacgaggttagattatgatgatgcgttatcggtttcagaagagcctgagctagaagaaatgctatcagattga

SEQ ID NO: 73745 - protein, 370 aa, Arabidopsis thaliana
  peptide (1)..(370): Ceres Seq. ID no. 4976800
MRVPRKCNEKCYINRVLPVLQKRHAVQLNKFDYRLSNKLRDDLQKLRCRVNYHALKFTDPILEMGNELVRRMRKRSKHFIALHLRFEPDMLAFSGCYYGGGEKEKKELGTIRRRWKTLHVNNPEKQRRQGRCPLTPEEVGLMLRALGYGSDVHIYVASGEVYGGEKSLAPLKALFPHFYSKDTIATKMELKPFSSYSSRMAALDFLVCDESDVFVTNNNGNMARILAGRRRYFGHKPTIRPNAKKLYKLFMSKENTTWEEFASRVRTFQKGFMGEPKEVRAGKGEFHENPAACICEDTDAKVKAGKMDSRKFGKKEQKEDEDAELSSSETDYEEDQTDLQDRGLYNGTRLDYDDALSVSEEPELEEMLSD

SEQ ID NO: 73746 - protein, 396 aa, Arabidopsis thaliana
  peptide (1)..(396): Ceres Seq. ID no. 4976801
MSFLSKDVKIIEKLPQKGGQTWSPRRMRVPRKCNEKCYINRVLPVLQKRHAVQLNKFDYRLSNKLRDDLQKLRCRVNYHALKFTDPILEMGNELVRRMRKRSKHFIALHLRFEPDMLAFSGCYYGGGEKEKKELGTIRRRWKTLHVNNPEKQRRQGRCPLTPEEVGLMLRALGYGSDVHIYVASGEVYGGEKSLAPLKALFPHFYSKDTIATKMELKPFSSYSSRMAALDFLVCDESDVFVTNNNGNMARILAGRRRYFGHKPTIRPNAKKLYKLFMSKENTTWEEFASRVRTFQKGFMGEPKEVRAGKGEFHENPAACICEDTDAKVKAGKMDSRKFGKKEQKEDEDAELSSSETDYEEDQTDLQDRGLYNGTRLDYDDALSVSEEPELEEMLSD

SEQ ID NO: 73747 - protein, 565 aa, Arabidopsis thaliana
  peptide (1)..(565): Ceres Seq. ID no. 4976802
MAFQRRRNNYYNRLRRLLPFICAVSGALLILFALLSILSPPPDDSDRRISKHINYGANDEKKNTPVVFTVPQRGGGRSDRDIWRSWNAEFFYGCCNASSKFPNAKAITRNDRYLAIATSGGLNQQRTGIVDAVVAARILNATLVIPKLDQKSYWKDASDFSNIFDVDWFMSFLSKDVKIIEKLPQKGGQTWSPRRMRVPRKCNEKCYINRVLPVLQKRHAVQLNKFDYRLSNKLRDDLQKLRCRVNYHALKFTDPILEMGNELVRRMRKRSKHFIALHLRFEPDMLAFSGCYYGGGEKEKKELGTIRRRWKTLHVNNPEKQRRQGRCPLTPEEVGLMLRALGYGSDVHIYVASGEVYGGEKSLAPLKALFPHFYSKDTIATKMELKPFSSYSSRMAALDFLVCDESDVFVTNNNGNMARILAGRRRYFGHKPTIRPNAKKLYKLFMSKENTTWEEFASRVRTFQKGFMGEPKEVRAGKGEFHENPAACICEDTDAKVKAGKMDSRKFGKKEQKEDEDAELSSSETDYEEDQTDLQDRGLYNGTRLDYDDALSVSEEPELEEMLSD

SEQ ID NO: 73748 - DNA, 1293 bp, Arabidopsis thaliana
  misc_feature (1)..(1293): Ceres Seq. ID no. 4976844
  misc_feature (1)..(1293): Ortholog of  Ceres SEQ ID NO 15171426 as cited in SEQ ID NO 51543
atggataatagatcgccaagatcaagaggaaacatgggtccgaaaccaacaccactgaaagtccgtggagattcgcacaagattatcaagaagccaccactagcgccgccacacccgcaaccacaaccaccacaaacccatcagcaagaaccgtcgcaatctcggcccccacctggtcccgtgaacatatacacagtaactcccagaattatccatacacaccctaataacttcatgacattggtccaacgtctcacaggtcaaacctctacctccacaacatcatcctcctcctcttcatccacgtcggaaccaaaagacacgtcaacaatggttgatacatctcatgggttgatatctccggcggctcggtttgctgttacagagaaggctaatatctcaaacgaactagggacatttgttggaggcgaagggactatggatcaatattatcatcatcatcatcaagaacaaccacatcaaaatcgagggttcgagcggccaagttttcaccatgctgggattttatcgccgggaccttattctctgccgtcggtatcaccggacttcttttccactattggaccaaccgatccacaagaaggtacaccatatttgattccttcaggtgatatgcacagttatttatcacaggatgaggatcgaggtatcccccattcagtaaaggatactagaagtattggatcagcttatgaccgctacctgcagagtatgcaaacgttttttgtgccatctgaagaagctggtccatttaatggtgttggcatggtacgacaaggaggttccaacatgatgcctggtccgtccatgggtgagctcatggctgggtgtggtgggagtttgccttcagatttcaggccaaatggtcgggatatgggttttggtcagctggattcagttggtaggccaggccgggaaccacatcctctacctccagatgtatccaacactctgtatgttgaaggacttccttctaattgctcaagaagggaaaggagtggagatcctactgttctgtgttttgttgattttgaaaactctgcctgtgcagcaactgctctgagcgctttgcaagactatcgaatggatgaagacgaacccgattccaagattttgcggctccaatttttcagaaacccaggtccaagaccaggacagcgtggaggaagaagattctacatgaacccaaatacacttgatcatatgctcaaatccttaggagtagtttcactcaaagaaacagagatgtatggagagacaccacggagatga

SEQ ID NO: 73749 - protein, 430 aa, Arabidopsis thaliana
  peptide (1)..(430): Ceres Seq. ID no. 4976845
MDNRSPRSRGNMGPKPTPLKVRGDSHKIIKKPPLAPPHPQPQPPQTHQQEPSQSRPPPGPVNIYTVTPRIIHTHPNNFMTLVQRLTGQTSTSTTSSSSSSSTSEPKDTSTMVDTSHGLISPAARFAVTEKANISNELGTFVGGEGTMDQYYHHHHQEQPHQNRGFERPSFHHAGILSPGPYSLPSVSPDFFSTIGPTDPQEGTPYLIPSGDMHSYLSQDEDRGIPHSVKDTRSIGSAYDRYLQSMQTFFVPSEEAGPFNGVGMVRQGGSNMMPGPSMGELMAGCGGSLPSDFRPNGRDMGFGQLDSVGRPGREPHPLPPDVSNTLYVEGLPSNCSRRERSGDPTVLCFVDFENSACAATALSALQDYRMDEDEPDSKILRLQFFRNPGPRPGQRGGRRFYMNPNTLDHMLKSLGVVSLKETEMYGETPRR

SEQ ID NO: 73750 - protein, 419 aa, Arabidopsis thaliana
  peptide (1)..(419): Ceres Seq. ID no. 4976846
MGPKPTPLKVRGDSHKIIKKPPLAPPHPQPQPPQTHQQEPSQSRPPPGPVNIYTVTPRIIHTHPNNFMTLVQRLTGQTSTSTTSSSSSSSTSEPKDTSTMVDTSHGLISPAARFAVTEKANISNELGTFVGGEGTMDQYYHHHHQEQPHQNRGFERPSFHHAGILSPGPYSLPSVSPDFFSTIGPTDPQEGTPYLIPSGDMHSYLSQDEDRGIPHSVKDTRSIGSAYDRYLQSMQTFFVPSEEAGPFNGVGMVRQGGSNMMPGPSMGELMAGCGGSLPSDFRPNGRDMGFGQLDSVGRPGREPHPLPPDVSNTLYVEGLPSNCSRRERSGDPTVLCFVDFENSACAATALSALQDYRMDEDEPDSKILRLQFFRNPGPRPGQRGGRRFYMNPNTLDHMLKSLGVVSLKETEMYGETPRR

SEQ ID NO: 73751 - protein, 352 aa, Arabidopsis thaliana
  peptide (1)..(352): Ceres Seq. ID no. 4976847
MTLVQRLTGQTSTSTTSSSSSSSTSEPKDTSTMVDTSHGLISPAARFAVTEKANISNELGTFVGGEGTMDQYYHHHHQEQPHQNRGFERPSFHHAGILSPGPYSLPSVSPDFFSTIGPTDPQEGTPYLIPSGDMHSYLSQDEDRGIPHSVKDTRSIGSAYDRYLQSMQTFFVPSEEAGPFNGVGMVRQGGSNMMPGPSMGELMAGCGGSLPSDFRPNGRDMGFGQLDSVGRPGREPHPLPPDVSNTLYVEGLPSNCSRRERSGDPTVLCFVDFENSACAATALSALQDYRMDEDEPDSKILRLQFFRNPGPRPGQRGGRRFYMNPNTLDHMLKSLGVVSLKETEMYGETPRR

SEQ ID NO: 73752 - DNA, 1002 bp, Arabidopsis thaliana
  misc_feature (1)..(1002): Ceres Seq. ID no. 4977027
  misc_feature (1)..(1002): Ortholog of  Ceres SEQ ID NO 14311207 as cited in SEQ ID NO 60304
atggatgagtttatggatcttagaccagtgaagtacacagagcacaagactgttatcagaaagtacactaaaaagtcgtctatggagaggaagaccagtgttcgtgactcggccaggttggttcgggtctcaatgacggatcgtgacgccactgattcatcaagcgacgaggaagagtttctgttccctcgaagacgtgtcaagagattgattaacgagatcagagtcgagcctagcagctcttccaccggcgacgtctctgcttctccgacgaaggaccggaaaagaatcaacgttgattctacggttcaaaagccctctgtttccggccaaaaccagaagaagtaccgcggcgtgagacagcgaccatggggaaaatgggcggcggagattcgtgatcctgagcaacgccggagaatctggctcggtacttttgcaacggcggaggaagctgccatcgtctacgacaacgcagcaatcaaacttcgtggccctgatgctcttaccaacttcaccgtacaaccagaaccagaaccggtacaagaacaagaacaagaaccggagagcaacatgtcggtttcgatatcagaatcaatggacgattctcaacatctatcatctccgacatcggttctcaactaccaaacatatgtctcggaggaaccaatcgatagtcttatcaaaccggttaaacaagagtttcttgaaccagaacaagagccaataagctggcatcttggagaaggtaatactaatactaatgatgattcatttccattggacattacatttctcgacaactatttcaatgaatcattaccagacatctccatcttcgatcaacctatgtctcctattcaaccaacagagaatgatttcttcaacgaccttatgttattcgatagcaacgcagaagaatactactcctccgagatcaaagagattggttcatcgttcaacgatcttgatgattctttgatatccgatctcttacttgtgtga

SEQ ID NO: 73753 - protein, 333 aa, Arabidopsis thaliana; identical to SEQ ID NO: 69726
  peptide (1)..(333): Ceres Seq. ID no. 4977028

SEQ ID NO: 73754 - protein, 329 aa, Arabidopsis thaliana; identical to SEQ ID NO: 69727
  peptide (1)..(329): Ceres Seq. ID no. 4977029

SEQ ID NO: 73755 - protein, 306 aa, Arabidopsis thaliana
  peptide (1)..(306): Ceres Seq. ID no. 4977030
MERKTSVRDSARLVRVSMTDRDATDSSSDEEEFLFPRRRVKRLINEIRVEPSSSSTGDVSASPTKDRKRINVDSTVQKPSVSGQNQKKYRGVRQRPWGKWAAEIRDPEQRRRIWLGTFATAEEAAIVYDNAAIKLRGPDALTNFTVQPEPEPVQEQEQEPESNMSVSISESMDDSQHLSSPTSVLNYQTYVSEEPIDSLIKPVKQEFLEPEQEPISWHLGEGNTNTNDDSFPLDITFLDNYFNESLPDISIFDQPMSPIQPTENDFFNDLMLFDSNAEEYYSSEIKEIGSSFNDLDDSLISDLLLV

SEQ ID NO: 73756 - DNA, 2046 bp, Arabidopsis thaliana
  misc_feature (1)..(2046): Ceres Seq. ID no. 4977055
  misc_feature (1)..(2046): Ortholog of  Ceres SEQ ID NO 13655640 as cited in SEQ ID NO 63844
atgttctctaaagtttccattcttctcttttccctcgcatccctactcttgttccgatcaaccacaggcatcgaattcatctacaactccaatttcaccacaaccaacacacttctcctcggcaacgccactgttaaatctccaccgtcgatcctcaccctcaccaaccaaaccactttctccatcggacgtggcctctacccttcaagaatcaacgcctcctcctcctctgcctcgccgttacctttcgccacatcattcatcttctccatggctccttttaaacacctctctcctggccacggcttcgccttcgtcttccttcctttctccgaaacctccgccgcaagctcatctcagcatctcggcctcttcaacttcaccaataacggtgaccccaatagccgaatcttcgccgttgaattcgatgttttcgctaaccaagagttcaacgacatcaacgacaaccacgtcggcgtcgacgtcaattctctcacttccgttgcatctgaaactgcaggtttctatggaggcagagacggccagagattcacggagctgaagcttaacagtggcgagaattatcaggcgtggatcgagtttaatgggtcagcgatcaatgtcacgatggctagagctagctctagaaagcccataagaccactcataagcattccattaaatctcactggagtcttacttgatgatatgttcgttggattcactgcctccacaggacaactagtgcagagccataggattctctcatggagttttagtaactccaatttctccattggtgatgctttgatcactaggaatctaccttcgtttaaattgtcaggtgactctgttttgaagtctaaaggcttcattgctggggtctctagtggtgttgtgttgttagtctctgttattgggctcctctgtttctacgttgtaaggcgtcgaaggcagagactagaaggagacgtggaagattgggaaacagagtattggcctcacagagtgcaatacaaagatgttttggaagcaacaaaagggttttccgatgagaacatgatcggatacggagggaattctaaagtgtacaggggagtgttggaaggtaaagaagttgcggttaagagaataatgatgagtcctcgagagagcgttggcgcgacgagtgagttcttagctgaggtctcgagcttagggaggttgagacacaagaatatagttggactaaaaggttggtctaagaaaggaggagagagtctgatattgatttacgagtatatggagaatggaagtgtcgataagcggatatttgattgtaacgagatgttgaattgggaggaaagaatgagagtgataagagacctagcctcagggatgttgtatctacacgaagggtgggagacaaaggtgttacatagagatataaagtcaagcaatgtgttgcttgacaaggatatgaacgcgagggtaggtgattttgggttggctaagttgcagaacactagtaaagagatggttagcacgacacatgttgttggaacagcgggttatatggcgcctgagttggttaagacagggagagcatcagcgcaaaccgatgtgtatagctttggagtgtttgtgttggaggtagtgtgtggaaggaggccaatagaggaaggaagagaagggatagtggaatggatatggggactaatggagaaagacaaagtggttgatggtttagacgagagaataaaggcgaatggagtgttcgtggtcgaggaagtggagatggctctgagaataggactgttgtgtgtgcatcctgatccgagagtgcgtccgaagatgagacaagtggtgcagatattggaacaagggagattagtggaggatggtggtgaaagggaaataagcttgttggagagagtgaagagctcttacttgttggaaactggtgagggaagcagacaacaacatcccacgttccaagatgtatggaattcgtcttcttattctaattccttccaaacttatgattctattcttcatggaaggtga

SEQ ID NO: 73757 - protein, 681 aa, Arabidopsis thaliana
  peptide (1)..(681): Ceres Seq. ID no. 4977056
MFSKVSILLFSLASLLLFRSTTGIEFIYNSNFTTTNTLLLGNATVKSPPSILTLTNQTTFSIGRGLYPSRINASSSSASPLPFATSFIFSMAPFKHLSPGHGFAFVFLPFSETSAASSSQHLGLFNFTNNGDPNSRIFAVEFDVFANQEFNDINDNHVGVDVNSLTSVASETAGFYGGRDGQRFTELKLNSGENYQAWIEFNGSAINVTMARASSRKPIRPLISIPLNLTGVLLDDMFVGFTASTGQLVQSHRILSWSFSNSNFSIGDALITRNLPSFKLSGDSVLKSKGFIAGVSSGVVLLVSVIGLLCFYVVRRRRQRLEGDVEDWETEYWPHRVQYKDVLEATKGFSDENMIGYGGNSKVYRGVLEGKEVAVKRIMMSPRESVGATSEFLAEVSSLGRLRHKNIVGLKGWSKKGGESLILIYEYMENGSVDKRIFDCNEMLNWEERMRVIRDLASGMLYLHEGWETKVLHRDIKSSNVLLDKDMNARVGDFGLAKLQNTSKEMVSTTHVVGTAGYMAPELVKTGRASAQTDVYSFGVFVLEVVCGRRPIEEGREGIVEWIWGLMEKDKVVDGLDERIKANGVFVVEEVEMALRIGLLCVHPDPRVRPKMRQVVQILEQGRLVEDGGEREISLLERVKSSYLLETGEGSRQQHPTFQDVWNSSSYSNSFQTYDSILHGR

SEQ ID NO: 73758 - protein, 591 aa, Arabidopsis thaliana
  peptide (1)..(591): Ceres Seq. ID no. 4977057
MAPFKHLSPGHGFAFVFLPFSETSAASSSQHLGLFNFTNNGDPNSRIFAVEFDVFANQEFNDINDNHVGVDVNSLTSVASETAGFYGGRDGQRFTELKLNSGENYQAWIEFNGSAINVTMARASSRKPIRPLISIPLNLTGVLLDDMFVGFTASTGQLVQSHRILSWSFSNSNFSIGDALITRNLPSFKLSGDSVLKSKGFIAGVSSGVVLLVSVIGLLCFYVVRRRRQRLEGDVEDWETEYWPHRVQYKDVLEATKGFSDENMIGYGGNSKVYRGVLEGKEVAVKRIMMSPRESVGATSEFLAEVSSLGRLRHKNIVGLKGWSKKGGESLILIYEYMENGSVDKRIFDCNEMLNWEERMRVIRDLASGMLYLHEGWETKVLHRDIKSSNVLLDKDMNARVGDFGLAKLQNTSKEMVSTTHVVGTAGYMAPELVKTGRASAQTDVYSFGVFVLEVVCGRRPIEEGREGIVEWIWGLMEKDKVVDGLDERIKANGVFVVEEVEMALRIGLLCVHPDPRVRPKMRQVVQILEQGRLVEDGGEREISLLERVKSSYLLETGEGSRQQHPTFQDVWNSSSYSNSFQTYDSILHGR

SEQ ID NO: 73759 - protein, 472 aa, Arabidopsis thaliana
  peptide (1)..(472): Ceres Seq. ID no. 4977058
MARASSRKPIRPLISIPLNLTGVLLDDMFVGFTASTGQLVQSHRILSWSFSNSNFSIGDALITRNLPSFKLSGDSVLKSKGFIAGVSSGVVLLVSVIGLLCFYVVRRRRQRLEGDVEDWETEYWPHRVQYKDVLEATKGFSDENMIGYGGNSKVYRGVLEGKEVAVKRIMMSPRESVGATSEFLAEVSSLGRLRHKNIVGLKGWSKKGGESLILIYEYMENGSVDKRIFDCNEMLNWEERMRVIRDLASGMLYLHEGWETKVLHRDIKSSNVLLDKDMNARVGDFGLAKLQNTSKEMVSTTHVVGTAGYMAPELVKTGRASAQTDVYSFGVFVLEVVCGRRPIEEGREGIVEWIWGLMEKDKVVDGLDERIKANGVFVVEEVEMALRIGLLCVHPDPRVRPKMRQVVQILEQGRLVEDGGEREISLLERVKSSYLLETGEGSRQQHPTFQDVWNSSSYSNSFQTYDSILHGR

SEQ ID NO: 73760 - DNA, 2658 bp, Arabidopsis thaliana
  misc_feature (1)..(2658): Ceres Seq. ID no. 4978442
  misc_feature (1)..(2658): Ortholog of  Ceres SEQ ID NO 15226720 as cited in SEQ ID NO 58707
  misc_feature (1)..(2658): Ortholog of  Ceres SEQ ID NO 13654989 as cited in SEQ ID NO 63117
  misc_feature (1)..(2658): Ortholog of  Ceres SEQ ID NO 13584744 as cited in SEQ ID NO 69137
atggagagacattgtgtgttagttgccacttttttgctgatgcttcatatcgttcatgctcaggatcaaattggattcattagtgtggattgtggtttggcacctcgtgagtctccttacaatgaagccaaaactggtttaacatatacatcagatgacggtctagtcaacgttgggaaacccggtagaatcgccaaggaattcgaaccgctcgccgataagccgactttgacactgagatattttccagagggagtacgaaactgctacaatctaaatgtcaccagcgacaccaactatctgatcaaggccacattcgtatatggaaattacgatggtcttaatgttgggccaaacttcgacctttacttcggtccgaatttgtggactacggtgagtagtaatgatactataaaggagatcattcatgtgaccaaaaccaattctttacaggtatgtcttattaagactggaataagtataccttttataaatgttttggagctacgaccgatgaagaaaaacatgtacgttactcaaggcgaatcactgaattacttattcagggtgtatattagcaattcaagtactcgtataaggttcccggatgatgtctatgatcgtaaatggtacccgtacttcgacaactcatggacacaagtaactacgactctcgatgtaaacacaagtcttacttatgaactaccacaaagtgtaatggcaaaagccgcaacgccaattaaggctaacgacaccttgaacattacatggacagtagagcctcctactacaaagttttactcctacatgcactttgcagagcttcagactttaagagccaacgatgcaagggaattcaatgtgacgatgaatggaatatatacatatggaccttatagtcctaaaccactaaaaaccgaaaccatatacgacaaaatccctgagcaatgcgatggaggtgcatgccttttgcaggttgtgaagacacttaaatctacccttccacctttacttaatgctatcgaggctttcaccgtgattgatttcccgcagatggagactaatggagatgacgttgatgcaatcaagaatgttcaagatacgtatggaattagtagaattagttggcaaggagatccatgtgtccccaaactgtttttgtgggatggtctaaattgcaacaactccgataattcgacatcaccaatcatcacttccttagacttatcttcaagtggactaactgggagcatcacccaagccattcagaatctaactaacctgcaagaactggacttgtcagataacaatttgactggagaaatacctgatttcttaggggacattaaatcactcttggtcataaacttaagtggtaataatctaagtggctcagttcctccctcacttcttcagaagaaaggaatgaagttaaatgtcgaaggaaaccctcatcttctttgcacagctgattcatgtgtgaaaaaaggagaggatggacacaagaaaaagagtgtcatagtgccagttgttgcatcaattgcttcaatagctgttcttataggtgcattggttctgtttttcattcttagaaagaaaaagtcaccaaaagttgaaggaccaccaccatcttatatgcaagcatcagatggtagatcgccaagatcatctgaaccggcaatagtgacaaagaatagaaggtttacttactcacaagttgcgataatgacaaataacttccaaagaatccttggaaaaggagggtttggaatggtttatcatggttttgtgaacggtacagaacaagtagctgttaagatactctcccattcatcgtctcaaggatataaagaatttaaagcggaggtagaacttcttcttagagttcatcacaagaacttggtcggtcttgttgggtactgcgacgaaggagagaacatggctcttatctatgaatacatggccaatggagatctaaaagaacatatgtcaggaacacgtaaccggtttactttgaattggggaactagactgaaaatagtcgtcgagtctgcacaaggacttgagtacttgcataatggatgcaaaccaccaatggttcatagagatgtcaaaaccacaaatatattgctgaacgaacacttccaagccaaactagctgattttgggctttcaaggtcatttccaattgaaggtgaaactcatgtgtcaacagttgttgctggaacgcctggatatcttgatcccgaatactataaaacaaattggttgacagaaaagagtgatgtttatagttttgggattgtattgttggagcttatcacaaatcgacccgtgatcgacaaaagccgtgaaaagccacatatagcagaatgggtaggagtaatgcttacaaaaggagacatcaacagtatcatggatcctaatttaaatgaagattatgattctggttctgtttggaaagctgttgagctagccatgagttgtctcaatccttcttcagcaagaagaccgaccatgtcccaagttgttattgaactaaacgagtgtatagcatcagaaaattcaaggggaggagcgagtcgggatatggactcgaagagttccatagaagtgagcttgacctttgataccgaactgagcccaacggctcggtag

SEQ ID NO: 73761 - protein, 885 aa, Arabidopsis thaliana
  peptide (1)..(885): Ceres Seq. ID no. 4978443
MERHCVLVATFLLMLHIVHAQDQIGFISVDCGLAPRESPYNEAKTGLTYTSDDGLVNVGKPGRIAKEFEPLADKPTLTLRYFPEGVRNCYNLNVTSDTNYLIKATFVYGNYDGLNVGPNFDLYFGPNLWTTVSSNDTIKEIIHVTKTNSLQVCLIKTGISIPFINVLELRPMKKNMYVTQGESLNYLFRVYISNSSTRIRFPDDVYDRKWYPYFDNSWTQVTTTLDVNTSLTYELPQSVMAKAATPIKANDTLNITWTVEPPTTKFYSYMHFAELQTLRANDAREFNVTMNGIYTYGPYSPKPLKTETIYDKIPEQCDGGACLLQVVKTLKSTLPPLLNAIEAFTVIDFPQMETNGDDVDAIKNVQDTYGISRISWQGDPCVPKLFLWDGLNCNNSDNSTSPIITSLDLSSSGLTGSITQAIQNLTNLQELDLSDNNLTGEIPDFLGDIKSLLVINLSGNNLSGSVPPSLLQKKGMKLNVEGNPHLLCTADSCVKKGEDGHKKKSVIVPVVASIASIAVLIGALVLFFILRKKKSPKVEGPPPSYMQASDGRSPRSSEPAIVTKNRRFTYSQVAIMTNNFQRILGKGGFGMVYHGFVNGTEQVAVKILSHSSSQGYKEFKAEVELLLRVHHKNLVGLVGYCDEGENMALIYEYMANGDLKEHMSGTRNRFTLNWGTRLKIVVESAQGLEYLHNGCKPPMVHRDVKTTNILLNEHFQAKLADFGLSRSFPIEGETHVSTVVAGTPGYLDPEYYKTNWLTEKSDVYSFGIVLLELITNRPVIDKSREKPHIAEWVGVMLTKGDINSIMDPNLNEDYDSGSVWKAVELAMSCLNPSSARRPTMSQVVIELNECIASENSRGGASRDMDSKSSIEVSLTFDTELSPTAR

SEQ ID NO: 73762 - protein, 872 aa, Arabidopsis thaliana
  peptide (1)..(872): Ceres Seq. ID no. 4978444
MLHIVHAQDQIGFISVDCGLAPRESPYNEAKTGLTYTSDDGLVNVGKPGRIAKEFEPLADKPTLTLRYFPEGVRNCYNLNVTSDTNYLIKATFVYGNYDGLNVGPNFDLYFGPNLWTTVSSNDTIKEIIHVTKTNSLQVCLIKTGISIPFINVLELRPMKKNMYVTQGESLNYLFRVYISNSSTRIRFPDDVYDRKWYPYFDNSWTQVTTTLDVNTSLTYELPQSVMAKAATPIKANDTLNITWTVEPPTTKFYSYMHFAELQTLRANDAREFNVTMNGIYTYGPYSPKPLKTETIYDKIPEQCDGGACLLQVVKTLKSTLPPLLNAIEAFTVIDFPQMETNGDDVDAIKNVQDTYGISRISWQGDPCVPKLFLWDGLNCNNSDNSTSPIITSLDLSSSGLTGSITQAIQNLTNLQELDLSDNNLTGEIPDFLGDIKSLLVINLSGNNLSGSVPPSLLQKKGMKLNVEGNPHLLCTADSCVKKGEDGHKKKSVIVPVVASIASIAVLIGALVLFFILRKKKSPKVEGPPPSYMQASDGRSPRSSEPAIVTKNRRFTYSQVAIMTNNFQRILGKGGFGMVYHGFVNGTEQVAVKILSHSSSQGYKEFKAEVELLLRVHHKNLVGLVGYCDEGENMALIYEYMANGDLKEHMSGTRNRFTLNWGTRLKIVVESAQGLEYLHNGCKPPMVHRDVKTTNILLNEHFQAKLADFGLSRSFPIEGETHVSTVVAGTPGYLDPEYYKTNWLTEKSDVYSFGIVLLELITNRPVIDKSREKPHIAEWVGVMLTKGDINSIMDPNLNEDYDSGSVWKAVELAMSCLNPSSARRPTMSQVVIELNECIASENSRGGASRDMDSKSSIEVSLTFDTELSPTAR

SEQ ID NO: 73763 - protein, 714 aa, Arabidopsis thaliana; identical to SEQ ID NO: 71421
  peptide (1)..(714): Ceres Seq. ID no. 4978445

SEQ ID NO: 73764 - DNA, 1428 bp, Arabidopsis thaliana
  misc_feature (1)..(1428): Ceres Seq. ID no. 4978521
  misc_feature (1)..(1428): Ortholog of  Ceres SEQ ID NO 12612314 as cited in SEQ ID NO 51420
atgggaaatacatttggttcaagtttggcgagtttattcttcttgtgggcaactattcaacaaatcttcccaaaccatctcagaatcgccattaaagagtttcttatctccacaatacaacaactctcatttgtccagagattttccgacagattcatcaacttcttttcgccttatgtcgaaatcagcttctctcaatacgaagattatcaattcaatcacgcatttgcagccattgagacttaccttggggcaaaagcaactgataaagccaagcatctaagagcaagccaagttaaagagagtaaaggtttggtcttgaaacgagacgagactaaagtccgagatgagtatgaaggaggtactgtctggtgggagatggaaaccgactccacaggatatagaacattcaaactcactttccatagacgctcgcgagatattgtaaccgactcttacataaaatatgtttttgaagaaggcaaatcgattcaagccaagagcaagcagatgaagttgttcacaaataatccgagttctcactggggcactagcaagaagagtttttggagatatattgattttgagcatcccgcaagttttcacacgctagctatggatacaaagaagaaagaggagatcttgaatgatcttgctgcgtttagcaatggtaaagagtattacaagaaaataggtaaagcttggaagaggggttacttgctacatggaccaccagggaccggtaaatcaacaatgatcgctgcaatggcgaatcatttaaactatagtatctatgatcttgaactcacggctatacgtaacaactcggagttgaggaagctactcactgctacttctagcaagtcgatcatcgtgattgaagatatagattgttctttggatcttacgggaaagagaaagaaagagaaaaacttgatgacctcgagagaagatggagaacaaggtaccgaagaagacaagagttttgtaacactctcggggcttttgaacttcattgatggcatttggtctgcttgtggacaagagaggattattatcttcactacgaatcactttgagaaacttgacccggctttgatcaggagagggagaatggacatgcatattgagttgtcatactgttctttcgaggcgtttaagattctcgccaagaactatcttgatcttgatactcatcctctattcaagaagatcgaatcattattgaaggaaacgaagatcgcaccagctgatgttgctgagaacttgatgaagaagaatactgaaatagatgctgatggatctcttaaagatctaattcaagctctggaggggaagaagaagattcatggagctcaagtagatgaaccgaaggacaaatataccaagaagttttataaagcattttgcatgtcatctaaagcctga

SEQ ID NO: 73765 - protein, 475 aa, Arabidopsis thaliana
  peptide (1)..(475): Ceres Seq. ID no. 4978522
MGNTFGSSLASLFFLWATIQQIFPNHLRIAIKEFLISTIQQLSFVQRFSDRFINFFSPYVEISFSQYEDYQFNHAFAAIETYLGAKATDKAKHLRASQVKESKGLVLKRDETKVRDEYEGGTVWWEMETDSTGYRTFKLTFHRRSRDIVTDSYIKYVFEEGKSIQAKSKQMKLFTNNPSSHWGTSKKSFWRYIDFEHPASFHTLAMDTKKKEEILNDLAAFSNGKEYYKKIGKAWKRGYLLHGPPGTGKSTMIAAMANHLNYSIYDLELTAIRNNSELRKLLTATSSKSIIVIEDIDCSLDLTGKRKKEKNLMTSREDGEQGTEEDKSFVTLSGLLNFIDGIWSACGQERIIIFTTNHFEKLDPALIRRGRMDMHIELSYCSFEAFKILAKNYLDLDTHPLFKKIESLLKETKIAPADVAENLMKKNTEIDADGSLKDLIQALEGKKKIHGAQVDEPKDKYTKKFYKAFCMSSKA

SEQ ID NO: 73766 - protein, 349 aa, Arabidopsis thaliana
  peptide (1)..(349): Ceres Seq. ID no. 4978523
METDSTGYRTFKLTFHRRSRDIVTDSYIKYVFEEGKSIQAKSKQMKLFTNNPSSHWGTSKKSFWRYIDFEHPASFHTLAMDTKKKEEILNDLAAFSNGKEYYKKIGKAWKRGYLLHGPPGTGKSTMIAAMANHLNYSIYDLELTAIRNNSELRKLLTATSSKSIIVIEDIDCSLDLTGKRKKEKNLMTSREDGEQGTEEDKSFVTLSGLLNFIDGIWSACGQERIIIFTTNHFEKLDPALIRRGRMDMHIELSYCSFEAFKILAKNYLDLDTHPLFKKIESLLKETKIAPADVAENLMKKNTEIDADGSLKDLIQALEGKKKIHGAQVDEPKDKYTKKFYKAFCMSSKA

SEQ ID NO: 73767 - protein, 305 aa, Arabidopsis thaliana
  peptide (1)..(305): Ceres Seq. ID no. 4978524
MKLFTNNPSSHWGTSKKSFWRYIDFEHPASFHTLAMDTKKKEEILNDLAAFSNGKEYYKKIGKAWKRGYLLHGPPGTGKSTMIAAMANHLNYSIYDLELTAIRNNSELRKLLTATSSKSIIVIEDIDCSLDLTGKRKKEKNLMTSREDGEQGTEEDKSFVTLSGLLNFIDGIWSACGQERIIIFTTNHFEKLDPALIRRGRMDMHIELSYCSFEAFKILAKNYLDLDTHPLFKKIESLLKETKIAPADVAENLMKKNTEIDADGSLKDLIQALEGKKKIHGAQVDEPKDKYTKKFYKAFCMSSKA

SEQ ID NO: 73768 - DNA, 435 bp, Arabidopsis thaliana
  misc_feature (1)..(435): Ceres Seq. ID no. 4978568
  misc_feature (1)..(435): Ortholog of  Ceres SEQ ID NO 13661797 as cited in SEQ ID NO 61647
atggcaaataagaagccatcaccttctgctgcaacaagaacaataacctcaaagaagagcacagcgactccacaggtgaaactgctgacaagagtcgagcagctcaagcttctgaccaaagccgagaaagcaggacttttgtctttagcagagaaatcaggtttctctctatcgaccatcgagcgtcttggattgctgaccaaagcagaggagttcggcgttttgtctgccgccacaaacccggaaacgcctggaacgttattcactttgagcctcggtttactccttcttggaccggtttttgcatatgtggttcctgaagattacacttgggaagtagtgattcaggttcttgtggctctactctctgttcttggtggctctgctgcttttgctgcttctggttttgtctccaatttgcagaaatctgattag

SEQ ID NO: 73769 - protein, 144 aa, Arabidopsis thaliana; identical to SEQ ID NO: 31057
  peptide (1)..(144): Ceres Seq. ID no. 4978569

SEQ ID NO: 73770 - DNA, 1653 bp, Arabidopsis thaliana
  misc_feature (1)..(1653): Ceres Seq. ID no. 4979423
  misc_feature (1)..(1653): Ortholog of  Ceres SEQ ID NO 14304057 as cited in SEQ ID NO 53782
atgacagagatcttcagtgacaccagcatcagacagttatctcaaatgctactatcactaatcttcttccacatatccgaatacattctagccatcaccattcacggagcatcaaacgtaactcttagttcgcttttaatcaccaagcattacgctttagcaatgcttctgtcgcttctcgaatacctaacggagattatcctcttcccggggctgaaacaacactggtgggtcagcaactttggactcataatgatcatcgttggggaaatcatcaggaaggcagcgataataacagcgggaagatcgttcactcacctcataaagatcaactacgaagagcatcacgggcttgtgactcatggtgtgtatagactaatgaggcatccaagttactgcggttttctcatctggtcggtcgggacacaagttatgctctgtaaccccgtttcagcagttgcgttcgcggttgtcgtgtggcggttttttgctcagagaataccgtacgaggagtattttctgaatcagttttttggggtacagtatctagagtatgcagagagtgttgcctctgtggagtcggtaaccatgttatgcggaggctctcgcgcctccgtgcatttgtgggaccatcgtcatcctcctaggctcggtgctaaggttttgcggaaatcttcgttcatgctcagaccttgttcggctatatcgcagcagcggataaagtcgtcgtttaggtctcactgtaaaactccaagaaaaatcccagctcctctcgattgtttcagccagggagatgatcatcctgagctttcagctgaagggctttccccagttgcaggaggcattgttgctctagggaagtttgatgccctgcatatcggtcatcgagagcttgcaattcaagctgcaagaattggtactccgtatctactgtcgtttgttggattggctgaagtacttggttggaagcctagagcaccaatagtagccaaatgcgacagaaaacgagtgctttcctcttgggcatcgtattgtggtaacatagcaccggtagagtttgagattgaatttgccagcgttcgacaccttaacccacaacagtttgtcgagaagttgtcaagagagcttagagtctgcggagttgtggcaggcgaaaattacaggtttggataccgggcttctggtgacgcctctgaacttgtgaggttatgcaaagactttggtatcagcgcttacatcattaactccgtgatggataagaaccaagtctctgtaaacacagaggaggaggactcaaagtcgaaagaaagaggtcaagtctcatccacacgagtccgtcatgctctagctgcaggagatgtgaggtatgtaacagagctcctcggcagaccacacagggtcatctctcggacaagaacacaagatttaacgagcaaaagagggaggatctcgcttcagacatcttcgctactaaatttaccaccagggaatggagtttacaaagcatgctcgcttatagttggtgataagcatccaatttcgtgtaaggttattgtcgatacatcgaatctctatatagaaacagaggaagaacgtttccacaactcagatgagtctcaagagtttcaactcttagggattgagttcggttaa

SEQ ID NO: 73771 - protein, 550 aa, Arabidopsis thaliana
  peptide (1)..(550): Ceres Seq. ID no. 4979424
MTEIFSDTSIRQLSQMLLSLIFFHISEYILAITIHGASNVTLSSLLITKHYALAMLLSLLEYLTEIILFPGLKQHWWVSNFGLIMIIVGEIIRKAAIITAGRSFTHLIKINYEEHHGLVTHGVYRLMRHPSYCGFLIWSVGTQVMLCNPVSAVAFAVVVWRFFAQRIPYEEYFLNQFFGVQYLEYAESVASVESVTMLCGGSRASVHLWDHRHPPRLGAKVLRKSSFMLRPCSAISQQRIKSSFRSHCKTPRKIPAPLDCFSQGDDHPELSAEGLSPVAGGIVALGKFDALHIGHRELAIQAARIGTPYLLSFVGLAEVLGWKPRAPIVAKCDRKRVLSSWASYCGNIAPVEFEIEFASVRHLNPQQFVEKLSRELRVCGVVAGENYRFGYRASGDASELVRLCKDFGISAYIINSVMDKNQVSVNTEEEDSKSKERGQVSSTRVRHALAAGDVRYVTELLGRPHRVISRTRTQDLTSKRGRISLQTSSLLNLPPGNGVYKACSLIVGDKHPISCKVIVDTSNLYIETEEERFHNSDESQEFQLLGIEFG

SEQ ID NO: 73772 - protein, 535 aa, Arabidopsis thaliana
  peptide (1)..(535): Ceres Seq. ID no. 4979425
MLLSLIFFHISEYILAITIHGASNVTLSSLLITKHYALAMLLSLLEYLTEIILFPGLKQHWWVSNFGLIMIIVGEIIRKAAIITAGRSFTHLIKINYEEHHGLVTHGVYRLMRHPSYCGFLIWSVGTQVMLCNPVSAVAFAVVVWRFFAQRIPYEEYFLNQFFGVQYLEYAESVASVESVTMLCGGSRASVHLWDHRHPPRLGAKVLRKSSFMLRPCSAISQQRIKSSFRSHCKTPRKIPAPLDCFSQGDDHPELSAEGLSPVAGGIVALGKFDALHIGHRELAIQAARIGTPYLLSFVGLAEVLGWKPRAPIVAKCDRKRVLSSWASYCGNIAPVEFEIEFASVRHLNPQQFVEKLSRELRVCGVVAGENYRFGYRASGDASELVRLCKDFGISAYIINSVMDKNQVSVNTEEEDSKSKERGQVSSTRVRHALAAGDVRYVTELLGRPHRVISRTRTQDLTSKRGRISLQTSSLLNLPPGNGVYKACSLIVGDKHPISCKVIVDTSNLYIETEEERFHNSDESQEFQLLGIEFG

SEQ ID NO: 73773 - protein, 496 aa, Arabidopsis thaliana
  peptide (1)..(496): Ceres Seq. ID no. 4979426
MLLSLLEYLTEIILFPGLKQHWWVSNFGLIMIIVGEIIRKAAIITAGRSFTHLIKINYEEHHGLVTHGVYRLMRHPSYCGFLIWSVGTQVMLCNPVSAVAFAVVVWRFFAQRIPYEEYFLNQFFGVQYLEYAESVASVESVTMLCGGSRASVHLWDHRHPPRLGAKVLRKSSFMLRPCSAISQQRIKSSFRSHCKTPRKIPAPLDCFSQGDDHPELSAEGLSPVAGGIVALGKFDALHIGHRELAIQAARIGTPYLLSFVGLAEVLGWKPRAPIVAKCDRKRVLSSWASYCGNIAPVEFEIEFASVRHLNPQQFVEKLSRELRVCGVVAGENYRFGYRASGDASELVRLCKDFGISAYIINSVMDKNQVSVNTEEEDSKSKERGQVSSTRVRHALAAGDVRYVTELLGRPHRVISRTRTQDLTSKRGRISLQTSSLLNLPPGNGVYKACSLIVGDKHPISCKVIVDTSNLYIETEEERFHNSDESQEFQLLGIEFG

SEQ ID NO: 73774 - DNA, 723 bp, Arabidopsis thaliana
  misc_feature (1)..(723): Ceres Seq. ID no. 4979462
  misc_feature (1)..(723): Ortholog of  Ceres SEQ ID NO 14305409 as cited in SEQ ID NO 55679
atgttactgattcgaacagcgacggtcgctcttcttctaatcgcgtttcttgaaaacgctgcgtggtgctgcaatgatgcttgtgtttcgggctctctcggggttcatcgacttgttgaggctctgaaacacgctttcgcagttagaatgaaccttggggatccggattttgtcgatgtttctaaggttatttctgatatgttgtctacaaattttgcacaaggcttgaagaaaaagataaacgacaacaaaacctttgatccaaattattacggtggcaggtgggatcagattaacgaccatgggacaagccatttatcaatcatagatagcgagaggaatgttgtttcactgactagtacaataaacagttactttggggcattgatgttatctccaagcaccggaattgttctgaacaacgaaatggatgatttctcaatccccatgaaatccagcagtaacctaactgtgccaccaccggcaccggccaatttcattcgtcctgggaaacgacctctgtcttctatgacacccaccattgtactcaaggatggtaaagtgaaagcctccgtgggtgcgagcggaggactgtacatcatcgctgggacaacagaagtttttctgaattatttcttcctcaagatggatcctctttcttccgttttggctccaagaatctaccatcagctgataccaaacatagtttcgtatgaaaactag

SEQ ID NO: 73775 - protein, 240 aa, Arabidopsis thaliana
  peptide (1)..(240): Ceres Seq. ID no. 4979463
MLLIRTATVALLLIAFLENAAWCCNDACVSGSLGVHRLVEALKHAFAVRMNLGDPDFVDVSKVISDMLSTNFAQGLKKKINDNKTFDPNYYGGRWDQINDHGTSHLSIIDSERNVVSLTSTINSYFGALMLSPSTGIVLNNEMDDFSIPMKSSSNLTVPPPAPANFIRPGKRPLSSMTPTIVLKDGKVKASVGASGGLYIIAGTTEVFLNYFFLKMDPLSSVLAPRIYHQLIPNIVSYEN

SEQ ID NO: 73776 - protein, 191 aa, Arabidopsis thaliana; identical to SEQ ID NO: 71559
  peptide (1)..(191): Ceres Seq. ID no. 4979464

SEQ ID NO: 73777 - protein, 174 aa, Arabidopsis thaliana; identical to SEQ ID NO: 71560
  peptide (1)..(174): Ceres Seq. ID no. 4979465

SEQ ID NO: 73778 - DNA, 1422 bp, Arabidopsis thaliana
  misc_feature (1)..(1422): Ceres Seq. ID no. 4980355
  misc_feature (1)..(1422): Ortholog of  Ceres SEQ ID NO 14303627 as cited in SEQ ID NO 62070
  misc_feature (1)..(1422): Ortholog of  Ceres SEQ ID NO 13597546 as cited in SEQ ID NO 65017
  misc_feature (1)..(1422): Ortholog of  Ceres SEQ ID NO 13654353 as cited in SEQ ID NO 68318
atgtatttgacaataatattcctcttcattagctccattattttccctctcctattcttccttggaaaacatttatcaaacttccgttatcccaaccttcctccgggaaagattggctttcccttaataggagagactttatcctttctctctgctggccgtcaaggccacccggagaagtttgtcaccgaccgagttcgtcatttctcctcaggtatcttcaagacccacctctttgggtctcccttcgcggtggtgactggtgcctctgggaacaagtttctattcaccaacgaaaacaagcttgtgatctcatggtggccagattcggtgaacaagatcttcccttcttcaacgcagaccagctctaaggaagaggccatcaagacgaggatgcttcttatgccgtccatgaagcctgaggctttgagaaggtatgttggtgttatggatgagattgctcagaaacattttgagacggaatgggccaaccaagatcaacttattgtcttccctctcaccaaaaagttcacgttttctatagcatgccgtttgttcctgagcatggacgacctcgaaagagtaagaaaactcgaagagccattcactacggttatgacgggtgtcttctcaatcccaatagatttaccgggaacacggtttaaccgtgccatcaaggcgtcaaggttactcagcaaagaggtttcaacgatcattaggcagagaaaagaagagctgaaggccgggaaagtatcagtggaacaggacatcctatctcatatgttgatgaatataggagagaccaaagacgaggatttggctgataagattattgccttgttaatcggaggacatgacacaacaagtatcgtatgcacattcgttgtcaactatcttgctgagttccctcatatctaccaacgtgtgctagaagagcaaaaggagatactaaacaacaaagacgtaaacgaaaaattaacgtgggaggacattgagaaaatgagatattcatggaatgttgcatgtgaagtgatgagaattgttcctcctcttgctggcacttttcgtgaggccatcgatcacttctcttttaagggtttttacatccccaaaggatggaagttatattggagtgccaccgctacgcataagaatccagaatactttccggaaccagagaaatttgagccaagccgatttgaaggaagtggtccgaagccttatacatatgttccctttggaggaggatccaggatatgtccagggagggagtatgctcgtctagagattcttatatttatgcacaatcttgttaagagatttaagtgggaaaaagtgtttccaaaagaaaataaattagtggctgatcccgcaccaataccagccaaaggtctccctattagaatctttcctcagtcttga

SEQ ID NO: 73779 - protein, 473 aa, Arabidopsis thaliana
  peptide (1)..(473): Ceres Seq. ID no. 4980356
MYLTIIFLFISSIIFPLLFFLGKHLSNFRYPNLPPGKIGFPLIGETLSFLSAGRQGHPEKFVTDRVRHFSSGIFKTHLFGSPFAVVTGASGNKFLFTNENKLVISWWPDSVNKIFPSSTQTSSKEEAIKTRMLLMPSMKPEALRRYVGVMDEIAQKHFETEWANQDQLIVFPLTKKFTFSIACRLFLSMDDLERVRKLEEPFTTVMTGVFSIPIDLPGTRFNRAIKASRLLSKEVSTIIRQRKEELKAGKVSVEQDILSHMLMNIGETKDEDLADKIIALLIGGHDTTSIVCTFVVNYLAEFPHIYQRVLEEQKEILNNKDVNEKLTWEDIEKMRYSWNVACEVMRIVPPLAGTFREAIDHFSFKGFYIPKGWKLYWSATATHKNPEYFPEPEKFEPSRFEGSGPKPYTYVPFGGGSRICPGREYARLEILIFMHNLVKRFKWEKVFPKENKLVADPAPIPAKGLPIRIFPQS

SEQ ID NO: 73780 - protein, 342 aa, Arabidopsis thaliana
  peptide (1)..(342): Ceres Seq. ID no. 4980357
MLLMPSMKPEALRRYVGVMDEIAQKHFETEWANQDQLIVFPLTKKFTFSIACRLFLSMDDLERVRKLEEPFTTVMTGVFSIPIDLPGTRFNRAIKASRLLSKEVSTIIRQRKEELKAGKVSVEQDILSHMLMNIGETKDEDLADKIIALLIGGHDTTSIVCTFVVNYLAEFPHIYQRVLEEQKEILNNKDVNEKLTWEDIEKMRYSWNVACEVMRIVPPLAGTFREAIDHFSFKGFYIPKGWKLYWSATATHKNPEYFPEPEKFEPSRFEGSGPKPYTYVPFGGGSRICPGREYARLEILIFMHNLVKRFKWEKVFPKENKLVADPAPIPAKGLPIRIFPQS

SEQ ID NO: 73781 - protein, 339 aa, Arabidopsis thaliana
  peptide (1)..(339): Ceres Seq. ID no. 4980358
MPSMKPEALRRYVGVMDEIAQKHFETEWANQDQLIVFPLTKKFTFSIACRLFLSMDDLERVRKLEEPFTTVMTGVFSIPIDLPGTRFNRAIKASRLLSKEVSTIIRQRKEELKAGKVSVEQDILSHMLMNIGETKDEDLADKIIALLIGGHDTTSIVCTFVVNYLAEFPHIYQRVLEEQKEILNNKDVNEKLTWEDIEKMRYSWNVACEVMRIVPPLAGTFREAIDHFSFKGFYIPKGWKLYWSATATHKNPEYFPEPEKFEPSRFEGSGPKPYTYVPFGGGSRICPGREYARLEILIFMHNLVKRFKWEKVFPKENKLVADPAPIPAKGLPIRIFPQS

SEQ ID NO: 73782 - DNA, 1515 bp, Arabidopsis thaliana
  misc_feature (1)..(1515): Ceres Seq. ID no. 4981130
  misc_feature (1)..(1515): Ortholog of  Ceres SEQ ID NO 13594380 as cited in SEQ ID NO 58039
  misc_feature (1)..(1515): Ortholog of  Ceres SEQ ID NO 13597407 as cited in SEQ ID NO 64106
atggctaaatcagtatctggcgggaagattacttattttgtggtggcttcatgtgtcatggccgccatgggcggtgtcatcttcggctacgacatcggggtttcaggtggagtgatgtcaatggggccatttctaaaaagatttttcccaaaagtgtataagctccaagaagaagatagaagaagaagaggcaatagcaataaccactactgccttttcaatagccaacttcttacatccttcacatcttctctatacgtttccggtctcatcgctactctgttagcttcgtccgtgactcgttcatggggtcgcaagccctctatatttcttggcggtgtgtcctttctcgccggcgctgctcttggtggctctgctcaaaacgttgctatgctcattattgcgcgtctcttgctcggcgtaggagttggattcgctaaccagtcggttcctctgtatctctccgagatggcgccggcaaaatacagaggagcaatcagcaatggtttccagctctgtatcggaattggatttctatctgcaaatgtaataaactacgaaacccaaaatatcaaacatggttggagaatctctttagccacagctgcaatacctgcttcaatcctcactttaggatcactgtttctcccggaaacgccgaatagtatcatccagaccaccggagatgttcacaagaccgagcttatgcttcgccgtgtccgtggaactaacgacgttcaagatgagcttactgatctcgttgaagcgagttctggttctgatacagattcaaacgcgtttttgaaactgcttcaaagaaaatataggcctgagttagtgatggctttggtgatacctttctttcagcaagttactggaatcaatgttgttgctttctacgcaccggttttgtatagaaccgttgggtttggagagagtggttcgttgatgtcgaccctcgtgactggaatcgtgggaacctcgtcgacgttgttgtcgatgcttgtcgttgacagaatcggtagaaagactctgtttttgattggagggttacagatgctcgtgtcgcaagttaccattggtgtgatcgttatggtggctgatgttcacgacggtgtgatcaaggaagggtatggttacgcggttgtggttttggtgtgtgtctacgtggccgggtttggttggtcttggggtccattaggatggcttgtaccgagtgagatttttccgttggagataagatcggtggcgcagagtgtaactgtggcagtgagttttgtgtttacttttgcggtggctcaaagtgcaccaccgatgttgtgtaagtttcgagctgggattttcttcttttatggagggtggttggtggtaatgacggtagcggtgcagctgtttttgccggagactaagaatgttccaatcgagaaggtggttggactttgggagaagcattggttttggaggagaatgacgagcaagcgtgatatccaagaaaccaccattcttagccattga

SEQ ID NO: 73783 - protein, 504 aa, Arabidopsis thaliana
  peptide (1)..(504): Ceres Seq. ID no. 4981131
MAKSVSGGKITYFVVASCVMAAMGGVIFGYDIGVSGGVMSMGPFLKRFFPKVYKLQEEDRRRRGNSNNHYCLFNSQLLTSFTSSLYVSGLIATLLASSVTRSWGRKPSIFLGGVSFLAGAALGGSAQNVAMLIIARLLLGVGVGFANQSVPLYLSEMAPAKYRGAISNGFQLCIGIGFLSANVINYETQNIKHGWRISLATAAIPASILTLGSLFLPETPNSIIQTTGDVHKTELMLRRVRGTNDVQDELTDLVEASSGSDTDSNAFLKLLQRKYRPELVMALVIPFFQQVTGINVVAFYAPVLYRTVGFGESGSLMSTLVTGIVGTSSTLLSMLVVDRIGRKTLFLIGGLQMLVSQVTIGVIVMVADVHDGVIKEGYGYAVVVLVCVYVAGFGWSWGPLGWLVPSEIFPLEIRSVAQSVTVAVSFVFTFAVAQSAPPMLCKFRAGIFFFYGGWLVVMTVAVQLFLPETKNVPIEKVVGLWEKHWFWRRMTSKRDIQETTILSH

SEQ ID NO: 73784 - protein, 485 aa, Arabidopsis thaliana
  peptide (1)..(485): Ceres Seq. ID no. 4981132
MAAMGGVIFGYDIGVSGGVMSMGPFLKRFFPKVYKLQEEDRRRRGNSNNHYCLFNSQLLTSFTSSLYVSGLIATLLASSVTRSWGRKPSIFLGGVSFLAGAALGGSAQNVAMLIIARLLLGVGVGFANQSVPLYLSEMAPAKYRGAISNGFQLCIGIGFLSANVINYETQNIKHGWRISLATAAIPASILTLGSLFLPETPNSIIQTTGDVHKTELMLRRVRGTNDVQDELTDLVEASSGSDTDSNAFLKLLQRKYRPELVMALVIPFFQQVTGINVVAFYAPVLYRTVGFGESGSLMSTLVTGIVGTSSTLLSMLVVDRIGRKTLFLIGGLQMLVSQVTIGVIVMVADVHDGVIKEGYGYAVVVLVCVYVAGFGWSWGPLGWLVPSEIFPLEIRSVAQSVTVAVSFVFTFAVAQSAPPMLCKFRAGIFFFYGGWLVVMTVAVQLFLPETKNVPIEKVVGLWEKHWFWRRMTSKRDIQETTILSH

SEQ ID NO: 73785 - protein, 482 aa, Arabidopsis thaliana
  peptide (1)..(482): Ceres Seq. ID no. 4981133
MGGVIFGYDIGVSGGVMSMGPFLKRFFPKVYKLQEEDRRRRGNSNNHYCLFNSQLLTSFTSSLYVSGLIATLLASSVTRSWGRKPSIFLGGVSFLAGAALGGSAQNVAMLIIARLLLGVGVGFANQSVPLYLSEMAPAKYRGAISNGFQLCIGIGFLSANVINYETQNIKHGWRISLATAAIPASILTLGSLFLPETPNSIIQTTGDVHKTELMLRRVRGTNDVQDELTDLVEASSGSDTDSNAFLKLLQRKYRPELVMALVIPFFQQVTGINVVAFYAPVLYRTVGFGESGSLMSTLVTGIVGTSSTLLSMLVVDRIGRKTLFLIGGLQMLVSQVTIGVIVMVADVHDGVIKEGYGYAVVVLVCVYVAGFGWSWGPLGWLVPSEIFPLEIRSVAQSVTVAVSFVFTFAVAQSAPPMLCKFRAGIFFFYGGWLVVMTVAVQLFLPETKNVPIEKVVGLWEKHWFWRRMTSKRDIQETTILSH

SEQ ID NO: 73786 - DNA, 1101 bp, Arabidopsis thaliana
  misc_feature (1)..(1101): Ceres Seq. ID no. 4981193
  misc_feature (1)..(1101): Ortholog of  Ceres SEQ ID NO 15172430 as cited in SEQ ID NO 59207
cttctttcctctttcttctttctgttttctggtcgctcgttaccaccaagacctcgtcgaggtttctctctctctgaaaaagtgcttttgctgcgtttccatgctctcggaaggaacttggctgaatcgttggagaattatcgatctggcgtcgttggtgcatctctagctgcgccaattcatcggatccggtttgatttctccctttcgcgaatctagccttccgtgatcttagccatgttctatggcacagctgtatgggacccttggcttatcgttggccagattatttgcctccaatgctcttactatctcactcttggactcttcaccatggtctttcttggccttcgtgttcctcgccttagtcttgtctacttcttcgattacgctactctcactacttccaccttcaccggttggtctgttattgcctcattcctcttctcttcactcgctggggctgtgtacatgatatttttggtggagcgagcacggaaatgcttagatttctctgcaactctctacatcatacatctcttcttttgcatcatgtatggaggatggccttcctctatggcgtggtgggttgttaatggaaccggactcgctgttatggctttgctagctgagtacttgtgcattaaacgcgaacagcgagagatccctatggatcgcttccactcaagggtttgaagattggtgaaagaacaagtgatgaagattcttgtgggttagcagcgcgactcgtagagcctagtagagcctagtactcttaacaattgtgatgtacagagatgaaatcagaggagtagaatgggcgaaaggaagttcagctagccaagcaacaatgttggacactggtgcaccaactctgactgcaatttttagtgacttcaaatactaagactttggaatacgtttcaatttgttcttttgtatgaaaaaaacattagactcgaataggttattgatttcatgttgcttcttttttttgtttatactggattttctcttctatcctctacttggtgcagctttgtgtgttttaaaaccagtgtctcattcatcatactcttttaccaccaattgaatccttcc

SEQ ID NO: 73787 - protein, 152 aa, Arabidopsis thaliana; identical to SEQ ID NO: 27739
  peptide (1)..(152): Ceres Seq. ID no. 4981194

SEQ ID NO: 73788 - protein, 120 aa, Arabidopsis thaliana; identical to SEQ ID NO: 27740
  peptide (1)..(120): Ceres Seq. ID no. 4981195

SEQ ID NO: 73789 - protein, 76 aa, Arabidopsis thaliana; identical to SEQ ID NO: 27741
  peptide (1)..(76): Ceres Seq. ID no. 4981196

SEQ ID NO: 73790 - DNA, 797 bp, Arabidopsis thaliana
  misc_feature (1)..(797): Ceres Seq. ID no. 4981253
  misc_feature (1)..(797): Ortholog of  Ceres SEQ ID NO 13595187 as cited in SEQ ID NO 56052
  misc_feature (1)..(797): Ortholog of  Ceres SEQ ID NO 14312239 as cited in SEQ ID NO 59176
  misc_feature (1)..(797): Ortholog of  Ceres SEQ ID NO 14313718 as cited in SEQ ID NO 59559
  misc_feature (1)..(797): Ortholog of  Ceres SEQ ID NO 15169505 as cited in SEQ ID NO 61011
  misc_feature (1)..(797): Ortholog of  Ceres SEQ ID NO 13662053 as cited in SEQ ID NO 61547
  misc_feature (1)..(797): Ortholog of  Ceres SEQ ID NO 13624283 as cited in SEQ ID NO 0
acgatagcctctcatcttcttttttcctctccatcatcttcaccataaccgaaaaaccaaacaaaaaatccttagataatcagatcttgatattatggatcatatcatcggctttatgggcacaacaaacatgtcacataacacaaaccttatgatcgctgccgcagccactaccactacgacctcttcgtcttcctcttcgtcctccggaggctcggggactaaccagctaagcaggtacgagaatcagaagagaagagattggaacactttcggacagtatctacgcaatcaccgtccaccactttctctctcccgttgcagtggtgctcatgttcttgaattcctcaggtacctcgaccaattcggcaagactaaggttcacacacacctatgtccgttcttcggacacccaaacccaccagcaccatgtgcctgtccactccgacaagcgtggggtagtctggacgcactcattggccgtcttagagctgcttttgaagagaacggtggttcaccagagacgaacccttttggtgcacgagccgttcgactctacctaagggaagtacgtgactcgcaggctaaagcacgtgggatcagctatgaaaaaaagaagcgcaagcgacctcctccgccactaccaccggctcagccggcgatttcaagtagccctaattaacattaagtcatgagtaagatgtttcaatgaactacgtttgtttacaaatttttatcaatgacgaacatgcacgagttcttttaaagtcacatgccctttcctaaacttttatttg

SEQ ID NO: 73791 - protein, 195 aa, Arabidopsis thaliana; identical to SEQ ID NO: 22865
  peptide (1)..(195): Ceres Seq. ID no. 4981254

SEQ ID NO: 73792 - protein, 188 aa, Arabidopsis thaliana; identical to SEQ ID NO: 22866
  peptide (1)..(188): Ceres Seq. ID no. 4981255

SEQ ID NO: 73793 - protein, 183 aa, Arabidopsis thaliana; identical to SEQ ID NO: 22867
  peptide (1)..(183): Ceres Seq. ID no. 4981256

SEQ ID NO: 73794 - DNA, 1117 bp, Arabidopsis thaliana
  misc_feature (1)..(1117): Ceres Seq. ID no. 4981295
  misc_feature (1)..(1117): Ortholog of  Ceres SEQ ID NO 14308107 as cited in SEQ ID NO 59030
  misc_feature (1)..(1117): Ortholog of  Ceres SEQ ID NO 15226612 as cited in SEQ ID NO 62700
agggaaaaatgttgcagaagatttctcagtctatttctttatgtaacggcgatcaatttaagccgttaatatacctcgccggagctccgacgaacttcatctcttcccctctctcagtttcaggcaagaagaaatcatcttctctgagaattaaaaggatacaacaacttcaaagtacattagaagatagaataaatccaccactagtatgtggaacagtatcgccacgtcttagtgttcctgatcatatactaaagcctctatatgttgagtctagcaaagttccagagatatcaagtgaattacagattcctgactctataggcattgtgaaaatgaagaaagcgtgtgagctcgcggctcgtgtattagactatgcaggaactttggttagaccgtttgttactacagatgaaattgataaagcagtgcatcagatggttattgagtttggtgcatatccttcacctcttggatatggtggatttcctaaaagtgtttgtacatcggttaatgaatgtatgtttcacgggattcccgattctcgtccgctacagaatggagatattataaacatcgatgttgcggtttacttggatgggtatcatggagatacgtcaaagactttcttatgtggagacgtcaatggaagccttaaacaacttgtcaaggtcacagaagaatgcttggagaaaggtatatcggtttgtaaagatggagcaagcttcaaacaaatcgggaagataatcagtgagcatgctgcaaagtatggctataatatggagcgattcatcggtcatggtgtaggaacggtattacactcggaacctcttatatatcttcatagtaactatgattatgaacttgaatatatgattgaaggtcaaacttttacgctcgaaccaattctcaccattggaacaacagagtttgtaacatggcctgacaaatggacaattgtgaccgcagatggtggtccggccgcacagtttgagcatacaattcttattaccaccactggtgcagaaattctcaccatatcatcatgaattatatcacaatgttacggaatttacattatgaaccatccatttctgttgtaaataaaagaaaatat

SEQ ID NO: 73795 - protein, 348 aa, Arabidopsis thaliana
  peptide (1)..(348): Ceres Seq. ID no. 4981296
GKMLQKISQSISLCNGDQFKPLIYLAGAPTNFISSPLSVSGKKKSSSLRIKRIQQLQSTLEDRINPPLVCGTVSPRLSVPDHILKPLYVESSKVPEISSELQIPDSIGIVKMKKACELAARVLDYAGTLVRPFVTTDEIDKAVHQMVIEFGAYPSPLGYGGFPKSVCTSVNECMFHGIPDSRPLQNGDIINIDVAVYLDGYHGDTSKTFLCGDVNGSLKQLVKVTEECLEKGISVCKDGASFKQIGKIISEHAAKYGYNMERFIGHGVGTVLHSEPLIYLHSNYDYELEYMIEGQTFTLEPILTIGTTEFVTWPDKWTIVTADGGPAAQFEHTILITTTGAEILTISS

SEQ ID NO: 73796 - protein, 346 aa, Arabidopsis thaliana
  peptide (1)..(346): Ceres Seq. ID no. 4981297
MLQKISQSISLCNGDQFKPLIYLAGAPTNFISSPLSVSGKKKSSSLRIKRIQQLQSTLEDRINPPLVCGTVSPRLSVPDHILKPLYVESSKVPEISSELQIPDSIGIVKMKKACELAARVLDYAGTLVRPFVTTDEIDKAVHQMVIEFGAYPSPLGYGGFPKSVCTSVNECMFHGIPDSRPLQNGDIINIDVAVYLDGYHGDTSKTFLCGDVNGSLKQLVKVTEECLEKGISVCKDGASFKQIGKIISEHAAKYGYNMERFIGHGVGTVLHSEPLIYLHSNYDYELEYMIEGQTFTLEPILTIGTTEFVTWPDKWTIVTADGGPAAQFEHTILITTTGAEILTISS

SEQ ID NO: 73797 - protein, 237 aa, Arabidopsis thaliana
  peptide (1)..(237): Ceres Seq. ID no. 4981298
MKKACELAARVLDYAGTLVRPFVTTDEIDKAVHQMVIEFGAYPSPLGYGGFPKSVCTSVNECMFHGIPDSRPLQNGDIINIDVAVYLDGYHGDTSKTFLCGDVNGSLKQLVKVTEECLEKGISVCKDGASFKQIGKIISEHAAKYGYNMERFIGHGVGTVLHSEPLIYLHSNYDYELEYMIEGQTFTLEPILTIGTTEFVTWPDKWTIVTADGGPAAQFEHTILITTTGAEILTISS

SEQ ID NO: 73798 - DNA, 1358 bp, Arabidopsis thaliana
  misc_feature (1)..(1358): Ceres Seq. ID no. 4981446
  misc_feature (1)..(1358): Ortholog of  Ceres SEQ ID NO 15171297 as cited in SEQ ID NO 51458
gtattcctcgtgagcactaacttctcactcattcttcttcttcagctgaatccaaatacccatttccatttttaaccgtggttggattgttttgagagttgaaggaagaagatgacgtctgacggagcaacgtcgacgtcagctgcagctgcagcagcagcgatggcgacgaggaggaaaccgtcgtggagagagagggagaacaatcggagaagagagcggcggagaagagctgttgcggcgaagatttatactggtcttagagctcaaggtaactacaatcttccaaaacattgtgacaacaatgaggttcttaaggctctttgttctgaagctggttgggttgttgaagaagacggaactacttatcgcaagggacacaagcctctacctggtgacatggctggatcatcttctcgagcaactccttactcttcccataaccaaagtcctctttcttccacttttgatagccccatcttatcttaccaagtcagtccttcctcttcttcattcccgagtccttctcgagttggtgatccacacaatatctccacaatcttccctttcctcaggaatggtggtattccttcatcgcttcctccacttagaatctcaaacagtgctcctgtcactccaccagtgtcatccccaacttctagaaaccccaaaccattgcctacttgggaatcttttaccaaacaatccatgtccatggctgctaaacagtcaatgacttctttgaactacccgttttatgcggtgtctgcacctgccagtcctactcatcatcgccagttccatgctccggctactatacctgaatgtgatgagtctgactcttccactgttgattctggtcattggataagctttcaaaagtttgcacaacaacagccattctctgcctctatggtgccaacctcgcctaccttcaatctcgtgaaacctgcaccacagcaattgtctccaaacacagcagcaatccaagagattggtcaaagctccgagtttaagtttgagaacagccaagttaagccatgggaaggggagaggatccatgatgtggctatggaggatctagagctcacgcttggaaatggtaaagctcatagttgagatgaagtatacatgaacctgttatgtcatgtcggaaggaaggattggagaatgagaattagtgtgttgttcattcagttcatggttttggttcttgttctagaatcgatattcattgtaccagtgagtttgtttcacaacgcattatttgtagatagaatgtttaagatgtatgtttctattatcattccttttaggtcttgaaaacattacaaatatattacatgattaagtggctt

SEQ ID NO: 73799 - protein, 335 aa, Arabidopsis thaliana; identical to SEQ ID NO: 21341
  peptide (1)..(335): Ceres Seq. ID no. 4981447

SEQ ID NO: 73800 - protein, 318 aa, Arabidopsis thaliana; identical to SEQ ID NO: 21342
  peptide (1)..(318): Ceres Seq. ID no. 4981448

SEQ ID NO: 73801 - protein, 239 aa, Arabidopsis thaliana; identical to SEQ ID NO: 21343
  peptide (1)..(239): Ceres Seq. ID no. 4981449

SEQ ID NO: 73802 - DNA, 1869 bp, Arabidopsis thaliana
  misc_feature (1)..(1869): Ceres Seq. ID no. 4981501
  misc_feature (1)..(1869): Ortholog of  Ceres SEQ ID NO 14302343 as cited in SEQ ID NO 67343
ataacaaatcacatttctctctcttctctgcttgaatccattacagagggattgtggagtggtttggtttgatttgatttcgatctgtgacaatggtggagactagtatcgacatggaggaaggaactctcgagatcggaatggagtatagaactgtctccggagttgctggacctttggtcatccttgacaaagtgaagggtccaaagtaccaggagattgttaatattcgcttaggagatggatcaacgagacgtggtcaggtcttggaggttgatggggagaaagctgttgtccaggtttttgaaggaacatctgggattgacaacaagtttaccaccgtgcaattcacaggagaggtgttactataaaagccttctcctcttttaagcttttggcagattagttaaaattttggttggaagttttctaaaaactaagaggatgcttggttacagtttttttcttgttctttttttgtcattatctgttattggtgtgtgttttcaggtactgaaaacgcctgtgtcattggacatgcttggccgcatatttaacggctcgggaaagccaattgataatggccctcctattttgccagaggcataccttgatatttctggaagttcaatcaaccccagtgaaagaacctaccctgaagagatgatacaaacggggatttctaccattgatgtcatgaactccattgctcgtggacagaagattcctcttttctctgctgctggtctacctcataatgagattgctgctcaaatttgtcgtcaggctggacttgtgaagcggttggaaaagactgagaacttaattcaggaggatcatggagaggacaattttgcaattgtttttgcagctatgggtgtaaacatggagacagctcagtttttcaagcgtgattttgaagaaaatggatcgatggaaagggttacccttttcctgaacttggccaatgatccaaccattgagagaattatcactcctcgaattgccctaacaaccgctgaatatttggcttatgaatgtggaaagcatgtgcttgttatattgacagacatgagttcttatgcagatgctcttcgtgaggtttctgctgctcgagaagaagttcctggaagacgtggatatccggggtatattatacagatcttgcaactatttatgaacgcgcgggacgtattgaaggaagaaagggttccattacccaaatccctatcctgactatgcccaatgacgatatcactcaccctactccggatcttactggttacattactgagggtcagatatatattgataggcaacttcacaacagacagatatacccacccattaacgtgcttccatcactttctcggctgatgaagagtgctattggtgaaggaatgactcgcaaagaccattctgatgtgtccaaccagctatacgcaaattatgcaatcggaaaagatgttcaagccatgaaagctgttgttggagaagaagctctgtcttccgaggatctgctgtatttagagtttctggataaatttgaaaggaagtttgtgatgcaaggcgcatacgatacaaggaacatcttccagtcgcttgacttggcatggacactgctccgtatcttcccacgtgagcttcttcaccgtattcctgccaaaacacttgatcaattctacagccgcgactccacaagctaaaccttttaaaacaagctctatgttgctccattcttatcttatttggaacttaaatcataccgagagaagacaaacaggattggttgcgtgaaaacaaaactcagagaattgtgaagttgggaattttcttttgtttttccatttgtataataaaggtttgtgt

SEQ ID NO: 73803 - protein, 263 aa, Arabidopsis thaliana
  peptide (1)..(263): Ceres Seq. ID no. 4981502
MLGYSFFLVLFLSLSVIGVCFQVLKTPVSLDMLGRIFNGSGKPIDNGPPILPEAYLDISGSSINPSERTYPEEMIQTGISTIDVMNSIARGQKIPLFSAAGLPHNEIAAQICRQAGLVKRLEKTENLIQEDHGEDNFAIVFAAMGVNMETAQFFKRDFEENGSMERVTLFLNLANDPTIERIITPRIALTTAEYLAYECGKHVLVILTDMSSYADALREVSAAREEVPGRRGYPGYIIQILQLFMNARDVLKEERVPLPKSLS

SEQ ID NO: 73804 - protein, 232 aa, Arabidopsis thaliana
  peptide (1)..(232): Ceres Seq. ID no. 4981503
MLGRIFNGSGKPIDNGPPILPEAYLDISGSSINPSERTYPEEMIQTGISTIDVMNSIARGQKIPLFSAAGLPHNEIAAQICRQAGLVKRLEKTENLIQEDHGEDNFAIVFAAMGVNMETAQFFKRDFEENGSMERVTLFLNLANDPTIERIITPRIALTTAEYLAYECGKHVLVILTDMSSYADALREVSAAREEVPGRRGYPGYIIQILQLFMNARDVLKEERVPLPKSLS

SEQ ID NO: 73805 - protein, 190 aa, Arabidopsis thaliana
  peptide (1)..(190): Ceres Seq. ID no. 4981504
MIQTGISTIDVMNSIARGQKIPLFSAAGLPHNEIAAQICRQAGLVKRLEKTENLIQEDHGEDNFAIVFAAMGVNMETAQFFKRDFEENGSMERVTLFLNLANDPTIERIITPRIALTTAEYLAYECGKHVLVILTDMSSYADALREVSAAREEVPGRRGYPGYIIQILQLFMNARDVLKEERVPLPKSLS

SEQ ID NO: 73806 - DNA, 1182 bp, Arabidopsis thaliana
  misc_feature (1)..(1182): Ceres Seq. ID no. 4981780
  misc_feature (1)..(1182): Ortholog of  Ceres SEQ ID NO 12484482 as cited in SEQ ID NO 53324
  misc_feature (1)..(1182): Ortholog of  Ceres SEQ ID NO 15176234 as cited in SEQ ID NO 54949
  misc_feature (1)..(1182): Ortholog of  Ceres SEQ ID NO 14314507 as cited in SEQ ID NO 59337
aacatacacaaaacactaaaagtagaagaaaaatggcgactcttaaggtttctgattctgttcctgctccttctgatgatgctgagcaattgagaaccgctttgatggggtacgaacgaggacttgatcatatcaatcttggctcacagaagtgctgaacagaggaaagtcatcaggcaagcataccacgaaacctacggcgaagaccttctcaagactcttgacaaggagctctctaacgatttcgagagagctatcttgttgtggactcttgaacccggtgagcgtgatgctttattggctaatgaagctacaaaaagatggacttcaagcaaccaagttcttatggaagttgcttgcacaaggacatcaacgcagctgcttcacgctaggcaagcttaccatgctcgctacaagaagtctcttgaagaggacgttgctcaccacactaccggtgacttcagaaagcttttggtttctcttgttacctcatacaggtacgaaggagatgaagtgaacatgacattggctaagcaagaagctaagctggtccatgagaaaatcaaggacaagcactacaatgatgaggatgttattagaatcttgtccacaagaagcaaagctcagatcaatgctacttttaaccgttaccaagatgatcatggcgaggaaattctcaagagtcttgaggaaggagatgatgatgacaagttccttgcacttttgaggtcaaccattcagtgcttgacaagaccagagctttactttgtcgatgttcttcgttcagcaatcaacaaaactggaactgatgaaggagcactcactagaattgtgaccacaagagctgagattgacttgaaggtcattggagaggagtaccagcgcaggaacagcattcctttggagaaagctattaccaaagacactcgtggagattacgagaagatgctcgtcgcacttctcggtgaagatgatgcttaatcaatcaatcctccacagagaaacataagctgctctacagcttctgttatctcttatctccctctctctctctttgatgagtttcaaatcgtttgattttgtttctacaaaaaccttgtttgtttctgttgtgtgttttgagttcctaaataatgcaaaagagagagacagagagaaccagtgtggtctcttaagttatat

SEQ ID NO: 73807 - protein, 211 aa, Arabidopsis thaliana; identical to SEQ ID NO: 24550
  peptide (1)..(211): Ceres Seq. ID no. 4981781

SEQ ID NO: 73808 - protein, 153 aa, Arabidopsis thaliana; identical to SEQ ID NO: 24551
  peptide (1)..(153): Ceres Seq. ID no. 4981782

SEQ ID NO: 73809 - DNA, 872 bp, Arabidopsis thaliana
  misc_feature (1)..(872): Ceres Seq. ID no. 4981826
  misc_feature (1)..(872): Ortholog of  Ceres SEQ ID NO 13660094 as cited in SEQ ID NO 60820
aaataatcggaaacagcgtcttctccataaacccagaaaatcgcagagagctttctcttgtctttgtacagatctctcccatcatcgttcgtgattcgatgccttctcgtagaagaactctcctcaaagtcatcatcctcggtgatagcggggttgggaagacttctttaatgaatcaatatgttaataagaagttcagcaaccagtataaggcaactattggggctgatttcttgactaaggaagttcaatttgaagaccggcttttcactttacagatctgggacacagctggtcaagaaaggtttcagagtcttggtgttgcgttttatcgtggtgctgattgctgtgttcttgtatatgatgtcaactccgcaaaatcattcgaggatctcaacaactggagggaagagtttctgatccaggcaagtccttcggatccagagaactttccctttgttgttatcggtaataagatcgatgtggatggtggaagcagccgggtggtatcagagaagaaggctcgagcttggtgtgcttcgaaaggaaacattccatactatgaaacctcagctaaagtaggcaccaatgtagaagacgcgttcctgtgcataactacgaacgcaatgaagagtggagaagaggaagaaatgtacctaccagacacgatcgatgtcggaaccagcaatccacagaggtcaacaggatgtgaatgctgaaagtgttcatttgacctatgctctctcatcagttatcccactctgaggttttttaccatattgtaaatctgttgttctgtggtacattaatattttaaaaatttagaaccctaataaataaataattaaaaagccgaattgggttggtcggtg

SEQ ID NO: 73810 - protein, 238 aa, Arabidopsis thaliana; identical to SEQ ID NO: 40275
  peptide (1)..(238): Ceres Seq. ID no. 4981827

SEQ ID NO: 73811 - protein, 206 aa, Arabidopsis thaliana; identical to SEQ ID NO: 40276
  peptide (1)..(206): Ceres Seq. ID no. 4981828

SEQ ID NO: 73812 - protein, 182 aa, Arabidopsis thaliana; identical to SEQ ID NO: 40277
  peptide (1)..(182): Ceres Seq. ID no. 4981829

SEQ ID NO: 73813 - DNA, 819 bp, Arabidopsis thaliana
  misc_feature (1)..(819): Ceres Seq. ID no. 4982024
  misc_feature (1)..(819): Ortholog of  Ceres SEQ ID NO 13594363 as cited in SEQ ID NO 60250
  misc_feature (1)..(819): Ortholog of  Ceres SEQ ID NO 15225478 as cited in SEQ ID NO 63805
  misc_feature (1)..(819): Ortholog of  Ceres SEQ ID NO 13596420 as cited in SEQ ID NO 68738
  misc_feature (1)..(819): Ortholog of  Ceres SEQ ID NO 14309260 as cited in SEQ ID NO 0
cattagagaaacgtgatcgtcttttcatactaaaactcaccggcgacggcgaacaccgtctaaacccaaccttactcgactctctccgctccaccatcaaccaaatccgatcagatccatcattttcacaatcagtactcatcacaacatcagatggtaaattcttctccaacggctacgatctcgctttagccgagtcaaatccttctctctctgttgtaatggacgcaaaacttagatccttagtcgccgatctaatctctcttcctatgccaacaatcgccgccgtcacaggtcacgcttccgccgcgggatgtattttagcgatgagtcatgattatgtattgatgcgtcgtgatagaggttttttgtatatgagtgaattggatattgagttgatagttccggcgtggtttatggctgttattaggggtaagattggttctccggcggccagaagggatgtgatgttgacggcggcgaaagtgacggcggatgtgggtgttaagatggggattgttgattcggcgtatggtagtgcggcggagacggttgaagccgccattaagttaggtgaggagattgttcagagaggtggtgatggacacgtgtatggtaagatgagagagagtcttttaagagaggttcttatccatacgattggtgaatatgagagtggttcaagtgtggtgcgtagcactggatctaaactttagaacatgtttgtacttcttgggctacttgtcagttcttttcaagcaattgttctttatacattgatgatgtatcttttcaccaagtgaatttatagtctttttt

SEQ ID NO: 73814 - protein, 237 aa, Arabidopsis thaliana
  peptide (1)..(237): Ceres Seq. ID no. 4982025
LEKRDRLFILKLTGDGEHRLNPTLLDSLRSTINQIRSDPSFSQSVLITTSDGKFFSNGYDLALAESNPSLSVVMDAKLRSLVADLISLPMPTIAAVTGHASAAGCILAMSHDYVLMRRDRGFLYMSELDIELIVPAWFMAVIRGKIGSPAARRDVMLTAAKVTADVGVKMGIVDSAYGSAAETVEAAIKLGEEIVQRGGDGHVYGKMRESLLREVLIHTIGEYESGSSVVRSTGSKL

SEQ ID NO: 73815 - protein, 164 aa, Arabidopsis thaliana
  peptide (1)..(164): Ceres Seq. ID no. 4982026
MDAKLRSLVADLISLPMPTIAAVTGHASAAGCILAMSHDYVLMRRDRGFLYMSELDIELIVPAWFMAVIRGKIGSPAARRDVMLTAAKVTADVGVKMGIVDSAYGSAAETVEAAIKLGEEIVQRGGDGHVYGKMRESLLREVLIHTIGEYESGSSVVRSTGSKL

SEQ ID NO: 73816 - protein, 148 aa, Arabidopsis thaliana
  peptide (1)..(148): Ceres Seq. ID no. 4982027
MPTIAAVTGHASAAGCILAMSHDYVLMRRDRGFLYMSELDIELIVPAWFMAVIRGKIGSPAARRDVMLTAAKVTADVGVKMGIVDSAYGSAAETVEAAIKLGEEIVQRGGDGHVYGKMRESLLREVLIHTIGEYESGSSVVRSTGSKL

SEQ ID NO: 73817 - DNA, 1251 bp, Arabidopsis thaliana
  misc_feature (1)..(1251): Ceres Seq. ID no. 4982269
  misc_feature (1)..(1251): Ortholog of  Ceres SEQ ID NO 12614739 as cited in SEQ ID NO 68587
tttcgatgccttacgagaaagagctcgctgctgctaagaaagccgtctctctagctgctcgtctcagccaggaagtgcagaagtctctgttgcaatcagatgtccggtcaaaatctgataaaagtccggttacagctgctgattatggatcccaagctgtgatcagtcatgtactagagagagaacttcaccctgaaccactatacttggttgctgaagagaatgcagaagatctgcacaagaatggcgccgaggaatttctagaaagcattactaagcttgtgaacaatgctctagcttctgatgattcctacgccaactcttctctttcaatggatgatgtaaggaaggcgatagaccacgggaggtcacaaggcggttccagtggccgccattggattcttgatcctgttgatggaaccagagggtttgtaaaaggagaggaatacgctgtggcattagctttgcttgtggaaggcaaagtagtgctcggtgtcatggcttgcccgaaacttgagaatcacaagtcttcttcttcaggatgccttttctttgctacagtgggagaaggagcttatgtgcaatcgcttgaaggcgactctcatcctccacagaaggtattataattatcagagcatttgatgtcccttaggcttgttctctcgttttgtgttcttaaaacagagtggagaaagtgtgctaataggtgcaagtgagcaacattgagaatcctgaagaagcaacctttgtggaatcatcccacaaaccaatccccatccatagctccattgccaataaacttgggatcaaagctccacctctaagaatccatagtcaagtgaagtacgcagctctggctcgaggagatgcagagatatacttgcgtttcactcttaaagggtaccgagagttcatatggaaccatgctgctggtgcaatcatcacaacagaagctggaggtgtagtttgcgatgctgacgggaatcctctggacttctcgagaggaaatcatcttgaacacaaaacagggatcgtggtcagcaccaagaaccttatgccacggctcttgaaagccattagagaatccatagaagaggagatgcttctctctgagacacaactgaaactgtaatatatgtactgcctgaaatagctatctggtgtatatcacacatctgccgttgtgtactgtcagacactgaagaaattgtatgcttttgaatattggtctcgatttcaataaaagatttc

SEQ ID NO: 73818 - protein, 207 aa, Arabidopsis thaliana
  peptide (1)..(207): Ceres Seq. ID no. 4982270
SMPYEKELAAAKKAVSLAARLSQEVQKSLLQSDVRSKSDKSPVTAADYGSQAVISHVLERELHPEPLYLVAEENAEDLHKNGAEEFLESITKLVNNALASDDSYANSSLSMDDVRKAIDHGRSQGGSSGRHWILDPVDGTRGFVKGEEYAVALALLVEGKVVLGVMACPKLENHKSSSSGCLFFATVGEGAYVQSLEGDSHPPQKVL

SEQ ID NO: 73819 - protein, 206 aa, Arabidopsis thaliana; identical to SEQ ID NO: 40991
  peptide (1)..(206): Ceres Seq. ID no. 4982271

SEQ ID NO: 73820 - DNA, 1176 bp, Arabidopsis thaliana
  misc_feature (1)..(1176): Ceres Seq. ID no. 4982417
  misc_feature (1)..(1176): Ortholog of  Ceres SEQ ID NO 14310920 as cited in SEQ ID NO 54622
aacacacctacacaaaaatcaatcacagtctctgtctcactcgccggagtttcggtcactgcgccatctccggggtcgagttcgtcgtacttcatcgaactatgaactctcatgatatcgatgatcagttagaagcagatgtatacagtaacttgccttctcgaaatgattcttcaacagggaggagaaatcgaaactcgtgtagatcgaaacactcagagactgagcaacgaagaagaagcaaaatcaatgaaagatttcagagtttaatggatattatacctcagaatcagaatgatcagaaacgagataaagcttctttcttgttggaggttatagagtatattcactttcttcaagaaaaagttcacatgtatgaagattctcaccaaatgtggtatcaatccccaaccaaattgattccttggagaaatagtcatgggtctgttgcggaggaaaatgaccatcctcaaatcgttaaaagcttttcaagtaatgataaagttgctgcttcttcgggttttctcttggatacgtacaattcagtaaatcctgatattgactcagcagttagcaccaagattcctgaacacagtcctgtttcagcagtttcatcgtatctacgtaccgagccttcgctgcagtttgttcagcatgacttttggcaaccaaaaacaagttgtggaacaattaactgttttacaaatgaattgttaacatctgacgaaaaaacatcagccagcttgtccactgtctgctcacaaagggtacttaacactctaactgaagcacttaagtcatcgggtgttaacatgtcagagaccatgatatctgtgcagttaagccttcggaaaagagaagatcgcgagtattctgttgctgcgtttgcttctgaggataatggtaatagcatcgctgatgaagaaggggactctcctactgaaactagaagcttctgcaatgatattgatcattcccagaagagaataagacgataagatctggttttctattttctatgttatgacaactgtttgataattttgttactttcggtgagtcaggatcagtaggtgtagatactacttttatcgtgctgcaactattttaaatgatatagtaaaaactaagtagaatgatgtaacaagtttcgcaaatctataacaagagtttgct

SEQ ID NO: 73821 - protein, 331 aa, Arabidopsis thaliana
  peptide (1)..(331): Ceres Seq. ID no. 4982418
HTYTKINHSLCLTRRSFGHCAISGVEFVVLHRTMNSHDIDDQLEADVYSNLPSRNDSSTGRRNRNSCRSKHSETEQRRRSKINERFQSLMDIIPQNQNDQKRDKASFLLEVIEYIHFLQEKVHMYEDSHQMWYQSPTKLIPWRNSHGSVAEENDHPQIVKSFSSNDKVAASSGFLLDTYNSVNPDIDSAVSTKIPEHSPVSAVSSYLRTEPSLQFVQHDFWQPKTSCGTINCFTNELLTSDEKTSASLSTVCSQRVLNTLTEALKSSGVNMSETMISVQLSLRKREDREYSVAAFASEDNGNSIADEEGDSPTETRSFCNDIDHSQKRIRR

SEQ ID NO: 73822 - protein, 298 aa, Arabidopsis thaliana
  peptide (1)..(298): Ceres Seq. ID no. 4982419
MNSHDIDDQLEADVYSNLPSRNDSSTGRRNRNSCRSKHSETEQRRRSKINERFQSLMDIIPQNQNDQKRDKASFLLEVIEYIHFLQEKVHMYEDSHQMWYQSPTKLIPWRNSHGSVAEENDHPQIVKSFSSNDKVAASSGFLLDTYNSVNPDIDSAVSTKIPEHSPVSAVSSYLRTEPSLQFVQHDFWQPKTSCGTINCFTNELLTSDEKTSASLSTVCSQRVLNTLTEALKSSGVNMSETMISVQLSLRKREDREYSVAAFASEDNGNSIADEEGDSPTETRSFCNDIDHSQKRIRR

SEQ ID NO: 73823 - protein, 242 aa, Arabidopsis thaliana
  peptide (1)..(242): Ceres Seq. ID no. 4982420
MDIIPQNQNDQKRDKASFLLEVIEYIHFLQEKVHMYEDSHQMWYQSPTKLIPWRNSHGSVAEENDHPQIVKSFSSNDKVAASSGFLLDTYNSVNPDIDSAVSTKIPEHSPVSAVSSYLRTEPSLQFVQHDFWQPKTSCGTINCFTNELLTSDEKTSASLSTVCSQRVLNTLTEALKSSGVNMSETMISVQLSLRKREDREYSVAAFASEDNGNSIADEEGDSPTETRSFCNDIDHSQKRIRR

SEQ ID NO: 73824 - DNA, 1786 bp, Arabidopsis thaliana
  misc_feature (1)..(1786): Ceres Seq. ID no. 4982425
  misc_feature (1)..(1786): Ortholog of  Ceres SEQ ID NO 14310419 as cited in SEQ ID NO 55050
  misc_feature (1)..(1786): Ortholog of  Ceres SEQ ID NO 13657789 as cited in SEQ ID NO 66154
tctctattctcttactaacgttatttcttcaatctcattgatcaaaaaaaaccaaaaccctaatctgcaaaaatctcaatttcctccaaaagtttcagtttttaaaaatgggttttcttcttttgtaacgaaaaaatgtgtcaaactttgaattgaccatttttttttataaggattcgatgaagaaattgagaagctattactcaaatgtgagacatcatcagaatcaccatcatcatcaccatcatcatagcaacattgtttcttcagagaggaaatggatatttttccctctattgattggttcaatcttcgctttgttcttactcttcctcacaacaaccctaacttcaccaaccggaggagtccgatttctcccttttacccgacccgttttgttaaccggatctggttcatcagctttcgttgaatccaaaatcaaacctcaacaaatctcatcactcccgtcgccaccgcgttttgcttacttgatttctggatccgccggcgacgggaaatctctccggcgaactcttttggctctttaccatccgaataatcggtatgttgttcatttagatagagaatcttcgcgtgaggagagagaggagcttcatggatatatcaaaaactcgtctttgtttcgaaggtttatgaatgttcatatgattgagaaagctaatcttgtcacgtatcgtggacctactatggttgccaatacacttcacgccgctgcgattttgcttagagaaggagctgattgggattggtttatcaatcttagctcttctgactatcctttagtgactcaagatgatttgttgcatatcttttcgcatttgccgcgggatttgaacttcattgatcatactagtaacattggatggaaagcatcacaaagagcaaaaccggtgattatagatcctggactgtatttgaacaagaaatctgatgttttttgggttacgcaaagacggagcatcccaacagcattcaagcttttcacaggctctgcttggatggcgttatctcggccattcgtcgactattgtatatggggttgggataatctacctcgtacggtcttaatgtattactcgaattttctctcttctccagaaggatattttcacactgttctctgcaacgctgaggaattcagaaacacaacggtaaatagcgacctgcacttcatatcgtgggacaatccgcctaagcagcatccacaccatctcactcttacagacatgaccaaaatggtaaatagcaatgccccgtttgctagaaagttcagaagagaagatcctgtccttgacaagatcgatgatgagctccttaacagaggtcctgggatgataacacctggcggttggtgcattggaagccatgagaatgggagtgacccttgtgctgttattggtgatactgatgttatcaggcctggtccaggcgctagacggctcgagaatctggtaacttcgttattatccactgagaatttccgatcaaaacagtgtaagtgatctgatatatctagagaacgacatcacatagagatggaatgtagcagccttgattattggggttagatgtgatttaggatctgatagaaatccctcttttagtcaagaatataagtgaagaaatacagaacaattaggctatatgatgtgggaagtatttgtcttgttgctccacacaacatgccttaaggtcttgttgtagttctcagattggaattttgagattttgtactctgctgttttaaagttagtttcttcctttc

SEQ ID NO: 73825 - protein, 447 aa, Arabidopsis thaliana
  peptide (1)..(447): Ceres Seq. ID no. 4982426
MKKLRSYYSNVRHHQNHHHHHHHHSNIVSSERKWIFFPLLIGSIFALFLLFLTTTLTSPTGGVRFLPFTRPVLLTGSGSSAFVESKIKPQQISSLPSPPRFAYLISGSAGDGKSLRRTLLALYHPNNRYVVHLDRESSREEREELHGYIKNSSLFRRFMNVHMIEKANLVTYRGPTMVANTLHAAAILLREGADWDWFINLSSSDYPLVTQDDLLHIFSHLPRDLNFIDHTSNIGWKASQRAKPVIIDPGLYLNKKSDVFWVTQRRSIPTAFKLFTGSAWMALSRPFVDYCIWGWDNLPRTVLMYYSNFLSSPEGYFHTVLCNAEEFRNTTVNSDLHFISWDNPPKQHPHHLTLTDMTKMVNSNAPFARKFRREDPVLDKIDDELLNRGPGMITPGGWCIGSHENGSDPCAVIGDTDVIRPGPGARRLENLVTSLLSTENFRSKQCK

SEQ ID NO: 73826 - protein, 289 aa, Arabidopsis thaliana
  peptide (1)..(289): Ceres Seq. ID no. 4982427
MNVHMIEKANLVTYRGPTMVANTLHAAAILLREGADWDWFINLSSSDYPLVTQDDLLHIFSHLPRDLNFIDHTSNIGWKASQRAKPVIIDPGLYLNKKSDVFWVTQRRSIPTAFKLFTGSAWMALSRPFVDYCIWGWDNLPRTVLMYYSNFLSSPEGYFHTVLCNAEEFRNTTVNSDLHFISWDNPPKQHPHHLTLTDMTKMVNSNAPFARKFRREDPVLDKIDDELLNRGPGMITPGGWCIGSHENGSDPCAVIGDTDVIRPGPGARRLENLVTSLLSTENFRSKQCK

SEQ ID NO: 73827 - protein, 285 aa, Arabidopsis thaliana
  peptide (1)..(285): Ceres Seq. ID no. 4982428
MIEKANLVTYRGPTMVANTLHAAAILLREGADWDWFINLSSSDYPLVTQDDLLHIFSHLPRDLNFIDHTSNIGWKASQRAKPVIIDPGLYLNKKSDVFWVTQRRSIPTAFKLFTGSAWMALSRPFVDYCIWGWDNLPRTVLMYYSNFLSSPEGYFHTVLCNAEEFRNTTVNSDLHFISWDNPPKQHPHHLTLTDMTKMVNSNAPFARKFRREDPVLDKIDDELLNRGPGMITPGGWCIGSHENGSDPCAVIGDTDVIRPGPGARRLENLVTSLLSTENFRSKQCK

SEQ ID NO: 73828 - DNA, 1015 bp, Arabidopsis thaliana
  misc_feature (1)..(1015): Ceres Seq. ID no. 4982473
  misc_feature (1)..(1015): Ortholog of  Ceres SEQ ID NO 14304830 as cited in SEQ ID NO 54884
  misc_feature (1)..(1015): Ortholog of  Ceres SEQ ID NO 14316297 as cited in SEQ ID NO 57465
  misc_feature (1)..(1015): Ortholog of  Ceres SEQ ID NO 12784351 as cited in SEQ ID NO 60968
  misc_feature (1)..(1015): Ortholog of  Ceres SEQ ID NO 13584213 as cited in SEQ ID NO 63690
acttcagcaaaaccactacacctatcttatctctcagattttctcaagaagattgtgtggaagatgatgagacggaagatttttctctttggtgattccatcactgaagaatcctttagtgacggtggctggggtgcttctctcgccgatcttctccgccgcaaggctgatatggtgctacgaggatacagtggatataacacgaggtgggcactgaaagtggtggagagagtttttccggtggcagaagaagacggcggagattctccggcagctgtgactgttttctttggagcgaacgacgcgtgtcttccggagagatgctcggggtttcagcatgtgccacttcacgagtacaagcagaatcttcgctctattgtttcgtttctcaagaatcgttggccacaaacggccattattcttataactccgcctccaatagacgaagaggcccgcctcagatatccttatatcgaaaacacaacggggttgccggaaagaacgaatgaagtagccggactatacgcaaaagcatgtatagcagtagctgaggaatgtcaaatttcggtcactgatctttggtccaaaatgcagcaaattccaaattggcaaacagaatgtctatgggacgggttacatttgagtcgggtcggtaacaaagtagtgtttgaagaagtagcaaagaagcttaaagaagaaggcattggagctgaggacttagctgtggatcttccccttatagaagatgttgaccctaaggatcctctcaaatcctttgatgagttttgatgctttatattactaccatgcagtttggttcttctatctttgattacttcttaatttcgatattattttagggaatgtattattttagggaatgtgacattattaggcactttgtgagaatctttttacgtttgaggcacttgtgagagagagggcactttgccatctttttttagaggagattgaaccaatttgcccctgaagtgatgaaaacacaataattttt

SEQ ID NO: 73829 - protein, 262 aa, Arabidopsis thaliana; identical to SEQ ID NO: 28668
  peptide (1)..(262): Ceres Seq. ID no. 4982474

SEQ ID NO: 73830 - protein, 241 aa, Arabidopsis thaliana; identical to SEQ ID NO: 28669
  peptide (1)..(241): Ceres Seq. ID no. 4982475

SEQ ID NO: 73831 - protein, 240 aa, Arabidopsis thaliana; identical to SEQ ID NO: 28670
  peptide (1)..(240): Ceres Seq. ID no. 4982476

SEQ ID NO: 73832 - DNA, 1661 bp, Arabidopsis thaliana
  misc_feature (1)..(1661): Ceres Seq. ID no. 4982518
  misc_feature (1)..(1661): Ortholog of  Ceres SEQ ID NO 13593889 as cited in SEQ ID NO 53305
  misc_feature (1)..(1661): Ortholog of  Ceres SEQ ID NO 13581959 as cited in SEQ ID NO 56156
  misc_feature (1)..(1661): Ortholog of  Ceres SEQ ID NO 15171809 as cited in SEQ ID NO 57329
atcaagaagaagtctctgctagttccaaaacagaacaagtgaatccctcaagtttcttattacaaaacccaaaaaccaaagtgaaccagtgttgttgtttgtactcacagatccattctccactgattcatttcttgctctgcttcttctctcttagttttgttaagaatcttctcttatccattgtgttttttctattttataaatacatatataattttagttgggggagagcttgcctggtgtcgccttcttctctctctaagacttgtgcttaatttacggacatgtgaagatacttcgcttttgcctcatcgaagggcatgttagctatttacttatctcttctcttctcttctttgtcttgtgagctctcaaatcttcatagatacaaatcaagaaagtgatcaaacaaaaaaaggacaagtctttttggtatttcagatcgagaaaaaatgtggttgcaaggtttgaagtaatcttgcaatggattctttgactggatttagaatggaacccaaatggcaaattgatcctcagcttctctttgttggtccaaagattggtgaaggagctcatgctaaagtctatgagggaaaatacaagaatcagacagttgctataaagatagttcacagaggagaaacaccagaagagattgctaaaagagattcaagattccttagagaagtagaaatgctctcacgtgttcaacacaagaatttggtcaagttcattggtgcttgcaaggagcctgtaatggtgatagttacagaacttcttcaaggcggtacattgcgtaaatatctattaaacttgagacccgcatgtttggagactcgtgtggctatcggttttgcgcttgatattgctcgtggtatggaatgcttgcattcccatgggatcattcaccgtgatctcaaacccgagaacttgcttttaactgcagaccataaaacagtaaaactagcagattttggattagcaagagaagagtcactgactgagatgatgacggctgagacaggaacataccgatggatggcacctgagttgtacagcacggtaactcttcgattgggagagaagaagcactacaatcataaagtcgacgcctatagctttgcaatagttctttgggagcttttacacaataaattgccttttgagggaatgtcaaatctccaagcagcatatgcagcagccttcaaaaatgtgagaccaagcgcggagagcttaccggaggagttgggcgacattgtaacatcatgttggaatgaggatccgaatgctcggcccaacttcacgcatatcattgagttacttcttaactatctctctaaagttggatctccgatatccgctattccacaacggattcttgcttcgaagaacacgctattgccaccggattctcctggaactagctctttgatggctaagcttgatgaatgtggggaaactccaaaggccaaaagtgaagacaaacgaaaaggtttgtttttctgcttcaatcaatgttattaaccttgaaatcacagagtggttttaggaccagagatttggtagacatcactcaaattattcatgtaataatatcctccctaccatatgaatttagcaagaagttcatttatataaataaatagttatgtaattgt

SEQ ID NO: 73833 - protein, 346 aa, Arabidopsis thaliana; identical to SEQ ID NO: 37299
  peptide (1)..(346): Ceres Seq. ID no. 4982519

SEQ ID NO: 73834 - protein, 338 aa, Arabidopsis thaliana; identical to SEQ ID NO: 37300
  peptide (1)..(338): Ceres Seq. ID no. 4982520

SEQ ID NO: 73835 - protein, 276 aa, Arabidopsis thaliana; identical to SEQ ID NO: 37301
  peptide (1)..(276): Ceres Seq. ID no. 4982521

SEQ ID NO: 73836 - DNA, 3057 bp, Arabidopsis thaliana
  misc_feature (1)..(3057): Ceres Seq. ID no. 4982775
  misc_feature (1)..(3057): Ortholog of  Ceres SEQ ID NO 13596392 as cited in SEQ ID NO 62136
  misc_feature (1)..(3057): Ortholog of  Ceres SEQ ID NO 13654360 as cited in SEQ ID NO 67980
  misc_feature (1)..(3057): Ortholog of  Ceres SEQ ID NO 13596394 as cited in SEQ ID NO 68561
atggatgaagattcgtctatggtggctgacaacgatcaggatcgtgagtttcagagccttgatggaggccaatctccttcgcctatggaaagagaaacgcctcagcagatgaacgaccaatcacctcctcctgaaggcggatcggtgcctacgccgccgccttcggatcctaatccggcaacttctcagcagcaagcggctgcggttgttggacaagagcagcagccggcgctagttgttggtccgaggtgtgcacctacgtattcggtggtggatgctatgatggataaaaaagaggatgggcctggccctaggtgtggtcacaccttgacggctgtgcctgctgttggtgatgaaggaacgcctggttatattggtcctcgtcttgtattgtttggtggtgcgacggctcttgagggaaattctggtggcaccggaactcctacttcagctggaagtgccggcattcggctagctggggcaactgctgatgttcattgttatgatgtactttctaataagtggactaggcttacaccttttggagaaccaccaaccccgagggccgcacatgttgcaactgcagtcgggaccatggtagttattcagggtggaattggtcctgctggtttatcggctgaagaccttcatgttcttgatctcactcaacaacggccacgatggcacagggttgttgttcagggtcctggaccaggacctcgttatggacatgtcatggcactcgtggggcaaaggtatctcatggcaattggtggaaatgatggaaaacgtccacttgctgatgtatgggccttggatactgccgccaagccttatgaatggcgtaagttggaaccagaaggggaaggtccacctccctgcatgtatgcaactgcaagtgcgcgctccgatggtcttcttctcctctgtggtggaagggatgcaaacagtgtgcctctggccagtgcatatggacttgcgaagcacagagatggacgttgggaatgggccatagcccctggtgtctcaccatcttccagatatcagcatgcagcagtctttgtaaatgcaagacttcatgtgtccggtggggcacttggtggtggacgcatggttgaagactcatccagtgttgcagtattggatactgcagcaggtgtatggtgtgatacaaaatcagttgttactagtcctagaactggtaggtatagtgccgatgcagctggtggcgatgcttcggttgagctgactaggcggtgtaggcatgctgctgctgcagtcggtgatttgatatttatctacggtggtttacgtggaggggtgttactcgatgacttattggttgctgaagatcttgctgctgcggaaacaacatatgctgcttctcatgctgctgcagctgcggcaacaaattctccaccaggtcgattacctggaaggtatggtttttcagatgaaaggaacagggagttatctgaatcagctgctgatggcgctgtggtgctgggaagccctgttgcaccccctgtaaatggtgatatgcatactgatattagccctgaaaatgcattacttccaggaactcggagaacgaataagggtgtggagtatcttgttgaagcatcagcagcggaagctgaggcgatcagtgcgacgttggctgctgccaaggcaagacaagtcaatggtgaagttgaactccctgatagggattgtggtgcagaggctacacccagtgggaaacctacattttcgctaatcaagccagattctatgggctcaatgagtgttacacctgcagggattcgtcttcatcatagagctgtggtggttgctgctgaaactggtggcgccttaggtggaatggttagacagttatccattgatcaatttgaaaatgagggacggcgtgtcagttatgggacaccagaaagtgcaacagcagcaaggaaactattagatcgacaaatgtcaatcaacagtgttccaaagaaggttatagctcatcttttgaagcctcgtggttggaagcctcctgttcgacggcagtttttcctagattgcaatgaaatagctgatctttgtgatagtgcagaacgtatcttcgcaagtgaaccgactgtattacagcttaaagctcctatcaaaatatttggtgatctgcatgggcagtttggggatcttatgcgcctttttgatgaatatggttcaccatctacagctggagacatatcatatatcgactacctcttcttaggggactatgttgatcggggtcaacacagtctagaaacaatctcccttctacttgcactaaaggttgagtaccagcataatgtacacttaattcggggaaaccatgaagctgcagatatcaatgccctttttggcttccggatagagtgtattgagcgaatgggtgaacgtgatggaatctgggtgtggcaccgaataaatcgtttattcaattggctacctcttgctgcatcgattgagaagaaaattatctgtatgcatgggggtattggtcgttctataaatcatgtggagcagatagaaaatattcaacgtccaattacaatggaagctggctccattgttcttatggatttattatggtcggatccaactgaaaatgacagtgtcgaaggtttaaggcccaatgctagaggccctggattggttacttttgggcctgaccgtgtcatggagttctgcaacaacaacgatcttcagttgattgtacgagcacacgaatgcgtaatggatggatttgagcgttttgctcaggggcatttgataacgctcttttctgctacaaactattgtggtactgcaaacaatgctggggctatcttggtactagggagagatcttgtagtggtacctaagctcattcatccgttacctccagcactttcatcgcctgaaacttcaccagaaagacatatagaagacacatggatgcaggagctgaacgcaaataggccagcgacgccaacccgaggacgcccacaaaattcaaatgaccgaggaggttctctggcttggatgtga

SEQ ID NO: 73837 - protein, 1018 aa, Arabidopsis thaliana
  peptide (1)..(1018): Ceres Seq. ID no. 4982776
MDEDSSMVADNDQDREFQSLDGGQSPSPMERETPQQMNDQSPPPEGGSVPTPPPSDPNPATSQQQAAAVVGQEQQPALVVGPRCAPTYSVVDAMMDKKEDGPGPRCGHTLTAVPAVGDEGTPGYIGPRLVLFGGATALEGNSGGTGTPTSAGSAGIRLAGATADVHCYDVLSNKWTRLTPFGEPPTPRAAHVATAVGTMVVIQGGIGPAGLSAEDLHVLDLTQQRPRWHRVVVQGPGPGPRYGHVMALVGQRYLMAIGGNDGKRPLADVWALDTAAKPYEWRKLEPEGEGPPPCMYATASARSDGLLLLCGGRDANSVPLASAYGLAKHRDGRWEWAIAPGVSPSSRYQHAAVFVNARLHVSGGALGGGRMVEDSSSVAVLDTAAGVWCDTKSVVTSPRTGRYSADAAGGDASVELTRRCRHAAAAVGDLIFIYGGLRGGVLLDDLLVAEDLAAAETTYAASHAAAAAATNSPPGRLPGRYGFSDERNRELSESAADGAVVLGSPVAPPVNGDMHTDISPENALLPGTRRTNKGVEYLVEASAAEAEAISATLAAAKARQVNGEVELPDRDCGAEATPSGKPTFSLIKPDSMGSMSVTPAGIRLHHRAVVVAAETGGALGGMVRQLSIDQFENEGRRVSYGTPESATAARKLLDRQMSINSVPKKVIAHLLKPRGWKPPVRRQFFLDCNEIADLCDSAERIFASEPTVLQLKAPIKIFGDLHGQFGDLMRLFDEYGSPSTAGDISYIDYLFLGDYVDRGQHSLETISLLLALKVEYQHNVHLIRGNHEAADINALFGFRIECIERMGERDGIWVWHRINRLFNWLPLAASIEKKIICMHGGIGRSINHVEQIENIQRPITMEAGSIVLMDLLWSDPTENDSVEGLRPNARGPGLVTFGPDRVMEFCNNNDLQLIVRAHECVMDGFERFAQGHLITLFSATNYCGTANNAGAILVLGRDLVVVPKLIHPLPPALSSPETSPERHIEDTWMQELNANRPATPTRGRPQNSNDRGGSLAWM

SEQ ID NO: 73838 - protein, 1012 aa, Arabidopsis thaliana
  peptide (1)..(1012): Ceres Seq. ID no. 4982777
MVADNDQDREFQSLDGGQSPSPMERETPQQMNDQSPPPEGGSVPTPPPSDPNPATSQQQAAAVVGQEQQPALVVGPRCAPTYSVVDAMMDKKEDGPGPRCGHTLTAVPAVGDEGTPGYIGPRLVLFGGATALEGNSGGTGTPTSAGSAGIRLAGATADVHCYDVLSNKWTRLTPFGEPPTPRAAHVATAVGTMVVIQGGIGPAGLSAEDLHVLDLTQQRPRWHRVVVQGPGPGPRYGHVMALVGQRYLMAIGGNDGKRPLADVWALDTAAKPYEWRKLEPEGEGPPPCMYATASARSDGLLLLCGGRDANSVPLASAYGLAKHRDGRWEWAIAPGVSPSSRYQHAAVFVNARLHVSGGALGGGRMVEDSSSVAVLDTAAGVWCDTKSVVTSPRTGRYSADAAGGDASVELTRRCRHAAAAVGDLIFIYGGLRGGVLLDDLLVAEDLAAAETTYAASHAAAAAATNSPPGRLPGRYGFSDERNRELSESAADGAVVLGSPVAPPVNGDMHTDISPENALLPGTRRTNKGVEYLVEASAAEAEAISATLAAAKARQVNGEVELPDRDCGAEATPSGKPTFSLIKPDSMGSMSVTPAGIRLHHRAVVVAAETGGALGGMVRQLSIDQFENEGRRVSYGTPESATAARKLLDRQMSINSVPKKVIAHLLKPRGWKPPVRRQFFLDCNEIADLCDSAERIFASEPTVLQLKAPIKIFGDLHGQFGDLMRLFDEYGSPSTAGDISYIDYLFLGDYVDRGQHSLETISLLLALKVEYQHNVHLIRGNHEAADINALFGFRIECIERMGERDGIWVWHRINRLFNWLPLAASIEKKIICMHGGIGRSINHVEQIENIQRPITMEAGSIVLMDLLWSDPTENDSVEGLRPNARGPGLVTFGPDRVMEFCNNNDLQLIVRAHECVMDGFERFAQGHLITLFSATNYCGTANNAGAILVLGRDLVVVPKLIHPLPPALSSPETSPERHIEDTWMQELNANRPATPTRGRPQNSNDRGGSLAWM

SEQ ID NO: 73839 - protein, 990 aa, Arabidopsis thaliana
  peptide (1)..(990): Ceres Seq. ID no. 4982778
MERETPQQMNDQSPPPEGGSVPTPPPSDPNPATSQQQAAAVVGQEQQPALVVGPRCAPTYSVVDAMMDKKEDGPGPRCGHTLTAVPAVGDEGTPGYIGPRLVLFGGATALEGNSGGTGTPTSAGSAGIRLAGATADVHCYDVLSNKWTRLTPFGEPPTPRAAHVATAVGTMVVIQGGIGPAGLSAEDLHVLDLTQQRPRWHRVVVQGPGPGPRYGHVMALVGQRYLMAIGGNDGKRPLADVWALDTAAKPYEWRKLEPEGEGPPPCMYATASARSDGLLLLCGGRDANSVPLASAYGLAKHRDGRWEWAIAPGVSPSSRYQHAAVFVNARLHVSGGALGGGRMVEDSSSVAVLDTAAGVWCDTKSVVTSPRTGRYSADAAGGDASVELTRRCRHAAAAVGDLIFIYGGLRGGVLLDDLLVAEDLAAAETTYAASHAAAAAATNSPPGRLPGRYGFSDERNRELSESAADGAVVLGSPVAPPVNGDMHTDISPENALLPGTRRTNKGVEYLVEASAAEAEAISATLAAAKARQVNGEVELPDRDCGAEATPSGKPTFSLIKPDSMGSMSVTPAGIRLHHRAVVVAAETGGALGGMVRQLSIDQFENEGRRVSYGTPESATAARKLLDRQMSINSVPKKVIAHLLKPRGWKPPVRRQFFLDCNEIADLCDSAERIFASEPTVLQLKAPIKIFGDLHGQFGDLMRLFDEYGSPSTAGDISYIDYLFLGDYVDRGQHSLETISLLLALKVEYQHNVHLIRGNHEAADINALFGFRIECIERMGERDGIWVWHRINRLFNWLPLAASIEKKIICMHGGIGRSINHVEQIENIQRPITMEAGSIVLMDLLWSDPTENDSVEGLRPNARGPGLVTFGPDRVMEFCNNNDLQLIVRAHECVMDGFERFAQGHLITLFSATNYCGTANNAGAILVLGRDLVVVPKLIHPLPPALSSPETSPERHIEDTWMQELNANRPATPTRGRPQNSNDRGGSLAWM

SEQ ID NO: 73840 - DNA, 3000 bp, Arabidopsis thaliana
  misc_feature (1)..(3000): Ceres Seq. ID no. 4982946
  misc_feature (1)..(3000): Ortholog of  Ceres SEQ ID NO 12586556 as cited in SEQ ID NO 64667
  misc_feature (1)..(3000): Ortholog of  Ceres SEQ ID NO 13660894 as cited in SEQ ID NO 67475
atgaactccaatctgctatcgaatcctatatcatcggaggtcttcacctccattgatttgggaacaaattctttcaagcttctaatagtccaagctgagccttccggtagatctttcgttccaatcgagagactcaaagagccagtggtgttgtctcgtgaatctccaacctcaatttcgtctcaatctcaggctcgcgcgcttcaatctctacggaaattcaaaagtttaattctctcgcaccacgtctctggtgataggatccgatgcgttgcaacggaagccttacggcgagccgagaatcaggaagagttcgtggatgcggtttttgaggatgttgggcttaaggtcgatgtgctttctggtgaagaggaagccaggttagtttatttaggcgtgcttcagtttttacctgtgtttgagaaatcagtgttgtgtgttgatattggaggtggttctactgaatttgtggttggtaagtgtggtgatgtcaagcttgctgtttctttaaagctaggtcacgtgaatttgacgcagatgtttatgaaaaatggtattggattgaaggaaatgagagactatattcgtcatgcgattgatgagtctaggttagcagaaaaattgaatgaatcagatggttttgaggttgttgtgggatcttctggaactatacgagctattgagaatgcagttttcagtggctatggagctgatttgtgtgatttcaatttggaagggtataagagggactggagatttggtacaagagagctgagcagcgttgtagcaaagctatgcagtgaaggagacgaagagctgattcgaagggagggatttttcaagagaagatcagagttcattgttgctggggctgtattgttggaggaaatattcaaggctcttggcatagaggacatggaggtctcagagtatgcattggcagagggtgtgattgctgattctctggccaaagcttttgatggatcatatgatttaaatgctaatgcaagatggcgatcggtcatgaggcttgccacgcgtttcagtggtaaaaagcgaatgactcatgcgatacactgtgccaagattgcaaaggttatcttagacgataaagatcttgagtatctcgaagctgcttgtttcttgcacaatatcggaatcatcacagggaaaaagggttatcataagcaatcttatcatatcatcaagaatggggatcatctccacagctacactgctgaggaaatcgagcttatagctatgcttgtgagataccaaagaaaaaagtttcccaagcttgatcgtgcacctcttaagggcttcactggggaggcaaagcgaaaattcataattttgtgtttgattacacgattatcagttacacttcaacggaatgagaatatggatctccaagaagttgaatttattgaatcttccgagatcttcaaactcgtgctgaaaagacaacaccaggaaccggtagaggttggttgtcaagatcaagtaaacaaaaactctgatgaatcacaactggagaaagaagttgagcattttaaaaggagagttgttggtttctttcctggagttttccgttgtccaatttgtgaagtcgaaaatgtcagttttaaaccagaaactgatggtaaaactatgattgtacgcagattgaattggtgtaatgaaaagagatttgactccatgttaacttttcccactggatgtgtgcatttgggttataagcagatgttgaaacggttgccttcgaatcaaggtcatctacacatgactgcaggaccaaaatctttatctttcttctcttccatgaaaagccggggaatttgggctgacgagtatacttacgcgcctttgctcaaatcctgttcgtctctttctgatttgcgatttgggaaatgcgttcatggtgagcttataagaactgggttccaccgtcttgggaaaattaggattggggtggtggagctttatacttccggtgggagaatgggtgatgcacagaaagtgttcgacgaaatgtctgagagaaacgttgtcgtctggaatcttatgattcgcgggttctgtgactccggggacgttgaaagaggtcttcatttgttcaaacagatgagcgaaagaagcattgtgtcgtggaattcgatgatatctagcttgtctaaatgtggtagagatcgtgaggctttggagcttttctgcgaaatgattgatcaaggttttgaccctgatgaggcgactgtggttacagtcttgccaatttctgcatctctaggagtgttggataccggaaaatggattcattctaccgcagaatccagtggtttgtttaaagatttcatcaccgtgggaaacgctttggtagatttctactgcaaaagcggcgacttggaggcagcaacggctatatttagaaaaatgcagcgtagaaacgttgtttcatggaacacattgatatcgggatcagccgtaaacggaaagggagaatttgggatagacttgtttgatgctatgatagaggaagggaaagtagctccaaatgaagcgacatttttgggggttttggcatgttgctcatacacaggtcaggtggagagaggagaggaattgtttggtttgatgatggaaagattcaaacttgaggcgagaaccgagcattacggtgccatggtagatctaatgagtagaagtgggagaatcacagaggcgtttaagtttctaaaaaatatgcccgtaaacgcaaatgcggcaatgtgggggtcgctgctcagtgcttgtcgtagccacggagatgtaaagctagcagaagttgcagcaatggagttagtgaagattgagccagggaattcggggaattatgtgttgttatctaatttgtatgcagaggaagggagatggcaagatgtggagaaggtacgaacgttgatgaaaaagaaccgccttagaaagtctactggccaaagcaccatttgcgatgtttcagtctga

SEQ ID NO: 73841 - protein, 999 aa, Arabidopsis thaliana
  peptide (1)..(999): Ceres Seq. ID no. 4982947
MNSNLLSNPISSEVFTSIDLGTNSFKLLIVQAEPSGRSFVPIERLKEPVVLSRESPTSISSQSQARALQSLRKFKSLILSHHVSGDRIRCVATEALRRAENQEEFVDAVFEDVGLKVDVLSGEEEARLVYLGVLQFLPVFEKSVLCVDIGGGSTEFVVGKCGDVKLAVSLKLGHVNLTQMFMKNGIGLKEMRDYIRHAIDESRLAEKLNESDGFEVVVGSSGTIRAIENAVFSGYGADLCDFNLEGYKRDWRFGTRELSSVVAKLCSEGDEELIRREGFFKRRSEFIVAGAVLLEEIFKALGIEDMEVSEYALAEGVIADSLAKAFDGSYDLNANARWRSVMRLATRFSGKKRMTHAIHCAKIAKVILDDKDLEYLEAACFLHNIGIITGKKGYHKQSYHIIKNGDHLHSYTAEEIELIAMLVRYQRKKFPKLDRAPLKGFTGEAKRKFIILCLITRLSVTLQRNENMDLQEVEFIESSEIFKLVLKRQHQEPVEVGCQDQVNKNSDESQLEKEVEHFKRRVVGFFPGVFRCPICEVENVSFKPETDGKTMIVRRLNWCNEKRFDSMLTFPTGCVHLGYKQMLKRLPSNQGHLHMTAGPKSLSFFSSMKSRGIWADEYTYAPLLKSCSSLSDLRFGKCVHGELIRTGFHRLGKIRIGVVELYTSGGRMGDAQKVFDEMSERNVVVWNLMIRGFCDSGDVERGLHLFKQMSERSIVSWNSMISSLSKCGRDREALELFCEMIDQGFDPDEATVVTVLPISASLGVLDTGKWIHSTAESSGLFKDFITVGNALVDFYCKSGDLEAATAIFRKMQRRNVVSWNTLISGSAVNGKGEFGIDLFDAMIEEGKVAPNEATFLGVLACCSYTGQVERGEELFGLMMERFKLEARTEHYGAMVDLMSRSGRITEAFKFLKNMPVNANAAMWGSLLSACRSHGDVKLAEVAAMELVKIEPGNSGNYVLLSNLYAEEGRWQDVEKVRTLMKKNRLRKSTGQSTICDVSV

SEQ ID NO: 73842 - protein, 820 aa, Arabidopsis thaliana
  peptide (1)..(820): Ceres Seq. ID no. 4982948
MFMKNGIGLKEMRDYIRHAIDESRLAEKLNESDGFEVVVGSSGTIRAIENAVFSGYGADLCDFNLEGYKRDWRFGTRELSSVVAKLCSEGDEELIRREGFFKRRSEFIVAGAVLLEEIFKALGIEDMEVSEYALAEGVIADSLAKAFDGSYDLNANARWRSVMRLATRFSGKKRMTHAIHCAKIAKVILDDKDLEYLEAACFLHNIGIITGKKGYHKQSYHIIKNGDHLHSYTAEEIELIAMLVRYQRKKFPKLDRAPLKGFTGEAKRKFIILCLITRLSVTLQRNENMDLQEVEFIESSEIFKLVLKRQHQEPVEVGCQDQVNKNSDESQLEKEVEHFKRRVVGFFPGVFRCPICEVENVSFKPETDGKTMIVRRLNWCNEKRFDSMLTFPTGCVHLGYKQMLKRLPSNQGHLHMTAGPKSLSFFSSMKSRGIWADEYTYAPLLKSCSSLSDLRFGKCVHGELIRTGFHRLGKIRIGVVELYTSGGRMGDAQKVFDEMSERNVVVWNLMIRGFCDSGDVERGLHLFKQMSERSIVSWNSMISSLSKCGRDREALELFCEMIDQGFDPDEATVVTVLPISASLGVLDTGKWIHSTAESSGLFKDFITVGNALVDFYCKSGDLEAATAIFRKMQRRNVVSWNTLISGSAVNGKGEFGIDLFDAMIEEGKVAPNEATFLGVLACCSYTGQVERGEELFGLMMERFKLEARTEHYGAMVDLMSRSGRITEAFKFLKNMPVNANAAMWGSLLSACRSHGDVKLAEVAAMELVKIEPGNSGNYVLLSNLYAEEGRWQDVEKVRTLMKKNRLRKSTGQSTICDVSV

SEQ ID NO: 73843 - protein, 818 aa, Arabidopsis thaliana
  peptide (1)..(818): Ceres Seq. ID no. 4982949
MKNGIGLKEMRDYIRHAIDESRLAEKLNESDGFEVVVGSSGTIRAIENAVFSGYGADLCDFNLEGYKRDWRFGTRELSSVVAKLCSEGDEELIRREGFFKRRSEFIVAGAVLLEEIFKALGIEDMEVSEYALAEGVIADSLAKAFDGSYDLNANARWRSVMRLATRFSGKKRMTHAIHCAKIAKVILDDKDLEYLEAACFLHNIGIITGKKGYHKQSYHIIKNGDHLHSYTAEEIELIAMLVRYQRKKFPKLDRAPLKGFTGEAKRKFIILCLITRLSVTLQRNENMDLQEVEFIESSEIFKLVLKRQHQEPVEVGCQDQVNKNSDESQLEKEVEHFKRRVVGFFPGVFRCPICEVENVSFKPETDGKTMIVRRLNWCNEKRFDSMLTFPTGCVHLGYKQMLKRLPSNQGHLHMTAGPKSLSFFSSMKSRGIWADEYTYAPLLKSCSSLSDLRFGKCVHGELIRTGFHRLGKIRIGVVELYTSGGRMGDAQKVFDEMSERNVVVWNLMIRGFCDSGDVERGLHLFKQMSERSIVSWNSMISSLSKCGRDREALELFCEMIDQGFDPDEATVVTVLPISASLGVLDTGKWIHSTAESSGLFKDFITVGNALVDFYCKSGDLEAATAIFRKMQRRNVVSWNTLISGSAVNGKGEFGIDLFDAMIEEGKVAPNEATFLGVLACCSYTGQVERGEELFGLMMERFKLEARTEHYGAMVDLMSRSGRITEAFKFLKNMPVNANAAMWGSLLSACRSHGDVKLAEVAAMELVKIEPGNSGNYVLLSNLYAEEGRWQDVEKVRTLMKKNRLRKSTGQSTICDVSV

SEQ ID NO: 73844 - DNA, 648 bp, Arabidopsis thaliana
  misc_feature (1)..(648): Ceres Seq. ID no. 4983157
  misc_feature (1)..(648): Ortholog of  Ceres SEQ ID NO 14308640 as cited in SEQ ID NO 60489
  misc_feature (1)..(648): Ortholog of  Ceres SEQ ID NO 12619999 as cited in SEQ ID NO 66123
  misc_feature (1)..(648): Ortholog of  Ceres SEQ ID NO 13656436 as cited in SEQ ID NO 69154
atgccggaaaagatcgattacgtgttcaaggtggtggtcattggagattctgctgtcgggaaaacgcagctcctctcacgttttacacacaacgagttctgttatgattcaaaatcaaccattggtgtcgagtttcagacacggaccatcactcttcggggcaaactcgtcaaagctcagatctgggacaccgccggtcaagagagagcggtgactagcgcctactacagaggtgcgttaggtgcgatggtggtttacgacattaccaaacgcctctcattcgaccacgttgcacgttgggtcgaggaattacgtgctcacgccgatgattccgccgtgatcatgctcgtcggaaacaaagccgatctctccgttggtaaacgtgccgttcctacggaggatgcagtcgaattcgccgagactcaacggctttttttctcggaagtctcggctctaagcggcggaaacgtcgacgaagcttttttccgtttactcgaggagattttcagccgcgttgttgtttcgagaaaagctatggaatccgacggtggagccaccgtgaaacttgacggttcgagaattgatgtcatctctggttcggatcttgagactagtaatatcaaggaacaagcttcgtgctcgtgttga

SEQ ID NO: 73845 - protein, 215 aa, Arabidopsis thaliana
  peptide (1)..(215): Ceres Seq. ID no. 4983158
MPEKIDYVFKVVVIGDSAVGKTQLLSRFTHNEFCYDSKSTIGVEFQTRTITLRGKLVKAQIWDTAGQERAVTSAYYRGALGAMVVYDITKRLSFDHVARWVEELRAHADDSAVIMLVGNKADLSVGKRAVPTEDAVEFAETQRLFFSEVSALSGGNVDEAFFRLLEEIFSRVVVSRKAMESDGGATVKLDGSRIDVISGSDLETSNIKEQASCSC

SEQ ID NO: 73846 - protein, 133 aa, Arabidopsis thaliana
  peptide (1)..(133): Ceres Seq. ID no. 4983159
MVVYDITKRLSFDHVARWVEELRAHADDSAVIMLVGNKADLSVGKRAVPTEDAVEFAETQRLFFSEVSALSGGNVDEAFFRLLEEIFSRVVVSRKAMESDGGATVKLDGSRIDVISGSDLETSNIKEQASCSC

SEQ ID NO: 73847 - DNA, 885 bp, Arabidopsis thaliana
  misc_feature (1)..(885): Ceres Seq. ID no. 4983181
  misc_feature (1)..(885): Ortholog of  Ceres SEQ ID NO 14306299 as cited in SEQ ID NO 56895
  misc_feature (1)..(885): Ortholog of  Ceres SEQ ID NO 13663631 as cited in SEQ ID NO 67073
atgggaaagccaagaagcgtgtctccgaccatcttcctcctagtcatcctcttggtgaccgccggagagaagacggaggcgaagccatggtggaagaaagtcggagattccatcgggaatatagccggaggaataagaaatgcggttgggaattataaaccagtggagatgggattgtcgttaaaaggaggattttgtgtgagaaagcttctgtctttgaatacgaatgtgttcagtgaatggtgtatagctcttaatgatccaagagctcctatgtacatgaagattgagaatataccaagtgcgacgagtactcggcttctgttgtcaccaccttcgttcaccggaaaccgattctcgttcaggttcaggtggaggagaatacgacgtcgtaacagagtcaacagagcgagcagagagtttttaatcgcacataacctcgtaagagcgcgcgtgggagaaccaccgtttcaatgggacggaagattagcggcgtacgcgcgcacgtgggcgaatcagcgcgtgggtgattgtaggcttgttcactctaacgggccgtatggagaaaacatattttgggccggaaagaataactggagccccagagatattgttaatgtgtgggccgatgaggataaattctacgacgtgaaaggtaacacgtgtgagccgcaacacatgtgtgggcactacacgcagatcgtgtggagagatagtaccaaggtcggatgcgcaagtgtggattgttcgaacggcggcgtttatgcgatttgtgtttataacccaccgggaaattacgaaggtgaaaatccgtttggaagttatgatgatcagattggtcttgcccgggatgatccaccggcggtgatcggaggaatggcttga

SEQ ID NO: 73848 - protein, 294 aa, Arabidopsis thaliana
  peptide (1)..(294): Ceres Seq. ID no. 4983182
MGKPRSVSPTIFLLVILLVTAGEKTEAKPWWKKVGDSIGNIAGGIRNAVGNYKPVEMGLSLKGGFCVRKLLSLNTNVFSEWCIALNDPRAPMYMKIENIPSATSTRLLLSPPSFTGNRFSFRFRWRRIRRRNRVNRASREFLIAHNLVRARVGEPPFQWDGRLAAYARTWANQRVGDCRLVHSNGPYGENIFWAGKNNWSPRDIVNVWADEDKFYDVKGNTCEPQHMCGHYTQIVWRDSTKVGCASVDCSNGGVYAICVYNPPGNYEGENPFGSYDDQIGLARDDPPAVIGGMA

SEQ ID NO: 73849 - protein, 238 aa, Arabidopsis thaliana
  peptide (1)..(238): Ceres Seq. ID no. 4983183
MGLSLKGGFCVRKLLSLNTNVFSEWCIALNDPRAPMYMKIENIPSATSTRLLLSPPSFTGNRFSFRFRWRRIRRRNRVNRASREFLIAHNLVRARVGEPPFQWDGRLAAYARTWANQRVGDCRLVHSNGPYGENIFWAGKNNWSPRDIVNVWADEDKFYDVKGNTCEPQHMCGHYTQIVWRDSTKVGCASVDCSNGGVYAICVYNPPGNYEGENPFGSYDDQIGLARDDPPAVIGGMA

SEQ ID NO: 73850 - protein, 203 aa, Arabidopsis thaliana
  peptide (1)..(203): Ceres Seq. ID no. 4983184
MYMKIENIPSATSTRLLLSPPSFTGNRFSFRFRWRRIRRRNRVNRASREFLIAHNLVRARVGEPPFQWDGRLAAYARTWANQRVGDCRLVHSNGPYGENIFWAGKNNWSPRDIVNVWADEDKFYDVKGNTCEPQHMCGHYTQIVWRDSTKVGCASVDCSNGGVYAICVYNPPGNYEGENPFGSYDDQIGLARDDPPAVIGGMA

SEQ ID NO: 73851 - DNA, 1680 bp, Arabidopsis thaliana
  misc_feature (1)..(1680): Ceres Seq. ID no. 4983267
  misc_feature (1)..(1680): Ortholog of  Ceres SEQ ID NO 14313151 as cited in SEQ ID NO 54664
atggaacaaaaggaaagacctctagatgaagggatcatcgagactgcaaaagaagatgagatgaccatcaagcaacgtatgatcaacaaaggcctcaaagtcacagaagacagagaaagggacacttacaagatcgagtgtgatgcagtggtagtgggttctggctgtggcggaggggttgcagctgcaattctagcaaagtcgggccttagggtggtagttatcgagaaggggaactactttgcccccagagactactcagctctcgagggcccttccatgtttgagctgtttgagtccaatagcttgatgatgactcatgatggcaggttccggttcatggcaggatcaacagtcggtggtggctctgtggtaaactgggcagcgtccttaaaaacacctgatgctatcatcgaagaatggtcagtacatcgagggatttcaatatattctagtgagaaatataaggcggcgatgggtattgtctgcaagaggttaggtgtcactgagaaaatcatcagagaagggtttcagaaccagattctgcggaaaggttgcgagaagcttggtttggatgtgacaatagtgccaaggaattcaacagagaaacattattgcggtagttgctcgtatggatgcccaaccggagagaagagagggacagattcaacctggctggttgatgcagttaacaacaatgctgtgatcctaacacagtgcaaggctgagaaactaatcttggcggataacgatgctaacaaaagagaggagagcggacgaagaaaaagatgtttgggagtcgcagcctctctatcccaccaaaccagaaagaagcttcagatcaatgccaaagtgacaattgtggcttgcggctcgcttaagacaccaggattgttggcttcaagcgggttgaagaattcaaacatcagtcgcggtctccatatccaccctatcatgatggcttggggctacttcccagaaaagaattcagaattggaaggagcggctcatgagggagagatcgtcacttcattgcattatgtgcatccaatggactccactacacctaacatcacactggagactcctgctataggaccaggtacgttcgcagctctgaccccgtgggtctctgggtcagacatgaaagaaagaatggccaaatacgcaagaacagctcatatttttgccatggtgagagatgaaggagttggagaggtgaaaggagacattgtcaaatacagattaaccaaagcggacgaagagaatctgacaattgggttaaagcaagcactgaggatcctagtagcagcaggagcagcggaggtaggcacatacaggagcgacgggcagagaatgaagtgtgatggaatcaaacagaaagatctagaggcatttttagataccgtaaacgcgccacctggagttgtgtccatgagtaagcattggactcaatcctttacagcgcatcaaataggatgttgccgtatgggtgccacagaaaaggaaggagccattgatggaaaaggagagagctgggaggcagaagatttgtatgtctgtgatgcaagtgttctgcctacagctcttggtgttaatcccatgatcaccgttcagtccactgcttactgcatatccaacagaatagccgagttaatgaagaagaggaagaaagactga

SEQ ID NO: 73852 - protein, 559 aa, Arabidopsis thaliana
  peptide (1)..(559): Ceres Seq. ID no. 4983268
MEQKERPLDEGIIETAKEDEMTIKQRMINKGLKVTEDRERDTYKIECDAVVVGSGCGGGVAAAILAKSGLRVVVIEKGNYFAPRDYSALEGPSMFELFESNSLMMTHDGRFRFMAGSTVGGGSVVNWAASLKTPDAIIEEWSVHRGISIYSSEKYKAAMGIVCKRLGVTEKIIREGFQNQILRKGCEKLGLDVTIVPRNSTEKHYCGSCSYGCPTGEKRGTDSTWLVDAVNNNAVILTQCKAEKLILADNDANKREESGRRKRCLGVAASLSHQTRKKLQINAKVTIVACGSLKTPGLLASSGLKNSNISRGLHIHPIMMAWGYFPEKNSELEGAAHEGEIVTSLHYVHPMDSTTPNITLETPAIGPGTFAALTPWVSGSDMKERMAKYARTAHIFAMVRDEGVGEVKGDIVKYRLTKADEENLTIGLKQALRILVAAGAAEVGTYRSDGQRMKCDGIKQKDLEAFLDTVNAPPGVVSMSKHWTQSFTAHQIGCCRMGATEKEGAIDGKGESWEAEDLYVCDASVLPTALGVNPMITVQSTAYCISNRIAELMKKRKKD

SEQ ID NO: 73853 - protein, 539 aa, Arabidopsis thaliana
  peptide (1)..(539): Ceres Seq. ID no. 4983269
MTIKQRMINKGLKVTEDRERDTYKIECDAVVVGSGCGGGVAAAILAKSGLRVVVIEKGNYFAPRDYSALEGPSMFELFESNSLMMTHDGRFRFMAGSTVGGGSVVNWAASLKTPDAIIEEWSVHRGISIYSSEKYKAAMGIVCKRLGVTEKIIREGFQNQILRKGCEKLGLDVTIVPRNSTEKHYCGSCSYGCPTGEKRGTDSTWLVDAVNNNAVILTQCKAEKLILADNDANKREESGRRKRCLGVAASLSHQTRKKLQINAKVTIVACGSLKTPGLLASSGLKNSNISRGLHIHPIMMAWGYFPEKNSELEGAAHEGEIVTSLHYVHPMDSTTPNITLETPAIGPGTFAALTPWVSGSDMKERMAKYARTAHIFAMVRDEGVGEVKGDIVKYRLTKADEENLTIGLKQALRILVAAGAAEVGTYRSDGQRMKCDGIKQKDLEAFLDTVNAPPGVVSMSKHWTQSFTAHQIGCCRMGATEKEGAIDGKGESWEAEDLYVCDASVLPTALGVNPMITVQSTAYCISNRIAELMKKRKKD

SEQ ID NO: 73854 - protein, 533 aa, Arabidopsis thaliana
  peptide (1)..(533): Ceres Seq. ID no. 4983270
MINKGLKVTEDRERDTYKIECDAVVVGSGCGGGVAAAILAKSGLRVVVIEKGNYFAPRDYSALEGPSMFELFESNSLMMTHDGRFRFMAGSTVGGGSVVNWAASLKTPDAIIEEWSVHRGISIYSSEKYKAAMGIVCKRLGVTEKIIREGFQNQILRKGCEKLGLDVTIVPRNSTEKHYCGSCSYGCPTGEKRGTDSTWLVDAVNNNAVILTQCKAEKLILADNDANKREESGRRKRCLGVAASLSHQTRKKLQINAKVTIVACGSLKTPGLLASSGLKNSNISRGLHIHPIMMAWGYFPEKNSELEGAAHEGEIVTSLHYVHPMDSTTPNITLETPAIGPGTFAALTPWVSGSDMKERMAKYARTAHIFAMVRDEGVGEVKGDIVKYRLTKADEENLTIGLKQALRILVAAGAAEVGTYRSDGQRMKCDGIKQKDLEAFLDTVNAPPGVVSMSKHWTQSFTAHQIGCCRMGATEKEGAIDGKGESWEAEDLYVCDASVLPTALGVNPMITVQSTAYCISNRIAELMKKRKKD

SEQ ID NO: 73855 - DNA, 1677 bp, Arabidopsis thaliana
  misc_feature (1)..(1677): Ceres Seq. ID no. 4983275
  misc_feature (1)..(1677): Ortholog of  Ceres SEQ ID NO 12586556 as cited in SEQ ID NO 64667
  misc_feature (1)..(1677): Ortholog of  Ceres SEQ ID NO 13660894 as cited in SEQ ID NO 67475
atggctcgtgtttacatggagacgatgatacaaaaatgcgtcagcttctcccaaatcaaacaactccaatctcacttcctcaccgccggccatttccaatcttcctttctccgttctcgtcttctcgaacgctgcgcaatctcaccattcggagacctttccttcgccgtacaaattttccggtacatccctaaacctttaaccaatgattggaacgcaatcatccgcggattcgccggaagttctcatccttcacttgcgttttcatggtatcgttccatgttgcagcaatcttcgtcatcgtcggctatatgtagagtcgatgctttgacttgttcttttactcttaaagcttgtgcacgtgcgctttgttcttccgctatggatcaacttcattgtcagattaaccgtcggggattatccgctgattcgcttctttgtactacgttgcttgatgcttactctaaaaacggagatttaattagtgcgtataagttgttcgatgaaatgcctgtgagagatgttgcgtcgtggaacgcgttgatcgcggggttagtgtctggtaatcgagcgagtgaggcgatggagttgtataagagaatggaaacggaaggaattagaagaagtgaagtaactgttgttgctgctttaggagcttgttctcatttgggtgatgttaaggaaggtgaaaatatcttccatggatacagtaacgataatgtgattgttagtaacgcggctattgatatgtattcgaaatgcgggtttgttgataaagcttatcaagtgtttgaacaattcactggtaagaagagtgttgttacatggaacactatgattacagggtttgcagtgcatggagaagcacatagagcgttggagatttttgacaagttggaggataatggtattaagcctgatgatgtctcgtacttagctgctttaactgcgtgtagacatgcggggttagtggagtatggtttgtctgtattcaataatatggcttgtaagggcgttgagcgtaacatgaagcactatggttgtgtggttgatctgttaagccgtgcaggaaggttgagagaagctcacgatatcatatgttcaatgtcgatgattccggatcctgttttgtggcagagccttcttggagcttcggagatttatagtgatgttgaaatggctgagattgcttctagggaaataaaggaaatgggagttaacaatgatggtgattttgtgttgctatcgaatgtttatgctgcgcagggacggtggaaagatgtaggacgagtgagagatgatatggaaagcaaacaagtgaagaaaattccaggtcttagctacatagaagccaaaggaacgattcatgaattctacaacagtgacaagagccatgaacagtggagagagatttatgagaagatcgatgagatcaggttcaagataagagaggatggttacgtggcgcagacaggacttgtgttgcacgacataggagaggaagagaaagagaacgctttgtgctatcacagcgagaaattggcggtggcctacggactgatgatgatggatggtgcggacgaggagagtccgttcggtttcataggttcaaagatggttcttgctcttgcagagatttttggtaacgttacaaaattaagagggtggcaattttaa

SEQ ID NO: 73856 - protein, 558 aa, Arabidopsis thaliana
  peptide (1)..(558): Ceres Seq. ID no. 4983276
MARVYMETMIQKCVSFSQIKQLQSHFLTAGHFQSSFLRSRLLERCAISPFGDLSFAVQIFRYIPKPLTNDWNAIIRGFAGSSHPSLAFSWYRSMLQQSSSSSAICRVDALTCSFTLKACARALCSSAMDQLHCQINRRGLSADSLLCTTLLDAYSKNGDLISAYKLFDEMPVRDVASWNALIAGLVSGNRASEAMELYKRMETEGIRRSEVTVVAALGACSHLGDVKEGENIFHGYSNDNVIVSNAAIDMYSKCGFVDKAYQVFEQFTGKKSVVTWNTMITGFAVHGEAHRALEIFDKLEDNGIKPDDVSYLAALTACRHAGLVEYGLSVFNNMACKGVERNMKHYGCVVDLLSRAGRLREAHDIICSMSMIPDPVLWQSLLGASEIYSDVEMAEIASREIKEMGVNNDGDFVLLSNVYAAQGRWKDVGRVRDDMESKQVKKIPGLSYIEAKGTIHEFYNSDKSHEQWREIYEKIDEIRFKIREDGYVAQTGLVLHDIGEEEKENALCYHSEKLAVAYGLMMMDGADEESPFGFIGSKMVLALAEIFGNVTKLRGWQF

SEQ ID NO: 73857 - protein, 553 aa, Arabidopsis thaliana
  peptide (1)..(553): Ceres Seq. ID no. 4983277
METMIQKCVSFSQIKQLQSHFLTAGHFQSSFLRSRLLERCAISPFGDLSFAVQIFRYIPKPLTNDWNAIIRGFAGSSHPSLAFSWYRSMLQQSSSSSAICRVDALTCSFTLKACARALCSSAMDQLHCQINRRGLSADSLLCTTLLDAYSKNGDLISAYKLFDEMPVRDVASWNALIAGLVSGNRASEAMELYKRMETEGIRRSEVTVVAALGACSHLGDVKEGENIFHGYSNDNVIVSNAAIDMYSKCGFVDKAYQVFEQFTGKKSVVTWNTMITGFAVHGEAHRALEIFDKLEDNGIKPDDVSYLAALTACRHAGLVEYGLSVFNNMACKGVERNMKHYGCVVDLLSRAGRLREAHDIICSMSMIPDPVLWQSLLGASEIYSDVEMAEIASREIKEMGVNNDGDFVLLSNVYAAQGRWKDVGRVRDDMESKQVKKIPGLSYIEAKGTIHEFYNSDKSHEQWREIYEKIDEIRFKIREDGYVAQTGLVLHDIGEEEKENALCYHSEKLAVAYGLMMMDGADEESPFGFIGSKMVLALAEIFGNVTKLRGWQF

SEQ ID NO: 73858 - protein, 550 aa, Arabidopsis thaliana
  peptide (1)..(550): Ceres Seq. ID no. 4983278
MIQKCVSFSQIKQLQSHFLTAGHFQSSFLRSRLLERCAISPFGDLSFAVQIFRYIPKPLTNDWNAIIRGFAGSSHPSLAFSWYRSMLQQSSSSSAICRVDALTCSFTLKACARALCSSAMDQLHCQINRRGLSADSLLCTTLLDAYSKNGDLISAYKLFDEMPVRDVASWNALIAGLVSGNRASEAMELYKRMETEGIRRSEVTVVAALGACSHLGDVKEGENIFHGYSNDNVIVSNAAIDMYSKCGFVDKAYQVFEQFTGKKSVVTWNTMITGFAVHGEAHRALEIFDKLEDNGIKPDDVSYLAALTACRHAGLVEYGLSVFNNMACKGVERNMKHYGCVVDLLSRAGRLREAHDIICSMSMIPDPVLWQSLLGASEIYSDVEMAEIASREIKEMGVNNDGDFVLLSNVYAAQGRWKDVGRVRDDMESKQVKKIPGLSYIEAKGTIHEFYNSDKSHEQWREIYEKIDEIRFKIREDGYVAQTGLVLHDIGEEEKENALCYHSEKLAVAYGLMMMDGADEESPFGFIGSKMVLALAEIFGNVTKLRGWQF

SEQ ID NO: 73859 - DNA, 3129 bp, Arabidopsis thaliana
  misc_feature (1)..(3129): Ceres Seq. ID no. 4983442
  misc_feature (1)..(3129): Ortholog of  Ceres SEQ ID NO 13593889 as cited in SEQ ID NO 53305
  misc_feature (1)..(3129): Ortholog of  Ceres SEQ ID NO 13581959 as cited in SEQ ID NO 56156
atgagaatggagtttcctggcagctccaatcagcatttaggtagggataggttcaatggagaagttggttgcggtaataactgttctcagacaggagaggaattttcaaatgagtttttgagggattttggtgctcaacgaagactacaacatggtggtgttaacagaaatgttgagggtaattataataatcgccatcttgtttacgaggatttcaacagaattcttggccttcaaagagttgattccaacatgtcagaaggtattaattcctcgaatggttactttgctgagtcaaatgttgcagactcacctcggaagatgtttcaaactgcaatatcagatgtttatttgcctgaagtattgaagcttctttgtagcttcgggggaaggatcttacagcggcctggtgatggcaagcttagatacattggaggggagactcggattatctcaatacgcaaacatgttggattaaacgaattgatgcacaagacttatgctttgtgcaaccatccgcatacaatcaagtatcaattaccaggagaagatcttgatgcccttatatcggtttgctcagatgaggatcttcttcatatgattgaagagtatcaagaagctgaaacaaaggctggatcccagaggattagggtctttcttgtaccttccacagaatcatcagagagtcctaaaattttccatgaaaggaatatgaacataaaccgaaacacgaaccagcagacggatatagatcattatcagtatgtttcagctcttaatggtattgtagatgtgagtcctcaaaagagttccagcggccaaagtggaacaagtcagaccacacaatttgggaatgcttcagaatttagccctacatttcatcttcgagactcgcctacttctgttcatacatgggaacacaaagacagcaacagtccaaccttcatgaaaccatatgggaacacgaatgctgttcattttatgccgaaaatgcagattcccaggaactcgtttggtcaacaatctcctccaacatctcctttttcagtccacaagagagcaaacaccgacgttccttattttgccgatcaaaatggtttctttgacccttacttggctgctccaaacttcccacagcaaaataggttcttttttgagactactacacaaaagcagaagcatccagaagtgaatcttcatgaccggaggccaagcgatgatatttacccccatggccaagcttatatcggagccgagaaaatgacgcttaagaaaaacgctctttctgatccgcagctgcatgatgagagccaaatcaacaatgggttagaagcatttaccaaacaaccatggaaaatattgagaaagaatctacgtgttgtggctacatcaaagtgggaagatagtgatgatatctatttcaataatccagaaggcaagagatgcaaggagcttgaactcaccaaggaagttcctaatagttggatcaatcgcgataataatcccgattcttttgatcaggcaacaaagaaacaggatggtagtaacagtaatagctccttcagtccgaattatttcagtccgaatcatcaaccagctgctcagattacttcaagtgattcacaagattcaggaagctcagtgttctctttatcagttaacaccaacgaaaattatcttgattgttcgagggaaaaatttaatggtttccagcatgacatgtcactagatattctcatcagaagccacacttcagctacagatcaactatgtagtacaaccaagtcaagtgataaagcagattactcctcacccaatacaaatttccccgtggtatttctgagacaggaacctatgattccgagacatgatttggagacaaatagcgatgattcagatactcaaaaatctcttcctagagaagagagtattcactatagtggattgccacttaggaaggtgggaagtagagaaactacttttatgcacacgcaggggtcagatgatttcttcaaaagcaagctgcttggtccacagttgatagttgaggatgtgacgaacgaagtaatttcagataatctcttatcagctactattgtccctcaagtaaatagggagtccgatgatgatcacaaatcctacacaagggagaaagagattacaaatgcggatcatgaatcagaaatggaggaaaagtacaagaaaagcagaaacaccgatgattcattcagcgaagctgcaatggttgaaatcgaagctggaatatatggcttacagataattaaaaacactgatcttgaagacttacacgagcttggatctggtacatttggaactgtttactatgggaagtggagaggaactgatgttgctatcaagaggataaagaatagttgtttctctggtggatcatccgagcaagcacggcagactaaagatttctggagagaagctcggatattggcgaatcttcaccatcctaacgtagtggccttttatggagttgtaccagatggacctggtggaacaatggcaacagtgactgagtatatggtgaacggatctttgaggcatgtcttgcagagaaaagacagattacttgataggcgcaaaaaactgatgataactcttgattctgcatttggcatggagtatctacatatgaaaaatattgttcattttgatcttaaatgcgataacttgcttgtaaacttgagggatccacaacgacccatttgcaaggttggagatttcggattgtcgagaataaaacgaaacacgcttgtctctggtggagtaagaggaacccttccatggatggcaccagagctgctaaacggaagcagcaatcgggtctcagagaaagtcgatgttttctcatttggtatcgtgatgtgggagatcttgacaggcgaagaaccctatgcgaatctgcattgcggtgccatcattggtggaattgtgaacaatacgttaagacctccggtgcctgaacggtgtgaagctgagtggaggaagttgatggagcaatgctggtcattcgatccaggagtacggccatcgtttacggagattgttgaacgacttcgatcaatgactgttgccttgcaacccaagcgaagaacctaa

SEQ ID NO: 73860 - protein, 1042 aa, Arabidopsis thaliana
  peptide (1)..(1042): Ceres Seq. ID no. 4983443
MRMEFPGSSNQHLGRDRFNGEVGCGNNCSQTGEEFSNEFLRDFGAQRRLQHGGVNRNVEGNYNNRHLVYEDFNRILGLQRVDSNMSEGINSSNGYFAESNVADSPRKMFQTAISDVYLPEVLKLLCSFGGRILQRPGDGKLRYIGGETRIISIRKHVGLNELMHKTYALCNHPHTIKYQLPGEDLDALISVCSDEDLLHMIEEYQEAETKAGSQRIRVFLVPSTESSESPKIFHERNMNINRNTNQQTDIDHYQYVSALNGIVDVSPQKSSSGQSGTSQTTQFGNASEFSPTFHLRDSPTSVHTWEHKDSNSPTFMKPYGNTNAVHFMPKMQIPRNSFGQQSPPTSPFSVHKRANTDVPYFADQNGFFDPYLAAPNFPQQNRFFFETTTQKQKHPEVNLHDRRPSDDIYPHGQAYIGAEKMTLKKNALSDPQLHDESQINNGLEAFTKQPWKILRKNLRVVATSKWEDSDDIYFNNPEGKRCKELELTKEVPNSWINRDNNPDSFDQATKKQDGSNSNSSFSPNYFSPNHQPAAQITSSDSQDSGSSVFSLSVNTNENYLDCSREKFNGFQHDMSLDILIRSHTSATDQLCSTTKSSDKADYSSPNTNFPVVFLRQEPMIPRHDLETNSDDSDTQKSLPREESIHYSGLPLRKVGSRETTFMHTQGSDDFFKSKLLGPQLIVEDVTNEVISDNLLSATIVPQVNRESDDDHKSYTREKEITNADHESEMEEKYKKSRNTDDSFSEAAMVEIEAGIYGLQIIKNTDLEDLHELGSGTFGTVYYGKWRGTDVAIKRIKNSCFSGGSSEQARQTKDFWREARILANLHHPNVVAFYGVVPDGPGGTMATVTEYMVNGSLRHVLQRKDRLLDRRKKLMITLDSAFGMEYLHMKNIVHFDLKCDNLLVNLRDPQRPICKVGDFGLSRIKRNTLVSGGVRGTLPWMAPELLNGSSNRVSEKVDVFSFGIVMWEILTGEEPYANLHCGAIIGGIVNNTLRPPVPERCEAEWRKLMEQCWSFDPGVRPSFTEIVERLRSMTVALQPKRRT

SEQ ID NO: 73861 - protein, 1040 aa, Arabidopsis thaliana
  peptide (1)..(1040): Ceres Seq. ID no. 4983444
MEFPGSSNQHLGRDRFNGEVGCGNNCSQTGEEFSNEFLRDFGAQRRLQHGGVNRNVEGNYNNRHLVYEDFNRILGLQRVDSNMSEGINSSNGYFAESNVADSPRKMFQTAISDVYLPEVLKLLCSFGGRILQRPGDGKLRYIGGETRIISIRKHVGLNELMHKTYALCNHPHTIKYQLPGEDLDALISVCSDEDLLHMIEEYQEAETKAGSQRIRVFLVPSTESSESPKIFHERNMNINRNTNQQTDIDHYQYVSALNGIVDVSPQKSSSGQSGTSQTTQFGNASEFSPTFHLRDSPTSVHTWEHKDSNSPTFMKPYGNTNAVHFMPKMQIPRNSFGQQSPPTSPFSVHKRANTDVPYFADQNGFFDPYLAAPNFPQQNRFFFETTTQKQKHPEVNLHDRRPSDDIYPHGQAYIGAEKMTLKKNALSDPQLHDESQINNGLEAFTKQPWKILRKNLRVVATSKWEDSDDIYFNNPEGKRCKELELTKEVPNSWINRDNNPDSFDQATKKQDGSNSNSSFSPNYFSPNHQPAAQITSSDSQDSGSSVFSLSVNTNENYLDCSREKFNGFQHDMSLDILIRSHTSATDQLCSTTKSSDKADYSSPNTNFPVVFLRQEPMIPRHDLETNSDDSDTQKSLPREESIHYSGLPLRKVGSRETTFMHTQGSDDFFKSKLLGPQLIVEDVTNEVISDNLLSATIVPQVNRESDDDHKSYTREKEITNADHESEMEEKYKKSRNTDDSFSEAAMVEIEAGIYGLQIIKNTDLEDLHELGSGTFGTVYYGKWRGTDVAIKRIKNSCFSGGSSEQARQTKDFWREARILANLHHPNVVAFYGVVPDGPGGTMATVTEYMVNGSLRHVLQRKDRLLDRRKKLMITLDSAFGMEYLHMKNIVHFDLKCDNLLVNLRDPQRPICKVGDFGLSRIKRNTLVSGGVRGTLPWMAPELLNGSSNRVSEKVDVFSFGIVMWEILTGEEPYANLHCGAIIGGIVNNTLRPPVPERCEAEWRKLMEQCWSFDPGVRPSFTEIVERLRSMTVALQPKRRT

SEQ ID NO: 73862 - protein, 958 aa, Arabidopsis thaliana
  peptide (1)..(958): Ceres Seq. ID no. 4983445
MSEGINSSNGYFAESNVADSPRKMFQTAISDVYLPEVLKLLCSFGGRILQRPGDGKLRYIGGETRIISIRKHVGLNELMHKTYALCNHPHTIKYQLPGEDLDALISVCSDEDLLHMIEEYQEAETKAGSQRIRVFLVPSTESSESPKIFHERNMNINRNTNQQTDIDHYQYVSALNGIVDVSPQKSSSGQSGTSQTTQFGNASEFSPTFHLRDSPTSVHTWEHKDSNSPTFMKPYGNTNAVHFMPKMQIPRNSFGQQSPPTSPFSVHKRANTDVPYFADQNGFFDPYLAAPNFPQQNRFFFETTTQKQKHPEVNLHDRRPSDDIYPHGQAYIGAEKMTLKKNALSDPQLHDESQINNGLEAFTKQPWKILRKNLRVVATSKWEDSDDIYFNNPEGKRCKELELTKEVPNSWINRDNNPDSFDQATKKQDGSNSNSSFSPNYFSPNHQPAAQITSSDSQDSGSSVFSLSVNTNENYLDCSREKFNGFQHDMSLDILIRSHTSATDQLCSTTKSSDKADYSSPNTNFPVVFLRQEPMIPRHDLETNSDDSDTQKSLPREESIHYSGLPLRKVGSRETTFMHTQGSDDFFKSKLLGPQLIVEDVTNEVISDNLLSATIVPQVNRESDDDHKSYTREKEITNADHESEMEEKYKKSRNTDDSFSEAAMVEIEAGIYGLQIIKNTDLEDLHELGSGTFGTVYYGKWRGTDVAIKRIKNSCFSGGSSEQARQTKDFWREARILANLHHPNVVAFYGVVPDGPGGTMATVTEYMVNGSLRHVLQRKDRLLDRRKKLMITLDSAFGMEYLHMKNIVHFDLKCDNLLVNLRDPQRPICKVGDFGLSRIKRNTLVSGGVRGTLPWMAPELLNGSSNRVSEKVDVFSFGIVMWEILTGEEPYANLHCGAIIGGIVNNTLRPPVPERCEAEWRKLMEQCWSFDPGVRPSFTEIVERLRSMTVALQPKRRT

SEQ ID NO: 73863 - DNA, 708 bp, Arabidopsis thaliana
  misc_feature (1)..(708): Ceres Seq. ID no. 4983454
  misc_feature (1)..(708): Ortholog of  Ceres SEQ ID NO 12781963 as cited in SEQ ID NO 56339
  misc_feature (1)..(708): Ortholog of  Ceres SEQ ID NO 15179365 as cited in SEQ ID NO 0
atgagatcccctagaaccttggaggtttggaagctaggcactgtcaactatttgaaatcccttaaactgcaggagaaattagtttcagagagaaaagctcatcagattccagataccctcctctcgcttcagcatccaccaacttatacgctcggaaagcgtagaaccgatcacaatctacttatccctgaatctgaacttacaaaaatcggagctgaacttcattatactcaaagaggaggagacatcaccttccatggccctcatcaagccatcttatatcccatcatttccttacgcagcattggttttggtgctaggaactacgtggagacattggagcggtcaatgatcgagtttgcttcgatttatggcgtgaaagctcgagcaggaaacaaatgtgagactggggtttgggttggggataggaagatcggtgctattggggttaggatatcttctggaatcactagtcatggtttggccttaaatatagatcctgatatgaagtactttgagcacattgtgccttgtgggattgctgataaagaagttacatctttgcgaagagagacggatactctgcttccttcagaagaagtgattcatgaacagttggtttcttgtttagccaaagcgttttcttatgatgatgttgtctggaaggaagatccttcactcattttggacacccaagataaagaataa

SEQ ID NO: 73864 - protein, 235 aa, Arabidopsis thaliana
  peptide (1)..(235): Ceres Seq. ID no. 4983455
MRSPRTLEVWKLGTVNYLKSLKLQEKLVSERKAHQIPDTLLSLQHPPTYTLGKRRTDHNLLIPESELTKIGAELHYTQRGGDITFHGPHQAILYPIISLRSIGFGARNYVETLERSMIEFASIYGVKARAGNKCETGVWVGDRKIGAIGVRISSGITSHGLALNIDPDMKYFEHIVPCGIADKEVTSLRRETDTLLPSEEVIHEQLVSCLAKAFSYDDVVWKEDPSLILDTQDKE

SEQ ID NO: 73865 - protein, 119 aa, Arabidopsis thaliana
  peptide (1)..(119): Ceres Seq. ID no. 4983456
MIEFASIYGVKARAGNKCETGVWVGDRKIGAIGVRISSGITSHGLALNIDPDMKYFEHIVPCGIADKEVTSLRRETDTLLPSEEVIHEQLVSCLAKAFSYDDVVWKEDPSLILDTQDKE

SEQ ID NO: 73866 - DNA, 1698 bp, Arabidopsis thaliana
  misc_feature (1)..(1698): Ceres Seq. ID no. 4983563
  misc_feature (1)..(1698): Ortholog of  Ceres SEQ ID NO 13597260 as cited in SEQ ID NO 63885
atgaattctaacaactggctcgcgttccctctatcaccaactcactcttctttgccgcctcacattcactcttcacaaaattctcatttcaatctaggtttggtcaacgacaatatcgacaacccttttcaaaaccaaggatggaatatgatcaatccacatggtggaggcggcgaaggtggagaggttccaaaagtggctgatttcttaggagtgagcaaatcgggggatcatcacaccgatcacaacctcgtaccttataacgacattcatcaaaccaacgcctccgactactactttcaaaccaatagcttgttacctacagtcgtcacttgtgcctctaatgctcctaataattatgagcttcaagagagtgcacacaatttgcaatctctcactctctctatgggaagtactggagctgccgctgcagaagtcgccactgtgaaagcctcgccggctgagactagtgccgataatagtagcagcactaccaacacaagtggaggagccatcgttgaggctacaccgagacggactttggaaacttttggacaacgaacctctatctatcgtggagttacaagacatagatggaccggtagatatgaagctcatctttgggataatagctgtagaagagaaggacaatcaaggaaaggaagacaaggtgggtatgacaaagaagagaaagcagccagagcatatgatctagctgcacttaaatattggggtccctctactactaccaactttccgataactaactacgagaaggaagtagaggagatgaaaaacatgacgagacaagagtttgtggcttctataagaaggaaaagtagcggattctcgcgtggtgcatccatgtatcgtggagtaacaaggcatcatcaacatggaagatggcaagcaaggatcggccgagttgctggaaacaaagatctctacttgggaacattcagcacggaggaagaagcagcagaagcttatgacatagctgcgataaagtttcgaggtctaaacgcggttacaaactttgagataaatcggtatgatgtgaaagccatcctggagagcaacacacttcctataggaggtggtgcggctaaacggctcaaagaagctcaagctctagaatcatcaagaaaacgagaggaaatgatagccctcggatcaaatttccatcaatatggtgcagcgagcggctcgagctctgttgcttccagctctaggcttcagcttcaaccttaccctctaagcattcaacaaccttttgagcatcttcatcatcatcagcctttacttactctacagaacaacaacgatatctctcagtatcatgattcctttagttacattcagacgcagcttcatcttcaccaacaacaaaccaacaattacttgcagtcttctagtcacacttcacagctctacaatgcttatcttcagagtaaccctggtctgcttcatggatttgtctctgataataacaacacttcagggtttcttggaaacaatgggattggtattgggtcaagctctaccgttggatcatcggctgaggaagagtttccagccgtgaaagtcgattacgatatgcctccttccggtggagctacagggtatggaggatggaatagtggagagtctgctcaaggatcgaatccaggaggtgttttcacgatgtggaatgaataa

SEQ ID NO: 73867 - protein, 565 aa, Arabidopsis thaliana; identical to SEQ ID NO: 70121
  peptide (1)..(565): Ceres Seq. ID no. 4983564

SEQ ID NO: 73868 - protein, 516 aa, Arabidopsis thaliana
  peptide (1)..(516): Ceres Seq. ID no. 4983565
MINPHGGGGEGGEVPKVADFLGVSKSGDHHTDHNLVPYNDIHQTNASDYYFQTNSLLPTVVTCASNAPNNYELQESAHNLQSLTLSMGSTGAAAAEVATVKASPAETSADNSSSTTNTSGGAIVEATPRRTLETFGQRTSIYRGVTRHRWTGRYEAHLWDNSCRREGQSRKGRQGGYDKEEKAARAYDLAALKYWGPSTTTNFPITNYEKEVEEMKNMTRQEFVASIRRKSSGFSRGASMYRGVTRHHQHGRWQARIGRVAGNKDLYLGTFSTEEEAAEAYDIAAIKFRGLNAVTNFEINRYDVKAILESNTLPIGGGAAKRLKEAQALESSRKREEMIALGSNFHQYGAASGSSSVASSSRLQLQPYPLSIQQPFEHLHHHQPLLTLQNNNDISQYHDSFSYIQTQLHLHQQQTNNYLQSSSHTSQLYNAYLQSNPGLLHGFVSDNNNTSGFLGNNGIGIGSSSTVGSSAEEEFPAVKVDYDMPPSGGATGYGGWNSGESAQGSNPGGVFTMWNE

SEQ ID NO: 73869 - protein, 430 aa, Arabidopsis thaliana
  peptide (1)..(430): Ceres Seq. ID no. 4983566
MGSTGAAAAEVATVKASPAETSADNSSSTTNTSGGAIVEATPRRTLETFGQRTSIYRGVTRHRWTGRYEAHLWDNSCRREGQSRKGRQGGYDKEEKAARAYDLAALKYWGPSTTTNFPITNYEKEVEEMKNMTRQEFVASIRRKSSGFSRGASMYRGVTRHHQHGRWQARIGRVAGNKDLYLGTFSTEEEAAEAYDIAAIKFRGLNAVTNFEINRYDVKAILESNTLPIGGGAAKRLKEAQALESSRKREEMIALGSNFHQYGAASGSSSVASSSRLQLQPYPLSIQQPFEHLHHHQPLLTLQNNNDISQYHDSFSYIQTQLHLHQQQTNNYLQSSSHTSQLYNAYLQSNPGLLHGFVSDNNNTSGFLGNNGIGIGSSSTVGSSAEEEFPAVKVDYDMPPSGGATGYGGWNSGESAQGSNPGGVFTMWNE

SEQ ID NO: 73870 - DNA, 1269 bp, Arabidopsis thaliana
  misc_feature (1)..(1269): Ceres Seq. ID no. 4983857
  misc_feature (1)..(1269): Ortholog of  Ceres SEQ ID NO 13594068 as cited in SEQ ID NO 58624
atgggtggagaagagagatcaggagatggagaaaaaagaggggaagaagtagttgatgctggttctctcttcgtccttaaatccaaaggatgggctgccgggatatcttgtctggtcggaggagcagccgttactttctactcgtacactcttctttctcttactctcgaacaccacgcttctctcggcaaccgttacctccgcttccgtgacatggctcatcacatcctcagtccgaaatggggaaggtactacgttggaccaatacaaatggcggtgtgctatggtgtggttattgccaatgcgctcttgggagggcaatgcctaaaggcaatgtacttggtagtgcagccaaatggggaaatgaaactctttgagtttgtgattatttttggatgcttacttttggttttggcacaattcccatcctttcactctctacgatacatcaactcactgtctctcctcctctgcctcctctacagtgcttctgccgctgctgcatccatctacattggaaaagaaccaaatgcaccagagaaggactatactatagttggtgatccagaaactagagtgtttggaatctttaatgctatggctattattgctactacatacggcaatggcattatacctgaaattcaggcaacaatatcggcaccagtgaaaggaaaaatgatgaaagggttgtgtatgtgttaccttgtagtaataatgacatttttcacagtagccatcacaggatattgggcattcggtaaaaaagccaatggacttatcttcaccaatttcttaaatgccgagacaaaccattactttgtccctacttggtttatttttctcgtcaatctcttcactgtccttcaactttcggccgttgctgtggtatacctacaacctataaacgatattttggaaagtgtgatcagcgatccaacaaagaaagaattctctatccgcaatgtcatccctcgactagttgtgcgttccctcttcgtcgtgatggctacaatcgttgcggcaatgcttccattttttggagatgtaaactccttgttaggcgctttcggttttatacctctagacttcgttcttcctgtagttttcttcaactttactttcaagccgtctaaaaaaagtttcattttttggatcaacactgtgatcgccgtggttttttcgtgtttaggggtgattgctatggtagcggcggttagacagattataatagatgccaatacgtataagttgtttgcggatgtataa

SEQ ID NO: 73871 - protein, 422 aa, Arabidopsis thaliana
  peptide (1)..(422): Ceres Seq. ID no. 4983858
MGGEERSGDGEKRGEEVVDAGSLFVLKSKGWAAGISCLVGGAAVTFYSYTLLSLTLEHHASLGNRYLRFRDMAHHILSPKWGRYYVGPIQMAVCYGVVIANALLGGQCLKAMYLVVQPNGEMKLFEFVIIFGCLLLVLAQFPSFHSLRYINSLSLLLCLLYSASAAAASIYIGKEPNAPEKDYTIVGDPETRVFGIFNAMAIIATTYGNGIIPEIQATISAPVKGKMMKGLCMCYLVVIMTFFTVAITGYWAFGKKANGLIFTNFLNAETNHYFVPTWFIFLVNLFTVLQLSAVAVVYLQPINDILESVISDPTKKEFSIRNVIPRLVVRSLFVVMATIVAAMLPFFGDVNSLLGAFGFIPLDFVLPVVFFNFTFKPSKKSFIFWINTVIAVVFSCLGVIAMVAAVRQIIIDANTYKLFADV

SEQ ID NO: 73872 - protein, 351 aa, Arabidopsis thaliana; identical to SEQ ID NO: 71004
  peptide (1)..(351): Ceres Seq. ID no. 4983859

SEQ ID NO: 73873 - protein, 332 aa, Arabidopsis thaliana; identical to SEQ ID NO: 71005
  peptide (1)..(332): Ceres Seq. ID no. 4983860

SEQ ID NO: 73874 - DNA, 879 bp, Arabidopsis thaliana
  misc_feature (1)..(879): Ceres Seq. ID no. 4983871
  misc_feature (1)..(879): Ortholog of  Ceres SEQ ID NO 13585342 as cited in SEQ ID NO 63601
atgggggattctcctgctagttcaaatagagttaagcttcgggatgggagattcttagcttataaagaaagaggagttccaaaggaaaaggccaaatacaagatcattcttgttcatggctttggaagctccaaagatatgaacttctctgcctcaaaagagcttatagaagaacttgaggtgtacttgctattctacgaccgttctggatatggagcatcagattcaaacacaaaacgttcgttggaaagcgaagttgaagacatagcagaacttgcagatcagctggagttaggacctaagttatccggcgtggcttttgttgctccggtggttaattatcgatggccttcacttccgaagaagctaatcaaaaaagattataggacaggtattatcaaatggggtttgaggatatcaaaatatgcacctggactgttacattggtggatcattcaaaagctcttcgcttcaactagttcggtccttgaaagcaatccggtctacttcaacagccacgacatagaagtgctcaagcgaaaaactggttttcccatgcttactaaggaaaagctacgggaaagaaatgttttcgatactctaagggacgattttatggtttgtttcgggcaatgggacttcgaacccgcggatctaagcatcagtacaaagagctatattcacatctggcatggtaaggaagacaaagttgttccatttcaacttcaaagatgcattctgcagaaacaacctttgatcaactaccacgaaatcccccaaggcggacatctgatcgtacactacgatggcatttgcgatacgattctacgtgcactattgctcaaggaagaacaacaaaagctgtataaaataaattga

SEQ ID NO: 73875 - protein, 292 aa, Arabidopsis thaliana
  peptide (1)..(292): Ceres Seq. ID no. 4983872
MGDSPASSNRVKLRDGRFLAYKERGVPKEKAKYKIILVHGFGSSKDMNFSASKELIEELEVYLLFYDRSGYGASDSNTKRSLESEVEDIAELADQLELGPKLSGVAFVAPVVNYRWPSLPKKLIKKDYRTGIIKWGLRISKYAPGLLHWWIIQKLFASTSSVLESNPVYFNSHDIEVLKRKTGFPMLTKEKLRERNVFDTLRDDFMVCFGQWDFEPADLSISTKSYIHIWHGKEDKVVPFQLQRCILQKQPLINYHEIPQGGHLIVHYDGICDTILRALLLKEEQQKLYKIN

SEQ ID NO: 73876 - protein, 246 aa, Arabidopsis thaliana
  peptide (1)..(246): Ceres Seq. ID no. 4983873
MNFSASKELIEELEVYLLFYDRSGYGASDSNTKRSLESEVEDIAELADQLELGPKLSGVAFVAPVVNYRWPSLPKKLIKKDYRTGIIKWGLRISKYAPGLLHWWIIQKLFASTSSVLESNPVYFNSHDIEVLKRKTGFPMLTKEKLRERNVFDTLRDDFMVCFGQWDFEPADLSISTKSYIHIWHGKEDKVVPFQLQRCILQKQPLINYHEIPQGGHLIVHYDGICDTILRALLLKEEQQKLYKIN

SEQ ID NO: 73877 - DNA, 2184 bp, Arabidopsis thaliana
  misc_feature (1)..(2184): Ceres Seq. ID no. 4983896
  misc_feature (1)..(2184): Ortholog of  Ceres SEQ ID NO 12586556 as cited in SEQ ID NO 64667
  misc_feature (1)..(2184): Ortholog of  Ceres SEQ ID NO 13660894 as cited in SEQ ID NO 67475
atgcatccaagtacctttcaaacagaactcaacccgcatacttccacgttattaaaaaaactgactcatcattcacagcaaaggaacctcgtggctggacgtgcagttcatggacagatcatcagaacgggagcatcaacctgcatccaacatgccaatgtccttgtcaacttttatgcaaaatgtggaaaattggccaaagcccactccatctttaacgccataatctgcaaggatgttgtgtcctggaacagtctcatcactggctattctcagaacggcggtatctccagctcctacactgttatgcagctgtttcgtgagatgagagcgcaagatatactgccaaatgcttatacccttgctgggatttttaaggccgagtcgagtcttcaaagttctacagttgggaggcaggctcacgcgctagtggtcaaaatgtcaagttttggggatatatatgttgatacttcgttggtgggcatgtactgtaaagcgggcttggtcgaggatggacttaaagtgttcgcctatatgcctgaaagaaatacttatacatggtctactatggtttctggttatgctacaagaggacgcgttgaagaggcaattaaagtcttcaatttgtttcttagagagaaggaggaaggaagtgatagtgactatgtcttcaccgcggttctcagctcgctggctgcaaccatatacgtaggactaggcaggcaaatccattgcatcacaattaaaaatgggttgcttgggtttgtagctttgagtaatgcgcttgttacaatgtattcaaagtgtgagagcttgaatgaggcatgcaagatgtttgactcgtctggtgacagaaattcgattacatggtcagcaatggtcactggttattctcagaatggggaatcacttgaagcagtaaagcttttctctagaatgttttctgctggaatcaagcccagtgaatacacgattgttggggttcttaatgcatgcagtgacatttgctatctagaagaagggaagcaacttcattctttcttgttaaagttgggatttgaaagacatttatttgcaactactgctttggttgacatgtatgcaaaagccggttgtctagcagatgccagaaaaggttttgactgcctacaagaacgtgatgtggcgctttggacatcgcttattagcgggtatgttcaaaactcagataacgaagaggctttgattctgtaccgcagaatgaaaacagcaggtattatcccaaacgacccaaccatggcaagtgttctaaaagcttgctcttctctagctaccttggagctcggaaagcaagtacacggccacacaatcaagcatgggtttgggcttgaagttccaataggaagcgcactttctacaatgtactcaaagtgtgggagtttagaagatgggaacctcgtctttagaagaactcccaataaagatgttgtgtcttggaacgctatgatctcaggcttgtcccataatggacaaggagatgaggctttggaactgtttgaggagatgttagcagaaggaatggaaccagatgatgtcactttcgtgaacattatatcagcgtgtagccacaaaggttttgtagagagaggctggttttatttcaatatgatgtcagatcagatcgggcttgatccaaaagttgaccactatgcttgtatggttgatctgctgagccgtgcaggacagctcaaagaggcaaaagagttcatcgaatcagctaatattgatcacggtttatgcctttggcggatactattaagcgcatgtaagaaccatgggaaatgtgagctaggagtttacgcaggagagaagctcatggcccttggatcgagagaatcatcaacttatgtgcaattgtcaggcatttacacggctttagggcggatgagagatgtggaacgggtttggaaacacatgagagcaaacggggtgagcaaagaagtgggttgcagttggatcgagctgaagaatcagtaccatgtttttgttgtgggagatacaatgcatccgatgattgaagagacgaaggatttggtttgtttggttagtagacagatgatagaagaaggattcgtaactgtgttggattcgtcttttgtcgaagaagaagaaggaacacaattatctacttctttcataatataa

SEQ ID NO: 73878 - protein, 727 aa, Arabidopsis thaliana
  peptide (1)..(727): Ceres Seq. ID no. 4983897
MHPSTFQTELNPHTSTLLKKLTHHSQQRNLVAGRAVHGQIIRTGASTCIQHANVLVNFYAKCGKLAKAHSIFNAIICKDVVSWNSLITGYSQNGGISSSYTVMQLFREMRAQDILPNAYTLAGIFKAESSLQSSTVGRQAHALVVKMSSFGDIYVDTSLVGMYCKAGLVEDGLKVFAYMPERNTYTWSTMVSGYATRGRVEEAIKVFNLFLREKEEGSDSDYVFTAVLSSLAATIYVGLGRQIHCITIKNGLLGFVALSNALVTMYSKCESLNEACKMFDSSGDRNSITWSAMVTGYSQNGESLEAVKLFSRMFSAGIKPSEYTIVGVLNACSDICYLEEGKQLHSFLLKLGFERHLFATTALVDMYAKAGCLADARKGFDCLQERDVALWTSLISGYVQNSDNEEALILYRRMKTAGIIPNDPTMASVLKACSSLATLELGKQVHGHTIKHGFGLEVPIGSALSTMYSKCGSLEDGNLVFRRTPNKDVVSWNAMISGLSHNGQGDEALELFEEMLAEGMEPDDVTFVNIISACSHKGFVERGWFYFNMMSDQIGLDPKVDHYACMVDLLSRAGQLKEAKEFIESANIDHGLCLWRILLSACKNHGKCELGVYAGEKLMALGSRESSTYVQLSGIYTALGRMRDVERVWKHMRANGVSKEVGCSWIELKNQYHVFVVGDTMHPMIEETKDLVCLVSRQMIEEGFVTVLDSSFVEEEEGTQLSTSFII

SEQ ID NO: 73879 - protein, 625 aa, Arabidopsis thaliana
  peptide (1)..(625): Ceres Seq. ID no. 4983898
MQLFREMRAQDILPNAYTLAGIFKAESSLQSSTVGRQAHALVVKMSSFGDIYVDTSLVGMYCKAGLVEDGLKVFAYMPERNTYTWSTMVSGYATRGRVEEAIKVFNLFLREKEEGSDSDYVFTAVLSSLAATIYVGLGRQIHCITIKNGLLGFVALSNALVTMYSKCESLNEACKMFDSSGDRNSITWSAMVTGYSQNGESLEAVKLFSRMFSAGIKPSEYTIVGVLNACSDICYLEEGKQLHSFLLKLGFERHLFATTALVDMYAKAGCLADARKGFDCLQERDVALWTSLISGYVQNSDNEEALILYRRMKTAGIIPNDPTMASVLKACSSLATLELGKQVHGHTIKHGFGLEVPIGSALSTMYSKCGSLEDGNLVFRRTPNKDVVSWNAMISGLSHNGQGDEALELFEEMLAEGMEPDDVTFVNIISACSHKGFVERGWFYFNMMSDQIGLDPKVDHYACMVDLLSRAGQLKEAKEFIESANIDHGLCLWRILLSACKNHGKCELGVYAGEKLMALGSRESSTYVQLSGIYTALGRMRDVERVWKHMRANGVSKEVGCSWIELKNQYHVFVVGDTMHPMIEETKDLVCLVSRQMIEEGFVTVLDSSFVEEEEGTQLSTSFII

SEQ ID NO: 73880 - protein, 619 aa, Arabidopsis thaliana
  peptide (1)..(619): Ceres Seq. ID no. 4983899
MRAQDILPNAYTLAGIFKAESSLQSSTVGRQAHALVVKMSSFGDIYVDTSLVGMYCKAGLVEDGLKVFAYMPERNTYTWSTMVSGYATRGRVEEAIKVFNLFLREKEEGSDSDYVFTAVLSSLAATIYVGLGRQIHCITIKNGLLGFVALSNALVTMYSKCESLNEACKMFDSSGDRNSITWSAMVTGYSQNGESLEAVKLFSRMFSAGIKPSEYTIVGVLNACSDICYLEEGKQLHSFLLKLGFERHLFATTALVDMYAKAGCLADARKGFDCLQERDVALWTSLISGYVQNSDNEEALILYRRMKTAGIIPNDPTMASVLKACSSLATLELGKQVHGHTIKHGFGLEVPIGSALSTMYSKCGSLEDGNLVFRRTPNKDVVSWNAMISGLSHNGQGDEALELFEEMLAEGMEPDDVTFVNIISACSHKGFVERGWFYFNMMSDQIGLDPKVDHYACMVDLLSRAGQLKEAKEFIESANIDHGLCLWRILLSACKNHGKCELGVYAGEKLMALGSRESSTYVQLSGIYTALGRMRDVERVWKHMRANGVSKEVGCSWIELKNQYHVFVVGDTMHPMIEETKDLVCLVSRQMIEEGFVTVLDSSFVEEEEGTQLSTSFII

SEQ ID NO: 73881 - DNA, 552 bp, Arabidopsis thaliana
  misc_feature (1)..(552): Ceres Seq. ID no. 4983933
  misc_feature (1)..(552): Ortholog of  Ceres SEQ ID NO 13595084 as cited in SEQ ID NO 56095
  misc_feature (1)..(552): Ortholog of  Ceres SEQ ID NO 13594252 as cited in SEQ ID NO 57528
atgtggaagaatcgacgcggagggtttcttctacttggatcaacgacattgttatggttcctctttgagaaatgtggatacagtttcttcccctttgttgttaatactcagcttctctccgtcgttatactcttcctctgggccaaatctgctattctcttcaataggcctatgcctcaactacctaatcttgaaatcactgaggaatttgtgtttatggtggctgatgctatacgagtctggattaataccgtgctcgctgttgctcgtgagatttacgtgggaagaaatgcaaagcaactctttcgggtgagtgttgtgttgtggacagtatcatttgttggaaatttcttaaacttcctcacaatactctatcttggtgttgttctgagtctgttgattccctttttgtacgagagataccaggatcttattgacgagaagctatctttaactcatcgagtcattcagacacagtacaggaagatcgatgaaagattactacagaagattattgctaagcccacaaataagataaagaagatgcaatag

SEQ ID NO: 73882 - protein, 183 aa, Arabidopsis thaliana; identical to SEQ ID NO: 70871
  peptide (1)..(183): Ceres Seq. ID no. 4983934

SEQ ID NO: 73883 - protein, 126 aa, Arabidopsis thaliana; identical to SEQ ID NO: 70872
  peptide (1)..(126): Ceres Seq. ID no. 4983935

SEQ ID NO: 73884 - protein, 111 aa, Arabidopsis thaliana
  peptide (1)..(111): Ceres Seq. ID no. 4983936
MVADAIRVWINTVLAVAREIYVGRNAKQLFRVSVVLWTVSFVGNFLNFLTILYLGVVLSLLIPFLYERYQDLIDEKLSLTHRVIQTQYRKIDERLLQKIIAKPTNKIKKMQ

SEQ ID NO: 73885 - DNA, 1502 bp, Arabidopsis thaliana
  misc_feature (1)..(1502): Ceres Seq. ID no. 4983988
  misc_feature (1)..(1502): Ortholog of  Ceres SEQ ID NO 13655434 as cited in SEQ ID NO 64337
gattagcaaatattcgtgatattttagctgtatggttttggttccgatcacaaagagcatcgaatcgagctacttcctccgccggctttgctgtgtgtgtgatcgttcgtttactaaatctgaaacaagtatctaacgccttgccggagatgtcgagctcaggccaaactcagttccgttatacacagacgccgtcgaaggtggttcatctgcggaatcttccatgggaatgcgtcgaagaggagctcatcgacctttgcaaacgattcggcaagatcgtcaataccaagagcaatgtcggcgccaatcgcaatcaagctttcgtcgaatttgctgacttgaatcaagctatatcaatggtttcgtattatgcttcatcttcagagcccgcacagattcgtgggaaaactgtctatattcagtactctaatcgccatgagattgttaacaatcagagtcctggagatgtccctggaaatgtcctcttggttacctttgaaggagtggaatctcacgaagtcagcatcgatgttatccatctggtattttctgcttttggatttgtgcataaaattgccacatttgagaaagctgctggtttccaggcactagttcaatttactgatgtggagactgcatccgcggcaaggagtgcgttggatggcagaagtatacccaggtatctgctttccgcacatgttggttcgtgcagtttgcgaatgtcttattcagctcatactgatctcaacatcaagtttcagtcccaccggagcagagattacacaaatccataccttccagtgaatcagaccgcaatggatgggtctatgcagcctgctttaggtgctgacggcaagaaagttgaatctcagagcaacgtccttctcggtttgattgagaatatgcagtatgctgtcactgtggatgttcttcacacggtgttttctgcatatggaactgtccagaagattgctatatttgagaagaatggttcaacgcaagcattaattcaatactctgatataccaacagcagcaatggccaaagaagcactggaaggacactgcatttatgacggtggctactgtaagcttcgactatcatactctcgtcatactgatctgaatgttaaggcttttagcgacaaaagcagagactatacacttcctgatctaagcctacttgtggcacaaaaaggtcccgcggtgtcgggttctgcaccaccagcaggttggcagaacccgcaagcgcaaagtcaatactcaggttatggcggaagcccatatatgtacccatcatctgatcccaacggggcttcaccctcaggtcaacctccttactatggatgagatatttgtttactaaaaatttcggattttgctgccaatggggagtatttccatgtttaggttgtttgaggttaaaagtgtgattgttctttcttttttgttgttgacataatttaagtggggagaccaataataaatcgaatatgttgcgct

SEQ ID NO: 73886 - protein, 448 aa, Arabidopsis thaliana; identical to SEQ ID NO: 27593
  peptide (1)..(448): Ceres Seq. ID no. 4983989

SEQ ID NO: 73887 - protein, 399 aa, Arabidopsis thaliana; identical to SEQ ID NO: 27594
  peptide (1)..(399): Ceres Seq. ID no. 4983990

SEQ ID NO: 73888 - protein, 330 aa, Arabidopsis thaliana; identical to SEQ ID NO: 27595
  peptide (1)..(330): Ceres Seq. ID no. 4983991

SEQ ID NO: 73889 - DNA, 4290 bp, Arabidopsis thaliana
  misc_feature (1)..(4290): Ceres Seq. ID no. 4984083
  misc_feature (1)..(4290): Ortholog of  Ceres SEQ ID NO 13657677 as cited in SEQ ID NO 66119
atggcggtttctgcaggggctttagcttttcctgctttatccgttcgcgccactcttaatcctgagattaaagatgaacaagcgaacatcagcagcactacttcttcttcccagaaattcacttacagtcgagcttctcccgccgtccgatggccacatttgaatctccgtgagatttatgattccacaccttcacaaactctttcttctccggtttctcccatcgccggtacaccggattcaggtgatgtcgtcgattcaattgcctcccgcgaggagcaaaagacgaaagatgaaaccgccgtggcgactcggagaaggagagtgaagaagatgaataaagtggcgttgattaaggctaaagactggagagagagagtcaaatttctgacggataagattctaagcttgaaatctaatcagttcgttgctgatattctcgatgctcgtcttgttcagatgactcctactgattactgcttcgtcgtgaaatcagttggtcaagagagttggcaacgagctcttgaggtttttgagtggctcaatctccgtcattggcactctcctaacgctcggatggtggctgctatactcggtgttttgggacggtggaatcaggaatcccttgcggtggagattttcactagggctgagccaaccgtcggagatagggttcaggtgtacaacgcaatgatgggggtttattcacgtagtggtaagttttcgaaagcacaagagctggtcgatgcaatgcgtcagagagggtgtgttccagatcttattagtttcaatactcttatcaacgctaggcttaaatctggtgggttgactccgaatttggctgttgagttattagatatggtgaggaattcgggtcttaggcctgatgctatcacttacaacactcttcttagtgcctgttcgcgggattcgaatttggatggtgcagtgaaggtttttgaggatatggaagctcatcggtgtcagcctgatttgtggacttataatgctatgatttctgtttatggaagatgtgggcttgctgctgaagctgagaggctcttcatggagctggagcttaaaggttttttccctgatgcagtgacatacaactctttgctgtatgcgtttgccagagaaagaaatacggagaaggtgaaggaggtgtaccaacagatgcagaaaatggggtttgggaaagatgagatgacatacaacacgatcattcacatgtatggcaagcagggacaacttgatcttgcgctacagctttataaggacatgaaaggtttgtcgggtaggaaccctgatgctattacttacactgttttgatcgattctcttggaaaagcaaaccgaacagtggaagccgcagctttaatgtctgagatgcttgatgttgggatcaaaccaactctgcagacatacagtgctcttatctgtggttatgccaaggctggaaagcgagaggaggctgaggatactttcagttgcatgttgcgctcaggcactaaacctgataatttagcgtattctgtaatgttggatgtattactaagaggcaacgagacaagaaaggcctggggtttataccgtgatatgatttctgatggtcatacaccgtcttacactctgtatgagttgatgatacttggacttatgaaggaaaacaggtcagatgacattcagaaaaccatcagagacatggaagaattgtgtggcatgaacccactagagatttcatcagtgcttgttaagggcgaatgctttgatctcgctgctagacagttgaaagtggctatcaccaatggctatgaattggaaaacgacactctattgtctatcctgggttcctatagttcatcaggcaggcattcagaagcgtttgagttacttgaatttttgaaagagcatgccagtggatctaaaagacttataactgaagctctaattgttctacattgcaaggtgaacaacttaagcgctgctctagatgaatatttcgctgacccatgtgttcatggctggtgttttggcagttccaccatgtatgagactctattacactgctgtgtagcaaatgaacattatgctgaagcttctcaggttttctctgacctgagactatctggctgcgaagcttcagaaagtgtttgtaaaagcatggttgttgtgtattgcaagcttggctttccagagacagctcatcaagtggttaatcaggctgagacaaaaggcttccactttgcttgttcgcctatgtatactgatatcattgaggcttatggaaaacaaaaactatggcagaaagcggagagtgtggttggcaacctaagacaaagtggacgaacacctgatctgaagacatggaacagcttgatgtcggcttatgctcagtgtggctgttacgagcgggcaagggctatttttaacactatgatgagggatggtccgtctcctactgttgaatccatcaatattttgttgcatgctttgtgtgttgatgggagactcgaggagctctacgttgttgttgaagaattgcaagatatgggctttaagattagcaaaagctccattctcttgatgcttgacgcatttgcccgagctggaaatatctttgaggtaaagaagatatacagtagcatgaaagctgctggttacttacccacaatccgcctttataggatgatgattgagcttctctgcaaagggaaacgagttagagatgctgaaattatggtctctgaaatggaagaggccaatttcaaggttgagcttgctatatggaattccatgctgaagatgtatacggctatcgaggattacaagaagacagttcaagtataccagaggataaaagaaactggactggaaccagacgagaccacttacaatactctgattataatgtattgtagagacagacgaccagaagaagggtacttgcttatgcagcaaatgagaaatcttggtttggacccaaaactggacacatacaagagcttgatctctgcttttggtaagcaaaaatgccttgaacaagctgaacaactgtttgaagagcttctctcaaaaggtttgaaactagaccgttcattttaccacacaatgatgaaaatatcccgagattctggaagcgactccaaggcagagaagttattgcaaatgatgaagaatgcgggaatagaaccaacacttgctacaatgcatctgcttatggtttcatatagttcttcaggaaatccccaagaagctgaaaaagttcttagtaacctgaaagacacagaagtggaactaacaactctgccttatagttcagttattgatgcttaccttcggagcaaagattataacagtggaatagaaaggcttttggaaatgaagaaagagggcctagagccagaccacaggatatggacttgctttgttagggcggcgagtttctccaaggaaaaaattgaagtcatgttgctgcttaaagctcttgaagatattggttttgatcttcctatcaggcttttagctggaagacctgagttgctagtttctgaggtggatggatggttcgagaaactgaaatccatagaggacaatgctgctctcaattttgttaatgctcttttgaatcttctctgggcgtttgaactcagagctactgcatcatgggttttccaattgggaatcaaaaggggtatcttcagtctcgatgtttttagggtggcggacaaggactggggtgcggatttcagaaggctgtctggaggtgcagcacttgatgcatcactggaaggctacccagagtctccaaagtcagttgtcttaatcacagggaccgcagagtacaacggtatatcccttgataaaacgctaaaggcgtgtctttgggaaatgggttctccatttcttccctgcaagacgagaacgggactgctagtggccaaagctcactctctcagaatgtggttgaaggactcgccgttctgcttcgacttggagctaaaagactcggtgtctttaccagaatcaaactcgatggacctgattgacgggtgtttcataagacgtggacttgttcctgcgtttaaccacatcaaagagagacttggtggatttgtgtcaccaaagaagttttcgagactggcgttgctaccagacgagatgagagagcgagtgataaagacagatattgaaggacatagacagaagttagagaagatgaagaagaagaaaatgggcaatgaaacgaatggtattaacactcgaaggaagttcgtcagaagcaagtga

SEQ ID NO: 73890 - protein, 1429 aa, Arabidopsis thaliana
  peptide (1)..(1429): Ceres Seq. ID no. 4984084
MAVSAGALAFPALSVRATLNPEIKDEQANISSTTSSSQKFTYSRASPAVRWPHLNLREIYDSTPSQTLSSPVSPIAGTPDSGDVVDSIASREEQKTKDETAVATRRRRVKKMNKVALIKAKDWRERVKFLTDKILSLKSNQFVADILDARLVQMTPTDYCFVVKSVGQESWQRALEVFEWLNLRHWHSPNARMVAAILGVLGRWNQESLAVEIFTRAEPTVGDRVQVYNAMMGVYSRSGKFSKAQELVDAMRQRGCVPDLISFNTLINARLKSGGLTPNLAVELLDMVRNSGLRPDAITYNTLLSACSRDSNLDGAVKVFEDMEAHRCQPDLWTYNAMISVYGRCGLAAEAERLFMELELKGFFPDAVTYNSLLYAFARERNTEKVKEVYQQMQKMGFGKDEMTYNTIIHMYGKQGQLDLALQLYKDMKGLSGRNPDAITYTVLIDSLGKANRTVEAAALMSEMLDVGIKPTLQTYSALICGYAKAGKREEAEDTFSCMLRSGTKPDNLAYSVMLDVLLRGNETRKAWGLYRDMISDGHTPSYTLYELMILGLMKENRSDDIQKTIRDMEELCGMNPLEISSVLVKGECFDLAARQLKVAITNGYELENDTLLSILGSYSSSGRHSEAFELLEFLKEHASGSKRLITEALIVLHCKVNNLSAALDEYFADPCVHGWCFGSSTMYETLLHCCVANEHYAEASQVFSDLRLSGCEASESVCKSMVVVYCKLGFPETAHQVVNQAETKGFHFACSPMYTDIIEAYGKQKLWQKAESVVGNLRQSGRTPDLKTWNSLMSAYAQCGCYERARAIFNTMMRDGPSPTVESINILLHALCVDGRLEELYVVVEELQDMGFKISKSSILLMLDAFARAGNIFEVKKIYSSMKAAGYLPTIRLYRMMIELLCKGKRVRDAEIMVSEMEEANFKVELAIWNSMLKMYTAIEDYKKTVQVYQRIKETGLEPDETTYNTLIIMYCRDRRPEEGYLLMQQMRNLGLDPKLDTYKSLISAFGKQKCLEQAEQLFEELLSKGLKLDRSFYHTMMKISRDSGSDSKAEKLLQMMKNAGIEPTLATMHLLMVSYSSSGNPQEAEKVLSNLKDTEVELTTLPYSSVIDAYLRSKDYNSGIERLLEMKKEGLEPDHRIWTCFVRAASFSKEKIEVMLLLKALEDIGFDLPIRLLAGRPELLVSEVDGWFEKLKSIEDNAALNFVNALLNLLWAFELRATASWVFQLGIKRGIFSLDVFRVADKDWGADFRRLSGGAALDASLEGYPESPKSVVLITGTAEYNGISLDKTLKACLWEMGSPFLPCKTRTGLLVAKAHSLRMWLKDSPFCFDLELKDSVSLPESNSMDLIDGCFIRRGLVPAFNHIKERLGGFVSPKKFSRLALLPDEMRERVIKTDIEGHRQKLEKMKKKKMGNETNGINTRRKFVRSK

SEQ ID NO: 73891 - protein, 1318 aa, Arabidopsis thaliana
  peptide (1)..(1318): Ceres Seq. ID no. 4984085
MNKVALIKAKDWRERVKFLTDKILSLKSNQFVADILDARLVQMTPTDYCFVVKSVGQESWQRALEVFEWLNLRHWHSPNARMVAAILGVLGRWNQESLAVEIFTRAEPTVGDRVQVYNAMMGVYSRSGKFSKAQELVDAMRQRGCVPDLISFNTLINARLKSGGLTPNLAVELLDMVRNSGLRPDAITYNTLLSACSRDSNLDGAVKVFEDMEAHRCQPDLWTYNAMISVYGRCGLAAEAERLFMELELKGFFPDAVTYNSLLYAFARERNTEKVKEVYQQMQKMGFGKDEMTYNTIIHMYGKQGQLDLALQLYKDMKGLSGRNPDAITYTVLIDSLGKANRTVEAAALMSEMLDVGIKPTLQTYSALICGYAKAGKREEAEDTFSCMLRSGTKPDNLAYSVMLDVLLRGNETRKAWGLYRDMISDGHTPSYTLYELMILGLMKENRSDDIQKTIRDMEELCGMNPLEISSVLVKGECFDLAARQLKVAITNGYELENDTLLSILGSYSSSGRHSEAFELLEFLKEHASGSKRLITEALIVLHCKVNNLSAALDEYFADPCVHGWCFGSSTMYETLLHCCVANEHYAEASQVFSDLRLSGCEASESVCKSMVVVYCKLGFPETAHQVVNQAETKGFHFACSPMYTDIIEAYGKQKLWQKAESVVGNLRQSGRTPDLKTWNSLMSAYAQCGCYERARAIFNTMMRDGPSPTVESINILLHALCVDGRLEELYVVVEELQDMGFKISKSSILLMLDAFARAGNIFEVKKIYSSMKAAGYLPTIRLYRMMIELLCKGKRVRDAEIMVSEMEEANFKVELAIWNSMLKMYTAIEDYKKTVQVYQRIKETGLEPDETTYNTLIIMYCRDRRPEEGYLLMQQMRNLGLDPKLDTYKSLISAFGKQKCLEQAEQLFEELLSKGLKLDRSFYHTMMKISRDSGSDSKAEKLLQMMKNAGIEPTLATMHLLMVSYSSSGNPQEAEKVLSNLKDTEVELTTLPYSSVIDAYLRSKDYNSGIERLLEMKKEGLEPDHRIWTCFVRAASFSKEKIEVMLLLKALEDIGFDLPIRLLAGRPELLVSEVDGWFEKLKSIEDNAALNFVNALLNLLWAFELRATASWVFQLGIKRGIFSLDVFRVADKDWGADFRRLSGGAALDASLEGYPESPKSVVLITGTAEYNGISLDKTLKACLWEMGSPFLPCKTRTGLLVAKAHSLRMWLKDSPFCFDLELKDSVSLPESNSMDLIDGCFIRRGLVPAFNHIKERLGGFVSPKKFSRLALLPDEMRERVIKTDIEGHRQKLEKMKKKKMGNETNGINTRRKFVRSK

SEQ ID NO: 73892 - protein, 1276 aa, Arabidopsis thaliana
  peptide (1)..(1276): Ceres Seq. ID no. 4984086
MTPTDYCFVVKSVGQESWQRALEVFEWLNLRHWHSPNARMVAAILGVLGRWNQESLAVEIFTRAEPTVGDRVQVYNAMMGVYSRSGKFSKAQELVDAMRQRGCVPDLISFNTLINARLKSGGLTPNLAVELLDMVRNSGLRPDAITYNTLLSACSRDSNLDGAVKVFEDMEAHRCQPDLWTYNAMISVYGRCGLAAEAERLFMELELKGFFPDAVTYNSLLYAFARERNTEKVKEVYQQMQKMGFGKDEMTYNTIIHMYGKQGQLDLALQLYKDMKGLSGRNPDAITYTVLIDSLGKANRTVEAAALMSEMLDVGIKPTLQTYSALICGYAKAGKREEAEDTFSCMLRSGTKPDNLAYSVMLDVLLRGNETRKAWGLYRDMISDGHTPSYTLYELMILGLMKENRSDDIQKTIRDMEELCGMNPLEISSVLVKGECFDLAARQLKVAITNGYELENDTLLSILGSYSSSGRHSEAFELLEFLKEHASGSKRLITEALIVLHCKVNNLSAALDEYFADPCVHGWCFGSSTMYETLLHCCVANEHYAEASQVFSDLRLSGCEASESVCKSMVVVYCKLGFPETAHQVVNQAETKGFHFACSPMYTDIIEAYGKQKLWQKAESVVGNLRQSGRTPDLKTWNSLMSAYAQCGCYERARAIFNTMMRDGPSPTVESINILLHALCVDGRLEELYVVVEELQDMGFKISKSSILLMLDAFARAGNIFEVKKIYSSMKAAGYLPTIRLYRMMIELLCKGKRVRDAEIMVSEMEEANFKVELAIWNSMLKMYTAIEDYKKTVQVYQRIKETGLEPDETTYNTLIIMYCRDRRPEEGYLLMQQMRNLGLDPKLDTYKSLISAFGKQKCLEQAEQLFEELLSKGLKLDRSFYHTMMKISRDSGSDSKAEKLLQMMKNAGIEPTLATMHLLMVSYSSSGNPQEAEKVLSNLKDTEVELTTLPYSSVIDAYLRSKDYNSGIERLLEMKKEGLEPDHRIWTCFVRAASFSKEKIEVMLLLKALEDIGFDLPIRLLAGRPELLVSEVDGWFEKLKSIEDNAALNFVNALLNLLWAFELRATASWVFQLGIKRGIFSLDVFRVADKDWGADFRRLSGGAALDASLEGYPESPKSVVLITGTAEYNGISLDKTLKACLWEMGSPFLPCKTRTGLLVAKAHSLRMWLKDSPFCFDLELKDSVSLPESNSMDLIDGCFIRRGLVPAFNHIKERLGGFVSPKKFSRLALLPDEMRERVIKTDIEGHRQKLEKMKKKKMGNETNGINTRRKFVRSK

SEQ ID NO: 73893 - DNA, 2742 bp, Arabidopsis thaliana
  misc_feature (1)..(2742): Ceres Seq. ID no. 4984244
  misc_feature (1)..(2742): Ortholog of  Ceres SEQ ID NO 14303531 as cited in SEQ ID NO 67674
atgaaagttcgtaggaaacttggtggtggttgcggcggagacgtcgttgtttcatggcggacgttcttttggttcgtgattctgtttgtcttctccttcgttctcttctccaccatgtttatttttaaggggaagtttcgtccggtggttcgttcgacgataagcttctcaacggctgttacggcaagggcggttttccgtgagtctatatcgtcttctccggcggttacgattcgtgaagcggtgaaattacctgaacaaactctggttttcctaaaataccctcagtctcgtcggttatttacaaaagacgatctcatttgcgttttctccggttcgtcgaagctacggaaagtgtatccgacggctgtggacagagacaaatttggaggtcagatcgtacggtgtcctgagacgccacgtggctacaccatttcgcttgccgtttcgagatggacgaccgatgatcatctcccggctggaccaactcaccggtatgattggctggtttacgacgccgtgatcgactacgataactctacggtggtttttgtcaaggggcttaatctacggccaggaagagttgctgacgtgtcgagatatgagtgcgtgtacggttgggatttcgcgaaacataatcggttaataagatcagatgtcatcactgcggctcaggagatcgtacggtgtagaacaccgttagctgtgttagacggcccaaaagcggcccgtgggcctgttaaagtctcggttagaatcaaaggaggaaccggaatgcttccttctatcgctcagccggttcggatcattaacccgccgcgaaagaaaccctttcaaatgtgcgtttgcaccatgacccgaaacgcagccgcggttttgagagagtgggtgatgtatcacgccggaattggcgttcaacggtggttcatctatgacaacaacagcgacgacgatatcatcgccgagatcgagaatctcgaaagacgtggttacaacatctctagacatttctggccgtggattaaaactcaggaagccggattctctaattgcgcgatccgtgcaaagagcgattgcgattggattgcgtttatcgacgtcgacgagttcttctacatcccatccggtgaaactctaacttccgtcatcagaaattacacaaccaccgactcaatcggtgaaattcgaacaccttgccacagtttcgggccatcgggtttgagatctcggcctcggagtggagtcacgtcgggatacacttgccgtgtggtgttaccggagagacacaagagcataatccggccggaagcgatgaacgcgacgctgataaacgttgttcaccattttcacctcagagatggattcacgtttgctgacatggataaggatataatggtaatcaaccactacaagtatcaggtgtgggaggttttcaaagagaagttttatcggcgagtcgcgacgtacgtagcggattggcaaaacgaagagaatgtcgggtcaagagatcgagcacccggtttaggaacccgacccgttgaaccatctgattgggctgagagattctgtgaggttaatgatacggggcttagagatcaagtgtttgagaagttcaaagacaaaaaaacgcagcgtttagtttgggaaaaagcggaagaagacgacaatatccagagaatggtgagtgaaacaccattgagagttactaatcgatctggagatggatcaaatggatcaaaggaagtatcgatcgcgagagagaagaatggtgaaaacgcagagatattcatcagcccgagattcaaatcagcggcggctatggcgggttgggacgaagaagatctgataatcgctagctttgtggtagatgatactcctgaaagaagttcttcaaagcgaaggagacgttccaatttgttgtttaaatcaaccccaccttctggttcttcaagaaggaatcagcgtgttaagcaaagtcttgttccgttacctgttattgatcttgataaagtaatcagacatgaagaagaaaaatctgcagagaagaagaaaaagaagagagagatggaaacagaaacaaaagaagagaagaaaatagataaagatgagaagagtttgtcagatcatgttgtgcttccttgcatagataagcttcgagatgaattgtcttgcgcgatttgtcttgagatttgctttgaacctagtactacaacttgtggacacagcttctgcaaaaagtgtttgcgatctgcggcggataagtgtggaaggaaatgccctaaatgcaggcaactaataggaaatggaagatattgtactgtcaatacggttctttggaacacaatccagcttttgttccctaaagaagtcgaagcacagagagctgcttctgctaacttgaaaggcaaggagacaccgagtcctagaaatccgaatcaaaggctaagaagcagaaacagggaaactgcattgtttcaagagaggttacaaagagaggatatttcgagattgcttgtatctgaagagagaagtgagaggagcgaaagaaggaggagaagtacaagtatgaggttggatcaaaatagggatgcagcattagcgatgcggttacagcgacaggagttcgcatcagcttttggcgcaacgacggctgaaacttcttcttcatcggtttctactctgtcgcgagcaagagctaacctgcaagctatggcgtcaagagctgttcgcaggcaaggatga

SEQ ID NO: 73894 - protein, 913 aa, Arabidopsis thaliana
  peptide (1)..(913): Ceres Seq. ID no. 4984245
MKVRRKLGGGCGGDVVVSWRTFFWFVILFVFSFVLFSTMFIFKGKFRPVVRSTISFSTAVTARAVFRESISSSPAVTIREAVKLPEQTLVFLKYPQSRRLFTKDDLICVFSGSSKLRKVYPTAVDRDKFGGQIVRCPETPRGYTISLAVSRWTTDDHLPAGPTHRYDWLVYDAVIDYDNSTVVFVKGLNLRPGRVADVSRYECVYGWDFAKHNRLIRSDVITAAQEIVRCRTPLAVLDGPKAARGPVKVSVRIKGGTGMLPSIAQPVRIINPPRKKPFQMCVCTMTRNAAAVLREWVMYHAGIGVQRWFIYDNNSDDDIIAEIENLERRGYNISRHFWPWIKTQEAGFSNCAIRAKSDCDWIAFIDVDEFFYIPSGETLTSVIRNYTTTDSIGEIRTPCHSFGPSGLRSRPRSGVTSGYTCRVVLPERHKSIIRPEAMNATLINVVHHFHLRDGFTFADMDKDIMVINHYKYQVWEVFKEKFYRRVATYVADWQNEENVGSRDRAPGLGTRPVEPSDWAERFCEVNDTGLRDQVFEKFKDKKTQRLVWEKAEEDDNIQRMVSETPLRVTNRSGDGSNGSKEVSIAREKNGENAEIFISPRFKSAAAMAGWDEEDLIIASFVVDDTPERSSSKRRRRSNLLFKSTPPSGSSRRNQRVKQSLVPLPVIDLDKVIRHEEEKSAEKKKKKREMETETKEEKKIDKDEKSLSDHVVLPCIDKLRDELSCAICLEICFEPSTTTCGHSFCKKCLRSAADKCGRKCPKCRQLIGNGRYCTVNTVLWNTIQLLFPKEVEAQRAASANLKGKETPSPRNPNQRLRSRNRETALFQERLQREDISRLLVSEERSERSERRRRSTSMRLDQNRDAALAMRLQRQEFASAFGATTAETSSSSVSTLSRARANLQAMASRAVRRQG

SEQ ID NO: 73895 - protein, 875 aa, Arabidopsis thaliana
  peptide (1)..(875): Ceres Seq. ID no. 4984246
MFIFKGKFRPVVRSTISFSTAVTARAVFRESISSSPAVTIREAVKLPEQTLVFLKYPQSRRLFTKDDLICVFSGSSKLRKVYPTAVDRDKFGGQIVRCPETPRGYTISLAVSRWTTDDHLPAGPTHRYDWLVYDAVIDYDNSTVVFVKGLNLRPGRVADVSRYECVYGWDFAKHNRLIRSDVITAAQEIVRCRTPLAVLDGPKAARGPVKVSVRIKGGTGMLPSIAQPVRIINPPRKKPFQMCVCTMTRNAAAVLREWVMYHAGIGVQRWFIYDNNSDDDIIAEIENLERRGYNISRHFWPWIKTQEAGFSNCAIRAKSDCDWIAFIDVDEFFYIPSGETLTSVIRNYTTTDSIGEIRTPCHSFGPSGLRSRPRSGVTSGYTCRVVLPERHKSIIRPEAMNATLINVVHHFHLRDGFTFADMDKDIMVINHYKYQVWEVFKEKFYRRVATYVADWQNEENVGSRDRAPGLGTRPVEPSDWAERFCEVNDTGLRDQVFEKFKDKKTQRLVWEKAEEDDNIQRMVSETPLRVTNRSGDGSNGSKEVSIAREKNGENAEIFISPRFKSAAAMAGWDEEDLIIASFVVDDTPERSSSKRRRRSNLLFKSTPPSGSSRRNQRVKQSLVPLPVIDLDKVIRHEEEKSAEKKKKKREMETETKEEKKIDKDEKSLSDHVVLPCIDKLRDELSCAICLEICFEPSTTTCGHSFCKKCLRSAADKCGRKCPKCRQLIGNGRYCTVNTVLWNTIQLLFPKEVEAQRAASANLKGKETPSPRNPNQRLRSRNRETALFQERLQREDISRLLVSEERSERSERRRRSTSMRLDQNRDAALAMRLQRQEFASAFGATTAETSSSSVSTLSRARANLQAMASRAVRRQG

SEQ ID NO: 73896 - protein, 655 aa, Arabidopsis thaliana
  peptide (1)..(655): Ceres Seq. ID no. 4984247
MLPSIAQPVRIINPPRKKPFQMCVCTMTRNAAAVLREWVMYHAGIGVQRWFIYDNNSDDDIIAEIENLERRGYNISRHFWPWIKTQEAGFSNCAIRAKSDCDWIAFIDVDEFFYIPSGETLTSVIRNYTTTDSIGEIRTPCHSFGPSGLRSRPRSGVTSGYTCRVVLPERHKSIIRPEAMNATLINVVHHFHLRDGFTFADMDKDIMVINHYKYQVWEVFKEKFYRRVATYVADWQNEENVGSRDRAPGLGTRPVEPSDWAERFCEVNDTGLRDQVFEKFKDKKTQRLVWEKAEEDDNIQRMVSETPLRVTNRSGDGSNGSKEVSIAREKNGENAEIFISPRFKSAAAMAGWDEEDLIIASFVVDDTPERSSSKRRRRSNLLFKSTPPSGSSRRNQRVKQSLVPLPVIDLDKVIRHEEEKSAEKKKKKREMETETKEEKKIDKDEKSLSDHVVLPCIDKLRDELSCAICLEICFEPSTTTCGHSFCKKCLRSAADKCGRKCPKCRQLIGNGRYCTVNTVLWNTIQLLFPKEVEAQRAASANLKGKETPSPRNPNQRLRSRNRETALFQERLQREDISRLLVSEERSERSERRRRSTSMRLDQNRDAALAMRLQRQEFASAFGATTAETSSSSVSTLSRARANLQAMASRAVRRQG

SEQ ID NO: 73897 - DNA, 1692 bp, Arabidopsis thaliana
  misc_feature (1)..(1692): Ceres Seq. ID no. 4984414
  misc_feature (1)..(1692): Ortholog of  Ceres SEQ ID NO 13502874 as cited in SEQ ID NO 66298
  misc_feature (1)..(1692): Ortholog of  Ceres SEQ ID NO 12614124 as cited in SEQ ID NO 68392
atggcagcaatgatcacctttgactttcaaaacagcttcatcttcatcctcttttttctcttctctctcctttgttactctctcttcttcaggaaaccaaagggctcacgagctggccgtgatcttcctccgagccctccttcttttcctgtaattggtcatcttcaccttcttctctctgctcttgttcacaagtcttttcaaaacatctcctctaagtatggacctcttctccatctccgcgtcttccacattcccatagtcctcgcctcctcggcctcagtggcctacgagatcttcaaggcccaagatgtgaatgtctcctctcgcggtcacgctccagtcggggagtctctctggtttggatcgtctagcttcttcttcgctccctatggagattactttaaatttatgaggaagctcatagccacaaagcttcttggaccacaggcactcgagcgttcacgaaaaatccgtgcagatgagctagatcggttttacaaaaccttgcttgacaaggcgatgaagaaggagagtgttgagatcggtgaggaagcagcgaagctcaataacaatatcatctgcaagatgatcatggggaggagttgttcagaggagaatggtgaggcggagaaattcagacacttggtgatcgagtcgatggctttgacaaagcaaatcttctttggtatgatctttcacaaaccgcttaaaaagctcgggatctcactgttccaaaaggatatactaagtctttcccgcaagttcgacgagttgctggagaagattctttttgaacacgaagagaaaaaggcggagcacaatcaagctaatgacatgatggattttttgttggaagcttatggagacgaaaatgcagagtataaaatcacaagaaaccatatcaagtccttgttcgtggatcttgtcattgcagggactgacacctcggtgcaagcaacacagtggacaatgggggagctcattaacaaccctaagattcttcagagattgagagaagaaatcgaatcggttgtagggaacacaagattaattcaagaaaatgatttaccaaacctcccttacttgcaagcggtagtcaaagaagggctaagattgcatccgccggggtctatctcggtaaggatgtttcaagaaaggtgtgaactcaaagggttctacataccggagaagacattacttgttgttaatacttatgctataatgagagatcctaatttctgggaagatcctgaggagtttaaacctgagaggtttatagcatcttcaagatcagagcaagaggacgaggtaagagaggaagtcttgaaatacattcctttctccgcgggaaggagaggctgtcctggatcaaatctagcttatatctctctaggaatcgtgattggggtaatggtgcagtgctttgattggagaattgaaggagagaaagtaaacatgaatgaggctgctgaaacaactgcgttgtccatggctcagcctcttaagtgcactcctgtttctcgaaccaaaaaccctttgccatcaatggccggcgagatcttcagggcccacgacatgaacgtatcctctcgcggtgctgctgcgatagatgagtccctcgtgtttggatcttctggtgtcgtctacgctccctatggagataacttgaagttcgtgaagaagaaataa

SEQ ID NO: 73898 - protein, 563 aa, Arabidopsis thaliana
  peptide (1)..(563): Ceres Seq. ID no. 4984415
MAAMITFDFQNSFIFILFFLFSLLCYSLFFRKPKGSRAGRDLPPSPPSFPVIGHLHLLLSALVHKSFQNISSKYGPLLHLRVFHIPIVLASSASVAYEIFKAQDVNVSSRGHAPVGESLWFGSSSFFFAPYGDYFKFMRKLIATKLLGPQALERSRKIRADELDRFYKTLLDKAMKKESVEIGEEAAKLNNNIICKMIMGRSCSEENGEAEKFRHLVIESMALTKQIFFGMIFHKPLKKLGISLFQKDILSLSRKFDELLEKILFEHEEKKAEHNQANDMMDFLLEAYGDENAEYKITRNHIKSLFVDLVIAGTDTSVQATQWTMGELINNPKILQRLREEIESVVGNTRLIQENDLPNLPYLQAVVKEGLRLHPPGSISVRMFQERCELKGFYIPEKTLLVVNTYAIMRDPNFWEDPEEFKPERFIASSRSEQEDEVREEVLKYIPFSAGRRGCPGSNLAYISLGIVIGVMVQCFDWRIEGEKVNMNEAAETTALSMAQPLKCTPVSRTKNPLPSMAGEIFRAHDMNVSSRGAAAIDESLVFGSSGVVYAPYGDNLKFVKKK

SEQ ID NO: 73899 - protein, 560 aa, Arabidopsis thaliana
  peptide (1)..(560): Ceres Seq. ID no. 4984416
MITFDFQNSFIFILFFLFSLLCYSLFFRKPKGSRAGRDLPPSPPSFPVIGHLHLLLSALVHKSFQNISSKYGPLLHLRVFHIPIVLASSASVAYEIFKAQDVNVSSRGHAPVGESLWFGSSSFFFAPYGDYFKFMRKLIATKLLGPQALERSRKIRADELDRFYKTLLDKAMKKESVEIGEEAAKLNNNIICKMIMGRSCSEENGEAEKFRHLVIESMALTKQIFFGMIFHKPLKKLGISLFQKDILSLSRKFDELLEKILFEHEEKKAEHNQANDMMDFLLEAYGDENAEYKITRNHIKSLFVDLVIAGTDTSVQATQWTMGELINNPKILQRLREEIESVVGNTRLIQENDLPNLPYLQAVVKEGLRLHPPGSISVRMFQERCELKGFYIPEKTLLVVNTYAIMRDPNFWEDPEEFKPERFIASSRSEQEDEVREEVLKYIPFSAGRRGCPGSNLAYISLGIVIGVMVQCFDWRIEGEKVNMNEAAETTALSMAQPLKCTPVSRTKNPLPSMAGEIFRAHDMNVSSRGAAAIDESLVFGSSGVVYAPYGDNLKFVKKK

SEQ ID NO: 73900 - protein, 426 aa, Arabidopsis thaliana
  peptide (1)..(426): Ceres Seq. ID no. 4984417
MRKLIATKLLGPQALERSRKIRADELDRFYKTLLDKAMKKESVEIGEEAAKLNNNIICKMIMGRSCSEENGEAEKFRHLVIESMALTKQIFFGMIFHKPLKKLGISLFQKDILSLSRKFDELLEKILFEHEEKKAEHNQANDMMDFLLEAYGDENAEYKITRNHIKSLFVDLVIAGTDTSVQATQWTMGELINNPKILQRLREEIESVVGNTRLIQENDLPNLPYLQAVVKEGLRLHPPGSISVRMFQERCELKGFYIPEKTLLVVNTYAIMRDPNFWEDPEEFKPERFIASSRSEQEDEVREEVLKYIPFSAGRRGCPGSNLAYISLGIVIGVMVQCFDWRIEGEKVNMNEAAETTALSMAQPLKCTPVSRTKNPLPSMAGEIFRAHDMNVSSRGAAAIDESLVFGSSGVVYAPYGDNLKFVKKK

SEQ ID NO: 73901 - DNA, 2133 bp, Arabidopsis thaliana
  misc_feature (1)..(2133): Ceres Seq. ID no. 4984473
  misc_feature (1)..(2133): Ortholog of  Ceres SEQ ID NO 12586556 as cited in SEQ ID NO 64667
  misc_feature (1)..(2133): Ortholog of  Ceres SEQ ID NO 13660894 as cited in SEQ ID NO 67475
atgatgatcgggaagttgtggagatctgtgggaaccgtcggaaagtttgatggtcgttacgacggcgtgaggacgatggttggaaaagcctcgaaccgagctggtgttcatgtcacagatactgtacttttcgaagagacgagtttcgaattttcgccttctctcactcctgagctgaatgaatttccaatgccttctttagatgttatcactccacaagcttatcttactccactggggtctcagagtatcaaccatgctaaatttttacaaatcccatggagacaatttgtcttcacaaagcctttaggtctctctaaatcaaccaaactcgacgaagccgtgacattgatagagaattcatcatcctcgccgtccaatctctccactcccgaagcttacacagaccttcttcatgcttgtatctccgctaaatcactccaccatggtataaaaatatgttctttgattctcaacaatcctagtctccgtcacaaccccaaattgctaagcaagctcattaccctattctcggtttgtcgccgattggatcttgctcggaaaatctttgacgatgtaactgattcgagtctacttactgagaaagtctgggcagctatggcgattgggtattctagaaacgggtcaccaagagacgctttgatcgtctatgtggatatgttgtgtagcttcattgagcctgggaatttttcgatatccgtggcgttgaaagcgtgcgtggatttgaaagatcttcgggttggtagaggaatccatgcccagattgtgaaacgaaaggagaaggttgaccaagtagtgtataatgtgctcttgaagctttatatggaaagtggcttatttgatgatgcacgtaaggtgttcgatggaatgtctgagagaaatgttgttacttggaattctttaatttcggtactcagtaagaaagttcgggttcatgagatgtttaatctgttcaggaagatgcaggaagagatgatcgggtttagttgggcgacgttgacgacaatattacccgcttgttcacgtgtcgctgctcttctcaccgggaaagagattcatgcacagattctgaaatcgaaagagaaacctgatgttccattgcttaattcattgatggatatgtatgggaaatgtggagaggttgagtattctcggagagtctttgatgtgatgttaactaaggatttggcttcatggaacataatgctaaactgttatgcaatcaacggaaatattgaagaagtgataaatctgtttgaatggatgatagagtcaggcgttgcaccagatgggattacctttgttgctttgttatctgggtgtagcgatacagggcttacggaatatggtctaagtttgtttgaacgcatgaaaacggagttcagagtttcaccggctttggagcattatgcttgtttggttgacatcttggggcgagctggtaagatcaaagaagcagtgaaggtgatagaaacaatgccatttaagccaagtgcgtccatttggggatcactgctcaactcttgcaggcttcatgggaatgtttcagtgggagagattgcagcaaaagagttgtttgttcttgaacctcataatccagggaactacgttatggtttctaacatatatgctgatgcaaagatgtgggacaatgtggataagattcgagagatgatgaaacaaagaggggtcaaaaaggaagctggttgcagttgggtacaggttaaagacaagattcaaatctttgttgcaggaggtggttatgagtttcgtaattctgatgagtataagaaagtatggacagaactacaagaagcaattgaaaaatccggttattcgcctaatacgagtgtggtgcttcatgatgttgatgaagaaaccaaagcaaattgggtttgtggacacagcgagagactcgcgacaacctactccctaatccacacaggtgaaggggttccaattaggattaccaagaatctcagagtatgtgcagactgtcattcatggatgaagattgtgtcacaagtaactaggagagtcatagtcctcagagacacaaaacgattccaccatttcgtcgacggaatctgctcatgtaaagactactggtga

SEQ ID NO: 73902 - protein, 710 aa, Arabidopsis thaliana
  peptide (1)..(710): Ceres Seq. ID no. 4984474
MMIGKLWRSVGTVGKFDGRYDGVRTMVGKASNRAGVHVTDTVLFEETSFEFSPSLTPELNEFPMPSLDVITPQAYLTPLGSQSINHAKFLQIPWRQFVFTKPLGLSKSTKLDEAVTLIENSSSSPSNLSTPEAYTDLLHACISAKSLHHGIKICSLILNNPSLRHNPKLLSKLITLFSVCRRLDLARKIFDDVTDSSLLTEKVWAAMAIGYSRNGSPRDALIVYVDMLCSFIEPGNFSISVALKACVDLKDLRVGRGIHAQIVKRKEKVDQVVYNVLLKLYMESGLFDDARKVFDGMSERNVVTWNSLISVLSKKVRVHEMFNLFRKMQEEMIGFSWATLTTILPACSRVAALLTGKEIHAQILKSKEKPDVPLLNSLMDMYGKCGEVEYSRRVFDVMLTKDLASWNIMLNCYAINGNIEEVINLFEWMIESGVAPDGITFVALLSGCSDTGLTEYGLSLFERMKTEFRVSPALEHYACLVDILGRAGKIKEAVKVIETMPFKPSASIWGSLLNSCRLHGNVSVGEIAAKELFVLEPHNPGNYVMVSNIYADAKMWDNVDKIREMMKQRGVKKEAGCSWVQVKDKIQIFVAGGGYEFRNSDEYKKVWTELQEAIEKSGYSPNTSVVLHDVDEETKANWVCGHSERLATTYSLIHTGEGVPIRITKNLRVCADCHSWMKIVSQVTRRVIVLRDTKRFHHFVDGICSCKDYW

SEQ ID NO: 73903 - protein, 709 aa, Arabidopsis thaliana
  peptide (1)..(709): Ceres Seq. ID no. 4984475
MIGKLWRSVGTVGKFDGRYDGVRTMVGKASNRAGVHVTDTVLFEETSFEFSPSLTPELNEFPMPSLDVITPQAYLTPLGSQSINHAKFLQIPWRQFVFTKPLGLSKSTKLDEAVTLIENSSSSPSNLSTPEAYTDLLHACISAKSLHHGIKICSLILNNPSLRHNPKLLSKLITLFSVCRRLDLARKIFDDVTDSSLLTEKVWAAMAIGYSRNGSPRDALIVYVDMLCSFIEPGNFSISVALKACVDLKDLRVGRGIHAQIVKRKEKVDQVVYNVLLKLYMESGLFDDARKVFDGMSERNVVTWNSLISVLSKKVRVHEMFNLFRKMQEEMIGFSWATLTTILPACSRVAALLTGKEIHAQILKSKEKPDVPLLNSLMDMYGKCGEVEYSRRVFDVMLTKDLASWNIMLNCYAINGNIEEVINLFEWMIESGVAPDGITFVALLSGCSDTGLTEYGLSLFERMKTEFRVSPALEHYACLVDILGRAGKIKEAVKVIETMPFKPSASIWGSLLNSCRLHGNVSVGEIAAKELFVLEPHNPGNYVMVSNIYADAKMWDNVDKIREMMKQRGVKKEAGCSWVQVKDKIQIFVAGGGYEFRNSDEYKKVWTELQEAIEKSGYSPNTSVVLHDVDEETKANWVCGHSERLATTYSLIHTGEGVPIRITKNLRVCADCHSWMKIVSQVTRRVIVLRDTKRFHHFVDGICSCKDYW

SEQ ID NO: 73904 - protein, 685 aa, Arabidopsis thaliana
  peptide (1)..(685): Ceres Seq. ID no. 4984476
MVGKASNRAGVHVTDTVLFEETSFEFSPSLTPELNEFPMPSLDVITPQAYLTPLGSQSINHAKFLQIPWRQFVFTKPLGLSKSTKLDEAVTLIENSSSSPSNLSTPEAYTDLLHACISAKSLHHGIKICSLILNNPSLRHNPKLLSKLITLFSVCRRLDLARKIFDDVTDSSLLTEKVWAAMAIGYSRNGSPRDALIVYVDMLCSFIEPGNFSISVALKACVDLKDLRVGRGIHAQIVKRKEKVDQVVYNVLLKLYMESGLFDDARKVFDGMSERNVVTWNSLISVLSKKVRVHEMFNLFRKMQEEMIGFSWATLTTILPACSRVAALLTGKEIHAQILKSKEKPDVPLLNSLMDMYGKCGEVEYSRRVFDVMLTKDLASWNIMLNCYAINGNIEEVINLFEWMIESGVAPDGITFVALLSGCSDTGLTEYGLSLFERMKTEFRVSPALEHYACLVDILGRAGKIKEAVKVIETMPFKPSASIWGSLLNSCRLHGNVSVGEIAAKELFVLEPHNPGNYVMVSNIYADAKMWDNVDKIREMMKQRGVKKEAGCSWVQVKDKIQIFVAGGGYEFRNSDEYKKVWTELQEAIEKSGYSPNTSVVLHDVDEETKANWVCGHSERLATTYSLIHTGEGVPIRITKNLRVCADCHSWMKIVSQVTRRVIVLRDTKRFHHFVDGICSCKDYW

SEQ ID NO: 73905 - DNA, 585 bp, Arabidopsis thaliana
  misc_feature (1)..(585): Ceres Seq. ID no. 4984562
  misc_feature (1)..(585): Ortholog of  Ceres SEQ ID NO 15173284 as cited in SEQ ID NO 61828
  misc_feature (1)..(585): Ortholog of  Ceres SEQ ID NO 15178906 as cited in SEQ ID NO 0
atggacgaggtgatgacagcggcggacgttggttcgttaggtggcggcaatagggcgttgtacggatctcctccgtcgcataatctgtttcctcacaatctcccaatcttctccgcttttcttgccttcgctcttgctcagttcctcaaagtcttcactaattggtacaaagaaaagaggtgggactctaaacgtatgattagttctggtggaatgccttcttctcattctgctactgtcactgccttagctgttgccattggctttgaagaaggagctggagcaccagcttttgctattgcagttgtcttggcttgcgttgttatgtatgatgcctctggtgtcaggcttcatgctggtcgtcaagccgagctgctgaatcaaattgtttgtgagtttcctccggagcatccattatcaacagttagaccattgcgtgaactgcttggccacactcctatccaggagctcaagctagtcagtctctctacacaagaacaaatcccgaattcttttgaaatcatagacccttcaggtactaagatagattcagcgatatcaagtgacgctagattattggagtaa

SEQ ID NO: 73906 - protein, 194 aa, Arabidopsis thaliana
  peptide (1)..(194): Ceres Seq. ID no. 4984563
MDEVMTAADVGSLGGGNRALYGSPPSHNLFPHNLPIFSAFLAFALAQFLKVFTNWYKEKRWDSKRMISSGGMPSSHSATVTALAVAIGFEEGAGAPAFAIAVVLACVVMYDASGVRLHAGRQAELLNQIVCEFPPEHPLSTVRPLRELLGHTPIQELKLVSLSTQEQIPNSFEIIDPSGTKIDSAISSDARLLE

SEQ ID NO: 73907 - protein, 190 aa, Arabidopsis thaliana
  peptide (1)..(190): Ceres Seq. ID no. 4984564
MTAADVGSLGGGNRALYGSPPSHNLFPHNLPIFSAFLAFALAQFLKVFTNWYKEKRWDSKRMISSGGMPSSHSATVTALAVAIGFEEGAGAPAFAIAVVLACVVMYDASGVRLHAGRQAELLNQIVCEFPPEHPLSTVRPLRELLGHTPIQELKLVSLSTQEQIPNSFEIIDPSGTKIDSAISSDARLLE

SEQ ID NO: 73908 - protein, 129 aa, Arabidopsis thaliana
  peptide (1)..(129): Ceres Seq. ID no. 4984565
MISSGGMPSSHSATVTALAVAIGFEEGAGAPAFAIAVVLACVVMYDASGVRLHAGRQAELLNQIVCEFPPEHPLSTVRPLRELLGHTPIQELKLVSLSTQEQIPNSFEIIDPSGTKIDSAISSDARLLE

SEQ ID NO: 73909 - DNA, 1296 bp, Arabidopsis thaliana
  misc_feature (1)..(1296): Ceres Seq. ID no. 4984598
  misc_feature (1)..(1296): Ortholog of  Ceres SEQ ID NO 13597574 as cited in SEQ ID NO 64677
  misc_feature (1)..(1296): Ortholog of  Ceres SEQ ID NO 13597843 as cited in SEQ ID NO 64850
  misc_feature (1)..(1296): Ortholog of  Ceres SEQ ID NO 13597678 as cited in SEQ ID NO 65375
  misc_feature (1)..(1296): Ortholog of  Ceres SEQ ID NO 13596180 as cited in SEQ ID NO 67941
  misc_feature (1)..(1296): Ortholog of  Ceres SEQ ID NO 13591190 as cited in SEQ ID NO 68044
  misc_feature (1)..(1296): Ortholog of  Ceres SEQ ID NO 13595961 as cited in SEQ ID NO 68223
atgatcacctctcttacatccaacaaccgcctccggtacgaaataatctccggaggagatcaacaaccaacggagctcaaagcaactgattcccacatccaaagtctaaagccactggtgagagacgcggttgctaaactcgtagattccactctaccagacgcgcctcgtcttgcgggattcgttgttgacatgtactgcacgtcgatgatcgatgtcgctaacgaatttggcgtccctagttacttgttttacacctctaacgctggatttcttggacttttgcttcacattcagttcatgtacgatgcagaggatatctatgacatgagcgaattagaagactctgacgtagagttggtggttccgagtttgactagtccttatccgttgaaatgtcttccttacattttcaaatcaaaagagtggctcactttttttgtaactcaagcgagaagattcagagaaactaagggcattttggtaaacacggttcctgacttggaacctcaagcgttgacgtttctttccaatggtaacattccacgtgcttacccagtaggaccattgttgcatctcaaaaacgtaaattgtgattacgtggacaagaagcaatcggagattttacggtggctagacgagcaaccgccaagatctgtagtgttcctctgtttcgggagcatgggagggttcagtgaggaacaagtgagagaaaccgcattagctctcgatcgaagcggccaccggtttctttggtctctccgtcgtgcatctccgaatatattgagagagcctcccggagaattcacaaacctagaggagattctcccagaagggtttttcgatcggacggctaacagaggaaaggttatcggatgggctgaacaggtggccatattggcgaagccggcgatcggaggttttgtttctcacggcggatggaattcgacgttggagagtttgtggtttggtgttccgatggcgatttggccgctttacgctgaacagaagtttaacgctttcgagatggtggaagagcttggtttggctgtggagatcaagaagcattggcgaggagatcttttgttggggaggtcggagattgtgacggcggaggagattgagaaaggaatcatatgtttgatggagcaagacagtgacgtcaggaagagagtgaatgagatcagcgagaagtgccacgtggctttaatggacggtggatcgtcagaaactgctttgaaaagatttattcaagacgtaacggagaatattgcttggtcggaaactgaaagctag

SEQ ID NO: 73910 - protein, 431 aa, Arabidopsis thaliana
  peptide (1)..(431): Ceres Seq. ID no. 4984599
MITSLTSNNRLRYEIISGGDQQPTELKATDSHIQSLKPLVRDAVAKLVDSTLPDAPRLAGFVVDMYCTSMIDVANEFGVPSYLFYTSNAGFLGLLLHIQFMYDAEDIYDMSELEDSDVELVVPSLTSPYPLKCLPYIFKSKEWLTFFVTQARRFRETKGILVNTVPDLEPQALTFLSNGNIPRAYPVGPLLHLKNVNCDYVDKKQSEILRWLDEQPPRSVVFLCFGSMGGFSEEQVRETALALDRSGHRFLWSLRRASPNILREPPGEFTNLEEILPEGFFDRTANRGKVIGWAEQVAILAKPAIGGFVSHGGWNSTLESLWFGVPMAIWPLYAEQKFNAFEMVEELGLAVEIKKHWRGDLLLGRSEIVTAEEIEKGIICLMEQDSDVRKRVNEISEKCHVALMDGGSSETALKRFIQDVTENIAWSETES

SEQ ID NO: 73911 - protein, 367 aa, Arabidopsis thaliana
  peptide (1)..(367): Ceres Seq. ID no. 4984600
MYCTSMIDVANEFGVPSYLFYTSNAGFLGLLLHIQFMYDAEDIYDMSELEDSDVELVVPSLTSPYPLKCLPYIFKSKEWLTFFVTQARRFRETKGILVNTVPDLEPQALTFLSNGNIPRAYPVGPLLHLKNVNCDYVDKKQSEILRWLDEQPPRSVVFLCFGSMGGFSEEQVRETALALDRSGHRFLWSLRRASPNILREPPGEFTNLEEILPEGFFDRTANRGKVIGWAEQVAILAKPAIGGFVSHGGWNSTLESLWFGVPMAIWPLYAEQKFNAFEMVEELGLAVEIKKHWRGDLLLGRSEIVTAEEIEKGIICLMEQDSDVRKRVNEISEKCHVALMDGGSSETALKRFIQDVTENIAWSETES

SEQ ID NO: 73912 - protein, 362 aa, Arabidopsis thaliana
  peptide (1)..(362): Ceres Seq. ID no. 4984601
MIDVANEFGVPSYLFYTSNAGFLGLLLHIQFMYDAEDIYDMSELEDSDVELVVPSLTSPYPLKCLPYIFKSKEWLTFFVTQARRFRETKGILVNTVPDLEPQALTFLSNGNIPRAYPVGPLLHLKNVNCDYVDKKQSEILRWLDEQPPRSVVFLCFGSMGGFSEEQVRETALALDRSGHRFLWSLRRASPNILREPPGEFTNLEEILPEGFFDRTANRGKVIGWAEQVAILAKPAIGGFVSHGGWNSTLESLWFGVPMAIWPLYAEQKFNAFEMVEELGLAVEIKKHWRGDLLLGRSEIVTAEEIEKGIICLMEQDSDVRKRVNEISEKCHVALMDGGSSETALKRFIQDVTENIAWSETES

SEQ ID NO: 73913 - DNA, 564 bp, Arabidopsis thaliana
  misc_feature (1)..(564): Ceres Seq. ID no. 4984621
  misc_feature (1)..(564): Ortholog of  Ceres SEQ ID NO 12611212 as cited in SEQ ID NO 56066
  misc_feature (1)..(564): Ortholog of  Ceres SEQ ID NO 15178576 as cited in SEQ ID NO 64133
atggatgaaggaagagaaggagagatagagaagaagaagaagaaagatgaagaaggagaagtgaaggaaggagtagcatcaatagctttgttaccatgtgggactatctctggtcatttcattcagatgcctagctctatctgttatggcctccatggcactgaactagcttgtgagactgagtgtagccgcggtgaggattatcggttgatcaaactcactatcatagactacaatagaaagaaggaacaaacagttgtagtggagtgcaaaggccatgatgctgctcgaattaatgatgtcgagcatgctcacggtgaatatgactacttgtctttggaaaggtgggaggaagatgtgataggattagtcgaagaaaaacacgggaagaagaaagtatcggtttcgttcgagtgtgagacattgaaggcagatgaagcagcagaggaccatatcagacagtttatgcccaaattagctggacttgatgctgttattaacattggaccgatgaagatttccgggcttgattttgctgcggtggaagagggacacataaactaa

SEQ ID NO: 73914 - protein, 187 aa, Arabidopsis thaliana
  peptide (1)..(187): Ceres Seq. ID no. 4984622
MDEGREGEIEKKKKKDEEGEVKEGVASIALLPCGTISGHFIQMPSSICYGLHGTELACETECSRGEDYRLIKLTIIDYNRKKEQTVVVECKGHDAARINDVEHAHGEYDYLSLERWEEDVIGLVEEKHGKKKVSVSFECETLKADEAAEDHIRQFMPKLAGLDAVINIGPMKISGLDFAAVEEGHIN

SEQ ID NO: 73915 - protein, 145 aa, Arabidopsis thaliana
  peptide (1)..(145): Ceres Seq. ID no. 4984623
MPSSICYGLHGTELACETECSRGEDYRLIKLTIIDYNRKKEQTVVVECKGHDAARINDVEHAHGEYDYLSLERWEEDVIGLVEEKHGKKKVSVSFECETLKADEAAEDHIRQFMPKLAGLDAVINIGPMKISGLDFAAVEEGHIN

SEQ ID NO: 73916 - DNA, 393 bp, Arabidopsis thaliana
  misc_feature (1)..(393): Ceres Seq. ID no. 4984678
  misc_feature (1)..(393): Ortholog of  Ceres SEQ ID NO 12610267 as cited in SEQ ID NO 51993
  misc_feature (1)..(393): Ortholog of  Ceres SEQ ID NO 13495070 as cited in SEQ ID NO 53216
  misc_feature (1)..(393): Ortholog of  Ceres SEQ ID NO 13661333 as cited in SEQ ID NO 61620
  misc_feature (1)..(393): Ortholog of  Ceres SEQ ID NO 13596812 as cited in SEQ ID NO 62283
  misc_feature (1)..(393): Ortholog of  Ceres SEQ ID NO 13623021 as cited in SEQ ID NO 0
atgacggatgattgcaagaaatcgttcatggagatgaaatggaagaaagtgcatagatacgtcgtttacaaactcgaggagaagtctcggaaagtcaccgtcgacaaggttggtgccgccggcgagagctacgacgatctcgctgcttctttgccggaggatgactgtcgttacgccgtgtttgatttcgattacgtcaccgtcgataactgtcgtatgagcaagatcttcttcataacttggtcgccggaggcttcaaggataagggagaagatgatgtacgcgacgtcgaagagcggactgagaagagtgttggatggtgttcactacgagcttcaagccaccgacccaaccgagatgggatttgataaaatccaggaccgggccaaatga

SEQ ID NO: 73917 - protein, 130 aa, Arabidopsis thaliana
  peptide (1)..(130): Ceres Seq. ID no. 4984679
MTDDCKKSFMEMKWKKVHRYVVYKLEEKSRKVTVDKVGAAGESYDDLAASLPEDDCRYAVFDFDYVTVDNCRMSKIFFITWSPEASRIREKMMYATSKSGLRRVLDGVHYELQATDPTEMGFDKIQDRAK

SEQ ID NO: 73918 - protein, 121 aa, Arabidopsis thaliana
  peptide (1)..(121): Ceres Seq. ID no. 4984680
MEMKWKKVHRYVVYKLEEKSRKVTVDKVGAAGESYDDLAASLPEDDCRYAVFDFDYVTVDNCRMSKIFFITWSPEASRIREKMMYATSKSGLRRVLDGVHYELQATDPTEMGFDKIQDRAK

SEQ ID NO: 73919 - protein, 119 aa, Arabidopsis thaliana
  peptide (1)..(119): Ceres Seq. ID no. 4984681
MKWKKVHRYVVYKLEEKSRKVTVDKVGAAGESYDDLAASLPEDDCRYAVFDFDYVTVDNCRMSKIFFITWSPEASRIREKMMYATSKSGLRRVLDGVHYELQATDPTEMGFDKIQDRAK

SEQ ID NO: 73920 - DNA, 3693 bp, Arabidopsis thaliana
  misc_feature (1)..(3693): Ceres Seq. ID no. 4984702
  misc_feature (1)..(3693): Ortholog of  Ceres SEQ ID NO 15179695 as cited in SEQ ID NO 193
atgaagaaggggaacttggaagcgaacacaaagacagtaccgttctacaaattgtttttcttctcagattctaccgatgtgttgttgatgatcgttggttcgatcggagctatcgcaaacggtgtttgttctccgttaatgacattattgtttggtgaactcattgatgcaatgggtccaaaccagaacaatgaagagattgttgagagagtttccaaggtttgtttgagtttagtctaccttggacttggagccctaggagctgcctttcttcaggtggcttgttggatgattactggggagagacaagctgcaaggataaggagtttgtatctgaaaacgattctaagacaagacattggattcttcgatgtcgaaatgaccacaggagaagttgttggtcgaatgtctggtgatacggttcttatacttgatgctatgggtgagaaggttgggaagtttatacagttgatttcaacatttgtgggtggatttgttatagcgtttttgagaggatggttacttacacttgttatgttgacctcaattcctcttctagctatgtctggtgcagctatagcgattatagttacaagagcttcttctcaagaacaagctgcttatgcaaaagcatcaaatgttgttgaacaaactttggggtccattcgaaccgttgcttctttcacgggagagaagcaagcgatgagtagctacaaagagttgataaatttggcctataaatcgaatgttaagcaaggtttcgttacgggtttaggtcttggagtaatgttcttggtgttcttttccacctatgctttgggtacatggtttggtggtgaaatgatactgagaaaagggtatacaggtggtgcagtgatcaatgttatggtcactgtggtctcgagttcgatagctttagggcaagcatcaccttgtctaactgcatttacggctggtaaagctgcagcttataagatgtttgaaacaatcgaaagagagcctttgattgatacttttgacctaaatgggaaggttttagaagatattcgaggcgaaatcgagctgagagatgtgtgttttagttaccctgcaaggcctaaagaagaggtttttggcggattctctctgttgattccgagtggcacaaccactgctttggtaggagaaagcgggagtgggaagtctactgtgatcagtttgatcgaaaggttttatgatccgaattccggacaagtgcttattgatggtgttgatttaaaggagtttcagttgaaatggattaggggaaagattggattggttagtcaagaacctgttctgttttcttcaagtataatggagaatatcggatacgggaaagagggggcaacggttgaagagatacaagcagcgtcgaagctagcaaacgcggctaaattcatcgataagttgcctctaggtttagagacattggtaggggagcatggaactcaactctcaggaggacagaaacagaggattgctatcgcgagggcgatacttaaagatccgcggatcttgctgttagatgaagcgacaagcgcacttgatgcggaatccgaaagagtggttcaagaggctttagataggataatggtgaaccggactacagtgattgtcgcgcatcggttaagcacggttagaaacgctgatatcatcgctgtgattcatcgtggaaagattgtggaagaaggttcgcattcagagttacttaaagatcatgaaggggcttattcacagcttctaaggttacaagagataaacaaagaatcaaagcgattggagatttctgatggatcaatcagcagtggatcatcaagaggaaacaacagcacaaggcaagatgatgactctttttctgttctgggtttacttgcaggccaagatagtactaaaatgtctcaagaactatcacagaaagtgtcgtttactcgaatcgctgctctaaacaaaccagagattccaattcttatacttggaaccctagtaggtgctgtgaacggcactatattccccatctttggtatcctctttgccaaagtaatcgaagctttcttcaaagcgcctcatgagctgaagagagattcaagattctggtcgatgatattcgtacttcttggtgtagccgctgtgatagtgtatccaacgactaactacttgtttgctatagctggagggagacttattcggaggataagatcaatgtgttttgagaaagttgttcacatggaggttgggtggttcgatgaacctgggaactcgagcggtgcaatgggagcgaggctctctgctgatgcagccttgatccggactcttgtgggagactcgctttgtctatcggttaaaaacgttgcgtctttggtgacaggactaatcatagctttcacggcgagctgggaagtggcgattatcatcttagtaattattccgtttattggaatcaatggatatattcaaattaagttcatgaaaggcttcagtgcagacgcaaaggcaaagtacgaggaggcgagtcaggtggcgaacgatgcagtggggagtataagaacggttgcgtctttctgtgcggaggaaaaagtgatggagatgtataagaaacgatgtgaagatacgattaaatctgggattaagcaaggtttaatcagcggagtagggtttggtatctcctttttcgttctttactctgtctacgctagttgtttctacgtgggagctagactggttaaagccggaaggacaaacttcaacgatgtttttcaggttttcttggccttgacgttaacagcagttgggatttctcaggcgagctcttttgctcctgattcgagtaaaggtaagggtgctgctgtttcgattttcagaattattgataggatatcgaagatagattcgagagacgaatcgggaatggtgttggagaatgtaaaaggagatatcgagctttgccacataagcttcacttaccaaactagacctgatgttcaagtctttcgtgacctctgtttgagcattcgtgccggacagactgttgctttggttggagaaagtgggtcaggaaaatctacggtgatttcactgttacagaggttttatgatccggattcaggtcatataactctagacggagttgagctcaagaagctgcgactaaaatggctaagacaacagatggggcttgtaggacaagagcctgtactattcaacgacacgatacgagccaacattgcttatggaaaaggcggcgaggaagcaaccgaggctgagattatagctgcttccgagctagctaatgcccacaggttcatctctagtatacaaaagggttatgatacggtggtgggagagagagggatacaattgtcaggaggacagaagcagcgcgtggcgattgcacgcgccatcgtgaaagaaccgaagattctgttactcgacgaagcgacgagcgcgttggacgcagaatcggagcgggtggttcaagacgcgcttgatcgggtgatggtgaaccggaccaccatcgtggtggctcacaggctttcaacgatcaagaatgctgacgtcatcgccgtcgtcaagaacggtgtgattgcagagaaagggacgcacgagacgttgatcaatatcgaaggtggagtttatgcctcgctcgttcaactccacatcaatgcttctaattga

SEQ ID NO: 73921 - protein, 1230 aa, Arabidopsis thaliana
  peptide (1)..(1230): Ceres Seq. ID no. 4984703
MKKGNLEANTKTVPFYKLFFFSDSTDVLLMIVGSIGAIANGVCSPLMTLLFGELIDAMGPNQNNEEIVERVSKVCLSLVYLGLGALGAAFLQVACWMITGERQAARIRSLYLKTILRQDIGFFDVEMTTGEVVGRMSGDTVLILDAMGEKVGKFIQLISTFVGGFVIAFLRGWLLTLVMLTSIPLLAMSGAAIAIIVTRASSQEQAAYAKASNVVEQTLGSIRTVASFTGEKQAMSSYKELINLAYKSNVKQGFVTGLGLGVMFLVFFSTYALGTWFGGEMILRKGYTGGAVINVMVTVVSSSIALGQASPCLTAFTAGKAAAYKMFETIEREPLIDTFDLNGKVLEDIRGEIELRDVCFSYPARPKEEVFGGFSLLIPSGTTTALVGESGSGKSTVISLIERFYDPNSGQVLIDGVDLKEFQLKWIRGKIGLVSQEPVLFSSSIMENIGYGKEGATVEEIQAASKLANAAKFIDKLPLGLETLVGEHGTQLSGGQKQRIAIARAILKDPRILLLDEATSALDAESERVVQEALDRIMVNRTTVIVAHRLSTVRNADIIAVIHRGKIVEEGSHSELLKDHEGAYSQLLRLQEINKESKRLEISDGSISSGSSRGNNSTRQDDDSFSVLGLLAGQDSTKMSQELSQKVSFTRIAALNKPEIPILILGTLVGAVNGTIFPIFGILFAKVIEAFFKAPHELKRDSRFWSMIFVLLGVAAVIVYPTTNYLFAIAGGRLIRRIRSMCFEKVVHMEVGWFDEPGNSSGAMGARLSADAALIRTLVGDSLCLSVKNVASLVTGLIIAFTASWEVAIIILVIIPFIGINGYIQIKFMKGFSADAKAKYEEASQVANDAVGSIRTVASFCAEEKVMEMYKKRCEDTIKSGIKQGLISGVGFGISFFVLYSVYASCFYVGARLVKAGRTNFNDVFQVFLALTLTAVGISQASSFAPDSSKGKGAAVSIFRIIDRISKIDSRDESGMVLENVKGDIELCHISFTYQTRPDVQVFRDLCLSIRAGQTVALVGESGSGKSTVISLLQRFYDPDSGHITLDGVELKKLRLKWLRQQMGLVGQEPVLFNDTIRANIAYGKGGEEATEAEIIAASELANAHRFISSIQKGYDTVVGERGIQLSGGQKQRVAIARAIVKEPKILLLDEATSALDAESERVVQDALDRVMVNRTTIVVAHRLSTIKNADVIAVVKNGVIAEKGTHETLINIEGGVYASLVQLHINASN

SEQ ID NO: 73922 - protein, 1201 aa, Arabidopsis thaliana
  peptide (1)..(1201): Ceres Seq. ID no. 4984704
MIVGSIGAIANGVCSPLMTLLFGELIDAMGPNQNNEEIVERVSKVCLSLVYLGLGALGAAFLQVACWMITGERQAARIRSLYLKTILRQDIGFFDVEMTTGEVVGRMSGDTVLILDAMGEKVGKFIQLISTFVGGFVIAFLRGWLLTLVMLTSIPLLAMSGAAIAIIVTRASSQEQAAYAKASNVVEQTLGSIRTVASFTGEKQAMSSYKELINLAYKSNVKQGFVTGLGLGVMFLVFFSTYALGTWFGGEMILRKGYTGGAVINVMVTVVSSSIALGQASPCLTAFTAGKAAAYKMFETIEREPLIDTFDLNGKVLEDIRGEIELRDVCFSYPARPKEEVFGGFSLLIPSGTTTALVGESGSGKSTVISLIERFYDPNSGQVLIDGVDLKEFQLKWIRGKIGLVSQEPVLFSSSIMENIGYGKEGATVEEIQAASKLANAAKFIDKLPLGLETLVGEHGTQLSGGQKQRIAIARAILKDPRILLLDEATSALDAESERVVQEALDRIMVNRTTVIVAHRLSTVRNADIIAVIHRGKIVEEGSHSELLKDHEGAYSQLLRLQEINKESKRLEISDGSISSGSSRGNNSTRQDDDSFSVLGLLAGQDSTKMSQELSQKVSFTRIAALNKPEIPILILGTLVGAVNGTIFPIFGILFAKVIEAFFKAPHELKRDSRFWSMIFVLLGVAAVIVYPTTNYLFAIAGGRLIRRIRSMCFEKVVHMEVGWFDEPGNSSGAMGARLSADAALIRTLVGDSLCLSVKNVASLVTGLIIAFTASWEVAIIILVIIPFIGINGYIQIKFMKGFSADAKAKYEEASQVANDAVGSIRTVASFCAEEKVMEMYKKRCEDTIKSGIKQGLISGVGFGISFFVLYSVYASCFYVGARLVKAGRTNFNDVFQVFLALTLTAVGISQASSFAPDSSKGKGAAVSIFRIIDRISKIDSRDESGMVLENVKGDIELCHISFTYQTRPDVQVFRDLCLSIRAGQTVALVGESGSGKSTVISLLQRFYDPDSGHITLDGVELKKLRLKWLRQQMGLVGQEPVLFNDTIRANIAYGKGGEEATEAEIIAASELANAHRFISSIQKGYDTVVGERGIQLSGGQKQRVAIARAIVKEPKILLLDEATSALDAESERVVQDALDRVMVNRTTIVVAHRLSTIKNADVIAVVKNGVIAEKGTHETLINIEGGVYASLVQLHINASN

SEQ ID NO: 73923 - protein, 1184 aa, Arabidopsis thaliana
  peptide (1)..(1184): Ceres Seq. ID no. 4984705
MTLLFGELIDAMGPNQNNEEIVERVSKVCLSLVYLGLGALGAAFLQVACWMITGERQAARIRSLYLKTILRQDIGFFDVEMTTGEVVGRMSGDTVLILDAMGEKVGKFIQLISTFVGGFVIAFLRGWLLTLVMLTSIPLLAMSGAAIAIIVTRASSQEQAAYAKASNVVEQTLGSIRTVASFTGEKQAMSSYKELINLAYKSNVKQGFVTGLGLGVMFLVFFSTYALGTWFGGEMILRKGYTGGAVINVMVTVVSSSIALGQASPCLTAFTAGKAAAYKMFETIEREPLIDTFDLNGKVLEDIRGEIELRDVCFSYPARPKEEVFGGFSLLIPSGTTTALVGESGSGKSTVISLIERFYDPNSGQVLIDGVDLKEFQLKWIRGKIGLVSQEPVLFSSSIMENIGYGKEGATVEEIQAASKLANAAKFIDKLPLGLETLVGEHGTQLSGGQKQRIAIARAILKDPRILLLDEATSALDAESERVVQEALDRIMVNRTTVIVAHRLSTVRNADIIAVIHRGKIVEEGSHSELLKDHEGAYSQLLRLQEINKESKRLEISDGSISSGSSRGNNSTRQDDDSFSVLGLLAGQDSTKMSQELSQKVSFTRIAALNKPEIPILILGTLVGAVNGTIFPIFGILFAKVIEAFFKAPHELKRDSRFWSMIFVLLGVAAVIVYPTTNYLFAIAGGRLIRRIRSMCFEKVVHMEVGWFDEPGNSSGAMGARLSADAALIRTLVGDSLCLSVKNVASLVTGLIIAFTASWEVAIIILVIIPFIGINGYIQIKFMKGFSADAKAKYEEASQVANDAVGSIRTVASFCAEEKVMEMYKKRCEDTIKSGIKQGLISGVGFGISFFVLYSVYASCFYVGARLVKAGRTNFNDVFQVFLALTLTAVGISQASSFAPDSSKGKGAAVSIFRIIDRISKIDSRDESGMVLENVKGDIELCHISFTYQTRPDVQVFRDLCLSIRAGQTVALVGESGSGKSTVISLLQRFYDPDSGHITLDGVELKKLRLKWLRQQMGLVGQEPVLFNDTIRANIAYGKGGEEATEAEIIAASELANAHRFISSIQKGYDTVVGERGIQLSGGQKQRVAIARAIVKEPKILLLDEATSALDAESERVVQDALDRVMVNRTTIVVAHRLSTIKNADVIAVVKNGVIAEKGTHETLINIEGGVYASLVQLHINASN

SEQ ID NO: 73924 - DNA, 2070 bp, Arabidopsis thaliana
  misc_feature (1)..(2070): Ceres Seq. ID no. 4984739
  misc_feature (1)..(2070): Ortholog of  Ceres SEQ ID NO 13638292 as cited in SEQ ID NO 57738
atgttcaagtataacataaaaccaaaacaaataaataaaaataaagagatgggtatgatgagatcctcaagaacgatggggttagggcattgcatggtttacgttgtggtcctaagtgccattgcggctacagtgacatcatacccttactcctctccttactcatcccctcaaaccccacattacaattctcccagccatgaacacaaaagccctaagtacgcgccacatccaaaaccatacgtttatatttctccaccacctccatcatactattctccttctccaaaagtaaactataagtctccaccaccaccaaacgtctacaactctccacctccaccatactattctccttcaccaaaggttgattataagtctccaccaccaccttacgtctacagttccccacctccaccatactattctccttctccgaaggttgactataagtctcctccaccaccatacgtctacagctccccacccccaccatactattctccttcgccaaaggttgaatacaagtctccaccaccaccgtacgtctacaattctccacctccaccatactactctccttctcctaagatagagtacaagtccccaccaccaccatatgtctacagttctccacccccaccgtactactctccatctccaaaggttgactacaagtccccaccaccaccgtacgtctacaactccccacccccaccatactactctccttcgccaaaggttgactacaaatctcccccaccaccgtacgtctacagttccccacccccaccatacttctctccttcgccaaaggttgaatacaagtctcccccaccaccgtacgtctacaattctccacctccaccatactactctccttctcctaaggtagagtacaagtccccaccaccaccatatgtctacagctctccacccccaccgtactactcaccatctccaaaagtttactacaagtccccaccaccaccatacgtctacagctccccacccccaccatactactctccatctccaaaggttgactacaagtccccaccaccaccgtatgtttacagctctccacccccaccatactactctccttcgcctaaggttgactacaagtctcccccaccaccatacgtctacagctccccgcccccacaatactactctccttcgccaaaggttgcgtacaagtctcccccaccaccatacgtctacagctctccgcccccaccttactactctccttcaccaaaggttgcgtacaagtctcccccaccaccatacgtctacagctccccgcccccaccatactactctccttcacctaaggttgattacaagtctcccccaccaccatacgtctacagctcccctcctccaccttactactctccttcaccaaaggttgagtacaagtctcccccaccaccatacgtctacagctcccctcccccaccttactactctccttcaccaaaggttgagtacaagtctccaccaccaccatacgtctacagttcccctcccccaccataccactctccttcgcctaaggtaaactacaaatctccaccaccaccatacgtctacagctcccatcccccaccatactactctccttcgcctaaggtaaactacaaatctccaccaccaccatacgtctacagctccccacccccaccatactactctccttcgcctaaggttaactacaagtctcccccaccaccatacgtttacagttctccgcccccaccatactactctccttctcctatggttgactacaagtctacccccccaccatacgtctatagcttcccacccctaccatattattctccttctccaaaggttgactacaagtctccaccactaccatacgtttacagctccccacccccactatattactctccttctccaaaggttcattacaaatctccaccaccaccatacgtgtataactctccacctccaccatactattctccttctccaaaggtcacttacaagtctccaccacccccatatgtctacaaggcgccttactattga

SEQ ID NO: 73925 - protein, 689 aa, Arabidopsis thaliana
  peptide (1)..(689): Ceres Seq. ID no. 4984740
MFKYNIKPKQINKNKEMGMMRSSRTMGLGHCMVYVVVLSAIAATVTSYPYSSPYSSPQTPHYNSPSHEHKSPKYAPHPKPYVYISPPPPSYYSPSPKVNYKSPPPPNVYNSPPPPYYSPSPKVDYKSPPPPYVYSSPPPPYYSPSPKVDYKSPPPPYVYSSPPPPYYSPSPKVEYKSPPPPYVYNSPPPPYYSPSPKIEYKSPPPPYVYSSPPPPYYSPSPKVDYKSPPPPYVYNSPPPPYYSPSPKVDYKSPPPPYVYSSPPPPYFSPSPKVEYKSPPPPYVYNSPPPPYYSPSPKVEYKSPPPPYVYSSPPPPYYSPSPKVYYKSPPPPYVYSSPPPPYYSPSPKVDYKSPPPPYVYSSPPPPYYSPSPKVDYKSPPPPYVYSSPPPQYYSPSPKVAYKSPPPPYVYSSPPPPYYSPSPKVAYKSPPPPYVYSSPPPPYYSPSPKVDYKSPPPPYVYSSPPPPYYSPSPKVEYKSPPPPYVYSSPPPPYYSPSPKVEYKSPPPPYVYSSPPPPYHSPSPKVNYKSPPPPYVYSSHPPPYYSPSPKVNYKSPPPPYVYSSPPPPYYSPSPKVNYKSPPPPYVYSSPPPPYYSPSPMVDYKSTPPPYVYSFPPLPYYSPSPKVDYKSPPLPYVYSSPPPLYYSPSPKVHYKSPPPPYVYNSPPPPYYSPSPKVTYKSPPPPYVYKAPYY

SEQ ID NO: 73926 - protein, 673 aa, Arabidopsis thaliana
  peptide (1)..(673): Ceres Seq. ID no. 4984741
MGMMRSSRTMGLGHCMVYVVVLSAIAATVTSYPYSSPYSSPQTPHYNSPSHEHKSPKYAPHPKPYVYISPPPPSYYSPSPKVNYKSPPPPNVYNSPPPPYYSPSPKVDYKSPPPPYVYSSPPPPYYSPSPKVDYKSPPPPYVYSSPPPPYYSPSPKVEYKSPPPPYVYNSPPPPYYSPSPKIEYKSPPPPYVYSSPPPPYYSPSPKVDYKSPPPPYVYNSPPPPYYSPSPKVDYKSPPPPYVYSSPPPPYFSPSPKVEYKSPPPPYVYNSPPPPYYSPSPKVEYKSPPPPYVYSSPPPPYYSPSPKVYYKSPPPPYVYSSPPPPYYSPSPKVDYKSPPPPYVYSSPPPPYYSPSPKVDYKSPPPPYVYSSPPPQYYSPSPKVAYKSPPPPYVYSSPPPPYYSPSPKVAYKSPPPPYVYSSPPPPYYSPSPKVDYKSPPPPYVYSSPPPPYYSPSPKVEYKSPPPPYVYSSPPPPYYSPSPKVEYKSPPPPYVYSSPPPPYHSPSPKVNYKSPPPPYVYSSHPPPYYSPSPKVNYKSPPPPYVYSSPPPPYYSPSPKVNYKSPPPPYVYSSPPPPYYSPSPMVDYKSTPPPYVYSFPPLPYYSPSPKVDYKSPPLPYVYSSPPPLYYSPSPKVHYKSPPPPYVYNSPPPPYYSPSPKVTYKSPPPPYVYKAPYY

SEQ ID NO: 73927 - protein, 671 aa, Arabidopsis thaliana
  peptide (1)..(671): Ceres Seq. ID no. 4984742
MMRSSRTMGLGHCMVYVVVLSAIAATVTSYPYSSPYSSPQTPHYNSPSHEHKSPKYAPHPKPYVYISPPPPSYYSPSPKVNYKSPPPPNVYNSPPPPYYSPSPKVDYKSPPPPYVYSSPPPPYYSPSPKVDYKSPPPPYVYSSPPPPYYSPSPKVEYKSPPPPYVYNSPPPPYYSPSPKIEYKSPPPPYVYSSPPPPYYSPSPKVDYKSPPPPYVYNSPPPPYYSPSPKVDYKSPPPPYVYSSPPPPYFSPSPKVEYKSPPPPYVYNSPPPPYYSPSPKVEYKSPPPPYVYSSPPPPYYSPSPKVYYKSPPPPYVYSSPPPPYYSPSPKVDYKSPPPPYVYSSPPPPYYSPSPKVDYKSPPPPYVYSSPPPQYYSPSPKVAYKSPPPPYVYSSPPPPYYSPSPKVAYKSPPPPYVYSSPPPPYYSPSPKVDYKSPPPPYVYSSPPPPYYSPSPKVEYKSPPPPYVYSSPPPPYYSPSPKVEYKSPPPPYVYSSPPPPYHSPSPKVNYKSPPPPYVYSSHPPPYYSPSPKVNYKSPPPPYVYSSPPPPYYSPSPKVNYKSPPPPYVYSSPPPPYYSPSPMVDYKSTPPPYVYSFPPLPYYSPSPKVDYKSPPLPYVYSSPPPLYYSPSPKVHYKSPPPPYVYNSPPPPYYSPSPKVTYKSPPPPYVYKAPYY

SEQ ID NO: 73928 - DNA, 1401 bp, Arabidopsis thaliana
  misc_feature (1)..(1401): Ceres Seq. ID no. 4984986
  misc_feature (1)..(1401): Ortholog of  Ceres SEQ ID NO 14307164 as cited in SEQ ID NO 54775
  misc_feature (1)..(1401): Ortholog of  Ceres SEQ ID NO 13584744 as cited in SEQ ID NO 69137
atgaggagcaaaaccccaacgcctctccgcttctcaaatggaaagcatcagagagatgattctgagtatagttggactgatgtaggtactggggagaaggccaggaatgtctccgtcctcggtgcgatcagaagggcagctaagaaagtctttgttattattttcttaggacaacggaagttaaagccaacagaatgtagatctgatcctggagagagcagcacgcacgacagagaatctacatcctttcttgaatatcaggagcatgctttgaatctcttaagctctggtgatgtatgccgaccattaagacaaccaaactttgttacaaacctgaggtatcaggctggactggttattcatcaccaagctcctttggaaggtcaacagaaagaaaggtttcagcttcaaagggcaaccgcaaatttttcttcggttcatcaaattggggaaggcggttttggaactgtttttaagggaaaacttgatgatggaactattgttgctatcaagcgtgcgagaaagaacaactatggcaaaagctggttgctagagttcaagaatgaaatatacacattgtcaaagattgagcatatgaatttggtaaagctgtatggatttcttgaacatggagatgaaaaggttattgttgttgaatatgttgccaatggaaacctacgagaacatctagatggtttaaggggtaaccgccttgaaatggcagaacgtcttgagattgcaattgatgtggctcatgcattgacctatttgcacacatatactgatagtccaataatccacagagacattaaagcatcaaatatcctcatcacgaataagcttagagccaaagtggcggactttggctttgctcgtttagtgtcggaagatcttggggctactcatatatcgactcaggtcaaaggatctgcaggctatgtggatccagattacctcaggacgtttcaactaactgacaagagcgacgtttactcttttggtgttttgctcgtagagattctcactggaagacgtcccattgagttaaagagaccacgaaaagacagactcacggttaaatgggcattgaggagactcaaagacgatgaagctgttctcataatggacccatttctcaagagaaaccgagccgccattgaagtggctgagaagatgctgagacttgcgagcgaatgtgttaccccgacgagagctacacgtccagctatgaaaggcattgcggaaaagctatgggctataaggagagagatgaaggagacgatgatatgttcatctgcatctaattcttcttgttcttcaacaacacatagcttcattggtcgtgattcagacagatatgcattgccgaggattgaagataacgagaatagcattgagtaa

SEQ ID NO: 73929 - protein, 466 aa, Arabidopsis thaliana
  peptide (1)..(466): Ceres Seq. ID no. 4984987
MRSKTPTPLRFSNGKHQRDDSEYSWTDVGTGEKARNVSVLGAIRRAAKKVFVIIFLGQRKLKPTECRSDPGESSTHDRESTSFLEYQEHALNLLSSGDVCRPLRQPNFVTNLRYQAGLVIHHQAPLEGQQKERFQLQRATANFSSVHQIGEGGFGTVFKGKLDDGTIVAIKRARKNNYGKSWLLEFKNEIYTLSKIEHMNLVKLYGFLEHGDEKVIVVEYVANGNLREHLDGLRGNRLEMAERLEIAIDVAHALTYLHTYTDSPIIHRDIKASNILITNKLRAKVADFGFARLVSEDLGATHISTQVKGSAGYVDPDYLRTFQLTDKSDVYSFGVLLVEILTGRRPIELKRPRKDRLTVKWALRRLKDDEAVLIMDPFLKRNRAAIEVAEKMLRLASECVTPTRATRPAMKGIAEKLWAIRREMKETMICSSASNSSCSSTTHSFIGRDSDRYALPRIEDNENSIE

SEQ ID NO: 73930 - protein, 268 aa, Arabidopsis thaliana
  peptide (1)..(268): Ceres Seq. ID no. 4984988
MNLVKLYGFLEHGDEKVIVVEYVANGNLREHLDGLRGNRLEMAERLEIAIDVAHALTYLHTYTDSPIIHRDIKASNILITNKLRAKVADFGFARLVSEDLGATHISTQVKGSAGYVDPDYLRTFQLTDKSDVYSFGVLLVEILTGRRPIELKRPRKDRLTVKWALRRLKDDEAVLIMDPFLKRNRAAIEVAEKMLRLASECVTPTRATRPAMKGIAEKLWAIRREMKETMICSSASNSSCSSTTHSFIGRDSDRYALPRIEDNENSIE

SEQ ID NO: 73931 - DNA, 1560 bp, Arabidopsis thaliana
  misc_feature (1)..(1560): Ceres Seq. ID no. 4985020
  misc_feature (1)..(1560): Ortholog of  Ceres SEQ ID NO 13596984 as cited in SEQ ID NO 63196
atggctagagaaaacccattgatgagcttctcctttagtttcagatatctctgtcactttgctctactcctctctctcctctcctttgtctcttttctcttcagacacaacacatcactctgttcttgtctttacgatcacaacacctacgttaacacattcgatcatcagcaaaacaatgaaaccatcgatcttcttcgattctcttctgcttggaaccatctcactttcccttctaaacccaagaagactctcaagatcgctgtggtggtcaagaaatggccgaggaaatcgcaagctggtgggctcgagcgacacgcgcttacattgcatctcgctctagccaatcgtggccacgagcttcatgttttcaccgctgcttctccatcgttccctgaatatcaactgaaaaatctgatgttccatctctctgagccaaccgctgctggatatcttgatcaagcttctgtctcgcaacagcttcagaaacggaatttaactaacgcaattttcctccggaaatcgcagacgcagaacgctagtggaagaccgtttgacgtaattcacacagagagcgttgggcttctccacacaagagccaagaatctccgtaacgtggtcgcgtcttggcatggaatcgcttacgaaacttttcactctgacatcatccaagaactccttcgtcaagcagacatcgccgccgccaccgctgctggaaccgaagaagaacagccaccgccttcatcgccagctctgacggagcgagcgaagcgagtcgtcgaggaagtcaaattcttccaacgttacgctcaccacgtggcaactagcgatcactgcggtgacgtactcaagaggatttacatgattccggaggaacgtgtccatatcattctaaacggcgtcgacgagaacgttttcaaaccggacgtttcaaaacgtgagagctttagagagaaatttggcgttagaagcggcaagaacaagaaatctcctctggttttgggaattgcagggaggttagtgagagataaaggtcatcctttgatgttctcagctttgaagcgagtgtttgaagaaaacaaggaggcacgtgaaaacgttgtcgttttggtagctggagatggtccatggggaaacagatataaagacctcgggtctactaatgtgattgttcttggaccgttggatcaagaaaagctagcgggattctacaacgcgatcgatgtgtttgtgaatccgacccttcgagctcaagggctggatcacactctcttggaagccatggtttcaggaaaaccggtcttagctactaggctagcgagtatcactgggtcagtggttgtcggtccacatttgggatatactttctcaccaaatgttgagtctcttaccgaggcgattttgcgggttgttagcgatggaacagaggaattacagaggaaaggcaaggaagcgcgtgaacggtcgttgaggcttttcacggcgactaaaatggctgattcatatgaaaggttttttctttgcatttcggatcagaggttttgtacgttacaagcttaa

SEQ ID NO: 73932 - protein, 519 aa, Arabidopsis thaliana
  peptide (1)..(519): Ceres Seq. ID no. 4985021
MARENPLMSFSFSFRYLCHFALLLSLLSFVSFLFRHNTSLCSCLYDHNTYVNTFDHQQNNETIDLLRFSSAWNHLTFPSKPKKTLKIAVVVKKWPRKSQAGGLERHALTLHLALANRGHELHVFTAASPSFPEYQLKNLMFHLSEPTAAGYLDQASVSQQLQKRNLTNAIFLRKSQTQNASGRPFDVIHTESVGLLHTRAKNLRNVVASWHGIAYETFHSDIIQELLRQADIAAATAAGTEEEQPPPSSPALTERAKRVVEEVKFFQRYAHHVATSDHCGDVLKRIYMIPEERVHIILNGVDENVFKPDVSKRESFREKFGVRSGKNKKSPLVLGIAGRLVRDKGHPLMFSALKRVFEENKEARENVVVLVAGDGPWGNRYKDLGSTNVIVLGPLDQEKLAGFYNAIDVFVNPTLRAQGLDHTLLEAMVSGKPVLATRLASITGSVVVGPHLGYTFSPNVESLTEAILRVVSDGTEELQRKGKEARERSLRLFTATKMADSYERFFLCISDQRFCTLQA

SEQ ID NO: 73933 - protein, 512 aa, Arabidopsis thaliana
  peptide (1)..(512): Ceres Seq. ID no. 4985022
MSFSFSFRYLCHFALLLSLLSFVSFLFRHNTSLCSCLYDHNTYVNTFDHQQNNETIDLLRFSSAWNHLTFPSKPKKTLKIAVVVKKWPRKSQAGGLERHALTLHLALANRGHELHVFTAASPSFPEYQLKNLMFHLSEPTAAGYLDQASVSQQLQKRNLTNAIFLRKSQTQNASGRPFDVIHTESVGLLHTRAKNLRNVVASWHGIAYETFHSDIIQELLRQADIAAATAAGTEEEQPPPSSPALTERAKRVVEEVKFFQRYAHHVATSDHCGDVLKRIYMIPEERVHIILNGVDENVFKPDVSKRESFREKFGVRSGKNKKSPLVLGIAGRLVRDKGHPLMFSALKRVFEENKEARENVVVLVAGDGPWGNRYKDLGSTNVIVLGPLDQEKLAGFYNAIDVFVNPTLRAQGLDHTLLEAMVSGKPVLATRLASITGSVVVGPHLGYTFSPNVESLTEAILRVVSDGTEELQRKGKEARERSLRLFTATKMADSYERFFLCISDQRFCTLQA

SEQ ID NO: 73934 - protein, 380 aa, Arabidopsis thaliana
  peptide (1)..(380): Ceres Seq. ID no. 4985023
MFHLSEPTAAGYLDQASVSQQLQKRNLTNAIFLRKSQTQNASGRPFDVIHTESVGLLHTRAKNLRNVVASWHGIAYETFHSDIIQELLRQADIAAATAAGTEEEQPPPSSPALTERAKRVVEEVKFFQRYAHHVATSDHCGDVLKRIYMIPEERVHIILNGVDENVFKPDVSKRESFREKFGVRSGKNKKSPLVLGIAGRLVRDKGHPLMFSALKRVFEENKEARENVVVLVAGDGPWGNRYKDLGSTNVIVLGPLDQEKLAGFYNAIDVFVNPTLRAQGLDHTLLEAMVSGKPVLATRLASITGSVVVGPHLGYTFSPNVESLTEAILRVVSDGTEELQRKGKEARERSLRLFTATKMADSYERFFLCISDQRFCTLQA

SEQ ID NO: 73935 - DNA, 765 bp, Arabidopsis thaliana
  misc_feature (1)..(765): Ceres Seq. ID no. 4985415
  misc_feature (1)..(765): Ortholog of  Ceres SEQ ID NO 13599585 as cited in SEQ ID NO 988
  misc_feature (1)..(765): Ortholog of  Ceres SEQ ID NO 13594624 as cited in SEQ ID NO 55765
  misc_feature (1)..(765): Ortholog of  Ceres SEQ ID NO 15177682 as cited in SEQ ID NO 0
atggcgttattctctccgccgatctcttcctcacttcagaaccctaatctcatccccaagatctcaacctctcttctctccaccaagcgtttctctctaatctccgtccctagagcttcctccgacaatggtacgacttcccccgtcgtggagattccgaagcctgcttctgtggctgtagaggaagttccagttaaatctccagccgaaagctcctccgcttctgaaaacggcgccgttggaggtgaagcgactgattcgagtactgagacggtaatcaaatatcagaatgcgaagtgggttaatggaacttgggatctgaaacagttcgagaaagatggcaaaactgattgggattctgttatcgtttctgaggcaaagaggagaaaatggcttgaagataacccggaaacaacgagtaacgacgagcttgttgtcttcgatacttcgattattccatggtgggcatggatgaagagataccatctacctgaagctgaacttctcaatggtcgtgctgcgatgatagggttcttcatggcttactttgttgatagtcttaccggagtaggacttgttgatcaaatgggaaatttcttctgcaaaacactcttgtttgtggctgtagctggagttctcttcatccgtaagaatgaagatttagacaaacttaaggatctgttcgatgagactacgttatatgacaaacaatggcaagctgcatggaaagagccagattcatcaacagtttcttcaaagaagtga

SEQ ID NO: 73936 - protein, 254 aa, Arabidopsis thaliana; identical to SEQ ID NO: 71158
  peptide (1)..(254): Ceres Seq. ID no. 4985416

SEQ ID NO: 73937 - DNA, 564 bp, Arabidopsis thaliana
  misc_feature (1)..(564): Ceres Seq. ID no. 4985417
  misc_feature (1)..(564): Ortholog of  Ceres SEQ ID NO 14312777 as cited in SEQ ID NO 55573
  misc_feature (1)..(564): Ortholog of  Ceres SEQ ID NO 13595190 as cited in SEQ ID NO 55916
  misc_feature (1)..(564): Ortholog of  Ceres SEQ ID NO 14302004 as cited in SEQ ID NO 63437
  misc_feature (1)..(564): Ortholog of  Ceres SEQ ID NO 13599456 as cited in SEQ ID NO 0
atgcgcttgaatatcggtggaaccattactaagcttggatgggttttaagtttattggagcatgtggtttcttgtcctccatataaacataaaataaggttttcacttctgcttctctttggtgttcttcatggggcttcagttggtccatgtatcaagtccacaatcgatattgattcaagcatccttatcaccgcgttcttaggaactgcggtgatatttttctgtttctcggcagtggcaatgctggcaagacgcagggagtatatctacctcggaggactgctttcgtctggcttttccttgctaacgtggctcaagaattctgatcagtttgcctctgcgacagttgagattcagatgtaccttggactcctgctcttcgtgggatgtatagtggtgaacacacaggagataatagagaaagcacactgtggtgacatggactacgcggtacattcgctgatcctttacattggctttgtacgtgtgttccttcaaattctcagtataatgtggaatacctctgccgatagaataagaagaaataatgaagaaacttag

SEQ ID NO: 73938 - protein, 187 aa, Arabidopsis thaliana
  peptide (1)..(187): Ceres Seq. ID no. 4985418
MRLNIGGTITKLGWVLSLLEHVVSCPPYKHKIRFSLLLLFGVLHGASVGPCIKSTIDIDSSILITAFLGTAVIFFCFSAVAMLARRREYIYLGGLLSSGFSLLTWLKNSDQFASATVEIQMYLGLLLFVGCIVVNTQEIIEKAHCGDMDYAVHSLILYIGFVRVFLQILSIMWNTSADRIRRNNEET

SEQ ID NO: 73939 - protein, 106 aa, Arabidopsis thaliana
  peptide (1)..(106): Ceres Seq. ID no. 4985419
MLARRREYIYLGGLLSSGFSLLTWLKNSDQFASATVEIQMYLGLLLFVGCIVVNTQEIIEKAHCGDMDYAVHSLILYIGFVRVFLQILSIMWNTSADRIRRNNEET

SEQ ID NO: 73940 - DNA, 1554 bp, Arabidopsis thaliana
  misc_feature (1)..(1554): Ceres Seq. ID no. 4985632
  misc_feature (1)..(1554): Ortholog of  Ceres SEQ ID NO 13648124 as cited in SEQ ID NO 20362
atgactgatgcaatgttctcttcttcggccaagccacacttcatcaagcctatgcttccaggcttcgaaacctatattgttattcctaaagctttttactcgaactacttagagggaagacaagagggaaacgctgcagaactgagatcagacgccacggagatcacttggaaaataaagatagacggccgaagaatgaccaaagggtgggaagaatttgcggtggctcacaatcttcaggtcgacgacattcttgttttcagacacgaaggaaatctcttgtttcatgtcacaccttttggactgagtttttgtgagatactttactcacagagagacgagaaagatgtcaaagacacgacgggaaaggttacaagatctagaacggtgaagaaaaacggaaaaaatgagtgttcatcagtggacactgattttgtggtccctgttacagcctcaaaccaacgagttgattcattttatcttccaagaggttttaccacatcaagtggttcgagtaaactgtgcaatgagataattctaatagatgaaaaagacaggccatcgacgctaaaactgcgttacaataaatcaagtaatcggttttgtgttagccgaggttggagagctttctgctgcaggaatggttatagaactggttgtttcttgagaatcatattggtccgaaaaggaaaaacacccgtgctccggatttttcctttggagagggatgaggacaacattgagcatgaggagtctgtgaaagaagagacgaatgtggaatcaggaaagcttaaaagagatagattactgcagaaagatcccaaaaatttgtgttctacatcacaagacactaattttgtggtccctgtcacagcttcaaaccaacgacatgattcatttcatcttccaaaaggtttaaccacctcaagtggtctgagtaaactgtgcaagaagattatttttatggatcaaaaaggtaggtcatcgatactagacttgagctacagtatatcagatgatcggtttactgtcaggcgaggctggaaagctttctgctgcaggaatgagcataaaactggttgtttcttgaggctcatattggtccaaaatggaaaaacacccgaatgcaatgtttatgagggaaccttttctattccagcgaagaactctaagaagattaagcaagaagtagaatatgagtctgcgaaagaagagaagaacctggaatcattgtctttgtcagataattctagctttgtggtatctgtcacagtttctaatctaagtgaagatatactgcatcttccaataaggctttcaagatcaaacttactggacaaaaaaattcacgagatagttttgatgaacaaagagggaagaacatggatattaagtttaaaatacagcaagtactccggtaggtttagaatcacacgcggctggaaaagtttctgcgaggcgaacggtcaaaaacctggatgtaccttcttactcaagctgcatctttcgatgactcggtttgaccaagacggagtagcatgggacaagaagtga

SEQ ID NO: 73941 - protein, 517 aa, Arabidopsis thaliana
  peptide (1)..(517): Ceres Seq. ID no. 4985633
MTDAMFSSSAKPHFIKPMLPGFETYIVIPKAFYSNYLEGRQEGNAAELRSDATEITWKIKIDGRRMTKGWEEFAVAHNLQVDDILVFRHEGNLLFHVTPFGLSFCEILYSQRDEKDVKDTTGKVTRSRTVKKNGKNECSSVDTDFVVPVTASNQRVDSFYLPRGFTTSSGSSKLCNEIILIDEKDRPSTLKLRYNKSSNRFCVSRGWRAFCCRNGYRTGCFLRIILVRKGKTPVLRIFPLERDEDNIEHEESVKEETNVESGKLKRDRLLQKDPKNLCSTSQDTNFVVPVTASNQRHDSFHLPKGLTTSSGLSKLCKKIIFMDQKGRSSILDLSYSISDDRFTVRRGWKAFCCRNEHKTGCFLRLILVQNGKTPECNVYEGTFSIPAKNSKKIKQEVEYESAKEEKNLESLSLSDNSSFVVSVTVSNLSEDILHLPIRLSRSNLLDKKIHEIVLMNKEGRTWILSLKYSKYSGRFRITRGWKSFCEANGQKPGCTFLLKLHLSMTRFDQDGVAWDKK

SEQ ID NO: 73942 - protein, 513 aa, Arabidopsis thaliana
  peptide (1)..(513): Ceres Seq. ID no. 4985634
MFSSSAKPHFIKPMLPGFETYIVIPKAFYSNYLEGRQEGNAAELRSDATEITWKIKIDGRRMTKGWEEFAVAHNLQVDDILVFRHEGNLLFHVTPFGLSFCEILYSQRDEKDVKDTTGKVTRSRTVKKNGKNECSSVDTDFVVPVTASNQRVDSFYLPRGFTTSSGSSKLCNEIILIDEKDRPSTLKLRYNKSSNRFCVSRGWRAFCCRNGYRTGCFLRIILVRKGKTPVLRIFPLERDEDNIEHEESVKEETNVESGKLKRDRLLQKDPKNLCSTSQDTNFVVPVTASNQRHDSFHLPKGLTTSSGLSKLCKKIIFMDQKGRSSILDLSYSISDDRFTVRRGWKAFCCRNEHKTGCFLRLILVQNGKTPECNVYEGTFSIPAKNSKKIKQEVEYESAKEEKNLESLSLSDNSSFVVSVTVSNLSEDILHLPIRLSRSNLLDKKIHEIVLMNKEGRTWILSLKYSKYSGRFRITRGWKSFCEANGQKPGCTFLLKLHLSMTRFDQDGVAWDKK

SEQ ID NO: 73943 - protein, 500 aa, Arabidopsis thaliana
  peptide (1)..(500): Ceres Seq. ID no. 4985635
MLPGFETYIVIPKAFYSNYLEGRQEGNAAELRSDATEITWKIKIDGRRMTKGWEEFAVAHNLQVDDILVFRHEGNLLFHVTPFGLSFCEILYSQRDEKDVKDTTGKVTRSRTVKKNGKNECSSVDTDFVVPVTASNQRVDSFYLPRGFTTSSGSSKLCNEIILIDEKDRPSTLKLRYNKSSNRFCVSRGWRAFCCRNGYRTGCFLRIILVRKGKTPVLRIFPLERDEDNIEHEESVKEETNVESGKLKRDRLLQKDPKNLCSTSQDTNFVVPVTASNQRHDSFHLPKGLTTSSGLSKLCKKIIFMDQKGRSSILDLSYSISDDRFTVRRGWKAFCCRNEHKTGCFLRLILVQNGKTPECNVYEGTFSIPAKNSKKIKQEVEYESAKEEKNLESLSLSDNSSFVVSVTVSNLSEDILHLPIRLSRSNLLDKKIHEIVLMNKEGRTWILSLKYSKYSGRFRITRGWKSFCEANGQKPGCTFLLKLHLSMTRFDQDGVAWDKK

SEQ ID NO: 73944 - DNA, 1066 bp, Arabidopsis thaliana
  misc_feature (1)..(1066): Ceres Seq. ID no. 4985686
  misc_feature (1)..(1066): Ortholog of  Ceres SEQ ID NO 15168591 as cited in SEQ ID NO 57836
attctcagaaatcttgaccatgaaggaggatcgtcgtcttcctcacaaacgcgacgccttccaattcttgaaaaccaaggctgcgtacgttatcgtcatagttctaacctacgcctttggttacttctccgcctaccactatcatcaaccgctgcagcagcagctgccaccgtctacgacagccgtggaaacgacaaaacctcaagtttgttcaatcgacaacttccgagttacgactccatgcggcaatcttgttccgccggaattgattcgccagactgttattgaccggatctttaacggaacttctccgtacatcgatttcccaccaccgcacgccaagaagtttctccggccaaaaagaatcaaaggttggggatcatacggggccgttttcgagaatctaatccgccgagtcaaacctaagacgatcgtcgaagtcgggagttttctcggcgcgtcggcgatacacatggcgaatctcacgcgccgacttgggctcgaggagactcagattctatgcgtcgacgacttccgtggctggcccggttttcgagaccggtttaaggacatggctttggttaacggtgacgttctgcttatgtaccagtttatgcaaaacgtggttatctcggatttttccggttcgatattgccggttcctttctcgaccggttcggctttggagaagctgtgtgagtggggagtgacggcggacctggtggagatagacgcgggtcacgattttaattcggcatgggcggatataaaccgggcggttcggatactccgacccggcggtgttatatttggtcacgattatttcacggcggcggataatagaggagtgaggagagccgtgaatctgttcgcagagattaaccggttaaaggtcaaaaccgatggtcaacattgggttattgattcggtcaaagtaacctgattccctttttcccataaggaatgaaaaaattcgatgtataaataataagaaaatgtgtaatattgcatagtcaattcatattttttttccatcttttgaaaattaatggatttgaggtttttg

SEQ ID NO: 73945 - protein, 313 aa, Arabidopsis thaliana
  peptide (1)..(313): Ceres Seq. ID no. 4985687
FSEILTMKEDRRLPHKRDAFQFLKTKAAYVIVIVLTYAFGYFSAYHYHQPLQQQLPPSTTAVETTKPQVCSIDNFRVTTPCGNLVPPELIRQTVIDRIFNGTSPYIDFPPPHAKKFLRPKRIKGWGSYGAVFENLIRRVKPKTIVEVGSFLGASAIHMANLTRRLGLEETQILCVDDFRGWPGFRDRFKDMALVNGDVLLMYQFMQNVVISDFSGSILPVPFSTGSALEKLCEWGVTADLVEIDAGHDFNSAWADINRAVRILRPGGVIFGHDYFTAADNRGVRRAVNLFAEINRLKVKTDGQHWVIDSVKVT

SEQ ID NO: 73946 - protein, 307 aa, Arabidopsis thaliana
  peptide (1)..(307): Ceres Seq. ID no. 4985688
MKEDRRLPHKRDAFQFLKTKAAYVIVIVLTYAFGYFSAYHYHQPLQQQLPPSTTAVETTKPQVCSIDNFRVTTPCGNLVPPELIRQTVIDRIFNGTSPYIDFPPPHAKKFLRPKRIKGWGSYGAVFENLIRRVKPKTIVEVGSFLGASAIHMANLTRRLGLEETQILCVDDFRGWPGFRDRFKDMALVNGDVLLMYQFMQNVVISDFSGSILPVPFSTGSALEKLCEWGVTADLVEIDAGHDFNSAWADINRAVRILRPGGVIFGHDYFTAADNRGVRRAVNLFAEINRLKVKTDGQHWVIDSVKVT

SEQ ID NO: 73947 - protein, 156 aa, Arabidopsis thaliana
  peptide (1)..(156): Ceres Seq. ID no. 4985689
MANLTRRLGLEETQILCVDDFRGWPGFRDRFKDMALVNGDVLLMYQFMQNVVISDFSGSILPVPFSTGSALEKLCEWGVTADLVEIDAGHDFNSAWADINRAVRILRPGGVIFGHDYFTAADNRGVRRAVNLFAEINRLKVKTDGQHWVIDSVKVT

SEQ ID NO: 73948 - DNA, 1345 bp, Arabidopsis thaliana
  misc_feature (1)..(1345): Ceres Seq. ID no. 4986015
  misc_feature (1)..(1345): Ortholog of  Ceres SEQ ID NO 13597740 as cited in SEQ ID NO 64482
  misc_feature (1)..(1345): Ortholog of  Ceres SEQ ID NO 13596056 as cited in SEQ ID NO 68307
  misc_feature (1)..(1345): Ortholog of  Ceres SEQ ID NO 12388689 as cited in SEQ ID NO 0
aacaacaacaacaacaatgtcttcttctctccgatctaccaccgccgcttctcttctcctccgctcctcctcctcctcctccagatccactctcactctctccgcttcctcctctctctccttcgtcagatctctcgtctcttctccacgtctctcttcttcttcatccctctctcagaaatatcgaattgcgtcggtgaatcggagtttcaactccaccaccgccgctactaaatcttcatcttcagatcctgatcagttgaagaacgctagagaagatatcaaagagcttctcagcaccaaattctgccatccgattttggttagattaggttggcatgatgctggtacgtataacaagaacattaaggaatggccacaaagaggtggagctaatggaagtttgagattcgatattgagcttaaacatgctgctaacgctggtcttgtgaatgctttaaacttgattaaggatatcaaagagaaatactctgggatcagttatgctgatttgttccagttagctagtgctactgctatagaggaagctggaggaccgaaaataccgatgaaatatggtagagttgatgcctctggtcctgaggattgtccagaagaaggaaggcttccagatgctggtcctccttcacctgctactcatctcagagaagttttttacagaatgggattagatgacaaggacatagttgcattatctggtgctcacacgttaggaagatctaggccagaacgtagtggttgggggaagcctgagacgaagtacacgaaagaaggacctggagcaccaggaggacagtcatggacaccagagtggctgaagtttgataattcttacttcaaggagatcaaggaaaagagagatgaagatctccttgtcctacccactgatgctgccatcttcgaagattcttctttcaaggtctatgctgaaaagtatgctgcagatcaggatgcatttttcaaggattacgctgtagcccatgcgaagctcagcaatcttggagcagaatttaaccctccggagggtatcgttatctaatgggggcacataatttactcaaccagacttatgattttagagaaacgtagttcaataatgaaagagaagaaaaagttgacggagaacttttcatgcgagtacttttcgagataccttttggacaatgtttctggctgttcaaaggattttgtttagccgaaagtatttgatcgttttcatggttttgggctttcatgttttttcttgtaataaattgcggaagtgattattcaaaatctatacaaattttgtctgggattgaattattttatcgatgttataact

SEQ ID NO: 73949 - protein, 352 aa, Arabidopsis thaliana
  peptide (1)..(352): Ceres Seq. ID no. 4986016
TTTTTMSSSLRSTTAASLLLRSSSSSSRSTLTLSASSSLSFVRSLVSSPRLSSSSSLSQKYRIASVNRSFNSTTAATKSSSSDPDQLKNAREDIKELLSTKFCHPILVRLGWHDAGTYNKNIKEWPQRGGANGSLRFDIELKHAANAGLVNALNLIKDIKEKYSGISYADLFQLASATAIEEAGGPKIPMKYGRVDASGPEDCPEEGRLPDAGPPSPATHLREVFYRMGLDDKDIVALSGAHTLGRSRPERSGWGKPETKYTKEGPGAPGGQSWTPEWLKFDNSYFKEIKEKRDEDLLVLPTDAAIFEDSSFKVYAEKYAADQDAFFKDYAVAHAKLSNLGAEFNPPEGIVI

SEQ ID NO: 73950 - protein, 347 aa, Arabidopsis thaliana
  peptide (1)..(347): Ceres Seq. ID no. 4986017
MSSSLRSTTAASLLLRSSSSSSRSTLTLSASSSLSFVRSLVSSPRLSSSSSLSQKYRIASVNRSFNSTTAATKSSSSDPDQLKNAREDIKELLSTKFCHPILVRLGWHDAGTYNKNIKEWPQRGGANGSLRFDIELKHAANAGLVNALNLIKDIKEKYSGISYADLFQLASATAIEEAGGPKIPMKYGRVDASGPEDCPEEGRLPDAGPPSPATHLREVFYRMGLDDKDIVALSGAHTLGRSRPERSGWGKPETKYTKEGPGAPGGQSWTPEWLKFDNSYFKEIKEKRDEDLLVLPTDAAIFEDSSFKVYAEKYAADQDAFFKDYAVAHAKLSNLGAEFNPPEGIVI

SEQ ID NO: 73951 - DNA, 633 bp, Arabidopsis thaliana
  misc_feature (1)..(633): Ceres Seq. ID no. 4986087
  misc_feature (1)..(633): Ortholog of  Ceres SEQ ID NO 12627215 as cited in SEQ ID NO 60976
  misc_feature (1)..(633): Ortholog of  Ceres SEQ ID NO 12635879 as cited in SEQ ID NO 0
  misc_feature (1)..(633): Ortholog of  Ceres SEQ ID NO 13599649 as cited in SEQ ID NO 0
atcatcactttcacaatcttcttcatcgatttctctcttccaaatctcccaaaagatgtcgaaccctagagttttcttcgacatgagtctcagcggtactcccatcggacggatcgagatggagcttttcgctgatacaaccccaaacacggcggagaatttccgtgctctctgtaccggcgagaaaggaatgggaaagctaagttcaaggacgagaactttatcaagaagcatacaggagctgggattctctcaatggctaactctggtcctaacactaacggatctcagttcttcatctgtaccgataagacgtcgtggttagatggtaagcacgttgtgtttggacaagttgttaaaggcttggacgtcgtgaaggcgattgagaaagttggatctgattctggaaagacttccaaagtcgttaccatcactgattgtggtcagctttcttagatctgagtgagaaagtgagagactttgatctttatgagtaataatggtgtcttttgctttcggttgttcttcctcttaccttaatggattattctgtttagggtttgagttttcgtttcagagtttgtaacaaaacccttttgtgttttctggggtttgaaataattatgagcttac

SEQ ID NO: 73952 - protein, 107 aa, Arabidopsis thaliana; identical to SEQ ID NO: 28754
  peptide (1)..(107): Ceres Seq. ID no. 4986088

SEQ ID NO: 73953 - protein, 89 aa, Arabidopsis thaliana; identical to SEQ ID NO: 28755
  peptide (1)..(89): Ceres Seq. ID no. 4986089

SEQ ID NO: 73954 - protein, 80 aa, Arabidopsis thaliana; identical to SEQ ID NO: 28756
  peptide (1)..(80): Ceres Seq. ID no. 4986090

SEQ ID NO: 73955 - DNA, 726 bp, Arabidopsis thaliana
  misc_feature (1)..(726): Ceres Seq. ID no. 4986452
  misc_feature (1)..(726): Ortholog of  Ceres SEQ ID NO 14306299 as cited in SEQ ID NO 56895
  misc_feature (1)..(726): Ortholog of  Ceres SEQ ID NO 13663631 as cited in SEQ ID NO 67073
atggagcttcgtaaacggaaaatacgagctccattacatatcttcgtcggcataacgttcttcctccttcagctttggtcgggaacggcccaaattaaccatgaagactcttccacaaaaccctccgttaaaaactctccgtcagcgacgagtactcggcttctgttgtcaccaccttcgttcaccggaaaccgattctcgttcaggttcaggtggaggagaatacgacgtcgtaacagagtcaacagagcgagcagagagtttttaatcgcacataacctcgtaagagcgcgcgtgggagaaccaccgtttcaatgggacggaagattagcggcgtacgcgcgcacgtgggcgaatcagcgcgtgggtgattgtaggcttgttcactctaacgggccgtatggagaaaacatattttgggccggaaagaataactggagccccagagatattgttaatgtgtgggccgatgaggataaattctacgacgtgaaaggtaacacgtgtgagccgcaacacatgtgtgggcactacacgcagatcgtgtggagagatagtaccaaggtcggatgcgcaagtgtggattgttcgaacggcggcgtttatgcgatttgtgtttataacccaccgggaaattacgaaggtgaaaatccgtttggaagttatgatgatcagattggtcttgcccgggatgatccaccggcggtgatcggaggaatggcttga

SEQ ID NO: 73956 - protein, 241 aa, Arabidopsis thaliana
  peptide (1)..(241): Ceres Seq. ID no. 4986453
MELRKRKIRAPLHIFVGITFFLLQLWSGTAQINHEDSSTKPSVKNSPSATSTRLLLSPPSFTGNRFSFRFRWRRIRRRNRVNRASREFLIAHNLVRARVGEPPFQWDGRLAAYARTWANQRVGDCRLVHSNGPYGENIFWAGKNNWSPRDIVNVWADEDKFYDVKGNTCEPQHMCGHYTQIVWRDSTKVGCASVDCSNGGVYAICVYNPPGNYEGENPFGSYDDQIGLARDDPPAVIGGMA

SEQ ID NO: 73957 - DNA, 3123 bp, Arabidopsis thaliana
  misc_feature (1)..(3123): Ceres Seq. ID no. 4986522
  misc_feature (1)..(3123): Ortholog of  Ceres SEQ ID NO 13593889 as cited in SEQ ID NO 53305
  misc_feature (1)..(3123): Ortholog of  Ceres SEQ ID NO 13581959 as cited in SEQ ID NO 56156
atggagtttcctggcagctccaatcagcatttaggtagggataggttcaatggagaagttggttgcggtaataactgttctcagacaggagaggaattttcaaatgagtttttgagggattttggtgctcaacgaagactacaacatggtggtgttaacagaaatgttgagggtaattataataatcgccatcttgtttacgaggatttcaacagaattcttggccttcaaagagttgattccaacatgtcagaaggtattaattcctcgaatggttactttgctgagtcaaatgttgcagactcacctcggaagatgtttcaaactgcaatatcagatgtttatttgcctgaagtattgaagcttctttgtagcttcgggggaaggatcttacagcggcctggtgatggcaagcttagatacattggaggggagactcggattatctcaatacgcaaacatgttggattaaacgaattgatgcacaagacttatgctttgtgcaaccatccgcatacaatcaagtatcaattaccaggagaagatcttgatgcccttatatcggtttgctcagatgaggatcttcttcatatgattgaagagtatcaagaagctgaaacaaaggctggatcccagaggattagggtctttcttgtaccttccacagaatcatcagagagtcctaaaattttccatgaaaggaatatgaacataaaccgaaacacgaaccagcagacggatatagatcattatcagtatgtttcagctcttaatggtattgtagatgtgagtcctcaaaagagttccagcggccaaagtggaacaagtcagaccacacaatttgggaatgcttcagaatttagccctacatttcatcttcgagactcgcctacttctgttcatacatgggaacacaaagacagcaacagtccaaccttcatgaaaccatatgggaacacgaatgctgttcattttatgccgaaaatgcagattcccaggaactcgtttggtcaacaatctcctccaacatctcctttttcagtccacaagagagcaaacaccgacgttccttattttgccgatcaaaatggtttctttgacccttacttggctgctccaaacttcccacagcaaaataggttcttttttgagactactacacaaaagcagaagcatccagaagtgaatcttcatgaccggaggccaagcgatgatatttacccccatggccaagcttatatcggagccgagaaaatgacgcttaagaaaaacgctctttctgatccgcagctgcatgatgagagccaaatcaacaatgggttagaagcatttaccaaacaaccatggaaaatattgagaaagaatctacgtgttgtggctacatcaaagtgggaagatagtgatgatatctatttcaataatccagaaggcaagagatgcaaggagcttgaactcaccaaggaagttcctaatagttggatcaatcgcgataataatcccgattcttttgatcaggcaacaaagaaacaggatggtagtaacagtaatagctccttcagtccgaattatttcagtccgaatcatcaaccagctgctcagattacttcaagtgattcacaagattcaggaagctcagtgttctctttatcagttaacaccaacgaaaattatcttgattgttcgagggaaaaatttaatggtttccagcatgacatgtcactagatattctcatcagaagccacacttcagctacagatcaactatgtagtacaaccaagtcaagtgataaagcagattactcctcacccaatacaaatttccccgtggtatttctgagacaggaacctatgattccgagacatgatttggagacaaatagcgatgattcagatactcaaaaatctcttcctagagaagagagtattcactatagtggattgccacttaggaaggtgggaagtagagaaactacttttatgcacacgcaggggtcagatgatttcttcaaaagcaagctgcttggtccacagttgatagttgaggatgtgacgaacgaagtaatttcagataatctcttatcagctactattgtccctcaagtaaatagggagtccgatgatgatcacaaatcctacacaagggagaaagagattacaaatgcggatcatgaatcagaaatggaggaaaagtacaagaaaagcagaaacaccgatgattcattcagcgaagctgcaatggttgaaatcgaagctggaatatatggcttacagataattaaaaacactgatcttgaagacttacacgagcttggatctggtacatttggaactgtttactatgggaagtggagaggaactgatgttgctatcaagaggataaagaatagttgtttctctggtggatcatccgagcaagcacggcagactaaagatttctggagagaagctcggatattggcgaatcttcaccatcctaacgtagtggccttttatggagttgtaccagatggacctggtggaacaatggcaacagtgactgagtatatggtgaacggatctttgaggcatgtcttgcagagaaaagacagattacttgataggcgcaaaaaactgatgataactcttgattctgcatttggcatggagtatctacatatgaaaaatattgttcattttgatcttaaatgcgataacttgcttgtaaacttgagggatccacaacgacccatttgcaaggttggagatttcggattgtcgagaataaaacgaaacacgcttgtctctggtggagtaagaggaacccttccatggatggcaccagagctgctaaacggaagcagcaatcgggtctcagagaaagtcgatgttttctcatttggtatcgtgatgtgggagatcttgacaggcgaagaaccctatgcgaatctgcattgcggtgccatcattggtggaattgtgaacaatacgttaagacctccggtgcctgaacggtgtgaagctgagtggaggaagttgatggagcaatgctggtcattcgatccaggagtacggccatcgtttacggagattgttgaacgacttcgatcaatgactgttgccttgcaacccaagcgaagaacctaa

SEQ ID NO: 73958 - protein, 1040 aa, Arabidopsis thaliana; identical to SEQ ID NO: 73861
  peptide (1)..(1040): Ceres Seq. ID no. 4986523

SEQ ID NO: 73959 - protein, 958 aa, Arabidopsis thaliana; identical to SEQ ID NO: 73862
  peptide (1)..(958): Ceres Seq. ID no. 4986524

SEQ ID NO: 73960 - protein, 935 aa, Arabidopsis thaliana
  peptide (1)..(935): Ceres Seq. ID no. 4986525
MFQTAISDVYLPEVLKLLCSFGGRILQRPGDGKLRYIGGETRIISIRKHVGLNELMHKTYALCNHPHTIKYQLPGEDLDALISVCSDEDLLHMIEEYQEAETKAGSQRIRVFLVPSTESSESPKIFHERNMNINRNTNQQTDIDHYQYVSALNGIVDVSPQKSSSGQSGTSQTTQFGNASEFSPTFHLRDSPTSVHTWEHKDSNSPTFMKPYGNTNAVHFMPKMQIPRNSFGQQSPPTSPFSVHKRANTDVPYFADQNGFFDPYLAAPNFPQQNRFFFETTTQKQKHPEVNLHDRRPSDDIYPHGQAYIGAEKMTLKKNALSDPQLHDESQINNGLEAFTKQPWKILRKNLRVVATSKWEDSDDIYFNNPEGKRCKELELTKEVPNSWINRDNNPDSFDQATKKQDGSNSNSSFSPNYFSPNHQPAAQITSSDSQDSGSSVFSLSVNTNENYLDCSREKFNGFQHDMSLDILIRSHTSATDQLCSTTKSSDKADYSSPNTNFPVVFLRQEPMIPRHDLETNSDDSDTQKSLPREESIHYSGLPLRKVGSRETTFMHTQGSDDFFKSKLLGPQLIVEDVTNEVISDNLLSATIVPQVNRESDDDHKSYTREKEITNADHESEMEEKYKKSRNTDDSFSEAAMVEIEAGIYGLQIIKNTDLEDLHELGSGTFGTVYYGKWRGTDVAIKRIKNSCFSGGSSEQARQTKDFWREARILANLHHPNVVAFYGVVPDGPGGTMATVTEYMVNGSLRHVLQRKDRLLDRRKKLMITLDSAFGMEYLHMKNIVHFDLKCDNLLVNLRDPQRPICKVGDFGLSRIKRNTLVSGGVRGTLPWMAPELLNGSSNRVSEKVDVFSFGIVMWEILTGEEPYANLHCGAIIGGIVNNTLRPPVPERCEAEWRKLMEQCWSFDPGVRPSFTEIVERLRSMTVALQPKRRT

SEQ ID NO: 73961 - DNA, 1017 bp, Arabidopsis thaliana
  misc_feature (1)..(1017): Ceres Seq. ID no. 4986727
  misc_feature (1)..(1017): Ortholog of  Ceres SEQ ID NO 12586556 as cited in SEQ ID NO 64667
  misc_feature (1)..(1017): Ortholog of  Ceres SEQ ID NO 13660894 as cited in SEQ ID NO 67475
atgtatcttgttggtggaaacatgattgatgctcacaaagtgtttgatgaaatgcctgagagaaatccggtaacttggaatgtgatgatcactggccttactaatttgggagatttcgaaaaagctctttgctttttggagaagatgccgaatcggacggtagtgtcttggaccactatcattgatgggtatgcacgagtagataaacccaaggaagctatactcttgttttcaagaatggttgcttgcgacgcaataaagcccaacgagataaccattctcgccattctcccagctgtttggaacttgggagacttaaagatgtgcggatcagttcatgcttatgttgggaaaagagggtttgttccatgtgatatccgtgtgactaactctctcatcgacgcttatgcaaaatgtgggtgtattcaaagcgcgttcaagtttttcatagagattccaaacggaaggaagaatcttgtatcgtggacaacgatgatctcggcgtttgcaattcacggaatgggaaaagaagcggtcagtatgtttaaagacatggaaagattaggattgaagccgaacagagtgaccatgatcagtgttttgaacgcttgcagccatggaggtttagcagaagaagagtttctagagtttttcaacacgatggtaaacgagtacaagatcacgccggatgtgaagcactatggatgtctagtagatatgttgagaagaaaaggaagattagaagaagcagagaagattgctttggagattccaatagaagaaaaagctgtggtttggagaatgctgcttggagcttgtagcgtttatgatgatgctgaattggctgagagggttactagaaagctaatggagctagagagaagccatggaggagactatgtgcttatgtccaacatcttttgtggtactggaagatttttagatgcgcagagatttcggaaacagatggatgttagaggagtagctaaacttccaggacattcacaagtaacatag

SEQ ID NO: 73962 - protein, 338 aa, Arabidopsis thaliana
  peptide (1)..(338): Ceres Seq. ID no. 4986728
MYLVGGNMIDAHKVFDEMPERNPVTWNVMITGLTNLGDFEKALCFLEKMPNRTVVSWTTIIDGYARVDKPKEAILLFSRMVACDAIKPNEITILAILPAVWNLGDLKMCGSVHAYVGKRGFVPCDIRVTNSLIDAYAKCGCIQSAFKFFIEIPNGRKNLVSWTTMISAFAIHGMGKEAVSMFKDMERLGLKPNRVTMISVLNACSHGGLAEEEFLEFFNTMVNEYKITPDVKHYGCLVDMLRRKGRLEEAEKIALEIPIEEKAVVWRMLLGACSVYDDAELAERVTRKLMELERSHGGDYVLMSNIFCGTGRFLDAQRFRKQMDVRGVAKLPGHSQVT

SEQ ID NO: 73963 - protein, 331 aa, Arabidopsis thaliana
  peptide (1)..(331): Ceres Seq. ID no. 4986729
MIDAHKVFDEMPERNPVTWNVMITGLTNLGDFEKALCFLEKMPNRTVVSWTTIIDGYARVDKPKEAILLFSRMVACDAIKPNEITILAILPAVWNLGDLKMCGSVHAYVGKRGFVPCDIRVTNSLIDAYAKCGCIQSAFKFFIEIPNGRKNLVSWTTMISAFAIHGMGKEAVSMFKDMERLGLKPNRVTMISVLNACSHGGLAEEEFLEFFNTMVNEYKITPDVKHYGCLVDMLRRKGRLEEAEKIALEIPIEEKAVVWRMLLGACSVYDDAELAERVTRKLMELERSHGGDYVLMSNIFCGTGRFLDAQRFRKQMDVRGVAKLPGHSQVT

SEQ ID NO: 73964 - protein, 321 aa, Arabidopsis thaliana
  peptide (1)..(321): Ceres Seq. ID no. 4986730
MPERNPVTWNVMITGLTNLGDFEKALCFLEKMPNRTVVSWTTIIDGYARVDKPKEAILLFSRMVACDAIKPNEITILAILPAVWNLGDLKMCGSVHAYVGKRGFVPCDIRVTNSLIDAYAKCGCIQSAFKFFIEIPNGRKNLVSWTTMISAFAIHGMGKEAVSMFKDMERLGLKPNRVTMISVLNACSHGGLAEEEFLEFFNTMVNEYKITPDVKHYGCLVDMLRRKGRLEEAEKIALEIPIEEKAVVWRMLLGACSVYDDAELAERVTRKLMELERSHGGDYVLMSNIFCGTGRFLDAQRFRKQMDVRGVAKLPGHSQVT

SEQ ID NO: 73965 - DNA, 684 bp, Arabidopsis thaliana
  misc_feature (1)..(684): Ceres Seq. ID no. 4986868
  misc_feature (1)..(684): Ortholog of  Ceres SEQ ID NO 13639514 as cited in SEQ ID NO 55736
  misc_feature (1)..(684): Ortholog of  Ceres SEQ ID NO 14312254 as cited in SEQ ID NO 59148
  misc_feature (1)..(684): Ortholog of  Ceres SEQ ID NO 13662804 as cited in SEQ ID NO 65394
  misc_feature (1)..(684): Ortholog of  Ceres SEQ ID NO 13656519 as cited in SEQ ID NO 69226
atggcgatcgaggatcaagagaacacaatccgtgaaatcaaacctaagaacagaagaatcatgggagctggtggtccggaggaagaggagaaccggtggccgccatggttgaaacctttgcttaaagagcaattctttgttcattgcaagtttcatggagactctcataagagtgaatgcaatatgtattgcttagactgcaccaatggcccactttgctctctttgtcttgctcatcacaaggatcatcgcaccattcagataaggagatcttcttatcatgatgttataagggtgaatgagatacaaaagtatcttgatataggtgggatccaaacctatgtgatcaatagtgctaaagtcgtcttcctgaatgagaggcctcagcctaggcctgggaaaggagtgaccaatacctgcaaggtttgctatcgtagcctcgttgatgatagcttccgcttctgctctcttggctgcaagattgctggaacatcaagaggctttgaaaagggaagggagaacctgctaatggaaacagaggattcaagtagcagcattgcaattgggaagaacattacaaatctccagagtttcagcccatcaacacctccacttactacatctagtaactgcagaatcgtcaagcgaagaaagggaattcctcaccgatctccaatgggataa

SEQ ID NO: 73966 - protein, 227 aa, Arabidopsis thaliana; identical to SEQ ID NO: 28831
  peptide (1)..(227): Ceres Seq. ID no. 4986869

SEQ ID NO: 73967 - protein, 207 aa, Arabidopsis thaliana; identical to SEQ ID NO: 28832
  peptide (1)..(207): Ceres Seq. ID no. 4986870

SEQ ID NO: 73968 - protein, 166 aa, Arabidopsis thaliana; identical to SEQ ID NO: 28833
  peptide (1)..(166): Ceres Seq. ID no. 4986871

SEQ ID NO: 73969 - DNA, 1758 bp, Arabidopsis thaliana
  misc_feature (1)..(1758): Ceres Seq. ID no. 4987023
  misc_feature (1)..(1758): Ortholog of  Ceres SEQ ID NO 13596319 as cited in SEQ ID NO 67933
atggaggaagctcaccagctggagtcgagatccgatgacctaagtcaacggagaagctactggagatggaggaagcaggattttttcccggaattctcttttcagagcttctctacctacaaatcagctctctccgccacttgtccacgcctcgccgatcgtcttctctctcgctcttccgatgcgtacgagctcgatgcagcccgccgcgaaagcgagaaccctatgcgtcgttgtctcacttggtgggacttgctctggcttagctttggttctgttgttggttcgggtgtgttcgtgatcacgggtcaggaggctcgagttggagctggtcctgctgttgttctctcctacgctatctctggtgtctctgcattgctctcagttctctgttatgctgagtttggagttgagattcctgtcgctggaggttctttctcttatcttagggttgaattgggggattttattgcctttattgctgctgggaatattcttcttgaggctatggttggtgctgctggattagggaggtcatggtcttcgtatctagctagtttggtcaagaatgattctgattattttcggattaaagtcgattcctttgctaaagggtttgatcttttggatccggttgctgttgcagtgcttttagttgctaatggtattgccatgactggaacaaagaggacttcttggttgaatttgattacttccatggtcactgtttgtattattgtgtttatcgtcgttgtggggtttactcattcaaaaacctcaaatttggttccttttttcccttatggagcgaaaggtgtggtgcaatctgctgcagttgtctactggtcatacactggttttgatatggtggctaacatggctgaagaaaccgagaaaccttccagagatattccaattggtttggttggttcgatgtctatgatcactgtggtttactgtttgatggctctggccttgactatgatggtgaaatacactgaaattgatgcgaatgcagcttattctgttgcttttgctcagattgggatgaaatgggcgaagtacttggttggtatatgcgctttaaagggaatgaccacaagcctgcttgttggctctctaggccaagctcggtacaccactcagattgctcggtctcatatgattcctccatggtttgctttggttcatccaaaaacaggaacccctatttatgctactctccttgtaaccatactcagttcaataatatccttcttcaccagcttagaggttttatcaagcgttttctcctttgctaccctcttcattttcatgctcgtggcagtagcattgcttgtgagacgttactacgtgaaggatgtcactcctgaggccggtttgttgaagtttcttggttttctgtttttgataattgcttcctccattggagtatcagcgctttggaactcaggcgttaaaggttggatcgcttacacagtgactggagttatttggtttataggcactttagggttggcattgcttccgaaatatcgtgttcctaaggtatggggagtcccactagttccgtggttgccatcgttttcaatcgccatgaatctattccttatcggatcactcggttatgtagcattcttgagattcattatctgcaccatggtgatgcttttgtactacctattcgttggtcttcatgcaacctatgatgtagctcatcagcctttggaggaagcaaagtttgagggagagagataa

SEQ ID NO: 73970 - protein, 585 aa, Arabidopsis thaliana; identical to SEQ ID NO: 41877
  peptide (1)..(585): Ceres Seq. ID no. 4987024

SEQ ID NO: 73971 - protein, 510 aa, Arabidopsis thaliana
  peptide (1)..(510): Ceres Seq. ID no. 4987025
MRRCLTWWDLLWLSFGSVVGSGVFVITGQEARVGAGPAVVLSYAISGVSALLSVLCYAEFGVEIPVAGGSFSYLRVELGDFIAFIAAGNILLEAMVGAAGLGRSWSSYLASLVKNDSDYFRIKVDSFAKGFDLLDPVAVAVLLVANGIAMTGTKRTSWLNLITSMVTVCIIVFIVVVGFTHSKTSNLVPFFPYGAKGVVQSAAVVYWSYTGFDMVANMAEETEKPSRDIPIGLVGSMSMITVVYCLMALALTMMVKYTEIDANAAYSVAFAQIGMKWAKYLVGICALKGMTTSLLVGSLGQARYTTQIARSHMIPPWFALVHPKTGTPIYATLLVTILSSIISFFTSLEVLSSVFSFATLFIFMLVAVALLVRRYYVKDVTPEAGLLKFLGFLFLIIASSIGVSALWNSGVKGWIAYTVTGVIWFIGTLGLALLPKYRVPKVWGVPLVPWLPSFSIAMNLFLIGSLGYVAFLRFIICTMVMLLYYLFVGLHATYDVAHQPLEEAKFEGER

SEQ ID NO: 73972 - protein, 416 aa, Arabidopsis thaliana
  peptide (1)..(416): Ceres Seq. ID no. 4987026
MVGAAGLGRSWSSYLASLVKNDSDYFRIKVDSFAKGFDLLDPVAVAVLLVANGIAMTGTKRTSWLNLITSMVTVCIIVFIVVVGFTHSKTSNLVPFFPYGAKGVVQSAAVVYWSYTGFDMVANMAEETEKPSRDIPIGLVGSMSMITVVYCLMALALTMMVKYTEIDANAAYSVAFAQIGMKWAKYLVGICALKGMTTSLLVGSLGQARYTTQIARSHMIPPWFALVHPKTGTPIYATLLVTILSSIISFFTSLEVLSSVFSFATLFIFMLVAVALLVRRYYVKDVTPEAGLLKFLGFLFLIIASSIGVSALWNSGVKGWIAYTVTGVIWFIGTLGLALLPKYRVPKVWGVPLVPWLPSFSIAMNLFLIGSLGYVAFLRFIICTMVMLLYYLFVGLHATYDVAHQPLEEAKFEGER

SEQ ID NO: 73973 - DNA, 2253 bp, Arabidopsis thaliana
  misc_feature (1)..(2253): Ceres Seq. ID no. 4987027
  misc_feature (1)..(2253): Ortholog of  Ceres SEQ ID NO 14314593 as cited in SEQ ID NO 52313
  misc_feature (1)..(2253): Ortholog of  Ceres SEQ ID NO 13655547 as cited in SEQ ID NO 63739
atggcgccgtgcattgattttgtgttcatggcttttggtttgcttctcttgctcatcgccgtcacaacaagtcgcccaatcactcggccaaaagtattcgacgttcgaagttatggtgctaaaggtgacggtaaaatggataacaccaatgcgttcacaaatgcatggaaagatgcatgcagatggaatggaccaagcaaaatgtacataccactaggaacattctatcttggtggtgtaacgtttgtaggaccatgcgatggtaagatctcgtttgtcattgatggaactttgttggctcctccgaacaacgacgacattaaaaaggaaatatggataaacttccgctacatcaactatctcacggtcttcggggatggcaccctcgacggccaaggaaaaaagtcatggtcactaattgattgccagaaggacaataattgtcccaaactcgctataaatatggggttcgatttcgtaaaaaactcaagcatgaatgggataacatcactcaacagtaaagccggacacttcaatttcttatccgttgaccacttcagcatcactagagtcaacataatagctcccagcaatagtcccaacactgacggaatcaaaatagctttatcaagtaacatgcaaatctcaaacactcacatcagcaccggagacgattgtatcgcaatgctctctggaaacacaaattttgatatctataatgtcaagtgcggaccgggacatggaattagtattggaagcttaggaaaaaacaaagacgaaaagaatgttaatggtttaatggttagaaattcggtctttaccggtacgaccaacggtatacggatcaagacatgggaatcttcagcttcaacaatccgaattatcaatttagtgtatgagaatctacagatgataaatgttgaaaatcctatcggcattgatcaaaaatactgtccttacccgccatgcagcaatatgggagattctcacattcagatccgaaacgtgacactaaagaacatttggggaacatcaaagaataaagtggctgtgaaatttcaatgtagcaaaacctttccttgcaaagatgttcagttaattgacattaacttaactcaccatggagtcgacggtcctgcaagtgcgttgtgtgagaacgttgatggatctgctactgggaagatgcttcagatcagtactgtgaatcccaatccagctcaatctcgattttcccgccctcgatccctccgtgttctctcactctccgccgatccatcggcaaatcggaatcctaaatcagccgttgacgcacacgcgccgccactggtggttgtgggatctgcgaacgccgatatctatgtggagatcgagagattacccaaggaaggggaaacgatttcggccaagacagggcaaacgctcgccggaggaaaaggcgcgaatcaggcggcgtgtggagcgaagctaatgtatccgacttacttcgttggtcgtttgggagaggacgcgcacgggaagctaatagctgaggcgttgggcgatgatgggtgtggggttcacttggactacgtgagatctgtgaataatgagccgacgggacacgcggtggtgatgcttcagtcggacggtcagaattcgatcattatcgttggtggtgcaaatatgaaagcttggcctgagattatgagcgatgatgatcttgagattgtgaggaatgctggtattgtgcttctgcaaagggagatcccagattccatcaatattcaagttgctaaggctgtgaagaaagcaggtgttccagtcatccttgatgtgggaggaatggatacgcctataccaaatgagctattggattccattgatatcttgagccccaatgaaactgagctcagtcgcttgacaggaatgccaactgaaacttttgaacagattagccaagctgttgcaaagtgccataagttgggagttaagcaagttctagtaaaactcgggtccaaaggatctgcactattcatacaaggggaaaaaccaatccagcagtctatcataccggctgcacaagtggttgatactacaggagctggggatactttcactgcagcatttgcagtcgctatggtagagggcaagtcccatgaggaatgcttgagatttgctgctgcagctgcctctctttgtgtccaagtaaagggtgcaataccgagcatgcctgaccgaaaatctgttttgaagctccttaaatttagtatctaa

SEQ ID NO: 73974 - protein, 750 aa, Arabidopsis thaliana
  peptide (1)..(750): Ceres Seq. ID no. 4987028
MAPCIDFVFMAFGLLLLLIAVTTSRPITRPKVFDVRSYGAKGDGKMDNTNAFTNAWKDACRWNGPSKMYIPLGTFYLGGVTFVGPCDGKISFVIDGTLLAPPNNDDIKKEIWINFRYINYLTVFGDGTLDGQGKKSWSLIDCQKDNNCPKLAINMGFDFVKNSSMNGITSLNSKAGHFNFLSVDHFSITRVNIIAPSNSPNTDGIKIALSSNMQISNTHISTGDDCIAMLSGNTNFDIYNVKCGPGHGISIGSLGKNKDEKNVNGLMVRNSVFTGTTNGIRIKTWESSASTIRIINLVYENLQMINVENPIGIDQKYCPYPPCSNMGDSHIQIRNVTLKNIWGTSKNKVAVKFQCSKTFPCKDVQLIDINLTHHGVDGPASALCENVDGSATGKMLQISTVNPNPAQSRFSRPRSLRVLSLSADPSANRNPKSAVDAHAPPLVVVGSANADIYVEIERLPKEGETISAKTGQTLAGGKGANQAACGAKLMYPTYFVGRLGEDAHGKLIAEALGDDGCGVHLDYVRSVNNEPTGHAVVMLQSDGQNSIIIVGGANMKAWPEIMSDDDLEIVRNAGIVLLQREIPDSINIQVAKAVKKAGVPVILDVGGMDTPIPNELLDSIDILSPNETELSRLTGMPTETFEQISQAVAKCHKLGVKQVLVKLGSKGSALFIQGEKPIQQSIIPAAQVVDTTGAGDTFTAAFAVAMVEGKSHEECLRFAAAAASLCVQVKGAIPSMPDRKSVLKLLKFSI

SEQ ID NO: 73975 - protein, 741 aa, Arabidopsis thaliana
  peptide (1)..(741): Ceres Seq. ID no. 4987029
MAFGLLLLLIAVTTSRPITRPKVFDVRSYGAKGDGKMDNTNAFTNAWKDACRWNGPSKMYIPLGTFYLGGVTFVGPCDGKISFVIDGTLLAPPNNDDIKKEIWINFRYINYLTVFGDGTLDGQGKKSWSLIDCQKDNNCPKLAINMGFDFVKNSSMNGITSLNSKAGHFNFLSVDHFSITRVNIIAPSNSPNTDGIKIALSSNMQISNTHISTGDDCIAMLSGNTNFDIYNVKCGPGHGISIGSLGKNKDEKNVNGLMVRNSVFTGTTNGIRIKTWESSASTIRIINLVYENLQMINVENPIGIDQKYCPYPPCSNMGDSHIQIRNVTLKNIWGTSKNKVAVKFQCSKTFPCKDVQLIDINLTHHGVDGPASALCENVDGSATGKMLQISTVNPNPAQSRFSRPRSLRVLSLSADPSANRNPKSAVDAHAPPLVVVGSANADIYVEIERLPKEGETISAKTGQTLAGGKGANQAACGAKLMYPTYFVGRLGEDAHGKLIAEALGDDGCGVHLDYVRSVNNEPTGHAVVMLQSDGQNSIIIVGGANMKAWPEIMSDDDLEIVRNAGIVLLQREIPDSINIQVAKAVKKAGVPVILDVGGMDTPIPNELLDSIDILSPNETELSRLTGMPTETFEQISQAVAKCHKLGVKQVLVKLGSKGSALFIQGEKPIQQSIIPAAQVVDTTGAGDTFTAAFAVAMVEGKSHEECLRFAAAAASLCVQVKGAIPSMPDRKSVLKLLKFSI

SEQ ID NO: 73976 - protein, 705 aa, Arabidopsis thaliana
  peptide (1)..(705): Ceres Seq. ID no. 4987030
MDNTNAFTNAWKDACRWNGPSKMYIPLGTFYLGGVTFVGPCDGKISFVIDGTLLAPPNNDDIKKEIWINFRYINYLTVFGDGTLDGQGKKSWSLIDCQKDNNCPKLAINMGFDFVKNSSMNGITSLNSKAGHFNFLSVDHFSITRVNIIAPSNSPNTDGIKIALSSNMQISNTHISTGDDCIAMLSGNTNFDIYNVKCGPGHGISIGSLGKNKDEKNVNGLMVRNSVFTGTTNGIRIKTWESSASTIRIINLVYENLQMINVENPIGIDQKYCPYPPCSNMGDSHIQIRNVTLKNIWGTSKNKVAVKFQCSKTFPCKDVQLIDINLTHHGVDGPASALCENVDGSATGKMLQISTVNPNPAQSRFSRPRSLRVLSLSADPSANRNPKSAVDAHAPPLVVVGSANADIYVEIERLPKEGETISAKTGQTLAGGKGANQAACGAKLMYPTYFVGRLGEDAHGKLIAEALGDDGCGVHLDYVRSVNNEPTGHAVVMLQSDGQNSIIIVGGANMKAWPEIMSDDDLEIVRNAGIVLLQREIPDSINIQVAKAVKKAGVPVILDVGGMDTPIPNELLDSIDILSPNETELSRLTGMPTETFEQISQAVAKCHKLGVKQVLVKLGSKGSALFIQGEKPIQQSIIPAAQVVDTTGAGDTFTAAFAVAMVEGKSHEECLRFAAAAASLCVQVKGAIPSMPDRKSVLKLLKFSI

SEQ ID NO: 73977 - DNA, 1122 bp, Arabidopsis thaliana
  misc_feature (1)..(1122): Ceres Seq. ID no. 4988145
  misc_feature (1)..(1122): Ortholog of  Ceres SEQ ID NO 13657872 as cited in SEQ ID NO 66357
atggcaaaagaaagaagcatatggtggggggtgttaatggggaggggaccacgtggcggttactgggaacgctgcaaactaaacgatcggtttagattcatagaagaaaacacaaaacttgtagaaaaagaaaccgggaacaaatcaaacaacgatgtaacaacaacgaagaagaaagctcttcaagatatcattatcaacaatggagtaggattgatcaattcatgggttgattcaatgagagcttgttcccctactcatcttaaatctttgttgaaacaaagctcttggctcacggaacatccatcagctttggatatgtttgaagagattcttcacctttctgaaggaaaacaaatcgttatgttcttggattatgatggcactttatctcccattgttgatgatccagatcgagctttcatgtctagaaagatgagaagaactgtgaggaaactagcaaactgtttcccgacggccatagttagtgggagatgcatagaaaagctaattatgatagttttgacaacttttcaggtttataactttgtaaaactaactgagttgtactatgctggaagtcatggaatggacatcaaaggaccagagcaagggtccaaatatgagcaagatagtaaatctcttctttgccaaccagctacagagttcctccccatgatcgacgaggtttatcataaattagtggagaaaacaaaatctactcccggagcccaagtagagaacaacaaattttgtgtctctgttcacttccgacgcgtagatgaaaataactggagtgatttggctaaccaagttcgatcagtaatgaaagactaccctaagctccgtcttactcaaggaagaaaagttttggaggttcgtccgattattaaatgggacaaaggcaaagcactcgagtttttattagagtcacttggatacgctaattgtaccgacgttttccctctttatatcggagatgatcgcaccgacgaagatgcattcaaggtatatacagaatttagttatggagttcttgcaacgtttagtggaatggaaacaattgagatctggagcatgatgagagctataactacagaagaatcgtttcttcttaattag

SEQ ID NO: 73978 - protein, 373 aa, Arabidopsis thaliana
  peptide (1)..(373): Ceres Seq. ID no. 4988146
MAKERSIWWGVLMGRGPRGGYWERCKLNDRFRFIEENTKLVEKETGNKSNNDVTTTKKKALQDIIINNGVGLINSWVDSMRACSPTHLKSLLKQSSWLTEHPSALDMFEEILHLSEGKQIVMFLDYDGTLSPIVDDPDRAFMSRKMRRTVRKLANCFPTAIVSGRCIEKLIMIVLTTFQVYNFVKLTELYYAGSHGMDIKGPEQGSKYEQDSKSLLCQPATEFLPMIDEVYHKLVEKTKSTPGAQVENNKFCVSVHFRRVDENNWSDLANQVRSVMKDYPKLRLTQGRKVLEVRPIIKWDKGKALEFLLESLGYANCTDVFPLYIGDDRTDEDAFKVYTEFSYGVLATFSGMETIEIWSMMRAITTEESFLLN

SEQ ID NO: 73979 - protein, 361 aa, Arabidopsis thaliana
  peptide (1)..(361): Ceres Seq. ID no. 4988147
MGRGPRGGYWERCKLNDRFRFIEENTKLVEKETGNKSNNDVTTTKKKALQDIIINNGVGLINSWVDSMRACSPTHLKSLLKQSSWLTEHPSALDMFEEILHLSEGKQIVMFLDYDGTLSPIVDDPDRAFMSRKMRRTVRKLANCFPTAIVSGRCIEKLIMIVLTTFQVYNFVKLTELYYAGSHGMDIKGPEQGSKYEQDSKSLLCQPATEFLPMIDEVYHKLVEKTKSTPGAQVENNKFCVSVHFRRVDENNWSDLANQVRSVMKDYPKLRLTQGRKVLEVRPIIKWDKGKALEFLLESLGYANCTDVFPLYIGDDRTDEDAFKVYTEFSYGVLATFSGMETIEIWSMMRAITTEESFLLN

SEQ ID NO: 73980 - protein, 294 aa, Arabidopsis thaliana
  peptide (1)..(294): Ceres Seq. ID no. 4988148
MRACSPTHLKSLLKQSSWLTEHPSALDMFEEILHLSEGKQIVMFLDYDGTLSPIVDDPDRAFMSRKMRRTVRKLANCFPTAIVSGRCIEKLIMIVLTTFQVYNFVKLTELYYAGSHGMDIKGPEQGSKYEQDSKSLLCQPATEFLPMIDEVYHKLVEKTKSTPGAQVENNKFCVSVHFRRVDENNWSDLANQVRSVMKDYPKLRLTQGRKVLEVRPIIKWDKGKALEFLLESLGYANCTDVFPLYIGDDRTDEDAFKVYTEFSYGVLATFSGMETIEIWSMMRAITTEESFLLN

SEQ ID NO: 73981 - DNA, 1995 bp, Arabidopsis thaliana
  misc_feature (1)..(1995): Ceres Seq. ID no. 4988544
  misc_feature (1)..(1995): Ortholog of  Ceres SEQ ID NO 13638292 as cited in SEQ ID NO 57738
atggggttagggcattgcatggtttacgttgtggtcctaagtgccattgcggctacagtgacatcatacccttactcctctccttactcatcccctcaaaccccacattacaattctcccagccatgaacacaaaagccctaagtacgcgccacatccaaaaccatacgtttatatttctccaccacctccatcatactattctccttctccaaaagtaaactataagtctccaccaccaccaaacgtctacaactctccacctccaccatactattctccttcaccaaaggttgattataagtctccaccaccaccttacgtctacagttccccacctccaccatactattctccttctccgaaggttgactataagtctcctccaccaccatacgtctacagctccccacccccaccatactattctccttcgccaaaggttgaatacaagtctccaccaccaccgtacgtctacaattctccacctccaccatactactctccttctcctaagatagagtacaagtccccaccaccaccatatgtctacagttctccacccccaccgtactactctccatctccaaaggttgactacaagtccccaccaccaccgtacgtctacaactccccacccccaccatactactctccttcgccaaaggttgactacaaatctcccccaccaccgtacgtctacagttccccacccccaccatacttctctccttcgccaaaggttgaatacaagtctcccccaccaccgtacgtctacaattctccacctccaccatactactctccttctcctaaggtagagtacaagtccccaccaccaccatatgtctacagctctccacccccaccgtactactcaccatctccaaaagtttactacaagtccccaccaccaccatacgtctacagctccccacccccaccatactactctccatctccaaaggttgactacaagtccccaccaccaccgtatgtttacagctctccacccccaccatactactctccttcgcctaaggttgactacaagtctcccccaccaccatacgtctacagctccccgcccccacaatactactctccttcgccaaaggttgcgtacaagtctcccccaccaccatacgtctacagctctccgcccccaccttactactctccttcaccaaaggttgcgtacaagtctcccccaccaccatacgtctacagctccccgcccccaccatactactctccttcacctaaggttgattacaagtctcccccaccaccatacgtctacagctcccctcctccaccttactactctccttcaccaaaggttgagtacaagtctcccccaccaccatacgtctacagctcccctcccccaccttactactctccttcaccaaaggttgagtacaagtctccaccaccaccatacgtctacagttcccctcccccaccataccactctccttcgcctaaggtaaactacaaatctccaccaccaccatacgtctacagctcccatcccccaccatactactctccttcgcctaaggtaaactacaaatctccaccaccaccatacgtctacagctccccacccccaccatactactctccttcgcctaaggttaactacaagtctcccccaccaccatacgtttacagttctccgcccccaccatactactctccttctcctatggttgactacaagtctacccccccaccatacgtctatagcttcccacccctaccatattattctccttctccaaaggttgactacaagtctccaccactaccatacgtttacagctccccacccccactatattactctccttctccaaaggttcattacaaatctccaccaccaccatacgtgtataactctccacctccaccatactattctccttctccaaaggtcacttacaagtctccaccacccccatatgtctacaaggcgccttactattga

SEQ ID NO: 73982 - protein, 664 aa, Arabidopsis thaliana
  peptide (1)..(664): Ceres Seq. ID no. 4988545
MGLGHCMVYVVVLSAIAATVTSYPYSSPYSSPQTPHYNSPSHEHKSPKYAPHPKPYVYISPPPPSYYSPSPKVNYKSPPPPNVYNSPPPPYYSPSPKVDYKSPPPPYVYSSPPPPYYSPSPKVDYKSPPPPYVYSSPPPPYYSPSPKVEYKSPPPPYVYNSPPPPYYSPSPKIEYKSPPPPYVYSSPPPPYYSPSPKVDYKSPPPPYVYNSPPPPYYSPSPKVDYKSPPPPYVYSSPPPPYFSPSPKVEYKSPPPPYVYNSPPPPYYSPSPKVEYKSPPPPYVYSSPPPPYYSPSPKVYYKSPPPPYVYSSPPPPYYSPSPKVDYKSPPPPYVYSSPPPPYYSPSPKVDYKSPPPPYVYSSPPPQYYSPSPKVAYKSPPPPYVYSSPPPPYYSPSPKVAYKSPPPPYVYSSPPPPYYSPSPKVDYKSPPPPYVYSSPPPPYYSPSPKVEYKSPPPPYVYSSPPPPYYSPSPKVEYKSPPPPYVYSSPPPPYHSPSPKVNYKSPPPPYVYSSHPPPYYSPSPKVNYKSPPPPYVYSSPPPPYYSPSPKVNYKSPPPPYVYSSPPPPYYSPSPMVDYKSTPPPYVYSFPPLPYYSPSPKVDYKSPPLPYVYSSPPPLYYSPSPKVHYKSPPPPYVYNSPPPPYYSPSPKVTYKSPPPPYVYKAPYY

SEQ ID NO: 73983 - protein, 658 aa, Arabidopsis thaliana
  peptide (1)..(658): Ceres Seq. ID no. 4988546
MVYVVVLSAIAATVTSYPYSSPYSSPQTPHYNSPSHEHKSPKYAPHPKPYVYISPPPPSYYSPSPKVNYKSPPPPNVYNSPPPPYYSPSPKVDYKSPPPPYVYSSPPPPYYSPSPKVDYKSPPPPYVYSSPPPPYYSPSPKVEYKSPPPPYVYNSPPPPYYSPSPKIEYKSPPPPYVYSSPPPPYYSPSPKVDYKSPPPPYVYNSPPPPYYSPSPKVDYKSPPPPYVYSSPPPPYFSPSPKVEYKSPPPPYVYNSPPPPYYSPSPKVEYKSPPPPYVYSSPPPPYYSPSPKVYYKSPPPPYVYSSPPPPYYSPSPKVDYKSPPPPYVYSSPPPPYYSPSPKVDYKSPPPPYVYSSPPPQYYSPSPKVAYKSPPPPYVYSSPPPPYYSPSPKVAYKSPPPPYVYSSPPPPYYSPSPKVDYKSPPPPYVYSSPPPPYYSPSPKVEYKSPPPPYVYSSPPPPYYSPSPKVEYKSPPPPYVYSSPPPPYHSPSPKVNYKSPPPPYVYSSHPPPYYSPSPKVNYKSPPPPYVYSSPPPPYYSPSPKVNYKSPPPPYVYSSPPPPYYSPSPMVDYKSTPPPYVYSFPPLPYYSPSPKVDYKSPPLPYVYSSPPPLYYSPSPKVHYKSPPPPYVYNSPPPPYYSPSPKVTYKSPPPPYVYKAPYY

SEQ ID NO: 73984 - DNA, 2134 bp, Arabidopsis thaliana
  misc_feature (1)..(2134): Ceres Seq. ID no. 4989202
  misc_feature (1)..(2134): Ortholog of  Ceres SEQ ID NO 13597407 as cited in SEQ ID NO 64106
aaacgacaataagctccacagtgagttcttctcagcaatcacaatctatctggtttaagccctcactatcctctctctcaaatcgcggagtctccgaagtttctctggtaattttcaaatctgaagttttgctttggatatcacgatttttgttaatcagccgcgatcgagaagagcgtttttactctctcgttcgcatcaatgcaacatatttcccaatttcgtgatgttgcgtcttcatcgttccttacttctctctttttgagttctgtttggtataaatgcgatccttttttttccttccttgcctaatatttctcgtttccttgcaattacggttataaaaagtcagacaaaatgcagtcgtcaacgtatgcggttaaaggaaacgctgcgtttgcgtttcagagacggaccttctcttctgacagatcgacgacttctaccggaattcgcttcgctggttataagagcttagccaccaccgggccactctactgttctggttctgaagccatgggagcgacgcttgctcgtgctgataacgggatccagagcgttatgagtttctcttctgtcaaagctcgatcggtcagagctcaagcctcatctgatggagatgaagaagaagctatacctctgagatctgaagggaaaagctctggaacagttttgccttttgttggtgttgcttgtcttggtgctatactctttggttatcatctcggggtggttaatggtgctcttgaatatcttgctaaggatcttgggatcgccgaaaatactgttttgcaaggatggattgttagttctctgcttgctggtgctacggtaggttcattcactggaggtgcattagctgacaaatttggacgaacaagaacttttcaattggatgctatcccgcttgccattggagctttcttatgtgcaacagctcagagtgtgcagactatgattgtgggacgtctgctcgctggaattggaattggaatctcatcagcgattgtaccactttacatatctgagatatcaccaactgaaatccgtggagcactcggatctgtgaaccagttgttcatctgtataggaatacttgcagccttgatagctggattaccccttgcagcaaaccctctatggtggaggacgatgtttggtgttgcagttatcccttccgttctattggccataggaatggctttttctccagaaagcccaaggtggctcgttcagcaaggaaaagtctctgaagctgaaaaggcgatcaaaactttgtatggtaaagaaagagtggttgaactagttcgcgacttatcagcctctggccaaggttcttctgagccggaggcaggatggtttgatctattcagcagccgctactggaaagttgtaagcgtaggtgcggctctcttcttgtttcaacagttagccgggataaacgcagttgtgtattactccacatcggtattccgtagtgcgggaatccaatcagatgttgcagccagtgctctcgttggagcatcaaatgtctttggcactgctgttgcttcatcgttgatggataaaatgggaaggaaaagtcttttactgacaagctttggtggaatggctttgtcaatgctgttactctccttgtccttcacatggaaggctcttgctgcctattctggaacccttgccgttgttggaactgttctatatgtcctgtcattctcacttggtgctggcccggtaccggctcttcttcttccagagatatttgcatcccgaatcagagcaaaagccgtcgctctttctctcggcatgcactggatatcaaactttgtgatcggactatacttcttaagcgttgtgactaaattcggaatcagcagtgtctacttgggttttgctggagtctgcgtccttgcggtcctctacattgcaggaaacgtcgtcgagactaaaggtcgatcactggaggaaatagagcttgctcttacatctggagcttgaaattaaacaaaagaaatcagcagaacaaaaaccagtttgtttcatcatttagtttgtgagtctttctctaatctgctactcttaaattgtacaatggacgacgttatcaataacgagaaatcttttcatgaccact

SEQ ID NO: 73985 - protein, 546 aa, Arabidopsis thaliana; identical to SEQ ID NO: 44093
  peptide (1)..(546): Ceres Seq. ID no. 4989203

SEQ ID NO: 73986 - protein, 493 aa, Arabidopsis thaliana; identical to SEQ ID NO: 44094
  peptide (1)..(493): Ceres Seq. ID no. 4989204

SEQ ID NO: 73987 - protein, 478 aa, Arabidopsis thaliana; identical to SEQ ID NO: 30167
  peptide (1)..(478): Ceres Seq. ID no. 4989205

SEQ ID NO: 73988 - DNA, 1200 bp, Arabidopsis thaliana
  misc_feature (1)..(1200): Ceres Seq. ID no. 4989667
  misc_feature (1)..(1200): Ortholog of  Ceres SEQ ID NO 13658728 as cited in SEQ ID NO 66270
  misc_feature (1)..(1200): Ortholog of  Ceres SEQ ID NO 12465428 as cited in SEQ ID NO 68898
atggagtggatggagaatcaaaaagatattgaatttagtgtttatgacattgctcttagattggatttgatcatcaaaactcatggcttgaaacaaggagaggagtattttgagaagctgctacatagttctgtgtctatgagagtagcgaaatcggcttatcttccgcttcttcgtgcttatgtgaagaataaaatggttaaagaagcggaagctctaatggagaagttgaatggattagggtttcttgttactccacacccgtttaacgaaatgatgaagctttatgaagctagtggtcagtatgagaaagtagttatggttgtttcgatgatgaaagggaataagataccaagaaacgttctttcgtataatctttggatgaatgcatgttgtgaagtgtctggagttgcggctgtggaaacggtttataaggaaatggttggtgataagagtgttgaagttgggtggagttcgttgtgtactttagctaatgtttatattaagagtggttttgatgagaaggctaggttggtgcttgaggatgcggaaaagatgttgaatagaagtaataggcttggatatttctttcttatcacgctttatgcgtctttagggaataaggaaggagttgttcgtttgtgggaagtttctaaatcggtttgtggtaggattagttgtgtgaactacatatgtgtattgtcgtctttggtgaaaactggtgatcttgaagaggctgaaagggtgtttagtgagtgggaggctcaatgttttaactatgatgttagggtctccaatgttcttttgggtgcttatgtgcgtaatggagaaatccggaaagccgagtcattgcatggttgtgtgttggagagaggaggtactccaaactacaagacctgggaaatcttaatggagggatgggtgaaatgtgagaatatggagaaagccattgatgctatgcaccaagtgtttgtactaatgaggcggtgtcattggaggccatcccataacatcgtcatggcgattgccgagtactttgagaaagaggagaaaattgaagaagcaactgcatatgttagagatttgcatcgtcttggtcttgcaagcttaccattatacagattgttacttagaatgcatgaacatgccaaaagaccagcttatgatatctatgaaatgatgaagttggacaaactatga

SEQ ID NO: 73989 - protein, 399 aa, Arabidopsis thaliana; identical to SEQ ID NO: 70137
  peptide (1)..(399): Ceres Seq. ID no. 4989668

SEQ ID NO: 73990 - protein, 396 aa, Arabidopsis thaliana
  peptide (1)..(396): Ceres Seq. ID no. 4989669
MENQKDIEFSVYDIALRLDLIIKTHGLKQGEEYFEKLLHSSVSMRVAKSAYLPLLRAYVKNKMVKEAEALMEKLNGLGFLVTPHPFNEMMKLYEASGQYEKVVMVVSMMKGNKIPRNVLSYNLWMNACCEVSGVAAVETVYKEMVGDKSVEVGWSSLCTLANVYIKSGFDEKARLVLEDAEKMLNRSNRLGYFFLITLYASLGNKEGVVRLWEVSKSVCGRISCVNYICVLSSLVKTGDLEEAERVFSEWEAQCFNYDVRVSNVLLGAYVRNGEIRKAESLHGCVLERGGTPNYKTWEILMEGWVKCENMEKAIDAMHQVFVLMRRCHWRPSHNIVMAIAEYFEKEEKIEEATAYVRDLHRLGLASLPLYRLLLRMHEHAKRPAYDIYEMMKLDKL

SEQ ID NO: 73991 - protein, 353 aa, Arabidopsis thaliana
  peptide (1)..(353): Ceres Seq. ID no. 4989670
MRVAKSAYLPLLRAYVKNKMVKEAEALMEKLNGLGFLVTPHPFNEMMKLYEASGQYEKVVMVVSMMKGNKIPRNVLSYNLWMNACCEVSGVAAVETVYKEMVGDKSVEVGWSSLCTLANVYIKSGFDEKARLVLEDAEKMLNRSNRLGYFFLITLYASLGNKEGVVRLWEVSKSVCGRISCVNYICVLSSLVKTGDLEEAERVFSEWEAQCFNYDVRVSNVLLGAYVRNGEIRKAESLHGCVLERGGTPNYKTWEILMEGWVKCENMEKAIDAMHQVFVLMRRCHWRPSHNIVMAIAEYFEKEEKIEEATAYVRDLHRLGLASLPLYRLLLRMHEHAKRPAYDIYEMMKLDKL

SEQ ID NO: 73992 - DNA, 1918 bp, Arabidopsis thaliana
  misc_feature (1)..(1918): Ceres Seq. ID no. 4989983
  misc_feature (1)..(1918): Ortholog of  Ceres SEQ ID NO 12586556 as cited in SEQ ID NO 64667
  misc_feature (1)..(1918): Ortholog of  Ceres SEQ ID NO 13660894 as cited in SEQ ID NO 67475
gtacttgatatttaaaatcgatttctgatacacttgttagattgagacaatgagcaagggggcggcaataatagcttatgcaaatcccatctttcatattcgacatctaaagcttgaatctttcttgtggaacatcatcattcgtgccattgttcacaatgtttcgtcgcctcaacgacattctccgatctcagtctacctccgtatgcgcaaccatcgcgtctctcccgattttcatacctttccgtttcttctcccttctttccacaatccgcttcatcttcctcttgggcaacgaactcatgctcagattcttctttttggacttgacaaagacccatttgtccgaacttcactgctcaacatgtattcttcctgtggcgacttgagatcagctcagcgagttttcgatgactcgggctcgaaggatttaccggcctggaactctgtggtcaatgcttatgccaaagctgggttgatcgatgatgcgcggaaactgttcgacgaaatgcctgaaagaaacgtgatttcctggagctgcttgattaacggctacgttatgtgtgggaaatacaaagaagcgcttgatttgttccgggagatgcaattacctaaaccaaacgaagcattcgtcagacccaacgagtttacaatgtcgactgtactctcggcttgtgggcgattgggtgcgctcgagcaagggaaatgggttcacgcttacatcgataagtaccacgttgagattgacattgtcttaggcacagctctcattgatatgtacgccaaatgtgggagcctcgagagggcgaaaagggttttcaatgccttgggatccaagaaagatgtcaaagcttacagtgctatgatatgttgcttagcaatgtacggtctcacagatgagtgcttccaactgttctctgagatgaccacgagtgacaacataaacccaaactctgtgacatttgtgggcattctcggtgcttgtgtacatcgaggtctaataaacgaaggaaaatcttactttaaaatgatgattgaggaatttggtatcacgccatcaatccagcattatggttgtatggttgatctctacggaagatctggtttgatcaaagaagcagagagctttatagcatctatgcctatggagcctgatgtacttatttgggggtctctcttaagcggatcaagaatgcttggggatatcaagacttgtgaaggtgccctcaagcgactcatcgagctagatcctatgaacagtggagcatatgtgcttctctctaacgtctatgccaaaacagggaggtggatggaagtcaagtgtatcagacacgaaatggaggcaatgcaaaactatttccctcttttccaactcttttcttaactgttgcacagtttctgaagtaaatacagattctctctacaggtaaagggcattaataaagttccgggatgtagctatgttgaagtagagggagtggttcacgagtttgttgtaggagacgaatctcaacaagagagcgaaaggatctatgctatgctcgatgagataatgcagaggctgagagaagctggatatgttacagacactaaggaggttttacttgatcttaacgagaaagataaagagatagctttgtcttaccacagtgagaaactggctattgcgttctgtttgatgaagacaaggcctggaactccagtgagaatcatcaagaacctcagaatctgtggagattgtcatcttgtaatgaagatgatctcgaagctttttagtagagaaattgttgtgagagattgtaatagatttcaccattttagagacgggtcttgctcttgcagagatttttggtgataacaattgcagcaatgtttgtgttggattgaataaacacattactgaattttggaggttttg

SEQ ID NO: 73993 - protein, 444 aa, Arabidopsis thaliana
  peptide (1)..(444): Ceres Seq. ID no. 4989984
MSKGAAIIAYANPIFHIRHLKLESFLWNIIIRAIVHNVSSPQRHSPISVYLRMRNHRVSPDFHTFPFLLPSFHNPLHLPLGQRTHAQILLFGLDKDPFVRTSLLNMYSSCGDLRSAQRVFDDSGSKDLPAWNSVVNAYAKAGLIDDARKLFDEMPERNVISWSCLINGYVMCGKYKEALDLFREMQLPKPNEAFVRPNEFTMSTVLSACGRLGALEQGKWVHAYIDKYHVEIDIVLGTALIDMYAKCGSLERAKRVFNALGSKKDVKAYSAMICCLAMYGLTDECFQLFSEMTTSDNINPNSVTFVGILGACVHRGLINEGKSYFKMMIEEFGITPSIQHYGCMVDLYGRSGLIKEAESFIASMPMEPDVLIWGSLLSGSRMLGDIKTCEGALKRLIELDPMNSGAYVLLSNVYAKTGRWMEVKCIRHEMEAMQNYFPLFQLFS

SEQ ID NO: 73994 - protein, 392 aa, Arabidopsis thaliana
  peptide (1)..(392): Ceres Seq. ID no. 4989985
MRNHRVSPDFHTFPFLLPSFHNPLHLPLGQRTHAQILLFGLDKDPFVRTSLLNMYSSCGDLRSAQRVFDDSGSKDLPAWNSVVNAYAKAGLIDDARKLFDEMPERNVISWSCLINGYVMCGKYKEALDLFREMQLPKPNEAFVRPNEFTMSTVLSACGRLGALEQGKWVHAYIDKYHVEIDIVLGTALIDMYAKCGSLERAKRVFNALGSKKDVKAYSAMICCLAMYGLTDECFQLFSEMTTSDNINPNSVTFVGILGACVHRGLINEGKSYFKMMIEEFGITPSIQHYGCMVDLYGRSGLIKEAESFIASMPMEPDVLIWGSLLSGSRMLGDIKTCEGALKRLIELDPMNSGAYVLLSNVYAKTGRWMEVKCIRHEMEAMQNYFPLFQLFS

SEQ ID NO: 73995 - protein, 339 aa, Arabidopsis thaliana
  peptide (1)..(339): Ceres Seq. ID no. 4989986
MYSSCGDLRSAQRVFDDSGSKDLPAWNSVVNAYAKAGLIDDARKLFDEMPERNVISWSCLINGYVMCGKYKEALDLFREMQLPKPNEAFVRPNEFTMSTVLSACGRLGALEQGKWVHAYIDKYHVEIDIVLGTALIDMYAKCGSLERAKRVFNALGSKKDVKAYSAMICCLAMYGLTDECFQLFSEMTTSDNINPNSVTFVGILGACVHRGLINEGKSYFKMMIEEFGITPSIQHYGCMVDLYGRSGLIKEAESFIASMPMEPDVLIWGSLLSGSRMLGDIKTCEGALKRLIELDPMNSGAYVLLSNVYAKTGRWMEVKCIRHEMEAMQNYFPLFQLFS

SEQ ID NO: 73996 - DNA, 864 bp, Arabidopsis thaliana
  misc_feature (1)..(864): Ceres Seq. ID no. 4989995
  misc_feature (1)..(864): Ortholog of  Ceres SEQ ID NO 14303487 as cited in SEQ ID NO 54521
  misc_feature (1)..(864): Ortholog of  Ceres SEQ ID NO 14316302 as cited in SEQ ID NO 55232
  misc_feature (1)..(864): Ortholog of  Ceres SEQ ID NO 14308274 as cited in SEQ ID NO 55597
  misc_feature (1)..(864): Ortholog of  Ceres SEQ ID NO 13659710 as cited in SEQ ID NO 60808
atgggaggaagtgctagtctccagtcagactcgatggaagcagcagcagcagcagattcttcgattcccagagacaaagactttggcaaattccaattcggatgcgagcactacaagagacgatgtaaaatcagagctccttgctgcaatctcatcttctcatgccgccattgccacaacgactctgcgaattctcttcctgatcctaaagaacgtcatgatttggtccgccaaaacgtcaaacaggttgtttgttcaatttgtcaaactgagcaagaggttgctaaagtctgctcgaattgtggcgtcaatatgggagaatacttttgcgatatctgcaaattctttgacgacgatatttcgaaagaacagtttcattgtgatgactgtggaatttgtagagttggtgggcgtgacaaattctttcattgccagaactgtggagcttgctacggaatgggcttgcgcgataaacactcgtgcattgagaactctacaaaaaattcttgtcctgtctgttatgagtatctatttgattcggtaaaggccgcacatgtgatgaaatgtggtcatacaatgcatatggattgctttgaacaaatgatcaatgaaaaccagtaccgatgcccaatttgtgccaagtcaatggtggatatgtctccttcgtggcacctattagatttcgagataagcgcaacagagatgcctgttgagtacaagtttgaggtttcaattctctgcaatgactgcaacaaggggagtaaagctatgttccacattttgggacacaagtgcagtgattgcggttcatacaacactcggagaatctcaacgccacaagatccagtgagtgaaacagagtga

SEQ ID NO: 73997 - protein, 287 aa, Arabidopsis thaliana
  peptide (1)..(287): Ceres Seq. ID no. 4989996
MGGSASLQSDSMEAAAAADSSIPRDKDFGKFQFGCEHYKRRCKIRAPCCNLIFSCRHCHNDSANSLPDPKERHDLVRQNVKQVVCSICQTEQEVAKVCSNCGVNMGEYFCDICKFFDDDISKEQFHCDDCGICRVGGRDKFFHCQNCGACYGMGLRDKHSCIENSTKNSCPVCYEYLFDSVKAAHVMKCGHTMHMDCFEQMINENQYRCPICAKSMVDMSPSWHLLDFEISATEMPVEYKFEVSILCNDCNKGSKAMFHILGHKCSDCGSYNTRRISTPQDPVSETE

SEQ ID NO: 73998 - protein, 276 aa, Arabidopsis thaliana
  peptide (1)..(276): Ceres Seq. ID no. 4989997
MEAAAAADSSIPRDKDFGKFQFGCEHYKRRCKIRAPCCNLIFSCRHCHNDSANSLPDPKERHDLVRQNVKQVVCSICQTEQEVAKVCSNCGVNMGEYFCDICKFFDDDISKEQFHCDDCGICRVGGRDKFFHCQNCGACYGMGLRDKHSCIENSTKNSCPVCYEYLFDSVKAAHVMKCGHTMHMDCFEQMINENQYRCPICAKSMVDMSPSWHLLDFEISATEMPVEYKFEVSILCNDCNKGSKAMFHILGHKCSDCGSYNTRRISTPQDPVSETE

SEQ ID NO: 73999 - protein, 183 aa, Arabidopsis thaliana
  peptide (1)..(183): Ceres Seq. ID no. 4989998
MGEYFCDICKFFDDDISKEQFHCDDCGICRVGGRDKFFHCQNCGACYGMGLRDKHSCIENSTKNSCPVCYEYLFDSVKAAHVMKCGHTMHMDCFEQMINENQYRCPICAKSMVDMSPSWHLLDFEISATEMPVEYKFEVSILCNDCNKGSKAMFHILGHKCSDCGSYNTRRISTPQDPVSETE

SEQ ID NO: 74000 - DNA, 1296 bp, Arabidopsis thaliana
  misc_feature (1)..(1296): Ceres Seq. ID no. 4991085
  misc_feature (1)..(1296): Ortholog of  Ceres SEQ ID NO 13486771 as cited in SEQ ID NO 20321
  misc_feature (1)..(1296): Ortholog of  Ceres SEQ ID NO 13595840 as cited in SEQ ID NO 56647
  misc_feature (1)..(1296): Ortholog of  Ceres SEQ ID NO 15180619 as cited in SEQ ID NO 0
atgagttctggtctgaacgaagatttcctcgattgtatcgtgcgtttagaggagacacatgttcaacaaggcttcgatgagggttacgaagaaggtcttgtgtccggtcgtgaagacgctcgtcatctgggtttgaaactcgggttcgagacaggcgagctgattggattctacagaggttgctctgctctttggaattcagctctccgtattgatcctacacgcttctctcctcagctccataagcatctcaatgatttccatgtcttgctcgataaaatcccgcttttggatcccgaggacgaagctaaagacgggatcaaggatgatctcagagtcaaattcagcatcatttgtgcatctctcggcttttccaagaaacaatttgagtggtcggaggagatgttgagagaaatgcttggttgttgcaaggtttacatatctgaagcgcggaataagacggccctcgaagccattgagagagctttaaagccttttccaccagctgcaattgtcaacaagtttgaagatgcggcttatggcagggttggttacactgttgtatcctcgcttgctaacgggtcgtcttcttccttgaagaatgcggtgtttgctatggttaagactgctctcgacactatcaatcttgagttgcactgtggatctcatccccgccttggagtggttgaccacatatgctttcaccccttatctcaaacctctatagaacaagtttcttccgtcgccaattcccttgcaatggatatcggctccattcttcgagttcctacatatctctatggagcagcagaaaaggagcagtgcaccctggattcgatcagaagaaagctggggtacttcaaggcaaacagggagggacatgaatgggcaggtgggtttgacctggagatggtgccactgaagccagacgcagggccacaagaggtgagcaaagccaaaggggttgtagcggttggggcgtgtgggtgggtaagtaactataacgtgcctgtcatgtcaaacgatctcaaggcagtgaggagaatagcgaggaagacgagcgagagaggagggggcttggcttcagtgcagacaatggcgctggtgcacggggaaggagtcatagaggttgcctgtaacttgttgaatccaagccaagtggggggagatgaagtacagggactgatcgagaggcttggcagagaggaaggtctgcttgtgggaaaagggtattatacggactatacacctgaccagatcgttgaaagatatatggacttgctcaacaattcataa

SEQ ID NO: 74001 - protein, 431 aa, Arabidopsis thaliana
  peptide (1)..(431): Ceres Seq. ID no. 4991086
MSSGLNEDFLDCIVRLEETHVQQGFDEGYEEGLVSGREDARHLGLKLGFETGELIGFYRGCSALWNSALRIDPTRFSPQLHKHLNDFHVLLDKIPLLDPEDEAKDGIKDDLRVKFSIICASLGFSKKQFEWSEEMLREMLGCCKVYISEARNKTALEAIERALKPFPPAAIVNKFEDAAYGRVGYTVVSSLANGSSSSLKNAVFAMVKTALDTINLELHCGSHPRLGVVDHICFHPLSQTSIEQVSSVANSLAMDIGSILRVPTYLYGAAEKEQCTLDSIRRKLGYFKANREGHEWAGGFDLEMVPLKPDAGPQEVSKAKGVVAVGACGWVSNYNVPVMSNDLKAVRRIARKTSERGGGLASVQTMALVHGEGVIEVACNLLNPSQVGGDEVQGLIERLGREEGLLVGKGYYTDYTPDQIVERYMDLLNNS

SEQ ID NO: 74002 - protein, 297 aa, Arabidopsis thaliana; identical to SEQ ID NO: 20322
  peptide (1)..(297): Ceres Seq. ID no. 4991087

SEQ ID NO: 74003 - protein, 293 aa, Arabidopsis thaliana; identical to SEQ ID NO: 20323
  peptide (1)..(293): Ceres Seq. ID no. 4991088

SEQ ID NO: 74004 - DNA, 681 bp, Arabidopsis thaliana
  misc_feature (1)..(681): Ceres Seq. ID no. 4991128
  misc_feature (1)..(681): Ortholog of  Ceres SEQ ID NO 14312777 as cited in SEQ ID NO 55573
  misc_feature (1)..(681): Ortholog of  Ceres SEQ ID NO 13595190 as cited in SEQ ID NO 55916
  misc_feature (1)..(681): Ortholog of  Ceres SEQ ID NO 14302004 as cited in SEQ ID NO 63437
  misc_feature (1)..(681): Ortholog of  Ceres SEQ ID NO 13599456 as cited in SEQ ID NO 0
atggacgggcttaaagacttcagtcggatctctccggcgattcagagtcatcttatgcgggtttatttcagcttattctgtattcttgctgcgtctgcgtttggagcttaccttcacatgcgcttgaatatcggtggaaccattactaagcttggatgggttttaagtttattggagcatgtggtttcttgtcctccatataaacataaaataaggttttcacttctgcttctctttggtgttcttcatggggcttcagttggtccatgtatcaagtccacaatcgatattgattcaagcatccttatcaccgcgttcttaggaactgcggtgatatttttctgtttctcggcagtggcaatgctggcaagacgcagggagtatatctacctcggaggactgctttcgtctggcttttccttgctaacgtggctcaagaattctgatcagtttgcctctgcgacagttgagattcagatgtaccttggactcctgctcttcgtgggatgtatagtggtgaacacacaggagataatagagaaagcacactgtggtgacatggactacgcggtacattcgctgatcctttacattggctttgtacgtgtgttccttcaaattctcagtataatgtggaatacctctgccgatagaataagaagaaataatgaagaaacttag

SEQ ID NO: 74005 - protein, 226 aa, Arabidopsis thaliana
  peptide (1)..(226): Ceres Seq. ID no. 4991129
MDGLKDFSRISPAIQSHLMRVYFSLFCILAASAFGAYLHMRLNIGGTITKLGWVLSLLEHVVSCPPYKHKIRFSLLLLFGVLHGASVGPCIKSTIDIDSSILITAFLGTAVIFFCFSAVAMLARRREYIYLGGLLSSGFSLLTWLKNSDQFASATVEIQMYLGLLLFVGCIVVNTQEIIEKAHCGDMDYAVHSLILYIGFVRVFLQILSIMWNTSADRIRRNNEET

SEQ ID NO: 74006 - protein, 208 aa, Arabidopsis thaliana
  peptide (1)..(208): Ceres Seq. ID no. 4991130
MRVYFSLFCILAASAFGAYLHMRLNIGGTITKLGWVLSLLEHVVSCPPYKHKIRFSLLLLFGVLHGASVGPCIKSTIDIDSSILITAFLGTAVIFFCFSAVAMLARRREYIYLGGLLSSGFSLLTWLKNSDQFASATVEIQMYLGLLLFVGCIVVNTQEIIEKAHCGDMDYAVHSLILYIGFVRVFLQILSIMWNTSADRIRRNNEET

SEQ ID NO: 74007 - protein, 187 aa, Arabidopsis thaliana; identical to SEQ ID NO: 73938
  peptide (1)..(187): Ceres Seq. ID no. 4991131

SEQ ID NO: 74008 - DNA, 987 bp, Arabidopsis thaliana
  misc_feature (1)..(987): Ceres Seq. ID no. 4991233
  misc_feature (1)..(987): Ortholog of  Ceres SEQ ID NO 14303043 as cited in SEQ ID NO 67110
atgtatgactatgatccaccattttcgcctctctctaaacccactaaacctccaaaagagaagaagaagcagaagacgaagaagcaagaccagtcgtcggagctggtaaatgacctgaagattccagtgatttcagacctccctttcgattttaggtattcgtattcagaaactaacccggaaattgaaccgattggattccgtgaaccgaaacggttctctccatttggaccgggtcgattggaccggaaatggactgggactaccgcactggcgtcgccggagattgatcagagtcaatgggtggaggagagagcaagagttctcggcgagactttgacagaggatgaagttacagagcttattgaacggtatcggcatagtgactgtacacgacagattaatctcgggaaaggtggtgtgactcacaatatgatagatgatattcataaccattggaagaaagctgaggcagtgaggatcaaatgcttgggagtaccaactcttgacatggacaacatatgtttccacctcgaggaaaaatccggtggaaagattgtatacagaaacataaacattctagttttgtaccggggaaggaattatgatccgaagagtcgtcccatcattccactcatgttatggaagcctcatccgccaatatacccaagacttgtaaagaatgtggctgatgggttagaatttgaagagaccaaggagatgagaaatcgtgggcttcattctcctgccttaatgaaacttactaggaatggtgtttatgttaatgtcgttggaagagtgagggaagagtttgaaacagaagagattgtgagactagattgcactcatgttgggatgagtgactgcaaacgaattggtgtgaaactaaaggagatggttccatgtgttcccatattgttcaaagatgagcagatcatactctggagagggaagaggactggtgaagaagagcttgttactctatga

SEQ ID NO: 74009 - protein, 328 aa, Arabidopsis thaliana
  peptide (1)..(328): Ceres Seq. ID no. 4991234
MYDYDPPFSPLSKPTKPPKEKKKQKTKKQDQSSELVNDLKIPVISDLPFDFRYSYSETNPEIEPIGFREPKRFSPFGPGRLDRKWTGTTALASPEIDQSQWVEERARVLGETLTEDEVTELIERYRHSDCTRQINLGKGGVTHNMIDDIHNHWKKAEAVRIKCLGVPTLDMDNICFHLEEKSGGKIVYRNINILVLYRGRNYDPKSRPIIPLMLWKPHPPIYPRLVKNVADGLEFEETKEMRNRGLHSPALMKLTRNGVYVNVVGRVREEFETEEIVRLDCTHVGMSDCKRIGVKLKEMVPCVPILFKDEQIILWRGKRTGEEELVTL

SEQ ID NO: 74010 - protein, 184 aa, Arabidopsis thaliana; identical to SEQ ID NO: 42647
  peptide (1)..(184): Ceres Seq. ID no. 4991235

SEQ ID NO: 74011 - DNA, 940 bp, Arabidopsis thaliana
  misc_feature (1)..(940): Ceres Seq. ID no. 4991465
  misc_feature (1)..(940): Ortholog of  Ceres SEQ ID NO 13597546 as cited in SEQ ID NO 65017
  misc_feature (1)..(940): Ortholog of  Ceres SEQ ID NO 13654353 as cited in SEQ ID NO 68318
gttgtattcagtcacgcgaagaagctatccaggtgatgaaagacgttctcatgatgagaaaagagacgcgagagaagcaagaagacttccttaacacgcttctagaagaactggagaaagacggtagctttttcgaccaaggatcggctataaatctcatcttccttctggcgtttgccttgagagaaggtacctctagttgtactgctttggccgtgaagttcatatccaaagacccgaaagtgcttgcagagctcaagcgtgagcataaggcaattgtagacaacagaaaagataaggaagctggagttagctgggaagaatatagacacaacatgactttcaccaacatggttagcaatgaggtgcttcgcctagcaaacacgacccctttgttgtttcgaaaggcggtgcaagatgttgagatcaaaggatatacaattccggctggttggattgtggcggttgcaccttcagcggttcattttgatcctgcaatctatgagaacccatttgagtttaatccatggagatgggaggggaaagaaatgatttggggatctaaaacgttcatggcgtttggatatggagttagactttgtgtaggtgcagagttttcacggcttcaaatggcaatcttcctccatcatcttgtggcatattacgatttctcaatggtccaagactccgagatcattcgttcaccattccatcaatacaccaaggatctgcttataaacatctctcagtctcctaccaagtgaaccatgcatgcagtttccaaatcttaataatcagatcattatatgcaataatctcatttcctgcttccgcaaaatctctggagtctttttatatgtaatatgcgatctctataatttttaaaaagtatctatcttgtcaaatgagttaaactttgtttatatatgtcttgaatctg

SEQ ID NO: 74012 - protein, 253 aa, Arabidopsis thaliana; identical to SEQ ID NO: 38007
  peptide (1)..(253): Ceres Seq. ID no. 4991466

SEQ ID NO: 74013 - protein, 242 aa, Arabidopsis thaliana; identical to SEQ ID NO: 38008
  peptide (1)..(242): Ceres Seq. ID no. 4991467

SEQ ID NO: 74014 - protein, 237 aa, Arabidopsis thaliana; identical to SEQ ID NO: 38009
  peptide (1)..(237): Ceres Seq. ID no. 4991468

SEQ ID NO: 74015 - DNA, 1368 bp, Arabidopsis thaliana
  misc_feature (1)..(1368): Ceres Seq. ID no. 4991596
  misc_feature (1)..(1368): Ortholog of  Ceres SEQ ID NO 13585342 as cited in SEQ ID NO 63601
gagattggtgagttggctgtggcgtctggagttttacaaagctgtaaactaagacagctaaaggatcaagtctgaagaatggtttagccaaaaagcatcagaagaggaatattttgctcgattctttattccttcaaattcaatacaccaacgacgaggctacttgcttttccttcgagtagccatcttcgttatcaatcatcgtcatcatctagtttatataaagatcaaacctttgaccatttataccgtttttgtgtcccagactcaaagcaattattttatcctttgtgttactgaatcagggttgatgggggattctcctgctagttcaaatagagttaagcttcgggatgggagattcttagcttataaagaaagaggagttccaaaggaaaaggccaaatacaagatcattcttgttcatggctttggaagctccaaagatatgaacttctctgcctcaaaagagcttatagaagaacttgaggtgtacttgctattctacgaccgttctggatatggagcatcagattcaaacacaaaacgttcgttggaaagcgaagttgaagacatagcagaacttgcagatcagctggagttaggacctaagttttatctaattggaatttccatgggatcttaccctacttggggttgcctaagacacatacctcacaggttatccggcgtggcttttgttgctccggtggttaattatcgatggccttcacttccgaagaagctaatcaaaaaagattataggacaggtattatcaaatggggtttgaggatatcaaaatatgcacctggactgttacattggtggatcattcaaaagctcttcgcttcaactagttcggtccttgaaagcaatccggtctacttcaacagccacgacatagaagtgctcaagcgaaaaactggttttcccatgcttactaaggaaaagctacgggaaagaaatgttttcgatactctaagggacgattttatggtttgtttcgggcaatgggacttcgaacccgcggatctaagcatcagtacaaagagctatattcacatctggcatggtaaggaagacaaagttgttccatttcaacttcaaagatgcattctgcagaaacaacctttgatcaactaccacgaaatcccccaaggcggacatctgatcgtacactacgatggcatttgcgatacgattctacgtgcactattgctcaaggaagaacaacaaaagctgtataaaataaattgatttgtaacagattctgtgtttgattgattgattcagttctacaaaacaaagtatgttcaaagtgtacattgtacaatgacaatatatatgtgtataatataaagtgtttg

SEQ ID NO: 74016 - protein, 315 aa, Arabidopsis thaliana
  peptide (1)..(315): Ceres Seq. ID no. 4991597
MGDSPASSNRVKLRDGRFLAYKERGVPKEKAKYKIILVHGFGSSKDMNFSASKELIEELEVYLLFYDRSGYGASDSNTKRSLESEVEDIAELADQLELGPKFYLIGISMGSYPTWGCLRHIPHRLSGVAFVAPVVNYRWPSLPKKLIKKDYRTGIIKWGLRISKYAPGLLHWWIIQKLFASTSSVLESNPVYFNSHDIEVLKRKTGFPMLTKEKLRERNVFDTLRDDFMVCFGQWDFEPADLSISTKSYIHIWHGKEDKVVPFQLQRCILQKQPLINYHEIPQGGHLIVHYDGICDTILRALLLKEEQQKLYKIN

SEQ ID NO: 74017 - protein, 269 aa, Arabidopsis thaliana
  peptide (1)..(269): Ceres Seq. ID no. 4991598
MNFSASKELIEELEVYLLFYDRSGYGASDSNTKRSLESEVEDIAELADQLELGPKFYLIGISMGSYPTWGCLRHIPHRLSGVAFVAPVVNYRWPSLPKKLIKKDYRTGIIKWGLRISKYAPGLLHWWIIQKLFASTSSVLESNPVYFNSHDIEVLKRKTGFPMLTKEKLRERNVFDTLRDDFMVCFGQWDFEPADLSISTKSYIHIWHGKEDKVVPFQLQRCILQKQPLINYHEIPQGGHLIVHYDGICDTILRALLLKEEQQKLYKIN

SEQ ID NO: 74018 - protein, 207 aa, Arabidopsis thaliana; identical to SEQ ID NO: 42624
  peptide (1)..(207): Ceres Seq. ID no. 4991599

SEQ ID NO: 74019 - DNA, 610 bp, Arabidopsis thaliana
  misc_feature (1)..(610): Ceres Seq. ID no. 4991643
  misc_feature (1)..(610): Ortholog of  Ceres SEQ ID NO 12610243 as cited in SEQ ID NO 56206
acaacacaacttcagctttaagacagctaaaactaaatacaaagaaacagagatgggtttggttacagaggaggtgagagctaaggcagagatgtacaccggagatgagatatgtagagagaagacaaagtgtttcctcaaggaaatatctatgcccaatggtttattaccattgaaggatatagaagaggttgggtatgacagagagtcaggtgttgtatggctgaagcagaagaagagcatcactcacaagttcacagagatagataagcttgtctcctatggaaccgaagtcacagcttttatagtcccagaagaacctgccaaggaggaacctgccaaagaggaacctgccaaggagaagagcagcgaagccaccgaggccaaggaggctgttgcaatcaaggaggctgtcgcagtcaaagaggcggcctaatcagctcagcttcagcagataaaagagacccgaatttttaagtgtacttcaagaatttgaacaaatcatggagagttagtgtttctcactgctctaactatcatgtattatctacctaccacttgttgctgcttgttttacctgtaataagatatcaatatcatcctgttccac

SEQ ID NO: 74020 - protein, 144 aa, Arabidopsis thaliana
  peptide (1)..(144): Ceres Seq. ID no. 4991644
QHNFSFKTAKTKYKETEMGLVTEEVRAKAEMYTGDEICREKTKCFLKEISMPNGLLPLKDIEEVGYDRESGVVWLKQKKSITHKFTEIDKLVSYGTEVTAFIVPEEPAKEEPAKEEPAKEKSSEATEAKEAVAIKEAVAVKEAA

SEQ ID NO: 74021 - protein, 127 aa, Arabidopsis thaliana
  peptide (1)..(127): Ceres Seq. ID no. 4991645
MGLVTEEVRAKAEMYTGDEICREKTKCFLKEISMPNGLLPLKDIEEVGYDRESGVVWLKQKKSITHKFTEIDKLVSYGTEVTAFIVPEEPAKEEPAKEEPAKEKSSEATEAKEAVAIKEAVAVKEAA

SEQ ID NO: 74022 - protein, 114 aa, Arabidopsis thaliana
  peptide (1)..(114): Ceres Seq. ID no. 4991646
MYTGDEICREKTKCFLKEISMPNGLLPLKDIEEVGYDRESGVVWLKQKKSITHKFTEIDKLVSYGTEVTAFIVPEEPAKEEPAKEEPAKEKSSEATEAKEAVAIKEAVAVKEAA

SEQ ID NO: 74023 - DNA, 559 bp, Arabidopsis thaliana
  misc_feature (1)..(559): Ceres Seq. ID no. 4991685
  misc_feature (1)..(559): Ortholog of  Ceres SEQ ID NO 12322366 as cited in SEQ ID NO 20549
aacaaccaaaaacattcatttgtcattttgtctcctcttttgttttctctgatcactagtatggctgtattcagagtcttgcttgcttctcttctcatatctcttcttgtcctcgacttcgtccatgccgatatggtgacgtcgaatgacgcccctaaaatcgattgcaacagcaggtgccaagagcggtgcagtctttcgagtaggccaaatctttgtcacagagcgtgcgggacttgctgcgctaggtgcaactgcgtggcaccgggcacatccggaaactacgacaaatgtccgtgctatggtagcctaaccacccacggaggacgcagaaagtgtccttaaaaactctgtcgctgtttgatttgatttcgtttataatactttacttttatgagagtaattgtggttattttcttgggaattattaaaaagcaaaagaaagagaatgttatacgtcatgtgcaactcttcgatctttgttttagtgtttatccaatttgtacttgttggtttggttcctggttaacattaggtctgaaaaggtattgtttttcat

SEQ ID NO: 74024 - protein, 114 aa, Arabidopsis thaliana; identical to SEQ ID NO: 20550
  peptide (1)..(114): Ceres Seq. ID no. 4991686

SEQ ID NO: 74025 - protein, 94 aa, Arabidopsis thaliana; identical to SEQ ID NO: 20551
  peptide (1)..(94): Ceres Seq. ID no. 4991687

SEQ ID NO: 74026 - protein, 70 aa, Arabidopsis thaliana; identical to SEQ ID NO: 20552
  peptide (1)..(70): Ceres Seq. ID no. 4991688

SEQ ID NO: 74027 - DNA, 1137 bp, Arabidopsis thaliana
  misc_feature (1)..(1137): Ceres Seq. ID no. 4991737
  misc_feature (1)..(1137): Ortholog of  Ceres SEQ ID NO 14314068 as cited in SEQ ID NO 52242
  misc_feature (1)..(1137): Ortholog of  Ceres SEQ ID NO 14314999 as cited in SEQ ID NO 52342
  misc_feature (1)..(1137): Ortholog of  Ceres SEQ ID NO 15177057 as cited in SEQ ID NO 55817
  misc_feature (1)..(1137): Ortholog of  Ceres SEQ ID NO 13585458 as cited in SEQ ID NO 60907
  misc_feature (1)..(1137): Ortholog of  Ceres SEQ ID NO 13598678 as cited in SEQ ID NO 61508
  misc_feature (1)..(1137): Ortholog of  Ceres SEQ ID NO 12625392 as cited in SEQ ID NO 63315
  misc_feature (1)..(1137): Ortholog of  Ceres SEQ ID NO 13598319 as cited in SEQ ID NO 68758
  misc_feature (1)..(1137): Ortholog of  Ceres SEQ ID NO 12589816 as cited in SEQ ID NO 0
tcacttctccactttttttctcggttagtgtcagtttttttgttggctagtctcttcggtcaaaatgcagctctttccggtcatcctaccgacactatgcgtcttcctccaccttctaataagtggctctggctctactccaccgttgactcactccaatcaacaagtggcagccactcgttggcttcccgccaccgcaacctggtacggaagtgccgagggagacggcagcagcggaggagcttgtggttacggatcgttggtggacgtgaagccgtttaaggctagagtcggagcggtgagtccgattctgttcaaaggtggtgaaggctgcggtgcatgctacaaggtcaggtgtctcgacaagaccatttgctctaagagagcagtcaccattattgccaccgaccagtcaccgtcaggaccatctgctaaagcaaaacacactcatttcgacctcagtggcgccgcctttggacatatggctattcccggccataacggtgtcatccgcaaccgtggcctattaaacatcctctaccgccgaacggcatgcaaatacagagggaagaacatagcgtttcatgtgaacgcaggatcaactgattattggttatcgcttctcattgagtatgaagacggtgaaggagacattggctctatgcacattcgtcaagcgggatctaaggagtggatatcgatgaagcacatatggggagcgaactggtgcatcgtcgaaggaccactcaagggaccattctccgtgaagctcacaactttgtccaacaataagacactctccgccaccgacgtcatccccagtaactgggttcccaaagctacttacacctctcgcctcaacttctcccctgttctctaattagcctctcttcaaaaaaattttgttgtgggagagaggaacacagagaagacaatgagtgagccatctccaaagttaggggattaagagcttttcattgtgtgtgtgactactaacattctatgttgtcccttttcatttttttccttctccatagggatgtgtgtatcatctataatgttgtttgtgggacattactatataagaatttacaaaagatgtaataatgtaatatgcaatctcattccttttttagc

SEQ ID NO: 74028 - protein, 271 aa, Arabidopsis thaliana; identical to SEQ ID NO: 39731
  peptide (1)..(271): Ceres Seq. ID no. 4991738

SEQ ID NO: 74029 - DNA, 874 bp, Arabidopsis thaliana
  misc_feature (1)..(874): Ceres Seq. ID no. 4991781
  misc_feature (1)..(874): Ortholog of  Ceres SEQ ID NO 13595142 as cited in SEQ ID NO 56671
ttttggctgcacgatctcagtttttcagatcaatgttttacaatactctagcagagaacaacagcgacgtagtgatcagcgatttggaacctaaggttttcaaggccttgttacacttcatgtataaagattccctcccaggagatgtggaaccattaacggctcattcatttgacctattaaggccgtccgaaatagatgatacactgattgtaaagcttctggcagctgcggaaatgtacaatctgagtaggctcagattattgtgtgaatctcacatctgcaaaggcatatctatcagctccgtgtccaagatcttagctttatccgacaaatataatgcatccgaactaaaaagcgtttccttaaaattcactgcagaaaacctagcagctgttctgcagacaaaagcatatgaagatctgaaggatgactgtccaaacctccagtctgagctactaaaggcggtcgctggttatgacgacacaagtagcagcggaggaggaaagtctcagagtgtttgggctcaactctctaacggtggtgagaccagtagccgaagggtcaggcagcgaaccacttagaagtgcttcttcacatgttgttaacaaactacttttgcttaccactcgtaaacagattaaccggtttatctagtatgtaccgaatgaaagggaagcggagccagaaatcttgtaccacaagagaagagctatgcggctgtgcactagtgattaaccggtgcttaaccggtgcttcacctttcagttccttcacgtctctgtggatttttgttgttgagtctttttttcaaattcttttcccagcttcaaattactagaaacttatgatgatataatagaaagagttaact

SEQ ID NO: 74030 - protein, 193 aa, Arabidopsis thaliana
  peptide (1)..(193): Ceres Seq. ID no. 4991782
LAARSQFFRSMFYNTLAENNSDVVISDLEPKVFKALLHFMYKDSLPGDVEPLTAHSFDLLRPSEIDDTLIVKLLAAAEMYNLSRLRLLCESHICKGISISSVSKILALSDKYNASELKSVSLKFTAENLAAVLQTKAYEDLKDDCPNLQSELLKAVAGYDDTSSSGGGKSQSVWAQLSNGGETSSRRVRQRTT

SEQ ID NO: 74031 - protein, 183 aa, Arabidopsis thaliana
  peptide (1)..(183): Ceres Seq. ID no. 4991783
MFYNTLAENNSDVVISDLEPKVFKALLHFMYKDSLPGDVEPLTAHSFDLLRPSEIDDTLIVKLLAAAEMYNLSRLRLLCESHICKGISISSVSKILALSDKYNASELKSVSLKFTAENLAAVLQTKAYEDLKDDCPNLQSELLKAVAGYDDTSSSGGGKSQSVWAQLSNGGETSSRRVRQRTT

SEQ ID NO: 74032 - protein, 154 aa, Arabidopsis thaliana
  peptide (1)..(154): Ceres Seq. ID no. 4991784
MYKDSLPGDVEPLTAHSFDLLRPSEIDDTLIVKLLAAAEMYNLSRLRLLCESHICKGISISSVSKILALSDKYNASELKSVSLKFTAENLAAVLQTKAYEDLKDDCPNLQSELLKAVAGYDDTSSSGGGKSQSVWAQLSNGGETSSRRVRQRTT

SEQ ID NO: 74033 - DNA, 776 bp, Arabidopsis thaliana
  misc_feature (1)..(776): Ceres Seq. ID no. 4991898
  misc_feature (1)..(776): Ortholog of  Ceres SEQ ID NO 15173263 as cited in SEQ ID NO 64606
ctctctcttaggttttttttcccttctcccaatctcatcttctccgaaaacctttcttctctcaaatttctgtgaaaacatgtctgacgacgagcaccactttgaggccagcgaatccggagcttccaagacctatcctcaatcagccggtaacatccgtaaaggtggtcacatcgtcatcaaaaaccgtccctgcaaggttgttgaggtttcgacttccaaaactggcaagcacggtcacgccaaatgtcactttgttgctattgatatcttcactgctaagaagcttgaagatattgttccatcttcccacaattgtgatgttccacatgtgaaccgtgttgattaccagttgattgatatcactgaggatggcttcgtgagccttctcactgacagtggtggcaccaaggatgatctcaagcttcccaccgatgatggtctcaccgcccagttgttgtgttttgttaatgcagatgaggcttggattcgatgagggaaaggatattgtggtgtctgtcatgtcttccatgggagaggagcagatctgtgccgtcaaggaagttggtggtggcaagtaaacaagtatcattcgatatattattaccagtttgacaacggacgtcaatgttataagaaccaaaagatgtttttctttttcctaatttagaccctttgtgtgtgtttcttgttgcaagacaaccatatctattggttttggattgttggaaaagtttgtgttgaaacattcaaagtttcttatgagatgttattct

SEQ ID NO: 74034 - protein, 164 aa, Arabidopsis thaliana
  peptide (1)..(164): Ceres Seq. ID no. 4991899
SLLGFFSLLPISSSPKTFLLSNFCENMSDDEHHFEASESGASKTYPQSAGNIRKGGHIVIKNRPCKVVEVSTSKTGKHGHAKCHFVAIDIFTAKKLEDIVPSSHNCDVPHVNRVDYQLIDITEDGFVSLLTDSGGTKDDLKLPTDDGLTAQLLCFVNADEAWIR

SEQ ID NO: 74035 - protein, 138 aa, Arabidopsis thaliana
  peptide (1)..(138): Ceres Seq. ID no. 4991900
MSDDEHHFEASESGASKTYPQSAGNIRKGGHIVIKNRPCKVVEVSTSKTGKHGHAKCHFVAIDIFTAKKLEDIVPSSHNCDVPHVNRVDYQLIDITEDGFVSLLTDSGGTKDDLKLPTDDGLTAQLLCFVNADEAWIR

SEQ ID NO: 74036 - DNA, 1208 bp, Arabidopsis thaliana
  misc_feature (1)..(1208): Ceres Seq. ID no. 4992056
  misc_feature (1)..(1208): Ortholog of  Ceres SEQ ID NO 13595598 as cited in SEQ ID NO 56822
  misc_feature (1)..(1208): Ortholog of  Ceres SEQ ID NO 15171777 as cited in SEQ ID NO 57417
  misc_feature (1)..(1208): Ortholog of  Ceres SEQ ID NO 13655712 as cited in SEQ ID NO 63394
  misc_feature (1)..(1208): Ortholog of  Ceres SEQ ID NO 15179075 as cited in SEQ ID NO 0
aacacctaactcatttgatagtgatttccaaatctgcaaacaacaaagtatatttgatcatcactatactgatttcacaatccattaatcactgataggtttttggtggaatacatacatgtatgtgtttgatccaacaacagaagctggattgagattagagatggcgtttcctcaacatggttttatgttccaacaacttcatgaagacaacagtcaagatcagctcccttcttgtcctcctcatctcttcaatggaggaggaaactacatgatgaacagatctatgtctttaatgaacgtgcaagaagatcataatcaaaccttggatgaggagaatctatcagacgatggggcacatactatgctgggagagaagaagaagaggctgcaattagagcaagttaaggcattagagaagagctttgagcttggtaacaagctggagccagagaggaagatacaactagctaaagcattagggatgcaaccaagacagatcgcgatttggtttcaaaacaggagagctaggtggaagactagacagctcgagagagattatgattcactcaagaaacagtttgagtctcttaaatccgacaatgcttctctacttgcctataacaagaaactccttgctgaggtaatggctttaaagaacaaagaatgtaatgaaggaaacatagtaaagagagaagcagaagcttcatggagcaacaacggaagcacagagaatagttcagacatcaatctggagatgcctagagagaccattacaacacatgtgaacacgatcaaagacctattcccttcatcgattcgatcatctgcacatgatgatgatcatcatcagaatcatgaaatagttcaagaagaaagcctttgtaacatgtttaatggcattgatgaaacgacgccggctggttactgggcatggtctgacccaaaccacaaccaccaccaccaccagttcaactgattcatgattctaaagctcaaaaaaaagtcatcagcacgcatcaagacaaatgatcataatcatcatcatcatatcatcaggagaagatcaagacacaattcttctctttggaattatgttattgctactcatttcaatttaaattaatggagcattttgttttctttgggtttgtagagcattggtgtatagtgcgaaaatttgttgttgctttaatttaataaaaatc

SEQ ID NO: 74037 - protein, 286 aa, Arabidopsis thaliana; identical to SEQ ID NO: 26724
  peptide (1)..(286): Ceres Seq. ID no. 4992057

SEQ ID NO: 74038 - protein, 271 aa, Arabidopsis thaliana; identical to SEQ ID NO: 26725
  peptide (1)..(271): Ceres Seq. ID no. 4992058

SEQ ID NO: 74039 - protein, 263 aa, Arabidopsis thaliana; identical to SEQ ID NO: 26726
  peptide (1)..(263): Ceres Seq. ID no. 4992059

SEQ ID NO: 74040 - DNA, 838 bp, Arabidopsis thaliana
  misc_feature (1)..(838): Ceres Seq. ID no. 4992184
  misc_feature (1)..(838): Ortholog of  Ceres SEQ ID NO 15168314 as cited in SEQ ID NO 60142
aactactctctctctctctctttcttctgccatcgccaaaaacttgtcttttgcttcttatttgctctgatcttttgattcaacggctcccggagacgacggaagcaatgcagttcttcggtggatctgagattagtccgtcgccgccagttccgacggcgagtggaaacaacgcgcacatgatgtacgttttcaatcgtaacggtgtatgtcttctctacaaagaatggaatcggcctcttcatacacttaatcctcagcaagatcacaagctcatgtttggtcttctcttctctctcaaatctctcaccgctaagatggatccagtcaatgcggataaaggaaatcttggggttccacagttgccaggacaaggttgctctttccatagtttccgtacgaatacttacaagctaagtttcatggagactccctctggtattaagattatcttagtaactcatccaaagaccggagatttacgcgaatccttgaagtacatctacagtttatacgttgaatatgtcgtaaaaaatcctatatacagcccaggatctccaatcaagtcggagttgttcaacactgcacttgaccagtacgtaaggagcatctcttagtgtgtgcattacagatttgtccattggaacttctctccttcaacagaactatcgtctgaacaatctctgaaaagaagagagaattgtagtagagagatttatcttgagttcgactgttttctctgcaaatctatgtttcgtttaccctttttattaactccactgtattggcttgctatcaatgatgttcatggtttactcaaatcttgaaatgcgacatg

SEQ ID NO: 74041 - protein, 204 aa, Arabidopsis thaliana; identical to SEQ ID NO: 30868
  peptide (1)..(204): Ceres Seq. ID no. 4992185

SEQ ID NO: 74042 - protein, 169 aa, Arabidopsis thaliana; identical to SEQ ID NO: 24678
  peptide (1)..(169): Ceres Seq. ID no. 4992186

SEQ ID NO: 74043 - protein, 145 aa, Arabidopsis thaliana; identical to SEQ ID NO: 24679
  peptide (1)..(145): Ceres Seq. ID no. 4992187

SEQ ID NO: 74044 - DNA, 445 bp, Arabidopsis thaliana
  misc_feature (1)..(445): Ceres Seq. ID no. 4992207
  misc_feature (1)..(445): Ortholog of  Ceres SEQ ID NO 12635272 as cited in SEQ ID NO 495
  misc_feature (1)..(445): Ortholog of  Ceres SEQ ID NO 13594789 as cited in SEQ ID NO 52172
  misc_feature (1)..(445): Ortholog of  Ceres SEQ ID NO 14306131 as cited in SEQ ID NO 52246
  misc_feature (1)..(445): Ortholog of  Ceres SEQ ID NO 14309585 as cited in SEQ ID NO 52660
  misc_feature (1)..(445): Ortholog of  Ceres SEQ ID NO 14305267 as cited in SEQ ID NO 0
ttcaacttccagagagagaacgtagcaaaacagggcttaccggagcagaacggaaaaacccatttcgaagctggagatgatcgtgctaaggagtacgtcagtctcttgaaatcgaacgatccaattggattcaacattgttgatgttcttgcttggggttctattggacacatcgttgcttactacatcttggctacttccagcaatggatacgacccaagcttctttggatgattcgtttcaatgtcaatctctcgtatatgtatatgtatatgtttgacttgtgttgcaagctatctaatctgttctctatctctgtttcttcttctgttgttgttgttgttgtctaagacttgtccctctttttgcaaatgttttatttctccatttacaaagattggtttgcagagttttataagaagaacataatagtatatacactatg

SEQ ID NO: 74045 - protein, 77 aa, Arabidopsis thaliana
  peptide (1)..(77): Ceres Seq. ID no. 4992208
FNFQRENVAKQGLPEQNGKTHFEAGDDRAKEYVSLLKSNDPIGFNIVDVLAWGSIGHIVAYYILATSSNGYDPSFFG

SEQ ID NO: 74046 - protein, 61 aa, Arabidopsis thaliana
  peptide (1)..(61): Ceres Seq. ID no. 4992209
MSISRICICICLTCVASYLICSLSLFLLLLLLLLSKTCPSFCKCFISPFTKIGLQSFIRRT

SEQ ID NO: 74047 - protein, 45 aa, Arabidopsis thaliana; identical to SEQ ID NO: 323
  peptide (1)..(45): Ceres Seq. ID no. 4992210

SEQ ID NO: 74048 - DNA, 1114 bp, Arabidopsis thaliana
  misc_feature (1)..(1114): Ceres Seq. ID no. 4992379
  misc_feature (1)..(1114): Ortholog of  Ceres SEQ ID NO 13594560 as cited in SEQ ID NO 51329
  misc_feature (1)..(1114): Ortholog of  Ceres SEQ ID NO 12613701 as cited in SEQ ID NO 67983
atactccatggagtagaaaaaggaaaaattcaaggctctttggcttcttctttcttctctgcacttgaatcagaagcttttctcagaatgggttggtcgttgagaatgtggattgtgagtatactcgtgcttacacagctcgttaatggagctctctgttggggagacgctggtcattacgctgtctgcaaaatagctcagagttattttgaggaagatactgtagttgctgtgaagaaacttctgcctgaatctgcaaatggtgagctagcagctgtttgctcatggcctgatgaaatcaaaaagctcccgcaatggcgatggactagtgctttgcattttgctgatacgcctgattacaaatgcaactatgagtactctcgggactgtcctaaagactggtgtgtgacaggggcaatcttcaattacactaaccaactaatgtctacttctgaaaactcacagagtatagtccactataacttaacagaggctctcatgttcttatcacattatatgggagatatccatcagcctttacatgaaggttttattggagatctaggtggtaacaagataaaagttcactggtacaatcaggaaactaatttgcaccgtgtgtgggatgatatgataattgagtctgctctagaaacatactacaattcaagccttccacgcatgattcatgaacttcaagccaaactcaagaacggctggtcaaacgatgtaccttcatgggagtcatgtcaacttaaccaaacggcctgcccaaatccgtatgcttctgaaagcattgatcttgcctgcaagtatgcttacaggaacgccaccgcagggactactttaggagattactatttcgtctctcggttaccggtggtagagaagagacttgcacaaggcggaattcgcttggcagggactcttaaccgaatattttctgcaaaacggaagcttgctagagcatgaaaaaagatccaggagaatcacttgaacatccatgaacactcttatgtattaataatgtgtaatggtagtagttaaggttatggtttggtattgttcctgcgttttaactataataagtatgaaacgaaaactgtacgtctac

SEQ ID NO: 74049 - protein, 323 aa, Arabidopsis thaliana; identical to SEQ ID NO: 36521
  peptide (1)..(323): Ceres Seq. ID no. 4992380

SEQ ID NO: 74050 - protein, 294 aa, Arabidopsis thaliana; identical to SEQ ID NO: 30425
  peptide (1)..(294): Ceres Seq. ID no. 4992381

SEQ ID NO: 74051 - protein, 288 aa, Arabidopsis thaliana; identical to SEQ ID NO: 30426
  peptide (1)..(288): Ceres Seq. ID no. 4992382

SEQ ID NO: 74052 - DNA, 750 bp, Arabidopsis thaliana
  misc_feature (1)..(750): Ceres Seq. ID no. 4992540
  misc_feature (1)..(750): Ortholog of  Ceres SEQ ID NO 13598422 as cited in SEQ ID NO 68856
aaaatcttctctatcctttctcgagagaatatggatcagatcttcaacaaggttggatcctactggttaggccaaaaggctaacaagcagtttgactccgtcggcaacgatctcaactcggtgtcaacgagcattgaaggaggaacaaaatggttggtcaacaaaatcaaagggaaaatgcagaagccgttgcctgagttactaaaagaatatgatttgccgattggaatcttcccgggagatgctacaaactacgagttcgatgaagagacaaagaaactaaccgttttgatcccatcgatatgcgaagttggatacaaggattcatcagtgttgaagttcacaacaacagtaacaggacatcttgagaaaggaaagctaacagatgtggaaggaatcaagacaaaagtaatgatatgggtaaaagtgacaagcatatctacagatgcatcaaaggtctatttcactgcaggaatgaagaagagcagaagcagagatgcttatgaggttcaaagaaatggtctccgagtcgataaattctaacacctgtctgtgttctgtctggttccaaagtttcaagcttttccatttacgttttggttttgatttaaagcctcctactgtgagtatacatcaacttatttataaatctgatcataacttcaatatggccggagcaattctactttgttcttttttttttccaattgtaaagaactactattcgtgtgctcaatgatttggtcttac

SEQ ID NO: 74053 - protein, 180 aa, Arabidopsis thaliana; identical to SEQ ID NO: 35119
  peptide (1)..(180): Ceres Seq. ID no. 4992541

SEQ ID NO: 74054 - protein, 170 aa, Arabidopsis thaliana; identical to SEQ ID NO: 35120
  peptide (1)..(170): Ceres Seq. ID no. 4992542

SEQ ID NO: 74055 - protein, 121 aa, Arabidopsis thaliana; identical to SEQ ID NO: 35121
  peptide (1)..(121): Ceres Seq. ID no. 4992543

SEQ ID NO: 74056 - DNA, 1648 bp, Arabidopsis thaliana
  misc_feature (1)..(1648): Ceres Seq. ID no. 4992547
  misc_feature (1)..(1648): Ortholog of  Ceres SEQ ID NO 13659033 as cited in SEQ ID NO 66372
  misc_feature (1)..(1648): Ortholog of  Ceres SEQ ID NO 13655724 as cited in SEQ ID NO 68973
  misc_feature (1)..(1648): Ortholog of  Ceres SEQ ID NO 12625899 as cited in SEQ ID NO 69079
aaagaaacaaaaggatttattaaaaaaaaaaaaaaagagatgaagacagctcgagggatgcaatagagccaagaggaggagaaagatgggatctgctccaaacttgtaccagtcgcatcaaagcaagttttggtgaagaagaagagacgaggtcttcctcttactgtggtggtgacattttctctaaaaagaaagtctccgatatgtcgcagagatggagtagaaagaagagtagacttccattagcgggtctcctctttattctcgttgtcacctttatgattctcttcaacgagcgtagcattcagcagatccatcaccacgccgcgagtcacactcaaaatctccgagaaccttccacgttcgatttcgtcaagcctaatgttcctcggattaactacttgggagctcatgaggttttggatagattcagcaaatgcaactcgacgaaagagtacagtgggaagaaaatcggatgggttgacccgtttgaagaccacccgggtcaagtaacaaaggaggagcagaaatgtgatgtcttttctgggaaatgggtctttgataattcatcatcataccctttacacaaggaatctcagtgtccttacatgtccgaccagttggcttgtcagaagcatggtaggaaggatttggagtatcagcattggagatggcaacctcatgcctgcaacttgaagagatggaatgcgatagaaatgtgggagaagctgagaggaaagagattgatgtttgttggagactcgttaaacagaggccaatggatttcaatggtttgtctcttacagtctgtcattccacgtgacaagcagtctatgtctcctaacgctcacctcaccattttcagggctgaggactacaatgccacagtggagtttctctgggcaccgttgctcgtggagtcgaattctgatgaccctgttaatcacagattgagcgagcggattatccgacccgattctgttcttaaacatgcatcaaagtggcaacatgctgatattctaatcttcaacacctacttatggtggagacaagactctgtcaagctccgatggagcagtgaagaaaaagggtcatgcgaggaggtgaagagcgccgagggaatggagatggcaatggatagttggggtgattgggttgctaacaatgtcgatccaaacaaaaagcgagttttcttcgttacaatgtctcctacacatcaatggagccgagaatggaacccgggaagcgaaggaaactgctacggggagaagaaaccaatagaggaagagagttattggggaagtgggtcggacattccgacaatgaggatggtgaagagagttttggagagattgggaccaaaggtctcagttataaacatcactcagttgtctgagtatcgaaaagatggtcatccatcggtgtaccggaaattctgggaacctctaaatgaagaccggttgaaaaacccggcatcgtattctgactgtactcattggtgtgtacctggagttcctgatgtctggaatcaattgcttttccattttttgtgaaaatgaaatgaatataaccttaccttgatggccgaatatcacccataaattatataacggggtgattttagctagctataaggatccaaatttgt

SEQ ID NO: 74057 - protein, 449 aa, Arabidopsis thaliana; identical to SEQ ID NO: 38720
  peptide (1)..(449): Ceres Seq. ID no. 4992548

SEQ ID NO: 74058 - protein, 424 aa, Arabidopsis thaliana; identical to SEQ ID NO: 38721
  peptide (1)..(424): Ceres Seq. ID no. 4992549

SEQ ID NO: 74059 - protein, 314 aa, Arabidopsis thaliana; identical to SEQ ID NO: 38722
  peptide (1)..(314): Ceres Seq. ID no. 4992550

SEQ ID NO: 74060 - DNA, 1575 bp, Arabidopsis thaliana
  misc_feature (1)..(1575): Ceres Seq. ID no. 4992687
  misc_feature (1)..(1575): Ortholog of  Ceres SEQ ID NO 13595688 as cited in SEQ ID NO 54342
  misc_feature (1)..(1575): Ortholog of  Ceres SEQ ID NO 13595240 as cited in SEQ ID NO 56316
  misc_feature (1)..(1575): Ortholog of  Ceres SEQ ID NO 15168425 as cited in SEQ ID NO 57370
cttcttcctcctcctctgttcgtcaatcgccgatctcgttgcttcattttccttgagatcgattggtacaagtgttcatccaatggttggaggaggagttatccggcagcttcttagaaggaaacttcattcccaatcagtcgtgagctttttccctgttacatctttttgattttctgctgtagcttaggatctgtttgaagatagaatcatatgatttgttttggttctgtctacaccttcattgctctgagagattgtccttgaagaattgtaactggaattgttgtggcgttggagattttgggatataagaaacttagacttattgatttgtgcttcgagagtatgattaatattcgatttcttttcagaaaaagtagtcttttgatttgttgagcatacaccttcttgtgtcttggcctttttttttgttttcttactgttgttctgtattatctaccaccataggcaactccggtattgtcatggttgtcttcgaagaaagcgaatgaagatgctgggtctgctggtttaagagcatttgctctcatgggtgctggtattaccggattattgagtttttctactgttgcatctgctgatgaggctgaacatggtctggagtgtcctaactacccttggccacatgagggcattctcagctcatatgaccatgcttcgatccgtcgtggtcaccaagtttatcagcaagtttgtgcgtcttgccattcgatgtctctgatctcataccgagacttggtgggtgttgcctacacagaggaagaggcgaaggccatggcagctgaaatcgaggttgttgatggaccaaatgatgagggtgagatgttcacccgacctggtaaactcagtgatcggcttcctgaaccatactcaaatgaatcggctgctaggttcgccaatggaggagcgtatccaccggatctaagtcttgtaactaaggcacgtcacaatggccaaaattatgtctttgctctgttgactggttatcgtgatcctcctgctggaatttcgatcagagaggggctacactacaatccttatttccctggtggagcaatcgctatgccaaaaatgctcaacgatgaagctgtggaatatgaagatggaactcctgcaacagaagcacagatgggtaaagatgttgtatccttcttgtcctgggcagctgaaccagagatggaagagaggaaattgatggggttcaaatggatattcttactgtctttggctctgcttcaagctgcgtattacaggagactgaaatggtcagtactcaaatcccgtaagcttgttctcgacgttgttaactaatcccgtgaagatcaccttttctctgggtaataatcattaatcttgaaagggataaatggtgaatcccactttttgtctcaaaagacatgtttctttgtttattgtttagaaagtctaatgaggcaaagaagtaaagcttttttaacctcaagtcacacatgattttgagattatattatttctttttggtttgttgtctcctaaaccggactcggtttgtcttaataaaaatgtggtttt

SEQ ID NO: 74061 - protein, 260 aa, Arabidopsis thaliana; identical to SEQ ID NO: 23964
  peptide (1)..(260): Ceres Seq. ID no. 4992688

SEQ ID NO: 74062 - protein, 199 aa, Arabidopsis thaliana; identical to SEQ ID NO: 23965
  peptide (1)..(199): Ceres Seq. ID no. 4992689

SEQ ID NO: 74063 - protein, 178 aa, Arabidopsis thaliana; identical to SEQ ID NO: 23966
  peptide (1)..(178): Ceres Seq. ID no. 4992690

SEQ ID NO: 74064 - DNA, 1624 bp, Arabidopsis thaliana
  misc_feature (1)..(1624): Ceres Seq. ID no. 4992709
  misc_feature (1)..(1624): Ortholog of  Ceres SEQ ID NO 14315515 as cited in SEQ ID NO 57454
acaatcagtctctttctctaaaccttcaccaatttctctctctctctctcttgcccttttacacagccatttgttagattcctctctcaataagcctctcttctcttttctattggagtttttgcattagactgattagctcaaagcaaaacccataaaccaaaatcttctctttgtgttcttgtttttttcatttctccaatttttctttgtggaggaggtttttcactttttgtttttctgggtttttattggctttcttctgcaaaaaccataactttattttttctgggtttttcttcgtaaagaagcttcccaaaacccagttttttgtataagctcaattagtagcaaacaagaaaaaacaatcttaaactcaatttcacaaaatctctgattcttgtgaaaatttgtatattgcaaaactttggaaaaaaaagagaaaaaagatggggaagcaaggtccttgctatcactgtggagttacaagtacacctctatggagaaacgggccaccagagaagccggtgttgtgcaatgcgtgtggttcgaggtggagaactaaaggatcattagtaaactacacacctcttcatgctcgtgctgaaggtgatgagactgagattgaggatcatagaactcaaacggtgatgattaagggaatgtctttgaacaaaaagattcccaagaggaaaccatatcaagaaaacttcacagtgaaaagagctaacttggaattccataccggtttcaagaggaaggctctggatgaagaagctagcaatagatcgagttcaggatcggttgtatcaaactccgagagctgtgcacaatctaatgcgtgggactcgacttttccttgtaagagaaggacatgtgtgggacgtccaaaggcagcttcttctgttgaaaagctcacaaaggatctttatactattctacaagaacagcaatcttcttgtctctctggtacttcagaggaagatttgctttttgagaatgaaacaccaatgctgttaggacatggtagtgttcttatgagagatcctcactcaggtgctcgagaagaggaatctgaagctagctcactcttagttgagagcagcaagtcttcatcagttcattctgttaaatttggtggaaaagcaatgaagcaggagcaagtgaagaggagcaaatctcaagtcttaggaagacatagttcactactctgtagcatagatttgaaggatgttttcaactttgatgagttcatagaaaatttcacagaggaagaacagcaaaaactgatgaaattacttcctcaagttgactctgttgatcgtcctgatagcctcagaagcatgtttgagagttctcaattcaaagagaacttatccttgtttcagcaacttgtggcagatggtgtttttgagacaaattcgtcttatgcaaaacttgaagacattaagacacttgcaaagcttgctttatcagatcctaacaaatcccatttgttggaaagctattacatgctcaagagaagagagattgaagactgtgttactacaacatcaagggtctcaagcttgagtccatcgaataataatagtcttgtaaccattgaaagaccttgtgaaagctt

SEQ ID NO: 74065 - protein, 391 aa, Arabidopsis thaliana
  peptide (1)..(391): Ceres Seq. ID no. 4992710
MGKQGPCYHCGVTSTPLWRNGPPEKPVLCNACGSRWRTKGSLVNYTPLHARAEGDETEIEDHRTQTVMIKGMSLNKKIPKRKPYQENFTVKRANLEFHTGFKRKALDEEASNRSSSGSVVSNSESCAQSNAWDSTFPCKRRTCVGRPKAASSVEKLTKDLYTILQEQQSSCLSGTSEEDLLFENETPMLLGHGSVLMRDPHSGAREEESEASSLLVESSKSSSVHSVKFGGKAMKQEQVKRSKSQVLGRHSSLLCSIDLKDVFNFDEFIENFTEEEQQKLMKLLPQVDSVDRPDSLRSMFESSQFKENLSLFQQLVADGVFETNSSYAKLEDIKTLAKLALSDPNKSHLLESYYMLKRREIEDCVTTTSRVSSLSPSNNNSLVTIERPCES

SEQ ID NO: 74066 - protein, 324 aa, Arabidopsis thaliana
  peptide (1)..(324): Ceres Seq. ID no. 4992711
MIKGMSLNKKIPKRKPYQENFTVKRANLEFHTGFKRKALDEEASNRSSSGSVVSNSESCAQSNAWDSTFPCKRRTCVGRPKAASSVEKLTKDLYTILQEQQSSCLSGTSEEDLLFENETPMLLGHGSVLMRDPHSGAREEESEASSLLVESSKSSSVHSVKFGGKAMKQEQVKRSKSQVLGRHSSLLCSIDLKDVFNFDEFIENFTEEEQQKLMKLLPQVDSVDRPDSLRSMFESSQFKENLSLFQQLVADGVFETNSSYAKLEDIKTLAKLALSDPNKSHLLESYYMLKRREIEDCVTTTSRVSSLSPSNNNSLVTIERPCES

SEQ ID NO: 74067 - protein, 320 aa, Arabidopsis thaliana
  peptide (1)..(320): Ceres Seq. ID no. 4992712
MSLNKKIPKRKPYQENFTVKRANLEFHTGFKRKALDEEASNRSSSGSVVSNSESCAQSNAWDSTFPCKRRTCVGRPKAASSVEKLTKDLYTILQEQQSSCLSGTSEEDLLFENETPMLLGHGSVLMRDPHSGAREEESEASSLLVESSKSSSVHSVKFGGKAMKQEQVKRSKSQVLGRHSSLLCSIDLKDVFNFDEFIENFTEEEQQKLMKLLPQVDSVDRPDSLRSMFESSQFKENLSLFQQLVADGVFETNSSYAKLEDIKTLAKLALSDPNKSHLLESYYMLKRREIEDCVTTTSRVSSLSPSNNNSLVTIERPCES

SEQ ID NO: 74068 - DNA, 1027 bp, Arabidopsis thaliana
  misc_feature (1)..(1027): Ceres Seq. ID no. 4992809
  misc_feature (1)..(1027): Ortholog of  Ceres SEQ ID NO 12484482 as cited in SEQ ID NO 53324
atgacaaaatgtttgttttttgggtttggtctgaaacaggatggggtaccaacgagaagctgatcatatcaatactagctcacaggaacgcagcacaacgcagcttgatccgcagcgtttatgcagctacctacaatgaggatcttctcaaagcattagacaaagagctttctagcgactttgagagagctgtgatgttgtggactcttgatccaccagagagagatgcttatttggctaaagaatccaccaagatgttcaccaagaacaattgggttcttgttgaaatcgcttgcacaaggcctgctcttgagcttatcaaggtcaagcaagcttaccaagctcgatacaagaaatcaatcgaggaagatgtcgcgcaacacacatctggtgaccttcgtaagctcttgcttcctcttgtgagcactttcaggtatgaaggagatgatgtgaacatgatgcttgcaagatctgaagctaagatacttcacgagaaggtctcagagaaatcttacagtgacgatgacttcatcagaatcttgacaacaagaagcaaagcacagctcggtgcaacactcaaccactacaacaacgagtatggaaacgccattaacaagaacttgaaggaagagtcggacgacaatgactacatgaaactactaagagctgtaatcacatgtttgacataccctgagaagcattttgagaaggttcttcgtctatcaatcaacaaaatgggaacagacgaatggggactaacccgagtcgtgactacacgaactgaagttgacatggaacgcatcaaagaggaatatcagcgaagaaacagcattcctttggaccgtgctatcgccaaagacacttctggtgactatgaggacatgcttgttgctcttctcggacatggcgatgcttgaaactgtttcaactttcgagttcctcctttctcttactgcatggtttgttttaaataaaagagttgtgaaactggttctgcaactatttatcaatgatcgtttgagtttgt

SEQ ID NO: 74069 - protein, 304 aa, Arabidopsis thaliana
  peptide (1)..(304): Ceres Seq. ID no. 4992810
DKMFVFWVWSETGWGTNEKLIISILAHRNAAQRSLIRSVYAATYNEDLLKALDKELSSDFERAVMLWTLDPPERDAYLAKESTKMFTKNNWVLVEIACTRPALELIKVKQAYQARYKKSIEEDVAQHTSGDLRKLLLPLVSTFRYEGDDVNMMLARSEAKILHEKVSEKSYSDDDFIRILTTRSKAQLGATLNHYNNEYGNAINKNLKEESDDNDYMKLLRAVITCLTYPEKHFEKVLRLSINKMGTDEWGLTRVVTTRTEVDMERIKEEYQRRNSIPLDRAIAKDTSGDYEDMLVALLGHGDA

SEQ ID NO: 74070 - protein, 302 aa, Arabidopsis thaliana
  peptide (1)..(302): Ceres Seq. ID no. 4992811
MFVFWVWSETGWGTNEKLIISILAHRNAAQRSLIRSVYAATYNEDLLKALDKELSSDFERAVMLWTLDPPERDAYLAKESTKMFTKNNWVLVEIACTRPALELIKVKQAYQARYKKSIEEDVAQHTSGDLRKLLLPLVSTFRYEGDDVNMMLARSEAKILHEKVSEKSYSDDDFIRILTTRSKAQLGATLNHYNNEYGNAINKNLKEESDDNDYMKLLRAVITCLTYPEKHFEKVLRLSINKMGTDEWGLTRVVTTRTEVDMERIKEEYQRRNSIPLDRAIAKDTSGDYEDMLVALLGHGDA

SEQ ID NO: 74071 - protein, 240 aa, Arabidopsis thaliana; identical to SEQ ID NO: 26097
  peptide (1)..(240): Ceres Seq. ID no. 4992812

SEQ ID NO: 74072 - DNA, 887 bp, Arabidopsis thaliana
  misc_feature (1)..(887): Ceres Seq. ID no. 4992853
  misc_feature (1)..(887): Ortholog of  Ceres SEQ ID NO 12784064 as cited in SEQ ID NO 66982
  misc_feature (1)..(887): Ortholog of  Ceres SEQ ID NO 15177907 as cited in SEQ ID NO 0
aaaggttccttgtttttccagacaaagaaaacacaaattcattccctcctcctcttcatctcttttgcagatatggatggttattattctctgtctcccatctctgtcctccaccggattaaagattccttccatttcgccgtctctgcccttctcgccaacctcttctccgctctcttcaccttcttcttcgctttaggggctttgatcggccaagaaacagagagcggtttcatcagaggagccgccgttggtgctatctcaggcgccgtcttctccatcgaagtctttgaatcttccctcctcctttggcaatccgatgagtctggaattggatgccttctctacttgccttttgagcgggaggcttgttcgtgagcgtatcggtcctgcaatgctaagtgccgtccagagtcagatgggagctgtggagtcccagttccaagatcatacagacatctttgacactgccatttcaaagggtctcactggggactctctcaacaggatccctaaggtccgaatcacagacacctctccggagattgtctcttgctctgtctgccttcaggactttcaggtgggagagacagttagaagtttgccgcactgccatcatatgttccacctaccatgcatcgacaaatggcttcgcaggcatgcttcttgtcccttgtgcagaagacatctttgaattgattttgaactcttctttcttctcttctttgtacatgaggtataggcatacacacacacacatatatacacactagtagtcttccttgattttttttagattacacgttacacagattttgatgcaccaatcattgtaacttcactcatctcttggagatcctgtttatttatgctacttattcttggct

SEQ ID NO: 74073 - protein, 125 aa, Arabidopsis thaliana
  peptide (1)..(125): Ceres Seq. ID no. 4992854
KGSLFFQTKKTQIHSLLLFISFADMDGYYSLSPISVLHRIKDSFHFAVSALLANLFSALFTFFFALGALIGQETESGFIRGAAVGAISGAVFSIEVFESSLLLWQSDESGIGCLLYLPFEREACS

SEQ ID NO: 74074 - protein, 124 aa, Arabidopsis thaliana; identical to SEQ ID NO: 42599
  peptide (1)..(124): Ceres Seq. ID no. 4992855

SEQ ID NO: 74075 - protein, 101 aa, Arabidopsis thaliana; identical to SEQ ID NO: 42600
  peptide (1)..(101): Ceres Seq. ID no. 4992856

SEQ ID NO: 74076 - DNA, 1251 bp, Arabidopsis thaliana
  misc_feature (1)..(1251): Ceres Seq. ID no. 4993070
  misc_feature (1)..(1251): Ortholog of  Ceres SEQ ID NO 12637732 as cited in SEQ ID NO 0
atgggaactggaagctcagagaattatctcaatttcgacataaagaatgctcctttcgatgtttatagaacagaacgtggtggtgaagttacttatcatggtcctggtcagcttgaggaagtagttattcgtgttctttcttcggctttcgccatcaatgcttctcgtctcgacggttttactggagtttgggttggcaacaaaaaaatggcggcgataggtattcgtgtgtcgaaatggatgacatatcatggtctagctcttaatgttacaacagatttaacaccctttaactccatagttccatgtgggataaggaaccgtggggttggaagcgtaaagggtttgattgaggatggagaacattataataagcttgaagatttgcagttgttagatatagctcatgagtcgttactaaaggaattctctgaagtttttcagcttcagatggaaaagcaaacaagatttgatttctctatttctctctccaaagaaagcttatctgcttcttggattgaccacaaagggatggctctggaagctgctttctccatgagtttttgctccttctctgtccctaaagcaatcttctgtgagagagaaacttcatcttttcaacgaatcacctcgagagcaaagggaattgcgggtgagagtcaagttcaaagctctgatggagttgagactcaagtcaaggaaacttctcccaaagtatttgataaactgcctgaaagaaatttagatacttggagcggtggcagagaaacagcaagaggactttcaggttcagtagtaagaaacactgtacgaaaagatactactttacgacatatctcaccttctagtcattcaacaaaggttagaggagataagccagagatttcagggggtgagaagaaagctattgtagatagaagcaaggcctacgtaaagctgaaatctttagggaaagaagtgagagacgcaggctatgtaccagagactaagtatgttcttcacgacattgatgaagaagctaaagagaaagccttgatgcatcatagtgaacggttagctattgctttcgggattataaacactcctccagggacgacaataagggtgatgaagaatctgaggatatgtggagattgccataacttcataaagatattatcgagtatcgaagatagagagatcattgtaagagataacaagaggttccatcattttagagatggtaactgctcttgtggagattattggtag

SEQ ID NO: 74077 - protein, 416 aa, Arabidopsis thaliana
  peptide (1)..(416): Ceres Seq. ID no. 4993071
MGTGSSENYLNFDIKNAPFDVYRTERGGEVTYHGPGQLEEVVIRVLSSAFAINASRLDGFTGVWVGNKKMAAIGIRVSKWMTYHGLALNVTTDLTPFNSIVPCGIRNRGVGSVKGLIEDGEHYNKLEDLQLLDIAHESLLKEFSEVFQLQMEKQTRFDFSISLSKESLSASWIDHKGMALEAAFSMSFCSFSVPKAIFCERETSSFQRITSRAKGIAGESQVQSSDGVETQVKETSPKVFDKLPERNLDTWSGGRETARGLSGSVVRNTVRKDTTLRHISPSSHSTKVRGDKPEISGGEKKAIVDRSKAYVKLKSLGKEVRDAGYVPETKYVLHDIDEEAKEKALMHHSERLAIAFGIINTPPGTTIRVMKNLRICGDCHNFIKILSSIEDREIIVRDNKRFHHFRDGNCSCGDYW

SEQ ID NO: 74078 - protein, 347 aa, Arabidopsis thaliana
  peptide (1)..(347): Ceres Seq. ID no. 4993072
MAAIGIRVSKWMTYHGLALNVTTDLTPFNSIVPCGIRNRGVGSVKGLIEDGEHYNKLEDLQLLDIAHESLLKEFSEVFQLQMEKQTRFDFSISLSKESLSASWIDHKGMALEAAFSMSFCSFSVPKAIFCERETSSFQRITSRAKGIAGESQVQSSDGVETQVKETSPKVFDKLPERNLDTWSGGRETARGLSGSVVRNTVRKDTTLRHISPSSHSTKVRGDKPEISGGEKKAIVDRSKAYVKLKSLGKEVRDAGYVPETKYVLHDIDEEAKEKALMHHSERLAIAFGIINTPPGTTIRVMKNLRICGDCHNFIKILSSIEDREIIVRDNKRFHHFRDGNCSCGDYW

SEQ ID NO: 74079 - protein, 336 aa, Arabidopsis thaliana
  peptide (1)..(336): Ceres Seq. ID no. 4993073
MTYHGLALNVTTDLTPFNSIVPCGIRNRGVGSVKGLIEDGEHYNKLEDLQLLDIAHESLLKEFSEVFQLQMEKQTRFDFSISLSKESLSASWIDHKGMALEAAFSMSFCSFSVPKAIFCERETSSFQRITSRAKGIAGESQVQSSDGVETQVKETSPKVFDKLPERNLDTWSGGRETARGLSGSVVRNTVRKDTTLRHISPSSHSTKVRGDKPEISGGEKKAIVDRSKAYVKLKSLGKEVRDAGYVPETKYVLHDIDEEAKEKALMHHSERLAIAFGIINTPPGTTIRVMKNLRICGDCHNFIKILSSIEDREIIVRDNKRFHHFRDGNCSCGDYW

SEQ ID NO: 74080 - DNA, 3330 bp, Arabidopsis thaliana
  misc_feature (1)..(3330): Ceres Seq. ID no. 4993511
  misc_feature (1)..(3330): Ortholog of  Ceres SEQ ID NO 15176941 as cited in SEQ ID NO 55559
atgaattcccagcaaagtactcggacaaagcaaatgttacaacaatcttcgacgcatttactctgcggtgttgttctgttacagctgtttgctgctcaagtcgatgctcaaagatctacaagtccatggcagacgctcagtggtgatgctccacttgtgattgctcgtggtggattttctggactttttccagattcgagtttagctgcataccaatttgcaatggtggtaagtgtagccgatgttgttctatggtgtgatgttcagctaaccaaagatgggcatgggatttgcttccctgatttaaatctggccaatgcctcaaatagtgaagaagtttacccaaatcgtcaaaaatcttaccctgttaatggagtcactactaagggttggttccccattgatttctccttgacagagctgcagaaagttttgttttctttgatccgaggaatattatcacgatcaggaaaatttgatgaaaatggatactcgatttcaacggttcaaaatgtagccacgcagatgaaaccagcattattctggttaaatgttcagcatgatgagttctatgagcagcataatcttagcatgagtagttttcttttatcaacttcaagaactgtttccattgacttcatctcttcccctgaagtaaatttctttaggaaaattgctggcggtttcgggaataatggaccgagttttgtgttccagtttatggggaaagaagatttcgagccgacaacaaatcgaacatacggttctatcttgagtaacctaagttttgtcaagacgtttgcttcagggattcttgtacccaaatcttacatattgcccctcgatgacaagcagtacttgcttcctcatacatccttagttcaagatgctcacaaagcagggctaaaactatatgcgtcaggttttgcaaatgatgttgatattgcatataactacagttgggatccagtttctgaatatctatcttttgttgacaatggcaatttttctgttgatggtatgctctctgattttcctttaactgcatctgcatctgttgactgcttctcccacattggcagaaacgctacaaaacaagtggattttcttgttatatcaaaaaatggtgcaagtggggagtatcctggatgtacaaaattggcatatgagaaggcaatcaaagatggttctgatgttattgattgcccagttcaaatgtctagcgacggtattcccttttgctcaagttcgatagatctcgtgaacagcacaacggtcggccaaactcatctcagaaaccgttccataatcgttcctgagattagctcagttgctggaatatttacttttagtctcacatggcatgagatccagagtttgactcctgcgatttcaaacccttttagggagaacggtatgtcgaggaatccgaatgagagaaattctgggaaccttatttcactctatgaattcctaaacttggcaaaaaactccacttctctatccggtattttgatcagtctagagaatgtagtatacctaagagagaagaaaggactcgacgtagttaaagtagttcttaatagactcacggaaactggttacatcgttggaacattaaaggtcatgattcagtctacgaccagattggttctagttgacttcaagaatcagagcacgtacaagactgtctacaaaattaaagaaaccattggtaatattactgactcggccatcgaagacataaagaaattcgctaacgctgttgtaatcaacaaagcttctgtttttcctaactctgattcgtttctcactggacaaacaacaaatgttttggagaggttgcagaagtttcagctcccggtttatgtggaactatttcagaatgagtttgtctctcaaccatttgacttcttcgcagatgaaactgttgagataaatgcatatatctttggagccggtatcaatggaaccatcacagagttcccttatacagctgcaagatataaaaggaatcgatgtttgggaagagaagaagtaccaccttacatgttacctgttaaccccggtggcgtcttaacgctcataagtacttcatccttacctccagcccaagatccaaacccgattttcacacacgatgatgtcactgagccaccactacctccagttatagcaaaatccccaacctcaactcttggaacaccatcaaccattgcaaaacctctaatttcatggtcagtagccggagttgtattgttcctggtcttattaacattagttttctgttttcaccgaaagagagaaacacggctgagacaacagaagctgaaggctcttattccactcgaacactatacttatgcacaagtgaagagaattacaaagtcatttgcggaagttgttgggagaggaggatttggaattgtttataaaggaacacttagtgatggccgggtggttgcggtgaaggtcttgaaagacacaaaaggtaatggtgaagacttcatcaatgaagttgcgaccatgagcagaacttctcatctcaacattgtttccttgcttggtttctgctctgaaggttccaaaagggcaattatatatgagtttttggaaaatgggtcacttgataagtttatattaggcaagacctccgtgaatatggattggacggcactatatagaattgctttaggagttgctcatggtttagagtacctgcaccatagctgcaaaacaaggatagtacatttcgacattaaaccacaaaatgtactcttggatgacagtttttgtcccaaagtttcggactttggcctcgctaaactctgtgagaagaaagagagcatcttgtctatgctggacacaagaggtaccatagggtacattgcaccagagatgatctcgagagtttatgggaatgtgtcacacaagtcagatgtgtatagctatggaatgttagtccttgagataattggtgcaagaaacaaagagaaagcaaatcaagcatgtgcttctaacacaagttcaatgtactttcctgaatgggtatatagggatcttgaatcatgcaagtctggaaggcatattgaggatggaattaacagcgaagaagatgagcttgcaaagaagatgacattggtgggtttgtggtgtattcagccttctccggtagatcgtcctgcgatgaacagagttgtggagatgatggaaggaagcttggaagctcttgaagtccctcctaggcctgttttgcagcaaatccccatatcaaatcttcatgaatcttctattctttcagaggatgtctctgtctacacagaaggatga

SEQ ID NO: 74081 - protein, 1109 aa, Arabidopsis thaliana
  peptide (1)..(1109): Ceres Seq. ID no. 4993512
MNSQQSTRTKQMLQQSSTHLLCGVVLLQLFAAQVDAQRSTSPWQTLSGDAPLVIARGGFSGLFPDSSLAAYQFAMVVSVADVVLWCDVQLTKDGHGICFPDLNLANASNSEEVYPNRQKSYPVNGVTTKGWFPIDFSLTELQKVLFSLIRGILSRSGKFDENGYSISTVQNVATQMKPALFWLNVQHDEFYEQHNLSMSSFLLSTSRTVSIDFISSPEVNFFRKIAGGFGNNGPSFVFQFMGKEDFEPTTNRTYGSILSNLSFVKTFASGILVPKSYILPLDDKQYLLPHTSLVQDAHKAGLKLYASGFANDVDIAYNYSWDPVSEYLSFVDNGNFSVDGMLSDFPLTASASVDCFSHIGRNATKQVDFLVISKNGASGEYPGCTKLAYEKAIKDGSDVIDCPVQMSSDGIPFCSSSIDLVNSTTVGQTHLRNRSIIVPEISSVAGIFTFSLTWHEIQSLTPAISNPFRENGMSRNPNERNSGNLISLYEFLNLAKNSTSLSGILISLENVVYLREKKGLDVVKVVLNRLTETGYIVGTLKVMIQSTTRLVLVDFKNQSTYKTVYKIKETIGNITDSAIEDIKKFANAVVINKASVFPNSDSFLTGQTTNVLERLQKFQLPVYVELFQNEFVSQPFDFFADETVEINAYIFGAGINGTITEFPYTAARYKRNRCLGREEVPPYMLPVNPGGVLTLISTSSLPPAQDPNPIFTHDDVTEPPLPPVIAKSPTSTLGTPSTIAKPLISWSVAGVVLFLVLLTLVFCFHRKRETRLRQQKLKALIPLEHYTYAQVKRITKSFAEVVGRGGFGIVYKGTLSDGRVVAVKVLKDTKGNGEDFINEVATMSRTSHLNIVSLLGFCSEGSKRAIIYEFLENGSLDKFILGKTSVNMDWTALYRIALGVAHGLEYLHHSCKTRIVHFDIKPQNVLLDDSFCPKVSDFGLAKLCEKKESILSMLDTRGTIGYIAPEMISRVYGNVSHKSDVYSYGMLVLEIIGARNKEKANQACASNTSSMYFPEWVYRDLESCKSGRHIEDGINSEEDELAKKMTLVGLWCIQPSPVDRPAMNRVVEMMEGSLEALEVPPRPVLQQIPISNLHESSILSEDVSVYTEG

SEQ ID NO: 74082 - protein, 1098 aa, Arabidopsis thaliana
  peptide (1)..(1098): Ceres Seq. ID no. 4993513
MLQQSSTHLLCGVVLLQLFAAQVDAQRSTSPWQTLSGDAPLVIARGGFSGLFPDSSLAAYQFAMVVSVADVVLWCDVQLTKDGHGICFPDLNLANASNSEEVYPNRQKSYPVNGVTTKGWFPIDFSLTELQKVLFSLIRGILSRSGKFDENGYSISTVQNVATQMKPALFWLNVQHDEFYEQHNLSMSSFLLSTSRTVSIDFISSPEVNFFRKIAGGFGNNGPSFVFQFMGKEDFEPTTNRTYGSILSNLSFVKTFASGILVPKSYILPLDDKQYLLPHTSLVQDAHKAGLKLYASGFANDVDIAYNYSWDPVSEYLSFVDNGNFSVDGMLSDFPLTASASVDCFSHIGRNATKQVDFLVISKNGASGEYPGCTKLAYEKAIKDGSDVIDCPVQMSSDGIPFCSSSIDLVNSTTVGQTHLRNRSIIVPEISSVAGIFTFSLTWHEIQSLTPAISNPFRENGMSRNPNERNSGNLISLYEFLNLAKNSTSLSGILISLENVVYLREKKGLDVVKVVLNRLTETGYIVGTLKVMIQSTTRLVLVDFKNQSTYKTVYKIKETIGNITDSAIEDIKKFANAVVINKASVFPNSDSFLTGQTTNVLERLQKFQLPVYVELFQNEFVSQPFDFFADETVEINAYIFGAGINGTITEFPYTAARYKRNRCLGREEVPPYMLPVNPGGVLTLISTSSLPPAQDPNPIFTHDDVTEPPLPPVIAKSPTSTLGTPSTIAKPLISWSVAGVVLFLVLLTLVFCFHRKRETRLRQQKLKALIPLEHYTYAQVKRITKSFAEVVGRGGFGIVYKGTLSDGRVVAVKVLKDTKGNGEDFINEVATMSRTSHLNIVSLLGFCSEGSKRAIIYEFLENGSLDKFILGKTSVNMDWTALYRIALGVAHGLEYLHHSCKTRIVHFDIKPQNVLLDDSFCPKVSDFGLAKLCEKKESILSMLDTRGTIGYIAPEMISRVYGNVSHKSDVYSYGMLVLEIIGARNKEKANQACASNTSSMYFPEWVYRDLESCKSGRHIEDGINSEEDELAKKMTLVGLWCIQPSPVDRPAMNRVVEMMEGSLEALEVPPRPVLQQIPISNLHESSILSEDVSVYTEG

SEQ ID NO: 74083 - protein, 1035 aa, Arabidopsis thaliana
  peptide (1)..(1035): Ceres Seq. ID no. 4993514
MVVSVADVVLWCDVQLTKDGHGICFPDLNLANASNSEEVYPNRQKSYPVNGVTTKGWFPIDFSLTELQKVLFSLIRGILSRSGKFDENGYSISTVQNVATQMKPALFWLNVQHDEFYEQHNLSMSSFLLSTSRTVSIDFISSPEVNFFRKIAGGFGNNGPSFVFQFMGKEDFEPTTNRTYGSILSNLSFVKTFASGILVPKSYILPLDDKQYLLPHTSLVQDAHKAGLKLYASGFANDVDIAYNYSWDPVSEYLSFVDNGNFSVDGMLSDFPLTASASVDCFSHIGRNATKQVDFLVISKNGASGEYPGCTKLAYEKAIKDGSDVIDCPVQMSSDGIPFCSSSIDLVNSTTVGQTHLRNRSIIVPEISSVAGIFTFSLTWHEIQSLTPAISNPFRENGMSRNPNERNSGNLISLYEFLNLAKNSTSLSGILISLENVVYLREKKGLDVVKVVLNRLTETGYIVGTLKVMIQSTTRLVLVDFKNQSTYKTVYKIKETIGNITDSAIEDIKKFANAVVINKASVFPNSDSFLTGQTTNVLERLQKFQLPVYVELFQNEFVSQPFDFFADETVEINAYIFGAGINGTITEFPYTAARYKRNRCLGREEVPPYMLPVNPGGVLTLISTSSLPPAQDPNPIFTHDDVTEPPLPPVIAKSPTSTLGTPSTIAKPLISWSVAGVVLFLVLLTLVFCFHRKRETRLRQQKLKALIPLEHYTYAQVKRITKSFAEVVGRGGFGIVYKGTLSDGRVVAVKVLKDTKGNGEDFINEVATMSRTSHLNIVSLLGFCSEGSKRAIIYEFLENGSLDKFILGKTSVNMDWTALYRIALGVAHGLEYLHHSCKTRIVHFDIKPQNVLLDDSFCPKVSDFGLAKLCEKKESILSMLDTRGTIGYIAPEMISRVYGNVSHKSDVYSYGMLVLEIIGARNKEKANQACASNTSSMYFPEWVYRDLESCKSGRHIEDGINSEEDELAKKMTLVGLWCIQPSPVDRPAMNRVVEMMEGSLEALEVPPRPVLQQIPISNLHESSILSEDVSVYTEG

SEQ ID NO: 74084 - DNA, 549 bp, Arabidopsis thaliana
  misc_feature (1)..(549): Ceres Seq. ID no. 4993527
  misc_feature (1)..(549): Ortholog of  Ceres SEQ ID NO 13594260 as cited in SEQ ID NO 57558
  misc_feature (1)..(549): Ortholog of  Ceres SEQ ID NO 13654956 as cited in SEQ ID NO 62966
atggattcgccaaactgggaactccgtggttgttgtaaccggaatcaaaatactttcctcatcaccatcggagtcttcaccgtagttatccttctgctatggaggacatttctattgactccatttaaactcattacggtgtttttgcacgaagctagtcatgccgttgcttgcaagcttacatgtggagatgtagaggggatggaggtgaatgcaaatgaagggggttcgaccacaacacgtggtggcatttattggttgatcttacctgctggctatcttggctcatcattttggggaatggcattgattcttgcatctaccaatctgcttacagcaagaatagctgctgctggtcttggtcttgctttattcatcgttctcttcattgccaaaaactggacgcttcgagggctttgtataggtttcatagttttcctcgctgtcatatgggttctacaagagttaactacagtcaaaattctccgttatgtcattctgtttattggtaagaataccatcaaactcttctctgtcttgttatcataa

SEQ ID NO: 74085 - protein, 182 aa, Arabidopsis thaliana
  peptide (1)..(182): Ceres Seq. ID no. 4993528
MDSPNWELRGCCNRNQNTFLITIGVFTVVILLLWRTFLLTPFKLITVFLHEASHAVACKLTCGDVEGMEVNANEGGSTTTRGGIYWLILPAGYLGSSFWGMALILASTNLLTARIAAAGLGLALFIVLFIAKNWTLRGLCIGFIVFLAVIWVLQELTTVKILRYVILFIGKNTIKLFSVLLS

SEQ ID NO: 74086 - protein, 115 aa, Arabidopsis thaliana
  peptide (1)..(115): Ceres Seq. ID no. 4993529
MEVNANEGGSTTTRGGIYWLILPAGYLGSSFWGMALILASTNLLTARIAAAGLGLALFIVLFIAKNWTLRGLCIGFIVFLAVIWVLQELTTVKILRYVILFIGKNTIKLFSVLLS

SEQ ID NO: 74087 - DNA, 2841 bp, Arabidopsis thaliana
  misc_feature (1)..(2841): Ceres Seq. ID no. 4993689
  misc_feature (1)..(2841): Ortholog of  Ceres SEQ ID NO 13657677 as cited in SEQ ID NO 66119
atgtccactcctccgccggatgacatgtttggtttcgacgatcctttctcccccagtgattcgcgggaagttgtggatttgactaaagagtactcctttttgcacgattctcttgtcgactatggaaacgttaatgttcatcaagtagtgcccattattactcaatcctctattgacgctagagccattgcagatgctgtttctggtgtcgacgatgtgtttgggagaaaatcccagaagtttcttaggcaatttagagagaaattgagtgagagtttagtgattgaggtgttgcgtttgatagcaagaccatctgctgttatcagtttcttcgtttgggcaggtaggcagataggttataagcatactgcacctgtgtataacgctttggttgaccttattgtacgtgatgatgacgaaaaagttcccgaagaattcctgcaacagattagagatgatgataaggaagtgtttggcgaatttctcaatgtgttggtaaggaaacattgcaggaatgggtcatttagtattgcgcttgaggagttagggaggctcaaggattttaggttcagaccttcaagatcgacttataattgtttgattcaggcatttctcaaggctgatcgtttggactctgcatctttgattcatagggaaatgtctcttgcaaatcttaggatggatgggtttacacttagatgctttgcttattctctctgtaaagtaggaaagtggagggaagctctaacattggtggaaacggaaaattttgtgcctgatactgtgttttatacaaaattgatatctggtctgtgtgaagcttcgctttttgaagaggctatggatttcctgaataggatgcgtgctacttcctgccttccaaatgttgttacatattcaactttgctgtgtggatgcttgaacaaaaaacagctgggtaggtgtaaaagggtgcttaatatgatgatgatggaaggttgttatccaagtcccaagatttttaattctcttgtacatgcttattgcacatcaggagatcattcatatgcatacaaattgctcaaaaaaatggttaaatgtggtcacatgccaggatatgttgtctacaatatattgattgggagtatttgtggtgacaaagactcccttaattgtgatctgttggacttagctgagaaagcttatagtgaaatgcttgctgcaggggttgttctgaataagattaatgtcagtagcttcacacggtgtctttgtagtgctgggaaatatgaaaaggcatttagtgttatccgtgaaatgattggtcagggatttataccagataccagtacctattccaaagtccttaattatttatgtaatgcttcgaaaatggagttggcgtttttgttatttgaagaaatgaaaaggggtggccttgttgctgatgtctacacgtatactattatggtagatagtttctgtaaagctggtctaattgaacaggctcgtaagtggttcaatgaaatgagagaggttggttgtacacctaacgtcgtcacatataccgctcttatccatgcttatcttaaggctaagaaggtcagctatgcaaatgagctgtttgaaacgatgctgtctgaagggtgtctccctaatattgttacatattctgccttaattgatggccattgcaaagctggacaagtggagaaagcctgccagatttttgaaagaatgtgtggcagcaaagatgtcccagatgtagatatgtacttcaagcagtatgatgacaacagcgagaggccaaatgtagttacatatggagctttactggatggtttctgcaagtcgcatagggtcgaagaagctcgtaagttgttggatgctatgtctatggaaggttgtgaaccgaatcagattgtatatgatgctctcattgatggactctgtaaggttgggaaactagacgaagcacaagaagtgaaaactgagatgtctgagcatggattccctgcaaccttatatacttacagttctctaattgatcgttatttcaaagtcaagcgccaagatttagcctcaaaagtattatctaagatgcttgagaattcctgtgcgcccaatgtggttatatacactgagatgattgatggcttatgcaaggttggtaaaactgatgaagcttataagcttatgcaaatgatggaagaaaaagggtgtcagcccaatgttgtgacatatacagcgatgattgatggatttggaatgattggtaaaatagaaacatgccttgagctcttagagcgaatgggttccaaaggtgttgctccaaattatgttacttacagggtcttgatagatcattgttgcaaaaatggtgcactggatgtggcccacaatcttctcgaagaaatgaaacagacacattggcctacacacacagcaggatatcgcaaagtcattgaaggattcaataaagagttcatagagtctctagggcttctcgatgagataggccaggatgatactgccccttttctttctgtatataggcttttgattgataatcttattaaagctcaaagactggaaatggctcttaggcttcttgaagaggttgcaacattttcagccacgttggttgactacagtagcacatataactcactgattgaaagcctttgccttgctaataaagtggaaacggcttttcagttgttctcagaaatgacaaagaaaggtgtcattccggagatgcaatcattctgtagtctaatcaagggacttttccgaaacagcaagatcagtgaagcactattgcttctagatttcatatctcatatggtttgtcctctctga

SEQ ID NO: 74088 - protein, 946 aa, Arabidopsis thaliana
  peptide (1)..(946): Ceres Seq. ID no. 4993690
MSTPPPDDMFGFDDPFSPSDSREVVDLTKEYSFLHDSLVDYGNVNVHQVVPIITQSSIDARAIADAVSGVDDVFGRKSQKFLRQFREKLSESLVIEVLRLIARPSAVISFFVWAGRQIGYKHTAPVYNALVDLIVRDDDEKVPEEFLQQIRDDDKEVFGEFLNVLVRKHCRNGSFSIALEELGRLKDFRFRPSRSTYNCLIQAFLKADRLDSASLIHREMSLANLRMDGFTLRCFAYSLCKVGKWREALTLVETENFVPDTVFYTKLISGLCEASLFEEAMDFLNRMRATSCLPNVVTYSTLLCGCLNKKQLGRCKRVLNMMMMEGCYPSPKIFNSLVHAYCTSGDHSYAYKLLKKMVKCGHMPGYVVYNILIGSICGDKDSLNCDLLDLAEKAYSEMLAAGVVLNKINVSSFTRCLCSAGKYEKAFSVIREMIGQGFIPDTSTYSKVLNYLCNASKMELAFLLFEEMKRGGLVADVYTYTIMVDSFCKAGLIEQARKWFNEMREVGCTPNVVTYTALIHAYLKAKKVSYANELFETMLSEGCLPNIVTYSALIDGHCKAGQVEKACQIFERMCGSKDVPDVDMYFKQYDDNSERPNVVTYGALLDGFCKSHRVEEARKLLDAMSMEGCEPNQIVYDALIDGLCKVGKLDEAQEVKTEMSEHGFPATLYTYSSLIDRYFKVKRQDLASKVLSKMLENSCAPNVVIYTEMIDGLCKVGKTDEAYKLMQMMEEKGCQPNVVTYTAMIDGFGMIGKIETCLELLERMGSKGVAPNYVTYRVLIDHCCKNGALDVAHNLLEEMKQTHWPTHTAGYRKVIEGFNKEFIESLGLLDEIGQDDTAPFLSVYRLLIDNLIKAQRLEMALRLLEEVATFSATLVDYSSTYNSLIESLCLANKVETAFQLFSEMTKKGVIPEMQSFCSLIKGLFRNSKISEALLLLDFISHMVCPL

SEQ ID NO: 74089 - protein, 938 aa, Arabidopsis thaliana
  peptide (1)..(938): Ceres Seq. ID no. 4993691
MFGFDDPFSPSDSREVVDLTKEYSFLHDSLVDYGNVNVHQVVPIITQSSIDARAIADAVSGVDDVFGRKSQKFLRQFREKLSESLVIEVLRLIARPSAVISFFVWAGRQIGYKHTAPVYNALVDLIVRDDDEKVPEEFLQQIRDDDKEVFGEFLNVLVRKHCRNGSFSIALEELGRLKDFRFRPSRSTYNCLIQAFLKADRLDSASLIHREMSLANLRMDGFTLRCFAYSLCKVGKWREALTLVETENFVPDTVFYTKLISGLCEASLFEEAMDFLNRMRATSCLPNVVTYSTLLCGCLNKKQLGRCKRVLNMMMMEGCYPSPKIFNSLVHAYCTSGDHSYAYKLLKKMVKCGHMPGYVVYNILIGSICGDKDSLNCDLLDLAEKAYSEMLAAGVVLNKINVSSFTRCLCSAGKYEKAFSVIREMIGQGFIPDTSTYSKVLNYLCNASKMELAFLLFEEMKRGGLVADVYTYTIMVDSFCKAGLIEQARKWFNEMREVGCTPNVVTYTALIHAYLKAKKVSYANELFETMLSEGCLPNIVTYSALIDGHCKAGQVEKACQIFERMCGSKDVPDVDMYFKQYDDNSERPNVVTYGALLDGFCKSHRVEEARKLLDAMSMEGCEPNQIVYDALIDGLCKVGKLDEAQEVKTEMSEHGFPATLYTYSSLIDRYFKVKRQDLASKVLSKMLENSCAPNVVIYTEMIDGLCKVGKTDEAYKLMQMMEEKGCQPNVVTYTAMIDGFGMIGKIETCLELLERMGSKGVAPNYVTYRVLIDHCCKNGALDVAHNLLEEMKQTHWPTHTAGYRKVIEGFNKEFIESLGLLDEIGQDDTAPFLSVYRLLIDNLIKAQRLEMALRLLEEVATFSATLVDYSSTYNSLIESLCLANKVETAFQLFSEMTKKGVIPEMQSFCSLIKGLFRNSKISEALLLLDFISHMVCPL

SEQ ID NO: 74090 - protein, 727 aa, Arabidopsis thaliana
  peptide (1)..(727): Ceres Seq. ID no. 4993692
MSLANLRMDGFTLRCFAYSLCKVGKWREALTLVETENFVPDTVFYTKLISGLCEASLFEEAMDFLNRMRATSCLPNVVTYSTLLCGCLNKKQLGRCKRVLNMMMMEGCYPSPKIFNSLVHAYCTSGDHSYAYKLLKKMVKCGHMPGYVVYNILIGSICGDKDSLNCDLLDLAEKAYSEMLAAGVVLNKINVSSFTRCLCSAGKYEKAFSVIREMIGQGFIPDTSTYSKVLNYLCNASKMELAFLLFEEMKRGGLVADVYTYTIMVDSFCKAGLIEQARKWFNEMREVGCTPNVVTYTALIHAYLKAKKVSYANELFETMLSEGCLPNIVTYSALIDGHCKAGQVEKACQIFERMCGSKDVPDVDMYFKQYDDNSERPNVVTYGALLDGFCKSHRVEEARKLLDAMSMEGCEPNQIVYDALIDGLCKVGKLDEAQEVKTEMSEHGFPATLYTYSSLIDRYFKVKRQDLASKVLSKMLENSCAPNVVIYTEMIDGLCKVGKTDEAYKLMQMMEEKGCQPNVVTYTAMIDGFGMIGKIETCLELLERMGSKGVAPNYVTYRVLIDHCCKNGALDVAHNLLEEMKQTHWPTHTAGYRKVIEGFNKEFIESLGLLDEIGQDDTAPFLSVYRLLIDNLIKAQRLEMALRLLEEVATFSATLVDYSSTYNSLIESLCLANKVETAFQLFSEMTKKGVIPEMQSFCSLIKGLFRNSKISEALLLLDFISHMVCPL

SEQ ID NO: 74091 - DNA, 2310 bp, Arabidopsis thaliana
  misc_feature (1)..(2310): Ceres Seq. ID no. 4993776
  misc_feature (1)..(2310): Ortholog of  Ceres SEQ ID NO 15169142 as cited in SEQ ID NO 58748
atggcgacattagcagatattggactagcagcagcgattaatattctaagtgcattgatatttctattgctatttgcaatcttgaggattcaaccattcaatgatagggtttatttccctaaatggtacttaaaaggtgttagaagcagccctgtgaattcgggtgctttcgttagcaagattatgaatttggactttcgatcatacgttcggtttttaaactggatgcctgatgctcttaagatgccagagcctgaacttattgatcatgctggtttggattctgctgtttacttgaggatttacttgattgggcttaagatctttggtccgattgcattactttcatggtcaattttagtacctgtaaattggacaagtgatggattgcagctagcaaaacttcgtaatgtaacatcgagtaatatcgataagctttcgatttcgaatgtcgaacgtggatcagacaggttttgggcacatcttgtgatggcttatgcattcacattttggacttgctatgtactaatgaaggaatatgagaaaattgctgcaatgcggttatcttttctccaatcagagaagcgacgtgctgatcaattcactgttctggttaggaacgtaccaccggactcagacgagtcgattagcgaaaacgtgcagcatttctttcttgttaaccacccagaccattatcttacacatcaggtggtgtacaatgcaaatgaattggctaaattggtagaagacaagaagaaaatgcagaattggttagattactaccagttgaagtatacaagaaacaaggaacaacggccacggatgggatttctcgggctatggggcaaaaaagtagatgcaatggatcattatacagcagagatcgagaaacttagcgagcaaataatggaagaaaggaagaggataaagaaagatgacaaaagtgtaatgcaagcagcttttgtgtcttttaaaacgcgttggggcgctgcggtctgcgcgcagacacaacagacgaagaatccaactgaatggttaaccgaatgggctcctgaggcaagagaaatgtactggccaaatctcgcaatgccttacgtatctctcactgtaaggagatttgtaatgcacatcgccttcttcttcctcacgttctttttcatcatcccaatcgcatttgtgcaatccttagcgagtattgaaggtatcgagaaatccgctccgttcctcagtcccattgtcaaaaacaagttaatgaaatcattgatccaaggttttcttcccggtattgtcttgaagctctttttgatattcctgccaacaatattgatgatcatgtcgaaattcgaagggtttatttcaatatcatcgttagagagaagagcggcttttcgatactatattttcaaccttgtgaatgttttcctcggtagcgtaatcactggatctgcttttgaacagctcgattcttttcttaaacaatccgcaaacgacattccgcggacagttggagtcgcgataccgataaaagcaacgttctttataacgtatataatggtagacggttgggcgggtgtggcgggagaaatctttaggctgaaaccattagtcattttccatttaaagaacttcttctttgtgaaaactgaaaaggatagagaagaagctatggatccgggacagattgatttctacgctaccgagcctcggattcaactatacttcctccttggccttgtctacgctcctgtcactcctgttcttcttcctttcatcatcttcttctttggtttcgcctacctcgtcttccgtcatcagaagtatgagagtgcgggtgcattctggccagacgttcatggacgtataatatcggcattgatcatctcacaaatccttttgttgggattaatgagcacgaaaggaaaagttcagtccacacctttcctcctcgttctagcgattctcaccttcggttttcatcggttttgcaaaggccggtacgaatcggcattcgtcattaacccgttgcaggaagctatgattaaggatacattggaacgagcaagagaaccaaacttgaatcttaaagggtttcttcagaatgcatatgttcatcctgtttttaaagacgaagaagattcagatgaagagggactaatcgaggattcagatgacgaagattgtgtagttgtacaaaccaaacgtcaaagatcacggagaaccaccgttgcgagcagcaatgcgagccgtggctcgtcacaatcaacgccttttaatcaacttgatttgggtaaggggaaaccggagacttga

SEQ ID NO: 74092 - protein, 769 aa, Arabidopsis thaliana
  peptide (1)..(769): Ceres Seq. ID no. 4993777
MATLADIGLAAAINILSALIFLLLFAILRIQPFNDRVYFPKWYLKGVRSSPVNSGAFVSKIMNLDFRSYVRFLNWMPDALKMPEPELIDHAGLDSAVYLRIYLIGLKIFGPIALLSWSILVPVNWTSDGLQLAKLRNVTSSNIDKLSISNVERGSDRFWAHLVMAYAFTFWTCYVLMKEYEKIAAMRLSFLQSEKRRADQFTVLVRNVPPDSDESISENVQHFFLVNHPDHYLTHQVVYNANELAKLVEDKKKMQNWLDYYQLKYTRNKEQRPRMGFLGLWGKKVDAMDHYTAEIEKLSEQIMEERKRIKKDDKSVMQAAFVSFKTRWGAAVCAQTQQTKNPTEWLTEWAPEAREMYWPNLAMPYVSLTVRRFVMHIAFFFLTFFFIIPIAFVQSLASIEGIEKSAPFLSPIVKNKLMKSLIQGFLPGIVLKLFLIFLPTILMIMSKFEGFISISSLERRAAFRYYIFNLVNVFLGSVITGSAFEQLDSFLKQSANDIPRTVGVAIPIKATFFITYIMVDGWAGVAGEIFRLKPLVIFHLKNFFFVKTEKDREEAMDPGQIDFYATEPRIQLYFLLGLVYAPVTPVLLPFIIFFFGFAYLVFRHQKYESAGAFWPDVHGRIISALIISQILLLGLMSTKGKVQSTPFLLVLAILTFGFHRFCKGRYESAFVINPLQEAMIKDTLERAREPNLNLKGFLQNAYVHPVFKDEEDSDEEGLIEDSDDEDCVVVQTKRQRSRRTTVASSNASRGSSQSTPFNQLDLGKGKPET

SEQ ID NO: 74093 - protein, 708 aa, Arabidopsis thaliana
  peptide (1)..(708): Ceres Seq. ID no. 4993778
MNLDFRSYVRFLNWMPDALKMPEPELIDHAGLDSAVYLRIYLIGLKIFGPIALLSWSILVPVNWTSDGLQLAKLRNVTSSNIDKLSISNVERGSDRFWAHLVMAYAFTFWTCYVLMKEYEKIAAMRLSFLQSEKRRADQFTVLVRNVPPDSDESISENVQHFFLVNHPDHYLTHQVVYNANELAKLVEDKKKMQNWLDYYQLKYTRNKEQRPRMGFLGLWGKKVDAMDHYTAEIEKLSEQIMEERKRIKKDDKSVMQAAFVSFKTRWGAAVCAQTQQTKNPTEWLTEWAPEAREMYWPNLAMPYVSLTVRRFVMHIAFFFLTFFFIIPIAFVQSLASIEGIEKSAPFLSPIVKNKLMKSLIQGFLPGIVLKLFLIFLPTILMIMSKFEGFISISSLERRAAFRYYIFNLVNVFLGSVITGSAFEQLDSFLKQSANDIPRTVGVAIPIKATFFITYIMVDGWAGVAGEIFRLKPLVIFHLKNFFFVKTEKDREEAMDPGQIDFYATEPRIQLYFLLGLVYAPVTPVLLPFIIFFFGFAYLVFRHQKYESAGAFWPDVHGRIISALIISQILLLGLMSTKGKVQSTPFLLVLAILTFGFHRFCKGRYESAFVINPLQEAMIKDTLERAREPNLNLKGFLQNAYVHPVFKDEEDSDEEGLIEDSDDEDCVVVQTKRQRSRRTTVASSNASRGSSQSTPFNQLDLGKGKPET

SEQ ID NO: 74094 - protein, 694 aa, Arabidopsis thaliana
  peptide (1)..(694): Ceres Seq. ID no. 4993779
MPDALKMPEPELIDHAGLDSAVYLRIYLIGLKIFGPIALLSWSILVPVNWTSDGLQLAKLRNVTSSNIDKLSISNVERGSDRFWAHLVMAYAFTFWTCYVLMKEYEKIAAMRLSFLQSEKRRADQFTVLVRNVPPDSDESISENVQHFFLVNHPDHYLTHQVVYNANELAKLVEDKKKMQNWLDYYQLKYTRNKEQRPRMGFLGLWGKKVDAMDHYTAEIEKLSEQIMEERKRIKKDDKSVMQAAFVSFKTRWGAAVCAQTQQTKNPTEWLTEWAPEAREMYWPNLAMPYVSLTVRRFVMHIAFFFLTFFFIIPIAFVQSLASIEGIEKSAPFLSPIVKNKLMKSLIQGFLPGIVLKLFLIFLPTILMIMSKFEGFISISSLERRAAFRYYIFNLVNVFLGSVITGSAFEQLDSFLKQSANDIPRTVGVAIPIKATFFITYIMVDGWAGVAGEIFRLKPLVIFHLKNFFFVKTEKDREEAMDPGQIDFYATEPRIQLYFLLGLVYAPVTPVLLPFIIFFFGFAYLVFRHQKYESAGAFWPDVHGRIISALIISQILLLGLMSTKGKVQSTPFLLVLAILTFGFHRFCKGRYESAFVINPLQEAMIKDTLERAREPNLNLKGFLQNAYVHPVFKDEEDSDEEGLIEDSDDEDCVVVQTKRQRSRRTTVASSNASRGSSQSTPFNQLDLGKGKPET

SEQ ID NO: 74095 - DNA, 1077 bp, Arabidopsis thaliana
  misc_feature (1)..(1077): Ceres Seq. ID no. 4993852
  misc_feature (1)..(1077): Ortholog of  Ceres SEQ ID NO 13662513 as cited in SEQ ID NO 63303
atggcgatttctcgttccatccttcaccggccagctaaatccttttcctcactgttcactcgttccttctcttcgtcatctcctctcgccaattcccctactgtttctcgatctgcgtcttcgttgttgaatcgttcacgttctctcgtttctggattctcagcgttggtccgtgccggtgtatctctagctagagacgagattattgattactacatcaaaaccctagctcaagttgttggcagtgaagaggaggcaaggatgaagatttactctgtgtcgcacaaatgctactttgcttttggagctcttgtttcagaagatctttcacataagatcaaagagttgcctaaggttaagtgggttcttcctgattcctacttggatgggaagaataaagactatggaggagaacctttcattgatggaaaggctgttccttatgacccaaagtatcatgaagaatggataagaaacaatgctaatgcaactaatgaaaacagacgccctcgcaggcctcgcaactcggatggaggcaggaacgataggggaaaccaagacacgggttacagacgtccaccaccaaaccaaggtatgggaggtgctccacctccaccgcctcacataggcaacaacccaaacatgcctcctcatatacaaccacctaacatgaaccagaactacagaggtcctcctccaccaccaaacatgaaccagaactatcagggaccaccagcaccaaacatgaaccagaactatcagggacctccaccatcaaacatgggtcagaactaccagggaccaccaccgccaaacatgaaccagagctatcagggacctccaccgccaaacatgaaccagagctatcagggacctccaccgtcgaacatgggccagaactacaggggaccttcactgccgccaccaaacatgagtcagaattacgagggaccaccaccaccgaacatgaatggaggatggtctggaaactaccagcagaacggtggataccaacaacaaggtcagggtggtggaatgcagcaacagccttacccacccaataggaaccagagttaa

SEQ ID NO: 74096 - protein, 358 aa, Arabidopsis thaliana
  peptide (1)..(358): Ceres Seq. ID no. 4993853
MAISRSILHRPAKSFSSLFTRSFSSSSPLANSPTVSRSASSLLNRSRSLVSGFSALVRAGVSLARDEIIDYYIKTLAQVVGSEEEARMKIYSVSHKCYFAFGALVSEDLSHKIKELPKVKWVLPDSYLDGKNKDYGGEPFIDGKAVPYDPKYHEEWIRNNANATNENRRPRRPRNSDGGRNDRGNQDTGYRRPPPNQGMGGAPPPPPHIGNNPNMPPHIQPPNMNQNYRGPPPPPNMNQNYQGPPAPNMNQNYQGPPPSNMGQNYQGPPPPNMNQSYQGPPPPNMNQSYQGPPPSNMGQNYRGPSLPPPNMSQNYEGPPPPNMNGGWSGNYQQNGGYQQQGQGGGMQQQPYPPNRNQS

SEQ ID NO: 74097 - protein, 271 aa, Arabidopsis thaliana
  peptide (1)..(271): Ceres Seq. ID no. 4993854
MKIYSVSHKCYFAFGALVSEDLSHKIKELPKVKWVLPDSYLDGKNKDYGGEPFIDGKAVPYDPKYHEEWIRNNANATNENRRPRRPRNSDGGRNDRGNQDTGYRRPPPNQGMGGAPPPPPHIGNNPNMPPHIQPPNMNQNYRGPPPPPNMNQNYQGPPAPNMNQNYQGPPPSNMGQNYQGPPPPNMNQSYQGPPPPNMNQSYQGPPPSNMGQNYRGPSLPPPNMSQNYEGPPPPNMNGGWSGNYQQNGGYQQQGQGGGMQQQPYPPNRNQS

SEQ ID NO: 74098 - DNA, 4161 bp, Arabidopsis thaliana
  misc_feature (1)..(4161): Ceres Seq. ID no. 4993910
  misc_feature (1)..(4161): Ortholog of  Ceres SEQ ID NO 13600485 as cited in SEQ ID NO 1221
atggttggaggaagtagtgcacagaagctaactacaaatgatgcacttgcatatcttaaagctgtcaaggataaatttcaagataaacgtgacaaatacgatgagtttcttgaggttatgaaagattttaaagctcagagagttgatactactggtgttatcttaagggtgaaagaactttttaaagggaacagagaattgattttggggtttaatactttcttaccaaagggtttcgagataactctccgacccgaggatgaccaacccgctgcaccaaagaagcctgttgagtttgaggaagctattagttttgttaacaagattaagacaaggtttcaaggcgatgatcgtgtatacaaatcgtttttagacattttgaacatgtatagaaaggaaaacaagtctattactgaggtctaccatgaggtggctatcctttttcgggaccatcacgatttgcttggagagttcactcactttctccctgatacttcagcaactgcatctactaatgattctgtaaaagttccagtacgtgatagaggcattaagtctcttcccaccatgcgtcaaatagatcttgataagaaggaccggattattacttcgcatcctaaccgtgccctcaaaaccgaaaatatggacgtagaccatgagaggtctttgttgaaagatagtaaagaagaagtgagacgcattgacaaaaagaatgatttcatggatgatagagacaggaaagattacagaggtcttgaccacgatagccataaagaacatttcttcaacagcaaaaagaaattgatacgtaaggatgatgattctgctgaaatgtcagatcaagccagggaaggagacaagttttctggagccattccgagttcatctacttatgatgaaaaaggtttcataattgatttcttagaaagtcatagccaagaacttgcttttgttgatagagtgaaggcaaagcttgataccgcggataaccaagagttcttacgatgtcttaatctctattcaaaggagataatcagccaaccagaattgcagtctttggtgagtgatttaattggtgtatatccagaccttatggacgccttcaaagtctttttggctcagtgtgacaagaatgatggattactctctggtatcgtgtctaagagtaagtctagtaccttttataatatacttctgacatacctcttcggacaatccttgtggagtgaaggcaaatgtcctcaacctactaagtcacttgacaaagatacagaccgagaacgtgagaagattgaaaggtatagagaaagagaccgtgagaaggagaggcttgaaaaggtggcagcgagtcagaaatgggctaaacctatcagtgaactagatctctcgaactgtgaacagtgcacacctagttatcggagacttccaaagaatttaaatgtacatacatactttgttctcttgcagtatccaattcctatagcaagccaaaaaatggagattggtagccaagtgcttaatgatcattgggtctctgtcacttcaggaagtgaagactattcattcaaacacatgcgcaagaaccaatacgaagagagcctattcaaatgtgaagatgacaggttcgagctagacatgttattagagtctgtgatctcggctactaatcgagttgaagagttattggcaaagattaacagtaatgaattgaaaaccgatactcccatctgtatcgaggatcacctcacagctctaaacctaagatgcatagaacggttatacagtgaccatgggctcgatgtgttggatttgttaaagaagaatgcatatcttgctttaccggtaatactaacccgtttgaaacaaaagcaagaagaatgggcaaggtgtcgtactgagtttaacaaagtctgggctgacatatatacaaagaactaccacaggtcgcttgatcatcgcagtttttatttcaaacagcaggattcaaagaatctgagcacaaaagcattgctggcagagataaaagagatctctgaaaagaagcgaggcgaagatgatgcacttcttgctcttgcggctggaaatagacgaactatttcttccaatatgagttttgattatccggatcctgatcttcacgaagatctgtatcagctgatcaagtattcatgtggagaaatgtgttcaacagaacagttagataaggtaatgaaggtatggacagaatttttggaaccaatatttggtgttccttctcgccctcaaggtgccgaagaccgagaagatgctgtcaagtctacaaaccatgaccgagaagaccaagaagatgctgtcagtcctcaaaatggagctagtattgccaactctatgcggtcaaatggccctcgaaaagtcaatgaaagtaatcaagtgcggcaagctagtgagttggataaagatgttacttctagtaagacctcagatgccttgttatcatgtgacaacactcagaatgataaaatgccgaagaatctgaccacacctgacgaaagagccgaaaccaaacaagctgtttctattgaacgtgcccataactcaaatgcactacctctggatggattgttacctcaaaggaatggaaaaatcagcagtttatccgttgcggatgaagaatggtatccttttcttttatactcgccagggcttagcaatagtaatccaaaacctgcattaaccagtggaacggaggagttgaagccaaattacgtaaatgggccacgcgtagagattggcgacaaccctgtaattccaaatgggacagtagcagaatggttcgctggggaagccaaagtcgaaagagaggagggtgaactttctccaacaggagattttgaagaagataattatgcagttcatggagagaatgacatggaggctctcagcaaaagtaaggagaatgatgcaactgcagatgatgcaagtgctccaagatcatcagatggtagcggaaacacatctcacaacggtgatgtttctggaactgactctggtgatggtgaagattgttatcgcgaagatgatatagaccataataaggtagaaagtgaaggtgaggctgaagaaggtatgtctgatggccatgatgatactgaaggagatatgcctgtgttgtccatctcagtaaaaaacctgctacatgtgaaacctcttgcaaagtatgtccctccagctttgtacgataaggacaacgatgattctcggaagaactcacaagtcttttatgggaatgattctttttatgttctattcaggcttcatcagattttgtatgacagaatattatcagcaaaaatcaattcatcatctccagatagaaagtggaagacctcaaatccaacaaaccccgctgattcgtacgccagaatcatggatgctctctacaatttgctcgatggcacatccgataattcaaagttcgaagatgattgccgagcaattatcgggacccagtcatatgttctcttcacattagacaaactgatctataagctcatcaagcattcgtcacatatgatccaactgaccaatgtgatcctccagctccaagcagtagcagctgatgagatggacaacaaattacaacagctttatgcttatgagaaatccagaaagcctgagaagtttctggatgctgtttattacgaaaatgctcttgtgcttcttcccgatgaggatatataccgcattgaatgtgaacaatcgacaccaagcaaactctctattcagcttctggactatggacatgataagcctgatgtgacatccatatccatggacccaacttttgcagcttacctccacaatgtattcctttcttatcaacctaatgcgaaagagaatcctcgaatctatttgaaacggaataagcgtaaaaatggtggtgacgatgaactctgcaccacggatgaagttaagattattaatggtttggaatgtaagataacctgcagttcttcaaaggtctcctatgtattagacaccgaggatgtgttgcatcgtgctaagaggaggaaacttttaaaccaaagcggtttacccctcgcacatgattctgtttgcagtggttctttaattaggcaaaggagaacacaaagatatcaaaaacttctcaccggtcaatga

SEQ ID NO: 74099 - protein, 1386 aa, Arabidopsis thaliana
  peptide (1)..(1386): Ceres Seq. ID no. 4993911
MVGGSSAQKLTTNDALAYLKAVKDKFQDKRDKYDEFLEVMKDFKAQRVDTTGVILRVKELFKGNRELILGFNTFLPKGFEITLRPEDDQPAAPKKPVEFEEAISFVNKIKTRFQGDDRVYKSFLDILNMYRKENKSITEVYHEVAILFRDHHDLLGEFTHFLPDTSATASTNDSVKVPVRDRGIKSLPTMRQIDLDKKDRIITSHPNRALKTENMDVDHERSLLKDSKEEVRRIDKKNDFMDDRDRKDYRGLDHDSHKEHFFNSKKKLIRKDDDSAEMSDQAREGDKFSGAIPSSSTYDEKGFIIDFLESHSQELAFVDRVKAKLDTADNQEFLRCLNLYSKEIISQPELQSLVSDLIGVYPDLMDAFKVFLAQCDKNDGLLSGIVSKSKSSTFYNILLTYLFGQSLWSEGKCPQPTKSLDKDTDREREKIERYRERDREKERLEKVAASQKWAKPISELDLSNCEQCTPSYRRLPKNLNVHTYFVLLQYPIPIASQKMEIGSQVLNDHWVSVTSGSEDYSFKHMRKNQYEESLFKCEDDRFELDMLLESVISATNRVEELLAKINSNELKTDTPICIEDHLTALNLRCIERLYSDHGLDVLDLLKKNAYLALPVILTRLKQKQEEWARCRTEFNKVWADIYTKNYHRSLDHRSFYFKQQDSKNLSTKALLAEIKEISEKKRGEDDALLALAAGNRRTISSNMSFDYPDPDLHEDLYQLIKYSCGEMCSTEQLDKVMKVWTEFLEPIFGVPSRPQGAEDREDAVKSTNHDREDQEDAVSPQNGASIANSMRSNGPRKVNESNQVRQASELDKDVTSSKTSDALLSCDNTQNDKMPKNLTTPDERAETKQAVSIERAHNSNALPLDGLLPQRNGKISSLSVADEEWYPFLLYSPGLSNSNPKPALTSGTEELKPNYVNGPRVEIGDNPVIPNGTVAEWFAGEAKVEREEGELSPTGDFEEDNYAVHGENDMEALSKSKENDATADDASAPRSSDGSGNTSHNGDVSGTDSGDGEDCYREDDIDHNKVESEGEAEEGMSDGHDDTEGDMPVLSISVKNLLHVKPLAKYVPPALYDKDNDDSRKNSQVFYGNDSFYVLFRLHQILYDRILSAKINSSSPDRKWKTSNPTNPADSYARIMDALYNLLDGTSDNSKFEDDCRAIIGTQSYVLFTLDKLIYKLIKHSSHMIQLTNVILQLQAVAADEMDNKLQQLYAYEKSRKPEKFLDAVYYENALVLLPDEDIYRIECEQSTPSKLSIQLLDYGHDKPDVTSISMDPTFAAYLHNVFLSYQPNAKENPRIYLKRNKRKNGGDDELCTTDEVKIINGLECKITCSSSKVSYVLDTEDVLHRAKRRKLLNQSGLPLAHDSVCSGSLIRQRRTQRYQKLLTGQ

SEQ ID NO: 74100 - protein, 1347 aa, Arabidopsis thaliana
  peptide (1)..(1347): Ceres Seq. ID no. 4993912
MKDFKAQRVDTTGVILRVKELFKGNRELILGFNTFLPKGFEITLRPEDDQPAAPKKPVEFEEAISFVNKIKTRFQGDDRVYKSFLDILNMYRKENKSITEVYHEVAILFRDHHDLLGEFTHFLPDTSATASTNDSVKVPVRDRGIKSLPTMRQIDLDKKDRIITSHPNRALKTENMDVDHERSLLKDSKEEVRRIDKKNDFMDDRDRKDYRGLDHDSHKEHFFNSKKKLIRKDDDSAEMSDQAREGDKFSGAIPSSSTYDEKGFIIDFLESHSQELAFVDRVKAKLDTADNQEFLRCLNLYSKEIISQPELQSLVSDLIGVYPDLMDAFKVFLAQCDKNDGLLSGIVSKSKSSTFYNILLTYLFGQSLWSEGKCPQPTKSLDKDTDREREKIERYRERDREKERLEKVAASQKWAKPISELDLSNCEQCTPSYRRLPKNLNVHTYFVLLQYPIPIASQKMEIGSQVLNDHWVSVTSGSEDYSFKHMRKNQYEESLFKCEDDRFELDMLLESVISATNRVEELLAKINSNELKTDTPICIEDHLTALNLRCIERLYSDHGLDVLDLLKKNAYLALPVILTRLKQKQEEWARCRTEFNKVWADIYTKNYHRSLDHRSFYFKQQDSKNLSTKALLAEIKEISEKKRGEDDALLALAAGNRRTISSNMSFDYPDPDLHEDLYQLIKYSCGEMCSTEQLDKVMKVWTEFLEPIFGVPSRPQGAEDREDAVKSTNHDREDQEDAVSPQNGASIANSMRSNGPRKVNESNQVRQASELDKDVTSSKTSDALLSCDNTQNDKMPKNLTTPDERAETKQAVSIERAHNSNALPLDGLLPQRNGKISSLSVADEEWYPFLLYSPGLSNSNPKPALTSGTEELKPNYVNGPRVEIGDNPVIPNGTVAEWFAGEAKVEREEGELSPTGDFEEDNYAVHGENDMEALSKSKENDATADDASAPRSSDGSGNTSHNGDVSGTDSGDGEDCYREDDIDHNKVESEGEAEEGMSDGHDDTEGDMPVLSISVKNLLHVKPLAKYVPPALYDKDNDDSRKNSQVFYGNDSFYVLFRLHQILYDRILSAKINSSSPDRKWKTSNPTNPADSYARIMDALYNLLDGTSDNSKFEDDCRAIIGTQSYVLFTLDKLIYKLIKHSSHMIQLTNVILQLQAVAADEMDNKLQQLYAYEKSRKPEKFLDAVYYENALVLLPDEDIYRIECEQSTPSKLSIQLLDYGHDKPDVTSISMDPTFAAYLHNVFLSYQPNAKENPRIYLKRNKRKNGGDDELCTTDEVKIINGLECKITCSSSKVSYVLDTEDVLHRAKRRKLLNQSGLPLAHDSVCSGSLIRQRRTQRYQKLLTGQ

SEQ ID NO: 74101 - protein, 1258 aa, Arabidopsis thaliana
  peptide (1)..(1258): Ceres Seq. ID no. 4993913
MYRKENKSITEVYHEVAILFRDHHDLLGEFTHFLPDTSATASTNDSVKVPVRDRGIKSLPTMRQIDLDKKDRIITSHPNRALKTENMDVDHERSLLKDSKEEVRRIDKKNDFMDDRDRKDYRGLDHDSHKEHFFNSKKKLIRKDDDSAEMSDQAREGDKFSGAIPSSSTYDEKGFIIDFLESHSQELAFVDRVKAKLDTADNQEFLRCLNLYSKEIISQPELQSLVSDLIGVYPDLMDAFKVFLAQCDKNDGLLSGIVSKSKSSTFYNILLTYLFGQSLWSEGKCPQPTKSLDKDTDREREKIERYRERDREKERLEKVAASQKWAKPISELDLSNCEQCTPSYRRLPKNLNVHTYFVLLQYPIPIASQKMEIGSQVLNDHWVSVTSGSEDYSFKHMRKNQYEESLFKCEDDRFELDMLLESVISATNRVEELLAKINSNELKTDTPICIEDHLTALNLRCIERLYSDHGLDVLDLLKKNAYLALPVILTRLKQKQEEWARCRTEFNKVWADIYTKNYHRSLDHRSFYFKQQDSKNLSTKALLAEIKEISEKKRGEDDALLALAAGNRRTISSNMSFDYPDPDLHEDLYQLIKYSCGEMCSTEQLDKVMKVWTEFLEPIFGVPSRPQGAEDREDAVKSTNHDREDQEDAVSPQNGASIANSMRSNGPRKVNESNQVRQASELDKDVTSSKTSDALLSCDNTQNDKMPKNLTTPDERAETKQAVSIERAHNSNALPLDGLLPQRNGKISSLSVADEEWYPFLLYSPGLSNSNPKPALTSGTEELKPNYVNGPRVEIGDNPVIPNGTVAEWFAGEAKVEREEGELSPTGDFEEDNYAVHGENDMEALSKSKENDATADDASAPRSSDGSGNTSHNGDVSGTDSGDGEDCYREDDIDHNKVESEGEAEEGMSDGHDDTEGDMPVLSISVKNLLHVKPLAKYVPPALYDKDNDDSRKNSQVFYGNDSFYVLFRLHQILYDRILSAKINSSSPDRKWKTSNPTNPADSYARIMDALYNLLDGTSDNSKFEDDCRAIIGTQSYVLFTLDKLIYKLIKHSSHMIQLTNVILQLQAVAADEMDNKLQQLYAYEKSRKPEKFLDAVYYENALVLLPDEDIYRIECEQSTPSKLSIQLLDYGHDKPDVTSISMDPTFAAYLHNVFLSYQPNAKENPRIYLKRNKRKNGGDDELCTTDEVKIINGLECKITCSSSKVSYVLDTEDVLHRAKRRKLLNQSGLPLAHDSVCSGSLIRQRRTQRYQKLLTGQ

SEQ ID NO: 74102 - DNA, 471 bp, Arabidopsis thaliana
  misc_feature (1)..(471): Ceres Seq. ID no. 4994080
  misc_feature (1)..(471): Ortholog of  Ceres SEQ ID NO 12612272 as cited in SEQ ID NO 55946
  misc_feature (1)..(471): Ortholog of  Ceres SEQ ID NO 15169960 as cited in SEQ ID NO 57591
atgtctctagttccgagcttttttggaggccgaagaacaaacgtgttcgacccattttcactagacgtatgggatccgttcgaaggattcttgacgcccgggttgacaaacgcacctgccaaggacgtggcagcgttcacaaacgctaaagtggactggagggagacacctgaagcgcatgtgttcaaggcggacgtgcctgggcttaagaaggaagaggtgaaggtggaggttgaagatggtaacatacttcagataagcggtgagaggagcagtgagaatgaagagaagagtgacacatggcaccgtgtggagcggtcaagtgggaagttcatgaggaggtttcggttgccagagaatgcaaaggtggaggaagtaaaggcgagtatggagaatggggtgttgtcggttacggtgccgaaagttcaggagagtaagccggaggtcaagtccgttgatatctctggttaa

SEQ ID NO: 74103 - protein, 156 aa, Arabidopsis thaliana
  peptide (1)..(156): Ceres Seq. ID no. 4994081
MSLVPSFFGGRRTNVFDPFSLDVWDPFEGFLTPGLTNAPAKDVAAFTNAKVDWRETPEAHVFKADVPGLKKEEVKVEVEDGNILQISGERSSENEEKSDTWHRVERSSGKFMRRFRLPENAKVEEVKASMENGVLSVTVPKVQESKPEVKSVDISG

SEQ ID NO: 74104 - DNA, 2148 bp, Arabidopsis thaliana
  misc_feature (1)..(2148): Ceres Seq. ID no. 4994142
  misc_feature (1)..(2148): Ortholog of  Ceres SEQ ID NO 13655640 as cited in SEQ ID NO 63844
atgtctctctttctctccttcttcatttcaatcttgctctgtttcttcaatggagctacgacgacacagtttgatttctccacgctagccataagcaacctcaaactcctcggtgatgcacgtttaagcaatggaatcgttggcctcacacgtgacctctctgtacctaattccggcgccggaaaagtcttatactctaacccaatcagattccgacaacctggaactcactttccgacaagcttctcttcttttttctccttctctataaccaatgtcaacccttcttccatcggcggtggtctcgctttcgtcatctctcccgacgcaaactcaatcggcatcgctggtggctctcttggtctaaccggtccaaacggttccggttcaaaatttgtcgccgtcgaattcgatactttaatggatgtagatttcaaggacattaacagtaaccatgttggattcgacgtaaatggcgtagtttcctctgtttccggtgatcttggcaccgtaaacatcgatctcaagagcggcaacaccatcaattcatggatcgaatacgacggattgactcgggtcttcaacgtatcagtctcttactcaaatctgaaaccgaaagttccaattttgtctttccctctcgatttagatcgatacgtgaacgatttcatgttcgttggattctccgggtcaactcagggaagtacagagattcacagtatcgaatggtggagcttcagttcatcattcgggtcgagtctcggatccggatccgggtcacctcctcctcgggctaatttgatgaatccgaaagctaattcggtgaaatctccgccgccgttggcgtcacaaccgtcgtcttcagcgattccgatctcaagcaacactcaattaaaaacttcgtcgtcgtcgtcttgccacagccgtttctgcaaagagaatcccggaacaatcgccggagtagtaaccgccggagctttcttcttagcactattcgccggagctttattctgggtttactccaaaaagttcaaacgtgtcgagagatctgattcattcgcatctgaaatcatcaaagctccgaaagagttcagctataaagaactcaaagccggcacaaagaacttcaacgagagtcgtatcatcggacatggagccttcggagtcgtatacagaggaatattaccggagaccggagacatcgtcgccgtcaaacgatgcagccatagctcacaagacaaaaagaacgagtttttatctgaactatcaataatcggaagcttaagacacagaaacctcgtgagattacaaggatggtgtcacgagaaaggtgagattttgttagtctacgatctaatgcctaatggttcgcttgataaagctttgtttgagtcacgattcacgttaccgtgggatcatcggaaaaagatcttgcttggtgttgcatctgctttagcttatttacatagagagtgtgagaatcaggtgattcatagagatgttaagagtagtaatataatgttagatgagagttttaatgccaagcttggagatttcggattggcgagacagattgagcatgataagtcgccggaagcaactgttgccgccgggacgatgggatatttagcgccggagtatcttctgacgggtcgtgcttcggagaagacggatgtgtttagttacggagcggtggttttggaagtggttagtggaagaagaccgattgagaaggacttaaatgtgcaaagacataatgttggggtgaatccgaatttagtagaatgggtgtggggtttgtataaagaagggaaagtttctgcagctgctgattctaggcttgaaggtaagtttgatgaaggtgagatgtggcgggtcttggttgtgggcttggcttgttcgcatccggatccagcatttaggcccactatgaggtcagtggtgcaaatgctgattggtgaggctgatgtaccggttgtgcctaagtctagacccaccatgagttttagcacttcgcatttgttgctgagtttgcaagatactctctctgattgtaataccgtggctttgaactctagtcgatcgtcttcgtggtcggtgcccgaacataacgttatcattcgaagcgacgatgaccatttggtatag

SEQ ID NO: 74105 - protein, 715 aa, Arabidopsis thaliana
  peptide (1)..(715): Ceres Seq. ID no. 4994143
MSLFLSFFISILLCFFNGATTTQFDFSTLAISNLKLLGDARLSNGIVGLTRDLSVPNSGAGKVLYSNPIRFRQPGTHFPTSFSSFFSFSITNVNPSSIGGGLAFVISPDANSIGIAGGSLGLTGPNGSGSKFVAVEFDTLMDVDFKDINSNHVGFDVNGVVSSVSGDLGTVNIDLKSGNTINSWIEYDGLTRVFNVSVSYSNLKPKVPILSFPLDLDRYVNDFMFVGFSGSTQGSTEIHSIEWWSFSSSFGSSLGSGSGSPPPRANLMNPKANSVKSPPPLASQPSSSAIPISSNTQLKTSSSSSCHSRFCKENPGTIAGVVTAGAFFLALFAGALFWVYSKKFKRVERSDSFASEIIKAPKEFSYKELKAGTKNFNESRIIGHGAFGVVYRGILPETGDIVAVKRCSHSSQDKKNEFLSELSIIGSLRHRNLVRLQGWCHEKGEILLVYDLMPNGSLDKALFESRFTLPWDHRKKILLGVASALAYLHRECENQVIHRDVKSSNIMLDESFNAKLGDFGLARQIEHDKSPEATVAAGTMGYLAPEYLLTGRASEKTDVFSYGAVVLEVVSGRRPIEKDLNVQRHNVGVNPNLVEWVWGLYKEGKVSAAADSRLEGKFDEGEMWRVLVVGLACSHPDPAFRPTMRSVVQMLIGEADVPVVPKSRPTMSFSTSHLLLSLQDTLSDCNTVALNSSRSSSWSVPEHNVIIRSDDDHLV

SEQ ID NO: 74106 - protein, 575 aa, Arabidopsis thaliana
  peptide (1)..(575): Ceres Seq. ID no. 4994144
MDVDFKDINSNHVGFDVNGVVSSVSGDLGTVNIDLKSGNTINSWIEYDGLTRVFNVSVSYSNLKPKVPILSFPLDLDRYVNDFMFVGFSGSTQGSTEIHSIEWWSFSSSFGSSLGSGSGSPPPRANLMNPKANSVKSPPPLASQPSSSAIPISSNTQLKTSSSSSCHSRFCKENPGTIAGVVTAGAFFLALFAGALFWVYSKKFKRVERSDSFASEIIKAPKEFSYKELKAGTKNFNESRIIGHGAFGVVYRGILPETGDIVAVKRCSHSSQDKKNEFLSELSIIGSLRHRNLVRLQGWCHEKGEILLVYDLMPNGSLDKALFESRFTLPWDHRKKILLGVASALAYLHRECENQVIHRDVKSSNIMLDESFNAKLGDFGLARQIEHDKSPEATVAAGTMGYLAPEYLLTGRASEKTDVFSYGAVVLEVVSGRRPIEKDLNVQRHNVGVNPNLVEWVWGLYKEGKVSAAADSRLEGKFDEGEMWRVLVVGLACSHPDPAFRPTMRSVVQMLIGEADVPVVPKSRPTMSFSTSHLLLSLQDTLSDCNTVALNSSRSSSWSVPEHNVIIRSDDDHLV

SEQ ID NO: 74107 - protein, 492 aa, Arabidopsis thaliana
  peptide (1)..(492): Ceres Seq. ID no. 4994145
MFVGFSGSTQGSTEIHSIEWWSFSSSFGSSLGSGSGSPPPRANLMNPKANSVKSPPPLASQPSSSAIPISSNTQLKTSSSSSCHSRFCKENPGTIAGVVTAGAFFLALFAGALFWVYSKKFKRVERSDSFASEIIKAPKEFSYKELKAGTKNFNESRIIGHGAFGVVYRGILPETGDIVAVKRCSHSSQDKKNEFLSELSIIGSLRHRNLVRLQGWCHEKGEILLVYDLMPNGSLDKALFESRFTLPWDHRKKILLGVASALAYLHRECENQVIHRDVKSSNIMLDESFNAKLGDFGLARQIEHDKSPEATVAAGTMGYLAPEYLLTGRASEKTDVFSYGAVVLEVVSGRRPIEKDLNVQRHNVGVNPNLVEWVWGLYKEGKVSAAADSRLEGKFDEGEMWRVLVVGLACSHPDPAFRPTMRSVVQMLIGEADVPVVPKSRPTMSFSTSHLLLSLQDTLSDCNTVALNSSRSSSWSVPEHNVIIRSDDDHLV

SEQ ID NO: 74108 - DNA, 876 bp, Arabidopsis thaliana
  misc_feature (1)..(876): Ceres Seq. ID no. 4994207
  misc_feature (1)..(876): Ortholog of  Ceres SEQ ID NO 13654989 as cited in SEQ ID NO 63117
  misc_feature (1)..(876): Ortholog of  Ceres SEQ ID NO 13655640 as cited in SEQ ID NO 63844
  misc_feature (1)..(876): Ortholog of  Ceres SEQ ID NO 13584744 as cited in SEQ ID NO 69137
atgacaagtaactttcaaagagctcttggtgaaggaggctttggcattgtctatcatggttatttgaatggttcagaggaagtagccgttaaagttgaacttctactgagagttcaccacacgaacttggtaagccttgtcgggtattgcgatgaacgaggtcacttggctctcatctacgaatatatgtccaacgtagacttaaaacatcacttgtcaggaaagcatgatgtctctattttgaagtggagtactcgattaagaatagccattgatgccgcactaggattggaatacttacatattggttgtcgaccatcaatggtacatagagatgtcaaaagtacaaatatattgttggacgatcaatttactgccaaaattgcggattttgggctttcaagatctttccaactcggagatgaatctcatatttcaacagttgttgctggtactcctggataccttgatcctgaaacgggtcggttggctgagatgagcgatgtctacagcttcgggattgtgttattggagatgatgacaaaccaacgtgtgattgaccaaaaccgtgaaaagcgacacataacagaatgggtagctttagtgcttaacagaggagacattaccaagatcatggatcctaatctttacggcgattacaactcaaattctgtttggaaagctcttgaattggctatgtcatgtgcaaacccatcttccgaaaaacgaccaagcatgtcccaagttatcagcgtactaaaagagtgtcttacttctgaaaacttgatgagaaataagaatcatgacatggaatccgatagttcccttgaactgaccaagagctttgatacagaagttgtccctcgtgctaggtag

SEQ ID NO: 74109 - protein, 291 aa, Arabidopsis thaliana
  peptide (1)..(291): Ceres Seq. ID no. 4994208
MTSNFQRALGEGGFGIVYHGYLNGSEEVAVKVELLLRVHHTNLVSLVGYCDERGHLALIYEYMSNVDLKHHLSGKHDVSILKWSTRLRIAIDAALGLEYLHIGCRPSMVHRDVKSTNILLDDQFTAKIADFGLSRSFQLGDESHISTVVAGTPGYLDPETGRLAEMSDVYSFGIVLLEMMTNQRVIDQNREKRHITEWVALVLNRGDITKIMDPNLYGDYNSNSVWKALELAMSCANPSSEKRPSMSQVISVLKECLTSENLMRNKNHDMESDSSLELTKSFDTEVVPRAR

SEQ ID NO: 74110 - protein, 229 aa, Arabidopsis thaliana
  peptide (1)..(229): Ceres Seq. ID no. 4994209
MSNVDLKHHLSGKHDVSILKWSTRLRIAIDAALGLEYLHIGCRPSMVHRDVKSTNILLDDQFTAKIADFGLSRSFQLGDESHISTVVAGTPGYLDPETGRLAEMSDVYSFGIVLLEMMTNQRVIDQNREKRHITEWVALVLNRGDITKIMDPNLYGDYNSNSVWKALELAMSCANPSSEKRPSMSQVISVLKECLTSENLMRNKNHDMESDSSLELTKSFDTEVVPRAR

SEQ ID NO: 74111 - protein, 184 aa, Arabidopsis thaliana
  peptide (1)..(184): Ceres Seq. ID no. 4994210
MVHRDVKSTNILLDDQFTAKIADFGLSRSFQLGDESHISTVVAGTPGYLDPETGRLAEMSDVYSFGIVLLEMMTNQRVIDQNREKRHITEWVALVLNRGDITKIMDPNLYGDYNSNSVWKALELAMSCANPSSEKRPSMSQVISVLKECLTSENLMRNKNHDMESDSSLELTKSFDTEVVPRAR

SEQ ID NO: 74112 - DNA, 1707 bp, Arabidopsis thaliana
  misc_feature (1)..(1707): Ceres Seq. ID no. 4994249
  misc_feature (1)..(1707): Ortholog of  Ceres SEQ ID NO 12582623 as cited in SEQ ID NO 51147
atggatcagctcgttaacttcatcattcgacctccaagagctgagtatgacccggaacatgatctcttggaaaagaagtttatgatgaaaggtagatggtatcagagaaaagatttagaggttaaaaacagtaggggagatgttctccagtgtagtcattatatgccagttgaacgccctgaaggaaagcctttaccctgtgtaatatactgccacggaaacagagcggatggtagtgaagccgcaattgtgttgctgccttcgaacatcacagtttttacccttgacttttcgggatcgggtctctcaggcggggaacatgtcaccttaggctggaacgaaaaggatgatctgaaggctgtggttgagtttttgcggcaggatggaaacatatccttgattgggctatgggggcggtcaatgggtgctgttactagcttgatgtatggagtcgaggatccttcgattgcaggaatgattctagacagccccttctccgatttagttgatctgatgatggaacttgttgatacatataagtttcgtctgccaaagtttactgtaaaatttgctatacagtttatgcggagagctattcagaaaaaagcaaagtttgatataatggaattgaacaccattaaggtcggtcctctacctgtggcaaaggctagttttgttccggttttatttggacatgccttagatgatgactttatccgccctcatcattcagatcgtatatatgaagcttacgtaggtgacaaaaatatcatcaaatttccgggagaccacaactccccaaggcctccattctattttgattcgatcaatatctttttccataacgttcttcaacccccagaggtggtggggccgacattttatgacccattggatgattactttgcaaatggcagttggggaactatgaatgacacaaatattccacaatcctctgtacagaaaagtttagccgcaggtagcatctctgaggcaattaatgaagtccgcaagaaacgacccatgagtcgcacagatgttccttcaaatgtcacactcacatctaacggttctccatcagaaactaaggaaaaagagaatcctgatggccgtggcagttcatcgtctcctgatatgataagctttgatttgtcagacggcaatcaataccctcctcaccttaggatggctttagatgatgatcaatatgttgagtatcagatggaggacatggctgatttcccatctaatgcagaggaagaagaaagaatgcttatgaaagcggtgatggaatcgttgaaagacttggaagtgcaaagtcaacagaaaaaagaacctcctgagacgagaattcatggcggctctgcttttttaaatgcagttcaatgcatttcatccagggaagaatcaacttcaactcgagcaaatcaatcagagactgattctgcttccagtccagtaacacgtagccaggatcaactaccgtcatcttctgagtccaatcctcctagtgagacctcgagttctctggcgagaaccgtaacctcttctgttcccggctctttaagccagaaggaaagcgagactggtgacgtgccaggtacaaaggccaccgtgacagtggaacgtagtagtagtgcaccggggaaagtcttagacgggttaatacgcaggtgggatcttaactttttcaaaaacaacaaataa

SEQ ID NO: 74113 - protein, 568 aa, Arabidopsis thaliana
  peptide (1)..(568): Ceres Seq. ID no. 4994250
MDQLVNFIIRPPRAEYDPEHDLLEKKFMMKGRWYQRKDLEVKNSRGDVLQCSHYMPVERPEGKPLPCVIYCHGNRADGSEAAIVLLPSNITVFTLDFSGSGLSGGEHVTLGWNEKDDLKAVVEFLRQDGNISLIGLWGRSMGAVTSLMYGVEDPSIAGMILDSPFSDLVDLMMELVDTYKFRLPKFTVKFAIQFMRRAIQKKAKFDIMELNTIKVGPLPVAKASFVPVLFGHALDDDFIRPHHSDRIYEAYVGDKNIIKFPGDHNSPRPPFYFDSINIFFHNVLQPPEVVGPTFYDPLDDYFANGSWGTMNDTNIPQSSVQKSLAAGSISEAINEVRKKRPMSRTDVPSNVTLTSNGSPSETKEKENPDGRGSSSSPDMISFDLSDGNQYPPHLRMALDDDQYVEYQMEDMADFPSNAEEEERMLMKAVMESLKDLEVQSQQKKEPPETRIHGGSAFLNAVQCISSREESTSTRANQSETDSASSPVTRSQDQLPSSSESNPPSETSSSLARTVTSSVPGSLSQKESETGDVPGTKATVTVERSSSAPGKVLDGLIRRWDLNFFKNNK

SEQ ID NO: 74114 - protein, 541 aa, Arabidopsis thaliana
  peptide (1)..(541): Ceres Seq. ID no. 4994251
MMKGRWYQRKDLEVKNSRGDVLQCSHYMPVERPEGKPLPCVIYCHGNRADGSEAAIVLLPSNITVFTLDFSGSGLSGGEHVTLGWNEKDDLKAVVEFLRQDGNISLIGLWGRSMGAVTSLMYGVEDPSIAGMILDSPFSDLVDLMMELVDTYKFRLPKFTVKFAIQFMRRAIQKKAKFDIMELNTIKVGPLPVAKASFVPVLFGHALDDDFIRPHHSDRIYEAYVGDKNIIKFPGDHNSPRPPFYFDSINIFFHNVLQPPEVVGPTFYDPLDDYFANGSWGTMNDTNIPQSSVQKSLAAGSISEAINEVRKKRPMSRTDVPSNVTLTSNGSPSETKEKENPDGRGSSSSPDMISFDLSDGNQYPPHLRMALDDDQYVEYQMEDMADFPSNAEEEERMLMKAVMESLKDLEVQSQQKKEPPETRIHGGSAFLNAVQCISSREESTSTRANQSETDSASSPVTRSQDQLPSSSESNPPSETSSSLARTVTSSVPGSLSQKESETGDVPGTKATVTVERSSSAPGKVLDGLIRRWDLNFFKNNK

SEQ ID NO: 74115 - protein, 540 aa, Arabidopsis thaliana
  peptide (1)..(540): Ceres Seq. ID no. 4994252
MKGRWYQRKDLEVKNSRGDVLQCSHYMPVERPEGKPLPCVIYCHGNRADGSEAAIVLLPSNITVFTLDFSGSGLSGGEHVTLGWNEKDDLKAVVEFLRQDGNISLIGLWGRSMGAVTSLMYGVEDPSIAGMILDSPFSDLVDLMMELVDTYKFRLPKFTVKFAIQFMRRAIQKKAKFDIMELNTIKVGPLPVAKASFVPVLFGHALDDDFIRPHHSDRIYEAYVGDKNIIKFPGDHNSPRPPFYFDSINIFFHNVLQPPEVVGPTFYDPLDDYFANGSWGTMNDTNIPQSSVQKSLAAGSISEAINEVRKKRPMSRTDVPSNVTLTSNGSPSETKEKENPDGRGSSSSPDMISFDLSDGNQYPPHLRMALDDDQYVEYQMEDMADFPSNAEEEERMLMKAVMESLKDLEVQSQQKKEPPETRIHGGSAFLNAVQCISSREESTSTRANQSETDSASSPVTRSQDQLPSSSESNPPSETSSSLARTVTSSVPGSLSQKESETGDVPGTKATVTVERSSSAPGKVLDGLIRRWDLNFFKNNK

SEQ ID NO: 74116 - DNA, 1452 bp, Arabidopsis thaliana
  misc_feature (1)..(1452): Ceres Seq. ID no. 4994304
  misc_feature (1)..(1452): Ortholog of  Ceres SEQ ID NO 13599900 as cited in SEQ ID NO 531
  misc_feature (1)..(1452): Ortholog of  Ceres SEQ ID NO 13659971 as cited in SEQ ID NO 67565
  misc_feature (1)..(1452): Ortholog of  Ceres SEQ ID NO 13500385 as cited in SEQ ID NO 67583
atggacaaggaatttgattcaaagcttactcttcaagggaattcatcttcaaatggtgaaactatttccagaagcaaaagcttcgcctttaaggctcctcaggagaatttcacttaccatgatttcgagctcggcaagatctatggcgttggctcttattctaaggttgttagggcgaagaagaaggataatggaactgtgtatgccttgaagatcatggacaaaaagtttatcaccaaggagaataaaacagcttatgtcaaattggagaggattgttcttgatcaactcgaacatcccgggattgtgaaactcttctttacgtttcaggatacacaatcactatacatggcgcttgagtcttgtgaaggtggggaacttttcgaccaaatcaccagaaaaggtcgtctatctgaggatgaagctcggttctacagtgcagaagttgttgatgctcttgagtatatacataatatgggactgatacatcgagatattaagccggagaatctgttgttaactttagatgggcacataaagattgctgattttggtagcgtaaagccaatgcaagacagccaaatcacagtgcttcctaatgcggcttctgatgataaggcgtgcacttttgtcgggacggctgcatatgttcctcctgaagttctaaactcctctccagcaacgttcggaaatgatctctgggcactcggctgcactctgtaccaaatgctttcaggaacttccccattcaaggatgcaagtgaatggctgattttccaaagaattatagctagagatataaagtttccaaatcatttctcagaagcagcaagagacctcatcgaccgattgctagatacagatcctagtagaagaccaggagctggatcagaaggttatgattctctcaagagacatcctttcttcaagggagttgactggaagaacctaaggtcacaaactcctccaaaactagctccagatcctgcgtctcaatcagcatctcctgagagggacggttctccatggaatccaacacatgttggagatacctcagtcttgcagaacgatggacacaatggactctctgaatcctcaggttccataactcggcttgcctccatagactctttcgattcaagatggcaacagtttctagaaccgggagaatcggttctaatgatatcagcagtgaagaagctacagaaaatcacaagtaagaaggtgcagctaatactcaccaacaaaccaagactgatatacgttgacccatcaaagcttgtagtaaaagggaatattatctggtctgataactccaacgacctcaacgttcaagtctcaagtccttcccatttcaagatttgcacaccgaagaaagttttatcgtttgaagatgcgaagcaaagagctttgcagtggaaaaaggcaatcgaaactcttcaaaaccgttga

SEQ ID NO: 74117 - protein, 483 aa, Arabidopsis thaliana; identical to SEQ ID NO: 49134
  peptide (1)..(483): Ceres Seq. ID no. 4994305

SEQ ID NO: 74118 - protein, 411 aa, Arabidopsis thaliana; identical to SEQ ID NO: 49135
  peptide (1)..(411): Ceres Seq. ID no. 4994306

SEQ ID NO: 74119 - protein, 367 aa, Arabidopsis thaliana
  peptide (1)..(367): Ceres Seq. ID no. 4994307
MALESCEGGELFDQITRKGRLSEDEARFYSAEVVDALEYIHNMGLIHRDIKPENLLLTLDGHIKIADFGSVKPMQDSQITVLPNAASDDKACTFVGTAAYVPPEVLNSSPATFGNDLWALGCTLYQMLSGTSPFKDASEWLIFQRIIARDIKFPNHFSEAARDLIDRLLDTDPSRRPGAGSEGYDSLKRHPFFKGVDWKNLRSQTPPKLAPDPASQSASPERDGSPWNPTHVGDTSVLQNDGHNGLSESSGSITRLASIDSFDSRWQQFLEPGESVLMISAVKKLQKITSKKVQLILTNKPRLIYVDPSKLVVKGNIIWSDNSNDLNVQVSSPSHFKICTPKKVLSFEDAKQRALQWKKAIETLQNR

SEQ ID NO: 74120 - DNA, 1566 bp, Arabidopsis thaliana
  misc_feature (1)..(1566): Ceres Seq. ID no. 4994409
  misc_feature (1)..(1566): Ortholog of  Ceres SEQ ID NO 14311055 as cited in SEQ ID NO 53705
atgataaaacagagcaataagaagaaaaagaatcacaagaacagtagaatcatcatcgaggttgaagattttccaggtgggtcagatgggttcgacttggttttaagattctgttatggtggaggaatctcgatagatgtctcaaatgtgtccattttgcattgctcttctgtcttccttgagatgacagagaaactctgttcctcgaatctcttgcttcgaacagagaagtttctagaaggaatgttctactggtcctggaacgacatcgtattgtgtctcaagagctgcgagcaagtgttcttacacgctgattcttacggtcttgttgataagcttgttttcggggttttagccaaaatccctcagaattcagacgtgagtcatgtcttttcatcatcctctccgtcttcctctgcctctgcctcagcctcctctcagtcgccggagacggcaatgattaggtcgtattcagacaaaaggtctacttcgaggtctttttcttgcaggacaagtaacgagtggtggttcgacgatatgtcaattctcgggccaaaaatcattgaaaagctgataaatacacttggtgcgcatgataagaacaatgacagcttggtcctcacaaaatttcttctccattacctcaagacaaaggtcccaaacaagtcaaccaacaagctcgagtattcaggtttagctgatacagcggttcaaggagtggttttcgcagcgaaaaccgcgttttcatgcagaaaaatgttctgggttctgcgagttttatcgggatttagcataagtaaagaatcaagaattggtttagagagggttataggagaaatgctggatcaagcaacacttgatgatcttctgataccagctggaggaaaaggagaaaaaggggtttacgatgtggatttggtgataagattactcaaagtgtttgtaagaattggaaacacagaagaaggagatcagaatttgagaatgagaagaattgggaagttgattgataagtatctcagagagatatctccagaccagaatcttaaagtgtcaaagtttcttgaagttgcagagagtttgccagattcagctagagattggtttgatggattatacagagccattaacatctatcttgagtctcatccgaaactatcatccgaggatagaacaaaactatgtcgatgtctaaactacaagaaattgacattggacacatgcaaacaacttgcaaaaaatcccaagatccctccaaatattgcagttcaagcactcaagtcacaacaattatcaaacgagactcgaccacactcaagagaggacaagaacaaagtaaacaagatctggaattcacgtaagtacttagaagagaaaccaatactggtgtgtttgaaaggttttgatatgtcggagaagtttgaagatgatctaatgatgaatttggagaggaagcaatggaataattctgaaaaagttagtaaggagaagaagagtgaagtaatgtcaagatctgtgagacatggacatacacattcaagttctagttttccaaggctttgttaa

SEQ ID NO: 74121 - protein, 521 aa, Arabidopsis thaliana
  peptide (1)..(521): Ceres Seq. ID no. 4994410
MIKQSNKKKKNHKNSRIIIEVEDFPGGSDGFDLVLRFCYGGGISIDVSNVSILHCSSVFLEMTEKLCSSNLLLRTEKFLEGMFYWSWNDIVLCLKSCEQVFLHADSYGLVDKLVFGVLAKIPQNSDVSHVFSSSSPSSSASASASSQSPETAMIRSYSDKRSTSRSFSCRTSNEWWFDDMSILGPKIIEKLINTLGAHDKNNDSLVLTKFLLHYLKTKVPNKSTNKLEYSGLADTAVQGVVFAAKTAFSCRKMFWVLRVLSGFSISKESRIGLERVIGEMLDQATLDDLLIPAGGKGEKGVYDVDLVIRLLKVFVRIGNTEEGDQNLRMRRIGKLIDKYLREISPDQNLKVSKFLEVAESLPDSARDWFDGLYRAINIYLESHPKLSSEDRTKLCRCLNYKKLTLDTCKQLAKNPKIPPNIAVQALKSQQLSNETRPHSREDKNKVNKIWNSRKYLEEKPILVCLKGFDMSEKFEDDLMMNLERKQWNNSEKVSKEKKSEVMSRSVRHGHTHSSSSFPRLC

SEQ ID NO: 74122 - protein, 460 aa, Arabidopsis thaliana
  peptide (1)..(460): Ceres Seq. ID no. 4994411
MTEKLCSSNLLLRTEKFLEGMFYWSWNDIVLCLKSCEQVFLHADSYGLVDKLVFGVLAKIPQNSDVSHVFSSSSPSSSASASASSQSPETAMIRSYSDKRSTSRSFSCRTSNEWWFDDMSILGPKIIEKLINTLGAHDKNNDSLVLTKFLLHYLKTKVPNKSTNKLEYSGLADTAVQGVVFAAKTAFSCRKMFWVLRVLSGFSISKESRIGLERVIGEMLDQATLDDLLIPAGGKGEKGVYDVDLVIRLLKVFVRIGNTEEGDQNLRMRRIGKLIDKYLREISPDQNLKVSKFLEVAESLPDSARDWFDGLYRAINIYLESHPKLSSEDRTKLCRCLNYKKLTLDTCKQLAKNPKIPPNIAVQALKSQQLSNETRPHSREDKNKVNKIWNSRKYLEEKPILVCLKGFDMSEKFEDDLMMNLERKQWNNSEKVSKEKKSEVMSRSVRHGHTHSSSSFPRLC

SEQ ID NO: 74123 - protein, 440 aa, Arabidopsis thaliana
  peptide (1)..(440): Ceres Seq. ID no. 4994412
MFYWSWNDIVLCLKSCEQVFLHADSYGLVDKLVFGVLAKIPQNSDVSHVFSSSSPSSSASASASSQSPETAMIRSYSDKRSTSRSFSCRTSNEWWFDDMSILGPKIIEKLINTLGAHDKNNDSLVLTKFLLHYLKTKVPNKSTNKLEYSGLADTAVQGVVFAAKTAFSCRKMFWVLRVLSGFSISKESRIGLERVIGEMLDQATLDDLLIPAGGKGEKGVYDVDLVIRLLKVFVRIGNTEEGDQNLRMRRIGKLIDKYLREISPDQNLKVSKFLEVAESLPDSARDWFDGLYRAINIYLESHPKLSSEDRTKLCRCLNYKKLTLDTCKQLAKNPKIPPNIAVQALKSQQLSNETRPHSREDKNKVNKIWNSRKYLEEKPILVCLKGFDMSEKFEDDLMMNLERKQWNNSEKVSKEKKSEVMSRSVRHGHTHSSSSFPRLC

SEQ ID NO: 74124 - DNA, 3483 bp, Arabidopsis thaliana
  misc_feature (1)..(3483): Ceres Seq. ID no. 4994477
  misc_feature (1)..(3483): Ortholog of  Ceres SEQ ID NO 14309166 as cited in SEQ ID NO 0
atgggggtttctcttcgtcacttgtctccttcctctttctgggtttcgcgtcgtcctcgtgtttcttcttcaattctttcttttcttgtccctcgccgtcgaatcctttgcaccaggaaagtagcaatcataaagggaaatgcgggatattcgactgctactgattgtggtggttctcatgggtttcatcattcaggtcatcaaaggtcatcctctgttgagtttagtggagagtggaaacttaatttgggatctaagacggcgagaatggttccgccaactgtgaaacaagctggagctgtaagtgcttggagggaggaagtcaataataagttaagaggaagaaatagagaatatgctaacaaccaggatgatgcttttggtaatggcagttatattttaaaaggctttgtccccaaaatagatgatgtccattcttatggaaacggccagaactttgattacaatctgaagcctggaactgatattaccacacttggtagagaattgaatggctttatgcaaacgaatagtataagaggatcggtcgtagcattaccaagcaaggatattgaggttggggaaacaacagacgtgactctgaaacctcttaacagtgatacgactcttgacaatgccagctataagaaaacagcaaccatttccaaagtggaaaaatgcaccaacctatcgcaagtccgtgcaaacctcaagaaaatatacaatagagttcgtgttgttgataatgtgtctagtgcaaaggaaaccgtggctctgctcatgaatcaatataggaatcttgtccatgcttgcgatacagaggtattgggtcatgtgtttgctaatacattgttgttcacatggcctagaaatgcttatgttcttgacgtatccaggattgatgtgaagactgaaacacctgtagaccatggggagatgatttgtttcagtatctattgtggatcagaagcagattttggagatggtaaatcatgtatctgggtagatgtgcttggcgaaaatggaagggatatcctggctgagtttaagccatttttcgaagactcatccataaaaaaagtatggcataactacagctttgataaccacatcatcagaaattatggaatcaagctttctggttttcatggtgatacaatgcacatggcacgattgtgggattcatctagacggatatcgggtggttattcgcttgaagcacttacaagtgacccaaaagttcttgggggaactgagacaaaggaggaagcagaattatttggtaaaatatcaatgaagaagattttcggcaagggaaaattgaaaaaagatggatcagaaggaaaattggtgatcattcctcctgttaaagagctacaaatggaggatcgagaagcttggatttcgtactcagcgttggattcaataagcactctaaagctttatgagagcatgaagaagcaactgcaagcgaagaaatggtttcttgatggaaaactaatttcaaaaaagaacatgtttgatttctaccaagaatattggcaaccttttggtgaacttcttgccaaaatggaatcggaaggaatgcttgtagatagggattatttggcgcagattgagattgtagccaaagcagaacaagaaattgctgtttcgaggttccgtaattgggcttcaaagcattgtccagatgcaaagcatatgaatgttggcagtgacacgcaattgcgacaactcttttttggtggcatttctaacagttgtaatgatgaggatcttccatatgaaaaacttttcaaagttcccaatgtggataaggtgattgaagaaggaaaaaagagagccacaaaattccggaatatcaaactgcataggataagcgacagacctttgcccactgaaaagttcactgcctcaggctggccctctgttagtggagacaccttgaaagccttagctgggaaagtctctgcagaatatgactatatggagggcgttttagatacttgtctagaagaaaacattggagatgatgattgtatttcgctaccagatgaagttgtagaaacacaacacgtcaatacctctgttgaatcagacacatctgcttatggaacagcatttgatgcatttggagggggtgaaagtggaaaggaagcttgccatgctattgctgcattatgtgaagtttgctccattgattccttaatatcaaattttatccttcctttacagggaagtaacgtgtcaggaaaagatggtcgtgtccactgctccctgaatatcaacactgaaactggacgcttatcggctagaaggccaaatttgcagaaccaacctgcattggagaaagatcggtacaaaatccgtcaggccttcatagcatcacctggaaattcacttattgttgctgattatggacagctggaacttaggattctggcacatcttgctagttgcgaaagcatgaaggaagctttcatagctggtggagacttccactcaagaacagccatgaatatgtatcctcatattcgtgaagctgttgaaaatggtgaaagaagaaaagcaaagatgcttaacttctcgattgcgtatgggaagactgctattgggctgtctagagattggaaggtatcaagagaagaagctcaagatacagttaatctctggtataatgacagacaagaagtccggaaatggcaagaactacgcaagaaagaagctatacaaaaagggtatgtactcactttgttgggaagggctcgtaaattccctgaataccgttcacgtgcccaaaagaaccatatcgagcgagcagcaatcaacactcctgttcagggaagtgcggctgatgttgctatgtgcgctatgctggagatatcaaataatcaacggctaaaagagcttggttggaaattgcttctacaagttcatgatgaagtaatcttggaaggaccaagtgagtcagcggagaacgctaaagacatagttgtgaactgcatgtctgaacccttcaacggcaagaatattctctcagtcgacttatctgttgatgctaagtgtgctcagaactggcagtatcatggcttccatttcaccatgcatagctcttctgcgagtttattctcctctaccaccaaactcaacaacacttcttctaccccacttagcctctcctctcggtttcttggaactagggttgtgaatctcgggatcagacttatccgactcggaccctccaataggtcagagccactgcctcgtttaagttcggaaagaacggcgtcgatgctgagaatgctggaatctatggcagccagtcacgtgatgattttgacagagacgacgtcgaacagtattttaactacatggggatacttgcggtggaagtctcggagggagacaagcctaaaattgaagagcttctcaaacgctgactacacggttaaggatgctgacggcagaaccactcttgactga

SEQ ID NO: 74125 - protein, 1160 aa, Arabidopsis thaliana
  peptide (1)..(1160): Ceres Seq. ID no. 4994478
MGVSLRHLSPSSFWVSRRPRVSSSILSFLVPRRRILCTRKVAIIKGNAGYSTATDCGGSHGFHHSGHQRSSSVEFSGEWKLNLGSKTARMVPPTVKQAGAVSAWREEVNNKLRGRNREYANNQDDAFGNGSYILKGFVPKIDDVHSYGNGQNFDYNLKPGTDITTLGRELNGFMQTNSIRGSVVALPSKDIEVGETTDVTLKPLNSDTTLDNASYKKTATISKVEKCTNLSQVRANLKKIYNRVRVVDNVSSAKETVALLMNQYRNLVHACDTEVLGHVFANTLLFTWPRNAYVLDVSRIDVKTETPVDHGEMICFSIYCGSEADFGDGKSCIWVDVLGENGRDILAEFKPFFEDSSIKKVWHNYSFDNHIIRNYGIKLSGFHGDTMHMARLWDSSRRISGGYSLEALTSDPKVLGGTETKEEAELFGKISMKKIFGKGKLKKDGSEGKLVIIPPVKELQMEDREAWISYSALDSISTLKLYESMKKQLQAKKWFLDGKLISKKNMFDFYQEYWQPFGELLAKMESEGMLVDRDYLAQIEIVAKAEQEIAVSRFRNWASKHCPDAKHMNVGSDTQLRQLFFGGISNSCNDEDLPYEKLFKVPNVDKVIEEGKKRATKFRNIKLHRISDRPLPTEKFTASGWPSVSGDTLKALAGKVSAEYDYMEGVLDTCLEENIGDDDCISLPDEVVETQHVNTSVESDTSAYGTAFDAFGGGESGKEACHAIAALCEVCSIDSLISNFILPLQGSNVSGKDGRVHCSLNINTETGRLSARRPNLQNQPALEKDRYKIRQAFIASPGNSLIVADYGQLELRILAHLASCESMKEAFIAGGDFHSRTAMNMYPHIREAVENGERRKAKMLNFSIAYGKTAIGLSRDWKVSREEAQDTVNLWYNDRQEVRKWQELRKKEAIQKGYVLTLLGRARKFPEYRSRAQKNHIERAAINTPVQGSAADVAMCAMLEISNNQRLKELGWKLLLQVHDEVILEGPSESAENAKDIVVNCMSEPFNGKNILSVDLSVDAKCAQNWQYHGFHFTMHSSSASLFSSTTKLNNTSSTPLSLSSRFLGTRVVNLGIRLIRLGPSNRSEPLPRLSSERTASMLRMLESMAASHVMILTETTSNSILTTWGYLRWKSRRETSLKLKSFSNADYTVKDADGRTTLD

SEQ ID NO: 74126 - protein, 1071 aa, Arabidopsis thaliana
  peptide (1)..(1071): Ceres Seq. ID no. 4994479
MVPPTVKQAGAVSAWREEVNNKLRGRNREYANNQDDAFGNGSYILKGFVPKIDDVHSYGNGQNFDYNLKPGTDITTLGRELNGFMQTNSIRGSVVALPSKDIEVGETTDVTLKPLNSDTTLDNASYKKTATISKVEKCTNLSQVRANLKKIYNRVRVVDNVSSAKETVALLMNQYRNLVHACDTEVLGHVFANTLLFTWPRNAYVLDVSRIDVKTETPVDHGEMICFSIYCGSEADFGDGKSCIWVDVLGENGRDILAEFKPFFEDSSIKKVWHNYSFDNHIIRNYGIKLSGFHGDTMHMARLWDSSRRISGGYSLEALTSDPKVLGGTETKEEAELFGKISMKKIFGKGKLKKDGSEGKLVIIPPVKELQMEDREAWISYSALDSISTLKLYESMKKQLQAKKWFLDGKLISKKNMFDFYQEYWQPFGELLAKMESEGMLVDRDYLAQIEIVAKAEQEIAVSRFRNWASKHCPDAKHMNVGSDTQLRQLFFGGISNSCNDEDLPYEKLFKVPNVDKVIEEGKKRATKFRNIKLHRISDRPLPTEKFTASGWPSVSGDTLKALAGKVSAEYDYMEGVLDTCLEENIGDDDCISLPDEVVETQHVNTSVESDTSAYGTAFDAFGGGESGKEACHAIAALCEVCSIDSLISNFILPLQGSNVSGKDGRVHCSLNINTETGRLSARRPNLQNQPALEKDRYKIRQAFIASPGNSLIVADYGQLELRILAHLASCESMKEAFIAGGDFHSRTAMNMYPHIREAVENGERRKAKMLNFSIAYGKTAIGLSRDWKVSREEAQDTVNLWYNDRQEVRKWQELRKKEAIQKGYVLTLLGRARKFPEYRSRAQKNHIERAAINTPVQGSAADVAMCAMLEISNNQRLKELGWKLLLQVHDEVILEGPSESAENAKDIVVNCMSEPFNGKNILSVDLSVDAKCAQNWQYHGFHFTMHSSSASLFSSTTKLNNTSSTPLSLSSRFLGTRVVNLGIRLIRLGPSNRSEPLPRLSSERTASMLRMLESMAASHVMILTETTSNSILTTWGYLRWKSRRETSLKLKSFSNADYTVKDADGRTTLD

SEQ ID NO: 74127 - protein, 987 aa, Arabidopsis thaliana
  peptide (1)..(987): Ceres Seq. ID no. 4994480
MQTNSIRGSVVALPSKDIEVGETTDVTLKPLNSDTTLDNASYKKTATISKVEKCTNLSQVRANLKKIYNRVRVVDNVSSAKETVALLMNQYRNLVHACDTEVLGHVFANTLLFTWPRNAYVLDVSRIDVKTETPVDHGEMICFSIYCGSEADFGDGKSCIWVDVLGENGRDILAEFKPFFEDSSIKKVWHNYSFDNHIIRNYGIKLSGFHGDTMHMARLWDSSRRISGGYSLEALTSDPKVLGGTETKEEAELFGKISMKKIFGKGKLKKDGSEGKLVIIPPVKELQMEDREAWISYSALDSISTLKLYESMKKQLQAKKWFLDGKLISKKNMFDFYQEYWQPFGELLAKMESEGMLVDRDYLAQIEIVAKAEQEIAVSRFRNWASKHCPDAKHMNVGSDTQLRQLFFGGISNSCNDEDLPYEKLFKVPNVDKVIEEGKKRATKFRNIKLHRISDRPLPTEKFTASGWPSVSGDTLKALAGKVSAEYDYMEGVLDTCLEENIGDDDCISLPDEVVETQHVNTSVESDTSAYGTAFDAFGGGESGKEACHAIAALCEVCSIDSLISNFILPLQGSNVSGKDGRVHCSLNINTETGRLSARRPNLQNQPALEKDRYKIRQAFIASPGNSLIVADYGQLELRILAHLASCESMKEAFIAGGDFHSRTAMNMYPHIREAVENGERRKAKMLNFSIAYGKTAIGLSRDWKVSREEAQDTVNLWYNDRQEVRKWQELRKKEAIQKGYVLTLLGRARKFPEYRSRAQKNHIERAAINTPVQGSAADVAMCAMLEISNNQRLKELGWKLLLQVHDEVILEGPSESAENAKDIVVNCMSEPFNGKNILSVDLSVDAKCAQNWQYHGFHFTMHSSSASLFSSTTKLNNTSSTPLSLSSRFLGTRVVNLGIRLIRLGPSNRSEPLPRLSSERTASMLRMLESMAASHVMILTETTSNSILTTWGYLRWKSRRETSLKLKSFSNADYTVKDADGRTTLD

SEQ ID NO: 74128 - DNA, 1320 bp, Arabidopsis thaliana
  misc_feature (1)..(1320): Ceres Seq. ID no. 4994839
  misc_feature (1)..(1320): Ortholog of  Ceres SEQ ID NO 13657677 as cited in SEQ ID NO 66119
atggcttattcttaccctctaccttcaattgttgaattcaataaagtattgactgctattgctaagatgcagatgtatgatgttgtgattaatctctggaaacgtattgagaatgctgaaggtattgaaatttcacctgatctctatacttgtaacattttggtgaattgtttctgccgctgctttcaaccctcttcggctttatcttatcttgggaagatgatgaagcttggtattgagcctgacattgtgactgctagctcgctggtcaatggattctgtctcagtaatagtattaaggatgctgtttatgtggctggccaaatggagaaaatgggaatcaaacgtgatgttgtagtcgataccatactcattgatactctttgcaaaaatagacttgtggttcccgcgctggaggttctcaaacgtatgaaagacagaggaatttcaccgaatgttgttacctacagctctctcataactggcctttgtaaatccggtagattggctgacgccgagagacgactgcacgaaatggactccaagaaaatcaaccctaatgttatcactttcagtgcattaatcgatgcatatgcaaaacgtgggaaactgtcgaaggttgatagtgtgtacaagatgatgatccaaatgtctatagatcctaatgttttcacttacagttcacttatctacgggctttgcatgcacaatcgtgtagacgaggccattaaaatgcttgacttgatgataagcaaggggtgcaccccaaatgtagtcacttacagtactcttgcaaatggatttttcaagtcgtcgagggtagatgatgggattaaacttttagacgacatgcctcaaagaggcgtggctgcaaacacagtctcttgcaacactcttatcaagggctattttcaagcaggcaagatagatctcgctctaggagtttttggatatatgacttctaatggtctgattcccaatattaggagctacaacattgtgttagctggtctatttgctaatggggaggtagagaaagcattgagcagattcgagcatatgcaaaagactagaaatgatcttgatattattacatatactatcatgattcatgggatgtgcaaggcttgtatggtgaaagaagcatatgatttgttctataaactcaagttcaaaagagtggagcccgattttaaagcatacacgataatgatcgcagaattgaatagggctggcatgcggactgaagcagatgccttgaatagattttaccaaaagcacgttcgccaaaacgaaagcgcaccagctgaagtatcctag

SEQ ID NO: 74129 - protein, 439 aa, Arabidopsis thaliana; identical to SEQ ID NO: 71316
  peptide (1)..(439): Ceres Seq. ID no. 4994840

SEQ ID NO: 74130 - protein, 417 aa, Arabidopsis thaliana; identical to SEQ ID NO: 71317
  peptide (1)..(417): Ceres Seq. ID no. 4994841

SEQ ID NO: 74131 - protein, 415 aa, Arabidopsis thaliana
  peptide (1)..(415): Ceres Seq. ID no. 4994842
MYDVVINLWKRIENAEGIEISPDLYTCNILVNCFCRCFQPSSALSYLGKMMKLGIEPDIVTASSLVNGFCLSNSIKDAVYVAGQMEKMGIKRDVVVDTILIDTLCKNRLVVPALEVLKRMKDRGISPNVVTYSSLITGLCKSGRLADAERRLHEMDSKKINPNVITFSALIDAYAKRGKLSKVDSVYKMMIQMSIDPNVFTYSSLIYGLCMHNRVDEAIKMLDLMISKGCTPNVVTYSTLANGFFKSSRVDDGIKLLDDMPQRGVAANTVSCNTLIKGYFQAGKIDLALGVFGYMTSNGLIPNIRSYNIVLAGLFANGEVEKALSRFEHMQKTRNDLDIITYTIMIHGMCKACMVKEAYDLFYKLKFKRVEPDFKAYTIMIAELNRAGMRTEADALNRFYQKHVRQNESAPAEVS

SEQ ID NO: 74132 - DNA, 2001 bp, Arabidopsis thaliana
  misc_feature (1)..(2001): Ceres Seq. ID no. 4994850
  misc_feature (1)..(2001): Ortholog of  Ceres SEQ ID NO 12465083 as cited in SEQ ID NO 68239
atggcttccgtatctgcgtttaaatccgtttccgcaaatggaaagaattctatgtttgggaaattaggttacttggcgagacctttctgctcgaggcctgtggggaatgatgttattggtattgatttgggtactaccaattcttgtgtatctgtgatggagggaaagaccgctagggttattgagaatgcggaaggaagtcgaaccacaccatcggttgttgctatgaaccaaaaaggggaactccttgttggaacaccggctaaacgtcaggccgtgaccaatccaacaaacacgattttcggttctaaacgtttgattgggagacgttttgatgatccacagactcagaaggagatgaaaatggttccttacaagattgttaaggcacctaacggtgatgcttgggtcgaagccaatggacaaaagttttctcccagtcagattggagctaatgtcctcactaaaatgaaggaaacagctgaagcttacctcgggaaatctatcaacaaagctgttgttaccgttccagcttatttcaatgatgcacagagacaagccactaaggatgctgggaaaatcgctggtcttgatgtccagaggatcatcaacgaacctacagctgctgcactatcatatggtatgaacaacaaggaaggtgtcattgcagtgtttgatcttggaggtggaacctttgatgtttctatcttggaaatctcaagtggtgtttttgaggttaaagcaacaaatggagatacctttttgggaggagaagactttgacaacaccttgttggagtacttggttaatgagttcaaaagatcagataatattgatctgactaaagacaaccttgccctccagaggctgagagaagctgcagagaaggccaagattgagctctcatcgacaactcagaccgaaatcaacctgcctttcattacagcggatgcttcaggagctaagcacttgaacatcaccttaactaggtcaaagtttgaaggtttggtgggcaagttgattgagagaacaagatccccgtgccaaaactgcctgaaggatgctggagtcacaattaaggaagttgatgaggttcttcttgttggtggaatgacccgtgttcccaaagtgcaagagatagtttctgagatctttgggaagagtccttgtaaaggtgttaacccggatgaagcggttgccatgggagcagccattcaaggtggtatcctccgtggtgatgtgaaggatttgcttcttttggacgtggttcctctctcattgggtattgaaacattgggtgcagtcttcaccaagttgattccacgaaacaccactattcccacaaagaagtctcaggttttctccacagctgctgacaaccagatgcaagtgggaatcaaagttcttcagggagaacgtgaaatggcggctgacaacaaagtgcttggagaattcgaccttgttggcatcccaccggcacctagaggaatgccacagatcgaagttacattcgacattgatgcaaatggtattactactgtctcagcgaaagacaaagcaacaggtaaagagcagaatatcacaatcagatcttcaggtggtctctcagacgatgagattaacagaatggtgaaagaagctgagcttaacgcacagaaggatcaagagaagaagcaacttatcgaccttaggaacagtgctgatacaacaatttacagtgtagagaagagcttgagtgaatacagagagaagattccagctgagattgcctctgagatcgaaactgcagtgtctgatctcaggactgctatggctggtgaggatgtcgaggacatcaaggctaaggtcgaagctgcaaacaaggcagtgtcgaagatcggagaacacatgtctaagggatctggatcatctggttccgatggaagctctggtgagggtacaagtgggactgagcagacgcctgaagctgaattcgaggaggccagtggttcaaggaagtga

SEQ ID NO: 74133 - protein, 666 aa, Arabidopsis thaliana; identical to SEQ ID NO: 45794
  peptide (1)..(666): Ceres Seq. ID no. 4994851

SEQ ID NO: 74134 - protein, 649 aa, Arabidopsis thaliana; identical to SEQ ID NO: 45795
  peptide (1)..(649): Ceres Seq. ID no. 4994852

SEQ ID NO: 74135 - protein, 614 aa, Arabidopsis thaliana
  peptide (1)..(614): Ceres Seq. ID no. 4994853
MEGKTARVIENAEGSRTTPSVVAMNQKGELLVGTPAKRQAVTNPTNTIFGSKRLIGRRFDDPQTQKEMKMVPYKIVKAPNGDAWVEANGQKFSPSQIGANVLTKMKETAEAYLGKSINKAVVTVPAYFNDAQRQATKDAGKIAGLDVQRIINEPTAAALSYGMNNKEGVIAVFDLGGGTFDVSILEISSGVFEVKATNGDTFLGGEDFDNTLLEYLVNEFKRSDNIDLTKDNLALQRLREAAEKAKIELSSTTQTEINLPFITADASGAKHLNITLTRSKFEGLVGKLIERTRSPCQNCLKDAGVTIKEVDEVLLVGGMTRVPKVQEIVSEIFGKSPCKGVNPDEAVAMGAAIQGGILRGDVKDLLLLDVVPLSLGIETLGAVFTKLIPRNTTIPTKKSQVFSTAADNQMQVGIKVLQGEREMAADNKVLGEFDLVGIPPAPRGMPQIEVTFDIDANGITTVSAKDKATGKEQNITIRSSGGLSDDEINRMVKEAELNAQKDQEKKQLIDLRNSADTTIYSVEKSLSEYREKIPAEIASEIETAVSDLRTAMAGEDVEDIKAKVEAANKAVSKIGEHMSKGSGSSGSDGSSGEGTSGTEQTPEAEFEEASGSRK

SEQ ID NO: 74136 - DNA, 1017 bp, Arabidopsis thaliana
  misc_feature (1)..(1017): Ceres Seq. ID no. 4994907
  misc_feature (1)..(1017): Ortholog of  Ceres SEQ ID NO 13654989 as cited in SEQ ID NO 63117
  misc_feature (1)..(1017): Ortholog of  Ceres SEQ ID NO 13657138 as cited in SEQ ID NO 65923
  misc_feature (1)..(1017): Ortholog of  Ceres SEQ ID NO 13584744 as cited in SEQ ID NO 69137
atgaagaacggctctataagtagaataagatctcctatcactgcttcacaatacactgtttcctctctgcaagttgcaacaaacagctttagtcaagaaaacatcattggtgaaggttctctaggccgtgtctatagagcagagttccccaatggaaagataatggcgattaagaagattgataatgcagcactttcattacaagaagaagataatttcttagaagccgtttcaaatatgtcgcggttgaggcatccaaacattgttcccttggctggatactgcaccgagcatggtcaacgtcttctagtgtatgaatatgtaggaaatgggaatctagatgatacgcttcacacgaatgatgatagaagcatgaatctgacttggaatgcgcgtgttaaagtggctcttggaactgccaaggctttagagtacttgcacgaagtttgcttgccttcaattgtccatagaaacttcaaatcagcgaatatattgctagacgaagaacttaatcctcacctatcagacagtggtttagctgctttgacacctaacactgagagacaggtttcaactcaagtggtaggttcatttggatacagcgctccagagtttgcactgtcgggaatttacacagtgaaaagtgatgtatacacttttggagtagtcatgcttgagctcttaactggtcggaagcctcttgacagctcgaggacgagagcagagcaatcactagtgagatgggcaacaccgcagcttcacgatatagatgctttgtctaaaatggttgatccttctcttaatggcatgtatccagctaagtcactgtctcgttttgcggacatcattgctctctgtattcagccggaaccagagttcaggcctccaatgtcagaggtggtgcaacagctagtaagattagttcaaagggcaagtgttgtcaaacgaagatcaagtgatgacactggattttcatacaggacacctgaacacgagcacgtcgatatctcattctga

SEQ ID NO: 74137 - protein, 338 aa, Arabidopsis thaliana
  peptide (1)..(338): Ceres Seq. ID no. 4994908
MKNGSISRIRSPITASQYTVSSLQVATNSFSQENIIGEGSLGRVYRAEFPNGKIMAIKKIDNAALSLQEEDNFLEAVSNMSRLRHPNIVPLAGYCTEHGQRLLVYEYVGNGNLDDTLHTNDDRSMNLTWNARVKVALGTAKALEYLHEVCLPSIVHRNFKSANILLDEELNPHLSDSGLAALTPNTERQVSTQVVGSFGYSAPEFALSGIYTVKSDVYTFGVVMLELLTGRKPLDSSRTRAEQSLVRWATPQLHDIDALSKMVDPSLNGMYPAKSLSRFADIIALCIQPEPEFRPPMSEVVQQLVRLVQRASVVKRRSSDDTGFSYRTPEHEHVDISF

SEQ ID NO: 74138 - protein, 284 aa, Arabidopsis thaliana
  peptide (1)..(284): Ceres Seq. ID no. 4994909
MAIKKIDNAALSLQEEDNFLEAVSNMSRLRHPNIVPLAGYCTEHGQRLLVYEYVGNGNLDDTLHTNDDRSMNLTWNARVKVALGTAKALEYLHEVCLPSIVHRNFKSANILLDEELNPHLSDSGLAALTPNTERQVSTQVVGSFGYSAPEFALSGIYTVKSDVYTFGVVMLELLTGRKPLDSSRTRAEQSLVRWATPQLHDIDALSKMVDPSLNGMYPAKSLSRFADIIALCIQPEPEFRPPMSEVVQQLVRLVQRASVVKRRSSDDTGFSYRTPEHEHVDISF

SEQ ID NO: 74139 - protein, 259 aa, Arabidopsis thaliana
  peptide (1)..(259): Ceres Seq. ID no. 4994910
MSRLRHPNIVPLAGYCTEHGQRLLVYEYVGNGNLDDTLHTNDDRSMNLTWNARVKVALGTAKALEYLHEVCLPSIVHRNFKSANILLDEELNPHLSDSGLAALTPNTERQVSTQVVGSFGYSAPEFALSGIYTVKSDVYTFGVVMLELLTGRKPLDSSRTRAEQSLVRWATPQLHDIDALSKMVDPSLNGMYPAKSLSRFADIIALCIQPEPEFRPPMSEVVQQLVRLVQRASVVKRRSSDDTGFSYRTPEHEHVDISF

SEQ ID NO: 74140 - DNA, 480 bp, Arabidopsis thaliana
  misc_feature (1)..(480): Ceres Seq. ID no. 4994989
  misc_feature (1)..(480): Ortholog of  Ceres SEQ ID NO 13598589 as cited in SEQ ID NO 65254
atggggttgaacctactgagactgcttgttcagaacagaatagctgaattccacacagaactgggattactttcatctgcaaccttggagaatccttgcatcaagcatgcggtggagctcgagcaatccttcatggaaggtgcttataaccgtgtgttgagtgctagacaaaccgcacctgatgagacttacgtctatttcatggatctcttggcaaaaaccattagagatgaaatagctggatgcagtgagaaagcatacgatcatctctcaatcagtgaaggttgtaagatgttactcttctcgtctgatcaacaactgttaacatatgtgaacgaggagcacccggagtgggaagttaaagacgggttagttgtcttccaaaaaaccagagaaaccgcaccgtgcaaggagataccgtcacttcaactcatcaaccagactctcagttacaccagagagctcgagcgtatcttgtaa

SEQ ID NO: 74141 - protein, 159 aa, Arabidopsis thaliana
  peptide (1)..(159): Ceres Seq. ID no. 4994990
MGLNLLRLLVQNRIAEFHTELGLLSSATLENPCIKHAVELEQSFMEGAYNRVLSARQTAPDETYVYFMDLLAKTIRDEIAGCSEKAYDHLSISEGCKMLLFSSDQQLLTYVNEEHPEWEVKDGLVVFQKTRETAPCKEIPSLQLINQTLSYTRELERIL

SEQ ID NO: 74142 - protein, 115 aa, Arabidopsis thaliana
  peptide (1)..(115): Ceres Seq. ID no. 4994991
MEGAYNRVLSARQTAPDETYVYFMDLLAKTIRDEIAGCSEKAYDHLSISEGCKMLLFSSDQQLLTYVNEEHPEWEVKDGLVVFQKTRETAPCKEIPSLQLINQTLSYTRELERIL

SEQ ID NO: 74143 - protein, 92 aa, Arabidopsis thaliana
  peptide (1)..(92): Ceres Seq. ID no. 4994992
MDLLAKTIRDEIAGCSEKAYDHLSISEGCKMLLFSSDQQLLTYVNEEHPEWEVKDGLVVFQKTRETAPCKEIPSLQLINQTLSYTRELERIL

SEQ ID NO: 74144 - DNA, 1191 bp, Arabidopsis thaliana
  misc_feature (1)..(1191): Ceres Seq. ID no. 4995050
  misc_feature (1)..(1191): Ortholog of  Ceres SEQ ID NO 13659033 as cited in SEQ ID NO 66372
  misc_feature (1)..(1191): Ortholog of  Ceres SEQ ID NO 13655724 as cited in SEQ ID NO 68973
  misc_feature (1)..(1191): Ortholog of  Ceres SEQ ID NO 12625899 as cited in SEQ ID NO 69079
  misc_feature (1)..(1191): Ortholog of  Ceres SEQ ID NO 15180366 as cited in SEQ ID NO 0
atgtttggtggaaaaagtcatatactcagagggagtgtatcactggccttgatcgtccttattcttttggtcattatactcctggtttctgaggaaaacccgcttcgtgattctctctttgaagtaaaactttgtaactttgcaaagggaaaatgggttgaagaccggaagagaccattgtattctggttttgaatgtaaacaatggttatcatccatgtggtcatgtagaataatgggcagacccgatttctcatttgagggttaccgttggcagccagaaggttgcaacatgccacagtttgacagattcactttcttgacaagaatgcagaacaagacgatagcatttataggagactcattggggcggcaacagtttcaatccctaatgtgtatggccagtggtggtgaagatagcccagaggttcaaaacgtgggatgggagtacggtttggtgaaagccaaaggagctctccgtcctgatggttgggcttatcggttcccaaccacaaacacgacgatcttgtattattggtcagctagcttatcagatttggtacccatgaacaatacagatccacctagtcttactgcaatgcatctagatcgtccaccagcattcatgagaaactaccttcaccgtttcgatgtattggttctaaacactggtcaccattggaacagaggtaagattgaaggaaaccattgggtgatgcatgtaaatggaacacaggtcgaaggcgaatatctcaaagatatcagaaacgccaaggattttacaatacacagcgttgcgaagtggctcgatgcacagcttccattgcatccgcggttgaaagctttctttaggacaatttctccgaggcattttaaaaacggagattggaatacaggtggaaactgtaacaacacggttcctttgtctagaggcagcgaaatcacaggggatgatggatcgatcgatgcaacagttgagagtgctgtgaacgggacaaggatcaagattcttgacataactgcactttctgagctaagagacgaagctcatatctcagggtctaaactcaaaccccgaaaaccgaagaaggcaagtaacgtgacctcaactccaacgatcaacgattgcttgcattggtgcttaccagggatcccagatacttggaatgaacttttcattgctcagatttga

SEQ ID NO: 74145 - protein, 396 aa, Arabidopsis thaliana
  peptide (1)..(396): Ceres Seq. ID no. 4995051
MFGGKSHILRGSVSLALIVLILLVIILLVSEENPLRDSLFEVKLCNFAKGKWVEDRKRPLYSGFECKQWLSSMWSCRIMGRPDFSFEGYRWQPEGCNMPQFDRFTFLTRMQNKTIAFIGDSLGRQQFQSLMCMASGGEDSPEVQNVGWEYGLVKAKGALRPDGWAYRFPTTNTTILYYWSASLSDLVPMNNTDPPSLTAMHLDRPPAFMRNYLHRFDVLVLNTGHHWNRGKIEGNHWVMHVNGTQVEGEYLKDIRNAKDFTIHSVAKWLDAQLPLHPRLKAFFRTISPRHFKNGDWNTGGNCNNTVPLSRGSEITGDDGSIDATVESAVNGTRIKILDITALSELRDEAHISGSKLKPRKPKKASNVTSTPTINDCLHWCLPGIPDTWNELFIAQI

SEQ ID NO: 74146 - protein, 324 aa, Arabidopsis thaliana
  peptide (1)..(324): Ceres Seq. ID no. 4995052
MWSCRIMGRPDFSFEGYRWQPEGCNMPQFDRFTFLTRMQNKTIAFIGDSLGRQQFQSLMCMASGGEDSPEVQNVGWEYGLVKAKGALRPDGWAYRFPTTNTTILYYWSASLSDLVPMNNTDPPSLTAMHLDRPPAFMRNYLHRFDVLVLNTGHHWNRGKIEGNHWVMHVNGTQVEGEYLKDIRNAKDFTIHSVAKWLDAQLPLHPRLKAFFRTISPRHFKNGDWNTGGNCNNTVPLSRGSEITGDDGSIDATVESAVNGTRIKILDITALSELRDEAHISGSKLKPRKPKKASNVTSTPTINDCLHWCLPGIPDTWNELFIAQI

SEQ ID NO: 74147 - protein, 318 aa, Arabidopsis thaliana
  peptide (1)..(318): Ceres Seq. ID no. 4995053
MGRPDFSFEGYRWQPEGCNMPQFDRFTFLTRMQNKTIAFIGDSLGRQQFQSLMCMASGGEDSPEVQNVGWEYGLVKAKGALRPDGWAYRFPTTNTTILYYWSASLSDLVPMNNTDPPSLTAMHLDRPPAFMRNYLHRFDVLVLNTGHHWNRGKIEGNHWVMHVNGTQVEGEYLKDIRNAKDFTIHSVAKWLDAQLPLHPRLKAFFRTISPRHFKNGDWNTGGNCNNTVPLSRGSEITGDDGSIDATVESAVNGTRIKILDITALSELRDEAHISGSKLKPRKPKKASNVTSTPTINDCLHWCLPGIPDTWNELFIAQI

SEQ ID NO: 74148 - DNA, 1668 bp, Arabidopsis thaliana
  misc_feature (1)..(1668): Ceres Seq. ID no. 4995115
  misc_feature (1)..(1668): Ortholog of  Ceres SEQ ID NO 14315275 as cited in SEQ ID NO 52556
  misc_feature (1)..(1668): Ortholog of  Ceres SEQ ID NO 14303351 as cited in SEQ ID NO 54864
  misc_feature (1)..(1668): Ortholog of  Ceres SEQ ID NO 13597260 as cited in SEQ ID NO 63885
atgaagaacaataacaacaaatcttcttcttcttctagctatgattcttctttgtctccttcttcttcatcctcctcccaccagaactggctctctttctctctctccaacaataacaacaacttcaattcttcctcaaaccctaatctcacttcctccacatcagatcatcatcatcctcacccttctcacctctctctctttcaagctttctccacttctccagtcgaacggcaagatgggtcaccgggagtttcacccagcgatgccacggcggttctttccgtataccccggcggtcctaaacttgagaacttcctcggcggaggagcctcaacgacgacaacaagaccaatgcaacaagtgcaatctcttggcggcgttgtcttctcttccgacctacagccaccgcttcatcctccgtccgccgccgagatctacgactctgagctcaagtcaatagccgctagcttcctaggaaactactccggtggacactcgtcggaggtctctagcgtacataaacaacaaccgaatcctctagctgtctcagaggcttcgcctactccgaagaagaacgtagagagttttggacaacgtacctcgatttatagaggagtcacaagacatagatggactggaagatacgaagctcatctatgggataatagttgccgaagagaaggccaaagcagaaaaggaagacaaggtggttatgataaggaagataaagcagctagagcttacgaccttgcagctcttaagtattggggtcctacaactacgactaatttcccgatatcaaattacgaatctgaacttgaagaaatgaaacacatgactcgacaagagttcgttgcttctttaagacggaaaagcagtggattctctaggggtgcctccatgtacagaggcgtcactagacatcatcagcatggtcgatggcaggcacgaattggaagagttgcaggcaacaaagacctttatcttggcacatttagcactcaagaggaagctgcagaagcttatgatatagcagcgatcaaattccgcggtctaaatgcagtcaccaatttcgacatcagtcgatatgatgtcaaatcaattgctagctgtaatctccctgtgggtggactaatgcctaaaccttctccagcaaccgcagcggctgacaaaaccgttgatctttctccatccgactctccatctctaaccacaccgtccctcacgttcaatgtggcaacaccggtcaatgaccatggaggaactttttaccacactggtataccaatcaaaccagacccggctgatcattattggtccaacatctttggattccaggcaaacccgaaagcagaaatgcgaccattagcaaactttgggtcggatcttcataacccttctcctggttatgctataatgccggtaatgcaggaaggtgaaaacaactttggtggtagttttgttgggtctgatgggtataacaatcattccgctgcatcgaacccggtctcagcaattccgctgtcctcgacaactacaatgagtaacggtaacgaagggtatggtggaaacataaactggattaataacaacatttcaagttcttaccaaactgcaaaatcaaatctctctgttttgcacacaccggtttttgggttggaatga

SEQ ID NO: 74149 - protein, 555 aa, Arabidopsis thaliana
  peptide (1)..(555): Ceres Seq. ID no. 4995116
MKNNNNKSSSSSSYDSSLSPSSSSSSHQNWLSFSLSNNNNNFNSSSNPNLTSSTSDHHHPHPSHLSLFQAFSTSPVERQDGSPGVSPSDATAVLSVYPGGPKLENFLGGGASTTTTRPMQQVQSLGGVVFSSDLQPPLHPPSAAEIYDSELKSIAASFLGNYSGGHSSEVSSVHKQQPNPLAVSEASPTPKKNVESFGQRTSIYRGVTRHRWTGRYEAHLWDNSCRREGQSRKGRQGGYDKEDKAARAYDLAALKYWGPTTTTNFPISNYESELEEMKHMTRQEFVASLRRKSSGFSRGASMYRGVTRHHQHGRWQARIGRVAGNKDLYLGTFSTQEEAAEAYDIAAIKFRGLNAVTNFDISRYDVKSIASCNLPVGGLMPKPSPATAAADKTVDLSPSDSPSLTTPSLTFNVATPVNDHGGTFYHTGIPIKPDPADHYWSNIFGFQANPKAEMRPLANFGSDLHNPSPGYAIMPVMQEGENNFGGSFVGSDGYNNHSAASNPVSAIPLSSTTTMSNGNEGYGGNINWINNNISSSYQTAKSNLSVLHTPVFGLE

SEQ ID NO: 74150 - protein, 437 aa, Arabidopsis thaliana
  peptide (1)..(437): Ceres Seq. ID no. 4995117
MQQVQSLGGVVFSSDLQPPLHPPSAAEIYDSELKSIAASFLGNYSGGHSSEVSSVHKQQPNPLAVSEASPTPKKNVESFGQRTSIYRGVTRHRWTGRYEAHLWDNSCRREGQSRKGRQGGYDKEDKAARAYDLAALKYWGPTTTTNFPISNYESELEEMKHMTRQEFVASLRRKSSGFSRGASMYRGVTRHHQHGRWQARIGRVAGNKDLYLGTFSTQEEAAEAYDIAAIKFRGLNAVTNFDISRYDVKSIASCNLPVGGLMPKPSPATAAADKTVDLSPSDSPSLTTPSLTFNVATPVNDHGGTFYHTGIPIKPDPADHYWSNIFGFQANPKAEMRPLANFGSDLHNPSPGYAIMPVMQEGENNFGGSFVGSDGYNNHSAASNPVSAIPLSSTTTMSNGNEGYGGNINWINNNISSSYQTAKSNLSVLHTPVFGLE

SEQ ID NO: 74151 - protein, 279 aa, Arabidopsis thaliana
  peptide (1)..(279): Ceres Seq. ID no. 4995118
MKHMTRQEFVASLRRKSSGFSRGASMYRGVTRHHQHGRWQARIGRVAGNKDLYLGTFSTQEEAAEAYDIAAIKFRGLNAVTNFDISRYDVKSIASCNLPVGGLMPKPSPATAAADKTVDLSPSDSPSLTTPSLTFNVATPVNDHGGTFYHTGIPIKPDPADHYWSNIFGFQANPKAEMRPLANFGSDLHNPSPGYAIMPVMQEGENNFGGSFVGSDGYNNHSAASNPVSAIPLSSTTTMSNGNEGYGGNINWINNNISSSYQTAKSNLSVLHTPVFGLE

SEQ ID NO: 74152 - DNA, 3378 bp, Arabidopsis thaliana
  misc_feature (1)..(3378): Ceres Seq. ID no. 4995134
  misc_feature (1)..(3378): Ortholog of  Ceres SEQ ID NO 13595870 as cited in SEQ ID NO 62101
  misc_feature (1)..(3378): Ortholog of  Ceres SEQ ID NO 13590241 as cited in SEQ ID NO 63878
  misc_feature (1)..(3378): Ortholog of  Ceres SEQ ID NO 13657939 as cited in SEQ ID NO 66349
atgtctcgcaatcggcaaatcatcatccccgacgacgtgatggaaacagaagcggtggttaataccgtcgccggcgtcgactgtttcgtctcactccctcgtcaattactacacgcgcttcaatccaccagctcctctcctctccctccgcttctccctgtcgagctacgctccggtgaccgccgttggtcagttgcttggtccggctctagctcctcctcttctgcgatcgagatcgctcgagtgtttgcggaaagcatttcgttgccggatggtacagttgttaaagttcgtgttcttcctaatgtgcccaaggctactttagtaacagtcgaaccagagactgaagatgactgggaagttcttgagctcaatgctgaacttgccgaggcagctatacttagtcaggtgaggatactacatgagaccatgaaattccctttgtggttgcatgaccgaactgtgataagattttctgtggtttcaacatttccatcaaaaggggtggtacaacttgtgccaggaactgaagtggctgtggctccaaagagacgtgacagaaatctcaaagcaaaaaagagtcaggaaaaagaatgtaacaatgtgaaggctctactacgtgtacaagagactgatagatcagcctttcatgaagctgatgtcaaaggatttgagctaagggtagccctcacgtctattgcctatattcatccagaaactgccaagaaacactctctagaatctcttcagttgatttctgtatcccctagaatacctttgaaaggtagtgcaaagaaggatgaagccttaaatatgaaaaacagtgaagcttcaaaggtggccgagaatggtacttcaagcgccaagaaagagcctcgtcaagcaattcttcgtcttgtcttttcagatttagctgctaaaggacatctaatgatggtcgagtctcttcgtctctatctaggagcaggcctacactcatgggtttacttaaggggatgcaatgtgaatgaagacaaagaaattcctgctctttcactttctccttgtgtcttcaagatttctgaaaatgaaaaggtgctggataagggtacggataggcttggtaataacaattctgttagaaaaagcagtcatccaccgtctggcttgagcacctatgtggatgttgtcgactggtctgtgcacgataaggttgttacagctctttcatctgagggtttgcatgacgaaggaaatcatgataagaataagaaaggattggaataccttactcgcctgtggtcattggcacagcttgatgctatggcgtcagtcacaggagttgatgttagttcgttaattgtgggaagagaaacgtttttccatttcgaagtaagagggctcgaatcttataaatccatagacgggcagccttctgttaatgatcgttgggaaagtgggaagaaggataaacacactcctttagaaattttgtacgtcatgacggtctctgatgagtctttgcttggtgataaattcgctgggtatgatcttagcctggatagaagtgagaagagcgacaatgtggtgcatattgagccagtgcttgagaagatgaatcttggcgagcctatatatttaaagtcggctaaagagacacactgcaataaaggtgtttccccagatatatcctccttgacgtggatgggcccaatcgtgtcggatgttatcaagagaatgaccgtgttgttgtctcctgcagctggaatgtggtttagcaagttcaagattccatcacctggacatattctcatatatgggcctcctggttcaggaaagacaatattggcaagagctgctgcaaagtatttcgaagaacagaaagacttgttggcacatgtgattttagtatcctgttctacacttgccttggagaaggttcaacacatccatcatgtcctttctagtgtaatagctgaggggttggaacatgcaccatctgtcatcattttggatgatcttgatagcattatctcatcgtcttctgatactgaaggaacacaagcttcggttggggttacaatgcttacaaaattcctaacagatgttatagatgattatggggaatacaggaattcctcttgtggaattggcccacttgcattcgttgcttctgtccagtctctagagcaaattccacagacattgagctcatcaggaaggtttgacttccatgtgcaactggctgctcctgctacctcggaacgtggggccatactgaagcatgagatacagaaacgccttttagactgttcagaagacattttacttaacttagctgctaaatgtgaaggatatgatgcatatgacctggaaatattggttgatagagctgttcatgctgccattggccggcatctacctttagaatcaaatatatccaaatataatttggtcaaagaagactttactcgagctatgcatgattttgtgcctgttgccatgcgtgacatcacaaaatctgcctctgaaggtggtcgtttggggtgggaagatgtgggaggtgtgactgatattaaaaatgctatcaaagagatgattgagctgccatcaaaatttccaaaaatctttgcaaaatctcctctgcgtttgagatcgaatgttctcttgtatggcccacccggttgtgggaagactcacattgttggtgcagctgctgcagcgtgttccctacggtttatatcggtgaaggggcctgagctgttaaacaaatacattggtgcatctgaacaagcggtccgtgatatattttcgaaagcagcagctgcagctccatgcatactctttttcgatgaattcgattcaattgctcccaaaagaggacatgataatactggtgtaactgatcgagttgttaatcaatttttgacagaactggatggagttgaagttctaacaggggtctttgtatttgctgcaaccagtagaccagatttacttgatcctgccctcctaaggcctggccggcttgatcgtcttcttttgtgcgactttccttccccaccagaacgattagagattcttacagttctttctagaaagcttctgatggctgatgatattgacctagagcctatagctttgatgactgaaggcttcagtggagctgatcttcaagctcttctctcagatgcgcaacttgcagctgtacacgagtatctgaacagagaagataaacccgagaccggaactacaccaataataactgatcctcttctgaagtcgattgcttctaaaactaaaccatcggtttccgaaaccgagaaacaaaagctctatgacatatatagccagtttctggattcaagaaaatcggtatctctctcatctccactctaa

SEQ ID NO: 74153 - protein, 1125 aa, Arabidopsis thaliana
  peptide (1)..(1125): Ceres Seq. ID no. 4995135
MSRNRQIIIPDDVMETEAVVNTVAGVDCFVSLPRQLLHALQSTSSSPLPPLLPVELRSGDRRWSVAWSGSSSSSSAIEIARVFAESISLPDGTVVKVRVLPNVPKATLVTVEPETEDDWEVLELNAELAEAAILSQVRILHETMKFPLWLHDRTVIRFSVVSTFPSKGVVQLVPGTEVAVAPKRRDRNLKAKKSQEKECNNVKALLRVQETDRSAFHEADVKGFELRVALTSIAYIHPETAKKHSLESLQLISVSPRIPLKGSAKKDEALNMKNSEASKVAENGTSSAKKEPRQAILRLVFSDLAAKGHLMMVESLRLYLGAGLHSWVYLRGCNVNEDKEIPALSLSPCVFKISENEKVLDKGTDRLGNNNSVRKSSHPPSGLSTYVDVVDWSVHDKVVTALSSEGLHDEGNHDKNKKGLEYLTRLWSLAQLDAMASVTGVDVSSLIVGRETFFHFEVRGLESYKSIDGQPSVNDRWESGKKDKHTPLEILYVMTVSDESLLGDKFAGYDLSLDRSEKSDNVVHIEPVLEKMNLGEPIYLKSAKETHCNKGVSPDISSLTWMGPIVSDVIKRMTVLLSPAAGMWFSKFKIPSPGHILIYGPPGSGKTILARAAAKYFEEQKDLLAHVILVSCSTLALEKVQHIHHVLSSVIAEGLEHAPSVIILDDLDSIISSSSDTEGTQASVGVTMLTKFLTDVIDDYGEYRNSSCGIGPLAFVASVQSLEQIPQTLSSSGRFDFHVQLAAPATSERGAILKHEIQKRLLDCSEDILLNLAAKCEGYDAYDLEILVDRAVHAAIGRHLPLESNISKYNLVKEDFTRAMHDFVPVAMRDITKSASEGGRLGWEDVGGVTDIKNAIKEMIELPSKFPKIFAKSPLRLRSNVLLYGPPGCGKTHIVGAAAAACSLRFISVKGPELLNKYIGASEQAVRDIFSKAAAAAPCILFFDEFDSIAPKRGHDNTGVTDRVVNQFLTELDGVEVLTGVFVFAATSRPDLLDPALLRPGRLDRLLLCDFPSPPERLEILTVLSRKLLMADDIDLEPIALMTEGFSGADLQALLSDAQLAAVHEYLNREDKPETGTTPIITDPLLKSIASKTKPSVSETEKQKLYDIYSQFLDSRKSVSLSSPL

SEQ ID NO: 74154 - protein, 1112 aa, Arabidopsis thaliana
  peptide (1)..(1112): Ceres Seq. ID no. 4995136
METEAVVNTVAGVDCFVSLPRQLLHALQSTSSSPLPPLLPVELRSGDRRWSVAWSGSSSSSSAIEIARVFAESISLPDGTVVKVRVLPNVPKATLVTVEPETEDDWEVLELNAELAEAAILSQVRILHETMKFPLWLHDRTVIRFSVVSTFPSKGVVQLVPGTEVAVAPKRRDRNLKAKKSQEKECNNVKALLRVQETDRSAFHEADVKGFELRVALTSIAYIHPETAKKHSLESLQLISVSPRIPLKGSAKKDEALNMKNSEASKVAENGTSSAKKEPRQAILRLVFSDLAAKGHLMMVESLRLYLGAGLHSWVYLRGCNVNEDKEIPALSLSPCVFKISENEKVLDKGTDRLGNNNSVRKSSHPPSGLSTYVDVVDWSVHDKVVTALSSEGLHDEGNHDKNKKGLEYLTRLWSLAQLDAMASVTGVDVSSLIVGRETFFHFEVRGLESYKSIDGQPSVNDRWESGKKDKHTPLEILYVMTVSDESLLGDKFAGYDLSLDRSEKSDNVVHIEPVLEKMNLGEPIYLKSAKETHCNKGVSPDISSLTWMGPIVSDVIKRMTVLLSPAAGMWFSKFKIPSPGHILIYGPPGSGKTILARAAAKYFEEQKDLLAHVILVSCSTLALEKVQHIHHVLSSVIAEGLEHAPSVIILDDLDSIISSSSDTEGTQASVGVTMLTKFLTDVIDDYGEYRNSSCGIGPLAFVASVQSLEQIPQTLSSSGRFDFHVQLAAPATSERGAILKHEIQKRLLDCSEDILLNLAAKCEGYDAYDLEILVDRAVHAAIGRHLPLESNISKYNLVKEDFTRAMHDFVPVAMRDITKSASEGGRLGWEDVGGVTDIKNAIKEMIELPSKFPKIFAKSPLRLRSNVLLYGPPGCGKTHIVGAAAAACSLRFISVKGPELLNKYIGASEQAVRDIFSKAAAAAPCILFFDEFDSIAPKRGHDNTGVTDRVVNQFLTELDGVEVLTGVFVFAATSRPDLLDPALLRPGRLDRLLLCDFPSPPERLEILTVLSRKLLMADDIDLEPIALMTEGFSGADLQALLSDAQLAAVHEYLNREDKPETGTTPIITDPLLKSIASKTKPSVSETEKQKLYDIYSQFLDSRKSVSLSSPL

SEQ ID NO: 74155 - protein, 982 aa, Arabidopsis thaliana
  peptide (1)..(982): Ceres Seq. ID no. 4995137
MKFPLWLHDRTVIRFSVVSTFPSKGVVQLVPGTEVAVAPKRRDRNLKAKKSQEKECNNVKALLRVQETDRSAFHEADVKGFELRVALTSIAYIHPETAKKHSLESLQLISVSPRIPLKGSAKKDEALNMKNSEASKVAENGTSSAKKEPRQAILRLVFSDLAAKGHLMMVESLRLYLGAGLHSWVYLRGCNVNEDKEIPALSLSPCVFKISENEKVLDKGTDRLGNNNSVRKSSHPPSGLSTYVDVVDWSVHDKVVTALSSEGLHDEGNHDKNKKGLEYLTRLWSLAQLDAMASVTGVDVSSLIVGRETFFHFEVRGLESYKSIDGQPSVNDRWESGKKDKHTPLEILYVMTVSDESLLGDKFAGYDLSLDRSEKSDNVVHIEPVLEKMNLGEPIYLKSAKETHCNKGVSPDISSLTWMGPIVSDVIKRMTVLLSPAAGMWFSKFKIPSPGHILIYGPPGSGKTILARAAAKYFEEQKDLLAHVILVSCSTLALEKVQHIHHVLSSVIAEGLEHAPSVIILDDLDSIISSSSDTEGTQASVGVTMLTKFLTDVIDDYGEYRNSSCGIGPLAFVASVQSLEQIPQTLSSSGRFDFHVQLAAPATSERGAILKHEIQKRLLDCSEDILLNLAAKCEGYDAYDLEILVDRAVHAAIGRHLPLESNISKYNLVKEDFTRAMHDFVPVAMRDITKSASEGGRLGWEDVGGVTDIKNAIKEMIELPSKFPKIFAKSPLRLRSNVLLYGPPGCGKTHIVGAAAAACSLRFISVKGPELLNKYIGASEQAVRDIFSKAAAAAPCILFFDEFDSIAPKRGHDNTGVTDRVVNQFLTELDGVEVLTGVFVFAATSRPDLLDPALLRPGRLDRLLLCDFPSPPERLEILTVLSRKLLMADDIDLEPIALMTEGFSGADLQALLSDAQLAAVHEYLNREDKPETGTTPIITDPLLKSIASKTKPSVSETEKQKLYDIYSQFLDSRKSVSLSSPL

SEQ ID NO: 74156 - DNA, 2469 bp, Arabidopsis thaliana
  misc_feature (1)..(2469): Ceres Seq. ID no. 4995175
  misc_feature (1)..(2469): Ortholog of  Ceres SEQ ID NO 13599820 as cited in SEQ ID NO 0
atgggaggaggagagaagaggaaatctagtttcaaaaacctagctaatgcaaagaagaggagaacaggacctcacttacctagctcaatactcaagaccattgcgaatgagaaacgtcctttgaactctgacgaaggagacgatgagattgattctgcttacggtgatttttacgagtacgaagaaggtgtgcctgaagaggaatctaggaaaaacaaccgctacgaacgcgtcgttaactacgaattcgagcttgcagaggattgcgaggatgaaaacgtggagtcagaagatgatgatgatgatgatgatgatgatgatgatgataggcactcacgaatgttgaaaaatgtcactgaattgccaatttcagcctttcaaggagagagtaagaacaaacgtgtagtctttactgaaccatatccagagtctgaattcaatcctacccgtgatgttctggagggtaaatccctcaccacaattgatgactttatggagcctcttcaaggattacatggaaatagccaactaagcaatatgatctcccggatgcgaaaagatacgcagtctcttgttcatgctcctctgccaaagccagaacaagaaagactggaacgggatgtagcgaatgaactggtttacaaggggtttgatatttgggtgcctctggtaaaaaggaacagagaggcaccaactatttactttaaccaagatgtcaatgttggatactctaccgttggtgctatagcatcacaatttcatcccaggactgaatttgagatgaaaatggcttctctactcgatgatcatgagattttggaggctcacaaagaagatggagctaggcttcttgaattcaacgaggtatctatggaagatcacatcaagagacgtaaccatgttgctaagatgcggagcatgctcttccgagttgacctgaaacataaacgaatcaagcagattaagtctaaaacatatcatcgccttaaaaacaaagacctgaatcaatcgggtgttggagcattcatggagccagcaatggctaaagaagaggctaagaagcaggaggcgaggcgagtaaaggaacgtatgactttaaagcacaaaaacacaggacaatgggccaaacgcatgctaagccgtggactgaataggaaatacgatgtgactcaggcagctctatctaaacaacttcaaattcatgctactttgtccagaaagatgaactccacaaaagatgaaagtagtagtgatgaggaagatttgaatgatggttcagatcaggatacttctaaactgatagcggaagcaaaggagaagatactgaaaactgtggacgatgatgaagtccccatttctcgtcttatgtcattacctttcatggctcgtgctgtgaaaaagaaaaacgaggaagctaaagaagaaggtaaacgtgatattgaggagttggagaaatttggtggagcagaaacctctaaaaagtccactaatgttgttggtagaagagtatttggtgcagaagctccaaaagagtctgaaaaggaatcagacaacctttttgataacagtgatagtagtgacaatgatatggaagataatgagttagaggctgtaaaagataatgcttcacctgctagaaacactgaaaccattatggaagccgagaagttggatgatattgctggaaacccagcatctaagacaacatttgatgtcgccttatatgcatcaggctcctggaagaagatgacaggctgcaaaaacgcagaatccaaaaaagcttcaaagacgcatgtgcccatttcgcagtcccaagataaaaaggaatcgagtgattcagaaagtgatgattcagaaagtgatgattcagagagtgaagcagagcaaatggttgatgggattttgacatgcggttcaaaggaaacgtatgaaattccttgtcaagcagagcttgtaagccgtgcttttgctggtgatgacgttgaaggtgactttgagaaggataagcaagaggtactaaatcaggaagttcctgaacccgagaaaccggttcaagttgctggttggggacattggaccaataaccaaaacaagagaggtttaccatcaaggattgttagagaacacgaagaagccaagaaaacgagagagcaagctctcagaaaaaggaaagacgcttctttcaaacatgttatcatatcagaaaaagttgataaaaaggctgagaaacttcagacaaagagtctaccttacccttacacatcaaaggaagttttcgaacaaagtatgcgtatgcctataggacctgagtttaatcccacaactattgttggagttctaaaccgacctgaggttgtgaagaaagctggagtgatcattaaacctgtcaagtttgaggaagtaaatccgaatgacgaacaccctcgtagccatcagaaacaaaaacccaagaaaaaaggtggtaagtaa

SEQ ID NO: 74157 - protein, 822 aa, Arabidopsis thaliana
  peptide (1)..(822): Ceres Seq. ID no. 4995176
MGGGEKRKSSFKNLANAKKRRTGPHLPSSILKTIANEKRPLNSDEGDDEIDSAYGDFYEYEEGVPEEESRKNNRYERVVNYEFELAEDCEDENVESEDDDDDDDDDDDDRHSRMLKNVTELPISAFQGESKNKRVVFTEPYPESEFNPTRDVLEGKSLTTIDDFMEPLQGLHGNSQLSNMISRMRKDTQSLVHAPLPKPEQERLERDVANELVYKGFDIWVPLVKRNREAPTIYFNQDVNVGYSTVGAIASQFHPRTEFEMKMASLLDDHEILEAHKEDGARLLEFNEVSMEDHIKRRNHVAKMRSMLFRVDLKHKRIKQIKSKTYHRLKNKDLNQSGVGAFMEPAMAKEEAKKQEARRVKERMTLKHKNTGQWAKRMLSRGLNRKYDVTQAALSKQLQIHATLSRKMNSTKDESSSDEEDLNDGSDQDTSKLIAEAKEKILKTVDDDEVPISRLMSLPFMARAVKKKNEEAKEEGKRDIEELEKFGGAETSKKSTNVVGRRVFGAEAPKESEKESDNLFDNSDSSDNDMEDNELEAVKDNASPARNTETIMEAEKLDDIAGNPASKTTFDVALYASGSWKKMTGCKNAESKKASKTHVPISQSQDKKESSDSESDDSESDDSESEAEQMVDGILTCGSKETYEIPCQAELVSRAFAGDDVEGDFEKDKQEVLNQEVPEPEKPVQVAGWGHWTNNQNKRGLPSRIVREHEEAKKTREQALRKRKDASFKHVIISEKVDKKAEKLQTKSLPYPYTSKEVFEQSMRMPIGPEFNPTTIVGVLNRPEVVKKAGVIIKPVKFEEVNPNDEHPRSHQKQKPKKKGGK

SEQ ID NO: 74158 - protein, 709 aa, Arabidopsis thaliana
  peptide (1)..(709): Ceres Seq. ID no. 4995177
MLKNVTELPISAFQGESKNKRVVFTEPYPESEFNPTRDVLEGKSLTTIDDFMEPLQGLHGNSQLSNMISRMRKDTQSLVHAPLPKPEQERLERDVANELVYKGFDIWVPLVKRNREAPTIYFNQDVNVGYSTVGAIASQFHPRTEFEMKMASLLDDHEILEAHKEDGARLLEFNEVSMEDHIKRRNHVAKMRSMLFRVDLKHKRIKQIKSKTYHRLKNKDLNQSGVGAFMEPAMAKEEAKKQEARRVKERMTLKHKNTGQWAKRMLSRGLNRKYDVTQAALSKQLQIHATLSRKMNSTKDESSSDEEDLNDGSDQDTSKLIAEAKEKILKTVDDDEVPISRLMSLPFMARAVKKKNEEAKEEGKRDIEELEKFGGAETSKKSTNVVGRRVFGAEAPKESEKESDNLFDNSDSSDNDMEDNELEAVKDNASPARNTETIMEAEKLDDIAGNPASKTTFDVALYASGSWKKMTGCKNAESKKASKTHVPISQSQDKKESSDSESDDSESDDSESEAEQMVDGILTCGSKETYEIPCQAELVSRAFAGDDVEGDFEKDKQEVLNQEVPEPEKPVQVAGWGHWTNNQNKRGLPSRIVREHEEAKKTREQALRKRKDASFKHVIISEKVDKKAEKLQTKSLPYPYTSKEVFEQSMRMPIGPEFNPTTIVGVLNRPEVVKKAGVIIKPVKFEEVNPNDEHPRSHQKQKPKKKGGK

SEQ ID NO: 74159 - protein, 658 aa, Arabidopsis thaliana
  peptide (1)..(658): Ceres Seq. ID no. 4995178
MEPLQGLHGNSQLSNMISRMRKDTQSLVHAPLPKPEQERLERDVANELVYKGFDIWVPLVKRNREAPTIYFNQDVNVGYSTVGAIASQFHPRTEFEMKMASLLDDHEILEAHKEDGARLLEFNEVSMEDHIKRRNHVAKMRSMLFRVDLKHKRIKQIKSKTYHRLKNKDLNQSGVGAFMEPAMAKEEAKKQEARRVKERMTLKHKNTGQWAKRMLSRGLNRKYDVTQAALSKQLQIHATLSRKMNSTKDESSSDEEDLNDGSDQDTSKLIAEAKEKILKTVDDDEVPISRLMSLPFMARAVKKKNEEAKEEGKRDIEELEKFGGAETSKKSTNVVGRRVFGAEAPKESEKESDNLFDNSDSSDNDMEDNELEAVKDNASPARNTETIMEAEKLDDIAGNPASKTTFDVALYASGSWKKMTGCKNAESKKASKTHVPISQSQDKKESSDSESDDSESDDSESEAEQMVDGILTCGSKETYEIPCQAELVSRAFAGDDVEGDFEKDKQEVLNQEVPEPEKPVQVAGWGHWTNNQNKRGLPSRIVREHEEAKKTREQALRKRKDASFKHVIISEKVDKKAEKLQTKSLPYPYTSKEVFEQSMRMPIGPEFNPTTIVGVLNRPEVVKKAGVIIKPVKFEEVNPNDEHPRSHQKQKPKKKGGK

SEQ ID NO: 74160 - DNA, 1419 bp, Arabidopsis thaliana
  misc_feature (1)..(1419): Ceres Seq. ID no. 4995197
  misc_feature (1)..(1419): Ortholog of  Ceres SEQ ID NO 14304867 as cited in SEQ ID NO 54375
atgaagaaagttgagttttttatgctccttctctgcttcatcgcagcgtcatctctagtgtctgctgatccaccaacatgtcctgctgatttgggaggcaagtgtagtgattctgatgactggcaaggtgatttcttccctgaaatccccaagattaagtatgagggaccttcgagtaagaacccacttgcttacaggtggtataacgctgaagaagagattcttgggaagaaaatgaaggattggtttagattcagtgttgcgttttggcatactttccgtgggactggaggtgatccatttggtgctgctactaagtattggccttgggaagatggtactaactctgtgtctatggctaagagaagaatgagagctaactttgagttcttgaagaaacttggagttgattggtggtgttttcatgacagagacatagcacctgatggcactacacttgaggaatctaacaaaaacttggatgaagttatcgaactcgccaaagaactccaaaaggggagcaaaatcaaaccattgtggggaacagctcagcttttcttgcatcctcgttatatgcacggaggagcgaccagctctgaagttggagtgtatgcttacgctgctgctcaggtgaagaaagccatggaggtaacacattacttaggtggtgaaaactacgttttttggggtggtcgtgaaggttatcagacactcttgaacactgatatgggaagagagcttgatcatctagccaggttctttgaagctgctgttgcttacaagaagaagattggattcaaaggcacgcttttaatcgagcccaagcctcaagaacccaccaagcaccagtatgactgggatgctgcaacagctgccaatttcttgaggaaatatggtcttattgatgagtttaagctcaacattgagtgtaaccatgccacgctctctggtcacacttgtcatcacgagcttgaaactgcaagaattaatggtttacttggcaacattgatgcaaacactggcgatgctcaaactggatgggatacagatcagtttcttacagatgttggagaagcaaccatggttatgatgagtgtcatcaaaaatggtgggattgctccaggcggcttcaactttgacgctaaactgcgaagagagagtacagacgtggaagacttattcattgctcatattagtggaatggatacaatggctcgtggactgagaaatgcagtcaaaatcttggaggagggaagtctaagtgaattggtacgcaagcgatatgcaacttgggactctgagcttgggaagcaaatagaagaaggaaaagctgattttgagtatcttgagaagaaagctaaagagtttggagaaccaaaggtttcttctgctaaacaggtacaagtttcttgctattaa

SEQ ID NO: 74161 - protein, 472 aa, Arabidopsis thaliana
  peptide (1)..(472): Ceres Seq. ID no. 4995198
MKKVEFFMLLLCFIAASSLVSADPPTCPADLGGKCSDSDDWQGDFFPEIPKIKYEGPSSKNPLAYRWYNAEEEILGKKMKDWFRFSVAFWHTFRGTGGDPFGAATKYWPWEDGTNSVSMAKRRMRANFEFLKKLGVDWWCFHDRDIAPDGTTLEESNKNLDEVIELAKELQKGSKIKPLWGTAQLFLHPRYMHGGATSSEVGVYAYAAAQVKKAMEVTHYLGGENYVFWGGREGYQTLLNTDMGRELDHLARFFEAAVAYKKKIGFKGTLLIEPKPQEPTKHQYDWDAATAANFLRKYGLIDEFKLNIECNHATLSGHTCHHELETARINGLLGNIDANTGDAQTGWDTDQFLTDVGEATMVMMSVIKNGGIAPGGFNFDAKLRRESTDVEDLFIAHISGMDTMARGLRNAVKILEEGSLSELVRKRYATWDSELGKQIEEGKADFEYLEKKAKEFGEPKVSSAKQVQVSCY

SEQ ID NO: 74162 - protein, 465 aa, Arabidopsis thaliana
  peptide (1)..(465): Ceres Seq. ID no. 4995199
MLLLCFIAASSLVSADPPTCPADLGGKCSDSDDWQGDFFPEIPKIKYEGPSSKNPLAYRWYNAEEEILGKKMKDWFRFSVAFWHTFRGTGGDPFGAATKYWPWEDGTNSVSMAKRRMRANFEFLKKLGVDWWCFHDRDIAPDGTTLEESNKNLDEVIELAKELQKGSKIKPLWGTAQLFLHPRYMHGGATSSEVGVYAYAAAQVKKAMEVTHYLGGENYVFWGGREGYQTLLNTDMGRELDHLARFFEAAVAYKKKIGFKGTLLIEPKPQEPTKHQYDWDAATAANFLRKYGLIDEFKLNIECNHATLSGHTCHHELETARINGLLGNIDANTGDAQTGWDTDQFLTDVGEATMVMMSVIKNGGIAPGGFNFDAKLRRESTDVEDLFIAHISGMDTMARGLRNAVKILEEGSLSELVRKRYATWDSELGKQIEEGKADFEYLEKKAKEFGEPKVSSAKQVQVSCY

SEQ ID NO: 74163 - protein, 394 aa, Arabidopsis thaliana
  peptide (1)..(394): Ceres Seq. ID no. 4995200
MKDWFRFSVAFWHTFRGTGGDPFGAATKYWPWEDGTNSVSMAKRRMRANFEFLKKLGVDWWCFHDRDIAPDGTTLEESNKNLDEVIELAKELQKGSKIKPLWGTAQLFLHPRYMHGGATSSEVGVYAYAAAQVKKAMEVTHYLGGENYVFWGGREGYQTLLNTDMGRELDHLARFFEAAVAYKKKIGFKGTLLIEPKPQEPTKHQYDWDAATAANFLRKYGLIDEFKLNIECNHATLSGHTCHHELETARINGLLGNIDANTGDAQTGWDTDQFLTDVGEATMVMMSVIKNGGIAPGGFNFDAKLRRESTDVEDLFIAHISGMDTMARGLRNAVKILEEGSLSELVRKRYATWDSELGKQIEEGKADFEYLEKKAKEFGEPKVSSAKQVQVSCY

SEQ ID NO: 74164 - DNA, 1176 bp, Arabidopsis thaliana
  misc_feature (1)..(1176): Ceres Seq. ID no. 4995259
  misc_feature (1)..(1176): Ortholog of  Ceres SEQ ID NO 15225673 as cited in SEQ ID NO 57784
  misc_feature (1)..(1176): Ortholog of  Ceres SEQ ID NO 13594185 as cited in SEQ ID NO 58882
atgttgcccagattagctcgagtcgtcactcaaacctcaaagcttcgatctttgaccactaatggatcgatgaaaaatctctcctttttctcccgatatgggtacgcgactgttgcgccggcggcagctgatcctccgtcgcagaaggatttccccagtaaatctccgctgttaatgcgtagttgttgtgaatgtttaggtctcactatagtattcgaacctaagctcaatttgattctctctgtttctagtttcatcgaatgcgggactaaaataaacttggataagatgttttggtcaaagccatgttcattggctctgcctaaagactctcctctcagaattgatgaaccagactatgtagggattcgtcgtttcatactaaagatgatgatgttctatagcaaacagagcatgtctatccgtggggctaacgtgatctacaagcggatcattgcacaagttgataaacctgcaatatatgatgtattcaacttggagaaaacattcaaaataacgtattcgctgcttgtccttcatatgtggcttgttttacgccgcttgaaggaagatggacaggaaggtgttgaccttggtcaatacgtctatgagatctacaatcatgatgttgaactcagggtatctaaagccggggttaacttgctgctagccaagtggatgaaggagttggagagaatattttatggaaatgttgttgcctatgatgctgcgctacttccggaagctaaaccaaatgacctacaaatcaaattatggaggaacgtattttctgatgatggaacaacaacacctgataacacagatttaaaaacagcacaggcaatggcaagatatgtccggagagaacttggttctctttctttaacaggtacctatgacgctatagttggaatgcctcattatgttactcgcatttgcatttcgaatagacatgccttttcttatatggttcttttttgtcatacacagataaagagtccatattctccggcaatttctccttcacccctttggagaacaagcccctgtgatttgaatgaaattagaagaagctgtggtgctttgcgaatcaatctttcatttgtttctctgtttcatttgatttacttatatcaaaccaaagaaacctacacaagggaatgtgctagctgttag

SEQ ID NO: 74165 - protein, 391 aa, Arabidopsis thaliana
  peptide (1)..(391): Ceres Seq. ID no. 4995260
MLPRLARVVTQTSKLRSLTTNGSMKNLSFFSRYGYATVAPAAADPPSQKDFPSKSPLLMRSCCECLGLTIVFEPKLNLILSVSSFIECGTKINLDKMFWSKPCSLALPKDSPLRIDEPDYVGIRRFILKMMMFYSKQSMSIRGANVIYKRIIAQVDKPAIYDVFNLEKTFKITYSLLVLHMWLVLRRLKEDGQEGVDLGQYVYEIYNHDVELRVSKAGVNLLLAKWMKELERIFYGNVVAYDAALLPEAKPNDLQIKLWRNVFSDDGTTTPDNTDLKTAQAMARYVRRELGSLSLTGTYDAIVGMPHYVTRICISNRHAFSYMVLFCHTQIKSPYSPAISPSPLWRTSPCDLNEIRRSCGALRINLSFVSLFHLIYLYQTKETYTRECASC

SEQ ID NO: 74166 - protein, 368 aa, Arabidopsis thaliana
  peptide (1)..(368): Ceres Seq. ID no. 4995261
MKNLSFFSRYGYATVAPAAADPPSQKDFPSKSPLLMRSCCECLGLTIVFEPKLNLILSVSSFIECGTKINLDKMFWSKPCSLALPKDSPLRIDEPDYVGIRRFILKMMMFYSKQSMSIRGANVIYKRIIAQVDKPAIYDVFNLEKTFKITYSLLVLHMWLVLRRLKEDGQEGVDLGQYVYEIYNHDVELRVSKAGVNLLLAKWMKELERIFYGNVVAYDAALLPEAKPNDLQIKLWRNVFSDDGTTTPDNTDLKTAQAMARYVRRELGSLSLTGTYDAIVGMPHYVTRICISNRHAFSYMVLFCHTQIKSPYSPAISPSPLWRTSPCDLNEIRRSCGALRINLSFVSLFHLIYLYQTKETYTRECASC

SEQ ID NO: 74167 - protein, 333 aa, Arabidopsis thaliana
  peptide (1)..(333): Ceres Seq. ID no. 4995262
MRSCCECLGLTIVFEPKLNLILSVSSFIECGTKINLDKMFWSKPCSLALPKDSPLRIDEPDYVGIRRFILKMMMFYSKQSMSIRGANVIYKRIIAQVDKPAIYDVFNLEKTFKITYSLLVLHMWLVLRRLKEDGQEGVDLGQYVYEIYNHDVELRVSKAGVNLLLAKWMKELERIFYGNVVAYDAALLPEAKPNDLQIKLWRNVFSDDGTTTPDNTDLKTAQAMARYVRRELGSLSLTGTYDAIVGMPHYVTRICISNRHAFSYMVLFCHTQIKSPYSPAISPSPLWRTSPCDLNEIRRSCGALRINLSFVSLFHLIYLYQTKETYTRECASC

SEQ ID NO: 74168 - DNA, 2148 bp, Arabidopsis thaliana
  misc_feature (1)..(2148): Ceres Seq. ID no. 4995303
  misc_feature (1)..(2148): Ortholog of  Ceres SEQ ID NO 13598023 as cited in SEQ ID NO 66487
atgccgttgttgcgctccgccatcaccgtcgtgtttcgctgctccggagaaattgaactttatgttgatgaggttgttgttgctatagttgtagcgttccgtgatgacaatactatttgtctgtctccaagcttgaagaataatgaactctcaagacagacaaattcatgggtttcaccattttgcttgcaacgcagagcgtattcgacgggtttcaccagcgtacatggtggaatacctacggcagagtatgcaaagttgcggagagaatcccttgaaactgaatttggacatgctctaggagcatatagctcgaaaagtttttctgcagtgtatcgttttggaccctttttggctttgtatagagctgcaatcatttcgtatcatgtggtgaagcttgccttttggcagctgtttgttcaggatatgaggaaacgggctgtcaaggcactgagcacgagaccagacatattaccatctatatactgtcaggaactttcaaaattgcaggaccagattcctccatttccaactactgttgccatgcgatgtattgaagagcaactgggtgctccagtgtcaaaactttttgcagatattagtcttaaacctgttgctgctgcatccctgggtcaggtatacaaagctcatctgcattctggacaattggtagccgttaaggttcagagacctggaatgtcactcattctaacacgtgatgccctcttattcaaaatgattgggggacaactgaaacgatttgctaaagcccgtaaggatcttttggtagcggtgaatgagatggtcaggcatatgtttgacgaaatagattacgttctcgaggcaaaaaatgcagaacgatttgcctctctatacagttttgactcagggaatgagcagattgatgataacgctggacctaggaatatgtccaggaatcacagagcagagaacatcaaagtccctaaaatttactggaattttacacgcacagcagtgctcacaatggaatggatcgatggcataaaattaacagatgaaattaagctgaaaagggcttcccttgatagaagggacttgatcgatcagggcttatcctgttcattaaagcagcttcttgaggttggattctttcatgctgatccgcacccaggaaatcttgtggctactaaagaagggtctcttgtttactttgacttcggaatgatggggaatattccacgccattaccgtgtgggacttattcaaattctggtgcattttgtcaaccgtgattctctaagtttggcaaatgatttcctgtccttgggatttttgcctgaaggggttgatatacaagcagtttcaaatgctttgcgtacttcatttggttctactacgagaatatcacaagatttccagggggtgatggaacaattatatgatgttatgtacgagttcaacttttcgctgcctccagactatgctcttgttataagatctcttggttcactggaaggcacggctaagattcttgatccagagtttaaagtgattgagagtgcatatccatttgttatcgggaggctattagcagatccaagcccagatatgaggaaaatactaagggagcttgtcatttgtaatgatggatcaataaggtggaatcgtcttgaacgcctggtagcagcaatatcagaacaggcttctgcgacttcaggagactctccagaagataaaacgttgaagaaatcatcggaactgaaatcattcgacatgcattcagtagtttccgcaacagaagatctgctactgttcatattatccgagaaagggcagagagttcgggtcttccttcttcaagacataatcagagtggttgatattttcctggaagtagaggctcttgagctcaacaagaccatcaatcttaagacggaagaagggacaatgaaaagagtgagcaatggattcaaaggtctgagtgaggcggtgaagcttgcaccgggaatgtggatatcaatgcttcttcggatgtcaaggaagtctgaggttcatagttatgctttagatattgtttctgcattgtctacacattttggccacaaagtgcctcacacttgttggatccttctctccaaattgctccatcacaataagagccaataa

SEQ ID NO: 74169 - protein, 715 aa, Arabidopsis thaliana
  peptide (1)..(715): Ceres Seq. ID no. 4995304
MPLLRSAITVVFRCSGEIELYVDEVVVAIVVAFRDDNTICLSPSLKNNELSRQTNSWVSPFCLQRRAYSTGFTSVHGGIPTAEYAKLRRESLETEFGHALGAYSSKSFSAVYRFGPFLALYRAAIISYHVVKLAFWQLFVQDMRKRAVKALSTRPDILPSIYCQELSKLQDQIPPFPTTVAMRCIEEQLGAPVSKLFADISLKPVAAASLGQVYKAHLHSGQLVAVKVQRPGMSLILTRDALLFKMIGGQLKRFAKARKDLLVAVNEMVRHMFDEIDYVLEAKNAERFASLYSFDSGNEQIDDNAGPRNMSRNHRAENIKVPKIYWNFTRTAVLTMEWIDGIKLTDEIKLKRASLDRRDLIDQGLSCSLKQLLEVGFFHADPHPGNLVATKEGSLVYFDFGMMGNIPRHYRVGLIQILVHFVNRDSLSLANDFLSLGFLPEGVDIQAVSNALRTSFGSTTRISQDFQGVMEQLYDVMYEFNFSLPPDYALVIRSLGSLEGTAKILDPEFKVIESAYPFVIGRLLADPSPDMRKILRELVICNDGSIRWNRLERLVAAISEQASATSGDSPEDKTLKKSSELKSFDMHSVVSATEDLLLFILSEKGQRVRVFLLQDIIRVVDIFLEVEALELNKTINLKTEEGTMKRVSNGFKGLSEAVKLAPGMWISMLLRMSRKSEVHSYALDIVSALSTHFGHKVPHTCWILLSKLLHHNKSQ

SEQ ID NO: 74170 - protein, 573 aa, Arabidopsis thaliana
  peptide (1)..(573): Ceres Seq. ID no. 4995305
MRKRAVKALSTRPDILPSIYCQELSKLQDQIPPFPTTVAMRCIEEQLGAPVSKLFADISLKPVAAASLGQVYKAHLHSGQLVAVKVQRPGMSLILTRDALLFKMIGGQLKRFAKARKDLLVAVNEMVRHMFDEIDYVLEAKNAERFASLYSFDSGNEQIDDNAGPRNMSRNHRAENIKVPKIYWNFTRTAVLTMEWIDGIKLTDEIKLKRASLDRRDLIDQGLSCSLKQLLEVGFFHADPHPGNLVATKEGSLVYFDFGMMGNIPRHYRVGLIQILVHFVNRDSLSLANDFLSLGFLPEGVDIQAVSNALRTSFGSTTRISQDFQGVMEQLYDVMYEFNFSLPPDYALVIRSLGSLEGTAKILDPEFKVIESAYPFVIGRLLADPSPDMRKILRELVICNDGSIRWNRLERLVAAISEQASATSGDSPEDKTLKKSSELKSFDMHSVVSATEDLLLFILSEKGQRVRVFLLQDIIRVVDIFLEVEALELNKTINLKTEEGTMKRVSNGFKGLSEAVKLAPGMWISMLLRMSRKSEVHSYALDIVSALSTHFGHKVPHTCWILLSKLLHHNKSQ

SEQ ID NO: 74171 - protein, 534 aa, Arabidopsis thaliana
  peptide (1)..(534): Ceres Seq. ID no. 4995306
MRCIEEQLGAPVSKLFADISLKPVAAASLGQVYKAHLHSGQLVAVKVQRPGMSLILTRDALLFKMIGGQLKRFAKARKDLLVAVNEMVRHMFDEIDYVLEAKNAERFASLYSFDSGNEQIDDNAGPRNMSRNHRAENIKVPKIYWNFTRTAVLTMEWIDGIKLTDEIKLKRASLDRRDLIDQGLSCSLKQLLEVGFFHADPHPGNLVATKEGSLVYFDFGMMGNIPRHYRVGLIQILVHFVNRDSLSLANDFLSLGFLPEGVDIQAVSNALRTSFGSTTRISQDFQGVMEQLYDVMYEFNFSLPPDYALVIRSLGSLEGTAKILDPEFKVIESAYPFVIGRLLADPSPDMRKILRELVICNDGSIRWNRLERLVAAISEQASATSGDSPEDKTLKKSSELKSFDMHSVVSATEDLLLFILSEKGQRVRVFLLQDIIRVVDIFLEVEALELNKTINLKTEEGTMKRVSNGFKGLSEAVKLAPGMWISMLLRMSRKSEVHSYALDIVSALSTHFGHKVPHTCWILLSKLLHHNKSQ

SEQ ID NO: 74172 - DNA, 1218 bp, Arabidopsis thaliana
  misc_feature (1)..(1218): Ceres Seq. ID no. 4995393
  misc_feature (1)..(1218): Ortholog of  Ceres SEQ ID NO 13593889 as cited in SEQ ID NO 53305
  misc_feature (1)..(1218): Ortholog of  Ceres SEQ ID NO 13581959 as cited in SEQ ID NO 56156
atgagacctcgcgggtatcaacgagctccgtcaatgcagaaaccaacagattatccgacggataagacgcttcatccgaattacccatttctcatgtcctctcatggtctcaagtcctttgaatcggacgacgaagacgacgactccgactcctccaacgatcaattcgctttcactatcaacacagagttgcttgtcgatgtcaaagacatatctataggggacttcatcggcgaaggttcatcatctactgtctacagaggattgttcaggagagttgtccctgtgtctgtgaagatattccagcctaaaagaacatctgctttaagcattgagcagaggaagaagtttcagagagaggttttgctgctttccaagtttagacatgaaaacattgtgcggttcattggggcgtgcatagaaccaaagttgatgataattactgaactcatggaaggcaatactcttcagaagtttatgttgagtgttcgtccaaagcctcttgatctgaagctctccattagctttgcgttggatattgctcggggaatggagttcttgaatgcaaatggcattattcaccgagatttgaaaccaagtaatatgctcttaacaggtgatcagaaacatgtaaagttggctgactttggacttgctagagaggagactaaaggtttcatgacctttgaggctggtacatacagatggatggctccagagttattcagctatgacacgcttgaaattggcgaaaagaaacactacgatcataaggtggacgtttacagtttcgccattgttttctgggagttacttaccaacaaaaccccattcaaaggaaagaacaacatctttgtagcttatgctgccagcaaaaaccagagaccaagtgtggagaatcttccagaaggcgttgtttctatcctgcaatcatgctgggcagagaatcctgacgctcgtcctgagtttaaagaaattacatattcactaacaaacttgctcagaagcttaagctcagacactgatgctacttcatccaatagcaaagccaatatagctaccgaggattcaacaagcagtctggttcaagaacgtgttgtctgtgattgtcccggactaaagatgagcaagacgaagaagctgaagaagaagacgaataaactgatgaatatgatcgtcccttttctcaagatcttcaaaagttgtatgtccaagtga

SEQ ID NO: 74173 - protein, 405 aa, Arabidopsis thaliana
  peptide (1)..(405): Ceres Seq. ID no. 4995394
MRPRGYQRAPSMQKPTDYPTDKTLHPNYPFLMSSHGLKSFESDDEDDDSDSSNDQFAFTINTELLVDVKDISIGDFIGEGSSSTVYRGLFRRVVPVSVKIFQPKRTSALSIEQRKKFQREVLLLSKFRHENIVRFIGACIEPKLMIITELMEGNTLQKFMLSVRPKPLDLKLSISFALDIARGMEFLNANGIIHRDLKPSNMLLTGDQKHVKLADFGLAREETKGFMTFEAGTYRWMAPELFSYDTLEIGEKKHYDHKVDVYSFAIVFWELLTNKTPFKGKNNIFVAYAASKNQRPSVENLPEGVVSILQSCWAENPDARPEFKEITYSLTNLLRSLSSDTDATSSNSKANIATEDSTSSLVQERVVCDCPGLKMSKTKKLKKKTNKLMNMIVPFLKIFKSCMSK

SEQ ID NO: 74174 - protein, 394 aa, Arabidopsis thaliana
  peptide (1)..(394): Ceres Seq. ID no. 4995395
MQKPTDYPTDKTLHPNYPFLMSSHGLKSFESDDEDDDSDSSNDQFAFTINTELLVDVKDISIGDFIGEGSSSTVYRGLFRRVVPVSVKIFQPKRTSALSIEQRKKFQREVLLLSKFRHENIVRFIGACIEPKLMIITELMEGNTLQKFMLSVRPKPLDLKLSISFALDIARGMEFLNANGIIHRDLKPSNMLLTGDQKHVKLADFGLAREETKGFMTFEAGTYRWMAPELFSYDTLEIGEKKHYDHKVDVYSFAIVFWELLTNKTPFKGKNNIFVAYAASKNQRPSVENLPEGVVSILQSCWAENPDARPEFKEITYSLTNLLRSLSSDTDATSSNSKANIATEDSTSSLVQERVVCDCPGLKMSKTKKLKKKTNKLMNMIVPFLKIFKSCMSK

SEQ ID NO: 74175 - protein, 374 aa, Arabidopsis thaliana
  peptide (1)..(374): Ceres Seq. ID no. 4995396
MSSHGLKSFESDDEDDDSDSSNDQFAFTINTELLVDVKDISIGDFIGEGSSSTVYRGLFRRVVPVSVKIFQPKRTSALSIEQRKKFQREVLLLSKFRHENIVRFIGACIEPKLMIITELMEGNTLQKFMLSVRPKPLDLKLSISFALDIARGMEFLNANGIIHRDLKPSNMLLTGDQKHVKLADFGLAREETKGFMTFEAGTYRWMAPELFSYDTLEIGEKKHYDHKVDVYSFAIVFWELLTNKTPFKGKNNIFVAYAASKNQRPSVENLPEGVVSILQSCWAENPDARPEFKEITYSLTNLLRSLSSDTDATSSNSKANIATEDSTSSLVQERVVCDCPGLKMSKTKKLKKKTNKLMNMIVPFLKIFKSCMSK

SEQ ID NO: 74176 - DNA, 1869 bp, Arabidopsis thaliana
  misc_feature (1)..(1869): Ceres Seq. ID no. 4995409
  misc_feature (1)..(1869): Ortholog of  Ceres SEQ ID NO 13654989 as cited in SEQ ID NO 63117
atggcagaaactcctcaaccgtatctcatcttcgtcttcttcgtcttcactctaaccgttgctacacaaaccaccggttcggttaagtgcaaaacaagtttgctccgttacccgtttggtttctccgacggttatccgatccgattcaactgctctgagataaccggagaggccgtgatcggtgaattcgctgtgcaagaagtgacaaactccaacatctacgtcgaaatcccgccggtttgcaaacgcaacatccgtaaaatcgaacaacttttccgggaaaatcttgctccgtcgaaattacagaacataattctcgtccaaggatgcaagaaacagaacaagtcttctaattgcttaatccgcaataaattcgttgaaaaccggttaaatctcagcaaatgtaaatctccggttagctgtctcgacggagcaacaacgacaactgccgatgtgatgagtttaggcgacgttgtgaacggaagtggatgtaagtattggttctcttctatttctcaatcgcaagtttcggtcaatttgggtcgactcaagcttgattggtggcttaagggaagttgcagtaacaccacttgctcggagaacgcagactgtgccaaagttaagctcgacgacggtggactcggtcatcgctgcacttgtcgtgaaggatttagcggtaaagccttcaccgtgcctggtggttgccaccgattagtttacaaacgcaaaggactacacaaactcgttgttcttggtactgcggggattttggttggagttttagtaatcgtggtcttgatagctacatatttcttccggaacaagcaatctgcgtcatctgaaagagcatcaatcgcgaatcgcttgctttgcgagctagccggaaactcaagtgttcctttctacacctacaaagagattgagaaagctaccgatagtttctccgacaagaacatgctcggaaccggagcatacggaacagtctacgcaggcgaattcccaaacagctcatgcgtcgctataaaacgtctcaaacacaaagacactacaagcattgaccaagttgtgaacgagatcaagcttctttcctctgtgagccacccaaatctagtacgtctcttaggttgttgctttgcagatggagaaccgtttctagtctatgagttcatgccaaacggaactctttatcagcatttacaacacgagagaggccaaccaccactttcttggcagctccgactcgccattgcgtgtcaaaccgcaaacgcaatcgcacatctccactcttcagtaaaccctcctatctaccaccgagacataaaatctagtaacatcctccttgaccacgaattcaactccaagatatctgatttcggactctctaggctcggcatgtctaccgatttcgaagcctctcatatctccacggctccacaaggcactccaggatacttagatcctcaatatcaccaagattttcagctctcggacaagagtgatgtctatagctttggagttgttctcgtagaaatcatctcaggctttaaagtcatagacttcactcgtccctactctgaagtgaacctagcctctcttgccgtcgacaggatcggaagagggcgtgtggtagatatcatcgatccctgcttaaacaaagaaatcaatccgaaaatgtttgcatctatccacaacttagcagaattggcgtttcgctgcttatcctttcacagaaacatgaggcctacgatggtagaaattacggaagatctccaccggattaagcttatgcactatggtacagagtcaggtaagttcaaaaaccgatccgaaatagatatgaagagacaacaatcatttccgagagaatga

SEQ ID NO: 74177 - protein, 622 aa, Arabidopsis thaliana
  peptide (1)..(622): Ceres Seq. ID no. 4995410
MAETPQPYLIFVFFVFTLTVATQTTGSVKCKTSLLRYPFGFSDGYPIRFNCSEITGEAVIGEFAVQEVTNSNIYVEIPPVCKRNIRKIEQLFRENLAPSKLQNIILVQGCKKQNKSSNCLIRNKFVENRLNLSKCKSPVSCLDGATTTTADVMSLGDVVNGSGCKYWFSSISQSQVSVNLGRLKLDWWLKGSCSNTTCSENADCAKVKLDDGGLGHRCTCREGFSGKAFTVPGGCHRLVYKRKGLHKLVVLGTAGILVGVLVIVVLIATYFFRNKQSASSERASIANRLLCELAGNSSVPFYTYKEIEKATDSFSDKNMLGTGAYGTVYAGEFPNSSCVAIKRLKHKDTTSIDQVVNEIKLLSSVSHPNLVRLLGCCFADGEPFLVYEFMPNGTLYQHLQHERGQPPLSWQLRLAIACQTANAIAHLHSSVNPPIYHRDIKSSNILLDHEFNSKISDFGLSRLGMSTDFEASHISTAPQGTPGYLDPQYHQDFQLSDKSDVYSFGVVLVEIISGFKVIDFTRPYSEVNLASLAVDRIGRGRVVDIIDPCLNKEINPKMFASIHNLAELAFRCLSFHRNMRPTMVEITEDLHRIKLMHYGTESGKFKNRSEIDMKRQQSFPRE

SEQ ID NO: 74178 - protein, 470 aa, Arabidopsis thaliana
  peptide (1)..(470): Ceres Seq. ID no. 4995411
MSLGDVVNGSGCKYWFSSISQSQVSVNLGRLKLDWWLKGSCSNTTCSENADCAKVKLDDGGLGHRCTCREGFSGKAFTVPGGCHRLVYKRKGLHKLVVLGTAGILVGVLVIVVLIATYFFRNKQSASSERASIANRLLCELAGNSSVPFYTYKEIEKATDSFSDKNMLGTGAYGTVYAGEFPNSSCVAIKRLKHKDTTSIDQVVNEIKLLSSVSHPNLVRLLGCCFADGEPFLVYEFMPNGTLYQHLQHERGQPPLSWQLRLAIACQTANAIAHLHSSVNPPIYHRDIKSSNILLDHEFNSKISDFGLSRLGMSTDFEASHISTAPQGTPGYLDPQYHQDFQLSDKSDVYSFGVVLVEIISGFKVIDFTRPYSEVNLASLAVDRIGRGRVVDIIDPCLNKEINPKMFASIHNLAELAFRCLSFHRNMRPTMVEITEDLHRIKLMHYGTESGKFKNRSEIDMKRQQSFPRE

SEQ ID NO: 74179 - DNA, 1827 bp, Arabidopsis thaliana
  misc_feature (1)..(1827): Ceres Seq. ID no. 4995432
  misc_feature (1)..(1827): Ortholog of  Ceres SEQ ID NO 13598865 as cited in SEQ ID NO 0
atgggggtggctcaagcaatggaagccctaaccgagcgagcaagtttgatgaaagagtctttgcataagagccagaccatcaccgataacatggtcggaatcttaggttctttcgatcatcgtctctcggctcttgaaaccgcaatgcgtcccacacaggttgtggaatttgagatctatcttctgttgaaattgaaatgtgattctggatttggtgataaaatgataagaacacattctataaggagagctcatgagaatattgacaaggcattgaaagcagctgaggttatattggatcaatttgatatctctagaaaggcggaagctaaaatattgagaggaccacatgaggatcttgaaagctatctggaagcaattgatcaactaagaggcactatcaaattcttcagcaacaacaaaatgttcaaaagtgctagtggagttattagtcatgctcacggtttactttctaaagctctatcaaagctagaagatgagttcagacagatactgcaaaactacagtaagccaatggaacctgatcgccttttcgaatgtcttccgagtaatcttcgaccatcatcagaaggtgaaggtggtggtggaaagactcatgatccccatcacaagagcttagaaaacgctatttttactgtcccaactgtcattcctccaagggttctgcctctgcttcatgacttagctcaacaaatggttcaagctggtcatcagcaacaacttttcaaatcttacagggatactcgagctgcggtgttggaacagagtttgaggaaattaggagtggagaggcttagcaaagatgatgttcagagaatgcaatgggaggtattagaggccaagattgggaattggatacattacatgagaatatccgtgaaactgttattcgccgcggaaaagaaaatctgcgaccaaattcttgatggtgttgagtctctcagagatcaatgttttggtgaggtcactgtaaatagtgtagctgtgctgcttagtttcggggaggctattgctaaaagcaagagatcacctgaaaaactgtttgttctgttagatatgtatgaaataatgagagagcttcagcctgagattgagttgctctttggaagcaaaccatgtgctgagatgaaagaatccgcgctgaatctgacaaagcggttagctcagacagctcaagaaacttttgctgattttgaagaagcggttgaaaaggatgctacgaaaaccgcggttatggatggaaccgttcatccacttactagctacgttataaattatgtcaagttcttgttcgattaccaaacgacgttgaggctactttttcaagagtttgatagtaaagatcctgatagcgagcttggagctgtaacaacgaggatcatgcacgctttacagaataatctggatgaaccagaaaagcctaaacataatcctgagttagagttacatttttcacagattttgcagtgtctcacggttcagtcgagtgggagcggtccgatagaaaactcaaatatatcaagagcatcagtaaaagacagattcaagactttcaattctcagtttgaagagcttcaccaaagacaatgccaatggacagttccggacagcgagttgcgtgaatctcttagacttgctgttgcggaagttcttttacctgctttcagatcgtttcttaaacgttttgggccgatgatagagagtggtaagaacccccagaagtatataaggtttagtcctgaagatcttgagagaatgcttaacgagttctttgaaggcaagacatggagtgagccaaagagataa

SEQ ID NO: 74180 - protein, 608 aa, Arabidopsis thaliana
  peptide (1)..(608): Ceres Seq. ID no. 4995433
MGVAQAMEALTERASLMKESLHKSQTITDNMVGILGSFDHRLSALETAMRPTQVVEFEIYLLLKLKCDSGFGDKMIRTHSIRRAHENIDKALKAAEVILDQFDISRKAEAKILRGPHEDLESYLEAIDQLRGTIKFFSNNKMFKSASGVISHAHGLLSKALSKLEDEFRQILQNYSKPMEPDRLFECLPSNLRPSSEGEGGGGKTHDPHHKSLENAIFTVPTVIPPRVLPLLHDLAQQMVQAGHQQQLFKSYRDTRAAVLEQSLRKLGVERLSKDDVQRMQWEVLEAKIGNWIHYMRISVKLLFAAEKKICDQILDGVESLRDQCFGEVTVNSVAVLLSFGEAIAKSKRSPEKLFVLLDMYEIMRELQPEIELLFGSKPCAEMKESALNLTKRLAQTAQETFADFEEAVEKDATKTAVMDGTVHPLTSYVINYVKFLFDYQTTLRLLFQEFDSKDPDSELGAVTTRIMHALQNNLDEPEKPKHNPELELHFSQILQCLTVQSSGSGPIENSNISRASVKDRFKTFNSQFEELHQRQCQWTVPDSELRESLRLAVAEVLLPAFRSFLKRFGPMIESGKNPQKYIRFSPEDLERMLNEFFEGKTWSEPKR

SEQ ID NO: 74181 - protein, 602 aa, Arabidopsis thaliana
  peptide (1)..(602): Ceres Seq. ID no. 4995434
MEALTERASLMKESLHKSQTITDNMVGILGSFDHRLSALETAMRPTQVVEFEIYLLLKLKCDSGFGDKMIRTHSIRRAHENIDKALKAAEVILDQFDISRKAEAKILRGPHEDLESYLEAIDQLRGTIKFFSNNKMFKSASGVISHAHGLLSKALSKLEDEFRQILQNYSKPMEPDRLFECLPSNLRPSSEGEGGGGKTHDPHHKSLENAIFTVPTVIPPRVLPLLHDLAQQMVQAGHQQQLFKSYRDTRAAVLEQSLRKLGVERLSKDDVQRMQWEVLEAKIGNWIHYMRISVKLLFAAEKKICDQILDGVESLRDQCFGEVTVNSVAVLLSFGEAIAKSKRSPEKLFVLLDMYEIMRELQPEIELLFGSKPCAEMKESALNLTKRLAQTAQETFADFEEAVEKDATKTAVMDGTVHPLTSYVINYVKFLFDYQTTLRLLFQEFDSKDPDSELGAVTTRIMHALQNNLDEPEKPKHNPELELHFSQILQCLTVQSSGSGPIENSNISRASVKDRFKTFNSQFEELHQRQCQWTVPDSELRESLRLAVAEVLLPAFRSFLKRFGPMIESGKNPQKYIRFSPEDLERMLNEFFEGKTWSEPKR

SEQ ID NO: 74182 - protein, 592 aa, Arabidopsis thaliana
  peptide (1)..(592): Ceres Seq. ID no. 4995435
MKESLHKSQTITDNMVGILGSFDHRLSALETAMRPTQVVEFEIYLLLKLKCDSGFGDKMIRTHSIRRAHENIDKALKAAEVILDQFDISRKAEAKILRGPHEDLESYLEAIDQLRGTIKFFSNNKMFKSASGVISHAHGLLSKALSKLEDEFRQILQNYSKPMEPDRLFECLPSNLRPSSEGEGGGGKTHDPHHKSLENAIFTVPTVIPPRVLPLLHDLAQQMVQAGHQQQLFKSYRDTRAAVLEQSLRKLGVERLSKDDVQRMQWEVLEAKIGNWIHYMRISVKLLFAAEKKICDQILDGVESLRDQCFGEVTVNSVAVLLSFGEAIAKSKRSPEKLFVLLDMYEIMRELQPEIELLFGSKPCAEMKESALNLTKRLAQTAQETFADFEEAVEKDATKTAVMDGTVHPLTSYVINYVKFLFDYQTTLRLLFQEFDSKDPDSELGAVTTRIMHALQNNLDEPEKPKHNPELELHFSQILQCLTVQSSGSGPIENSNISRASVKDRFKTFNSQFEELHQRQCQWTVPDSELRESLRLAVAEVLLPAFRSFLKRFGPMIESGKNPQKYIRFSPEDLERMLNEFFEGKTWSEPKR

SEQ ID NO: 74183 - DNA, 1329 bp, Arabidopsis thaliana
  misc_feature (1)..(1329): Ceres Seq. ID no. 4995464
  misc_feature (1)..(1329): Ortholog of  Ceres SEQ ID NO 13599520 as cited in SEQ ID NO 633
  misc_feature (1)..(1329): Ortholog of  Ceres SEQ ID NO 13595142 as cited in SEQ ID NO 56671
  misc_feature (1)..(1329): Ortholog of  Ceres SEQ ID NO 15226382 as cited in SEQ ID NO 63295
  misc_feature (1)..(1329): Ortholog of  Ceres SEQ ID NO 13598460 as cited in SEQ ID NO 63382
atgggcacaactagggtctgctcggaggtttcttctggatcttcgaaatcgcttagccaatctctcacggtatcgacctctaccacagaaacagtcaatggtttccatgaattcaagatctgtgggtactctctcgctaaaggtgttggtgtcggcaaatacgtcgcttccgatacgtttatggtcggtggttactcgtgggcaatctacttttatccagatgggaagagtccggaggataactcgtcttacgtttctttgttcatagctcttgctagcgaaggagctgatgttagggctttgtttgagctcacgcttgtggatcagagtggtaatgggaagcataaggttcatagccattttggtagagctctcgatagcggtccctatactctcaagtatcgtggaagcatgtggggatacaagcggtttttcaggaggtccagtctagaatcgtcggattatttgaaggagaatagtctcttggttaggtgccgtgtgggtgtggtgaagtcagttacggagggaccgaggtattacaatatccctgtgccagtttctaacttgggacaacagttgggaaatttattggagagtgggaaaggctgtgatgttgttttccaagttgatggagaaaccttcaacgcacacaaattggttcttgcaacgcgttccccggttttcaacgcacagctttttggccctttaggagaccgaaataccaaatgcataacgatagaagacatggaagcacccattttcaaggtcctccctttaactctcttgctgattgtctattcacggatgtaccatccgggatcttctcctggggcgctactcctattctcgagtttactcacccgggataaggtattgctccattttatctactgggacgaattgcctgatatgcaagagttaataggaacagactctacattggcgtctactcttgtggctcagcatctactagcagcggcagaccgttatgctcttgagcggcttaaagcaatctgtgagtcaaaactctgtgaaggggttgccataaacacggttgcaactactttggccctagcagagcagcatcattgtttgcagctaaaagcagtgtgtctcaaattcgtggcactgccagagaacctgaaagctgtgatgcaaacagatgggtttgattatctgaaagagagttgcccatctttactaacggagctattgcagtatgtggcgaggctaagtgaacactctgttatagtatctggacatcgaaaagaaatatttgccgatggttgtgacgcgagtggaagacgagtgaagccccggttgcactga

SEQ ID NO: 74184 - protein, 442 aa, Arabidopsis thaliana
  peptide (1)..(442): Ceres Seq. ID no. 4995465
MGTTRVCSEVSSGSSKSLSQSLTVSTSTTETVNGFHEFKICGYSLAKGVGVGKYVASDTFMVGGYSWAIYFYPDGKSPEDNSSYVSLFIALASEGADVRALFELTLVDQSGNGKHKVHSHFGRALDSGPYTLKYRGSMWGYKRFFRRSSLESSDYLKENSLLVRCRVGVVKSVTEGPRYYNIPVPVSNLGQQLGNLLESGKGCDVVFQVDGETFNAHKLVLATRSPVFNAQLFGPLGDRNTKCITIEDMEAPIFKVLPLTLLLIVYSRMYHPGSSPGALLLFSSLLTRDKVLLHFIYWDELPDMQELIGTDSTLASTLVAQHLLAAADRYALERLKAICESKLCEGVAINTVATTLALAEQHHCLQLKAVCLKFVALPENLKAVMQTDGFDYLKESCPSLLTELLQYVARLSEHSVIVSGHRKEIFADGCDASGRRVKPRLH

SEQ ID NO: 74185 - protein, 382 aa, Arabidopsis thaliana
  peptide (1)..(382): Ceres Seq. ID no. 4995466
MVGGYSWAIYFYPDGKSPEDNSSYVSLFIALASEGADVRALFELTLVDQSGNGKHKVHSHFGRALDSGPYTLKYRGSMWGYKRFFRRSSLESSDYLKENSLLVRCRVGVVKSVTEGPRYYNIPVPVSNLGQQLGNLLESGKGCDVVFQVDGETFNAHKLVLATRSPVFNAQLFGPLGDRNTKCITIEDMEAPIFKVLPLTLLLIVYSRMYHPGSSPGALLLFSSLLTRDKVLLHFIYWDELPDMQELIGTDSTLASTLVAQHLLAAADRYALERLKAICESKLCEGVAINTVATTLALAEQHHCLQLKAVCLKFVALPENLKAVMQTDGFDYLKESCPSLLTELLQYVARLSEHSVIVSGHRKEIFADGCDASGRRVKPRLH

SEQ ID NO: 74186 - protein, 305 aa, Arabidopsis thaliana
  peptide (1)..(305): Ceres Seq. ID no. 4995467
MWGYKRFFRRSSLESSDYLKENSLLVRCRVGVVKSVTEGPRYYNIPVPVSNLGQQLGNLLESGKGCDVVFQVDGETFNAHKLVLATRSPVFNAQLFGPLGDRNTKCITIEDMEAPIFKVLPLTLLLIVYSRMYHPGSSPGALLLFSSLLTRDKVLLHFIYWDELPDMQELIGTDSTLASTLVAQHLLAAADRYALERLKAICESKLCEGVAINTVATTLALAEQHHCLQLKAVCLKFVALPENLKAVMQTDGFDYLKESCPSLLTELLQYVARLSEHSVIVSGHRKEIFADGCDASGRRVKPRLH

SEQ ID NO: 74187 - DNA, 789 bp, Arabidopsis thaliana
  misc_feature (1)..(789): Ceres Seq. ID no. 4995515
  misc_feature (1)..(789): Ortholog of  Ceres SEQ ID NO 13639476 as cited in SEQ ID NO 58353
atggcgttcacgtggggatctgctctccggatttctgttctccttatccttgtagctgcaattgtcttagcttgttattttctccctgttgagaagctattgaaggattttttgttatgggttgaacaagatctagggccttggggaccttttgccctagctgttgcgtacattcctctaacagttttggctgttcctgcctcggttctcacgctcggtggtggctacctttttgggctgccaattggttttgtggcggactcagtcggtgctacacttggctcaggagctgcatttctactaggccgtacgattggaaaaccttttgtagttgcaaaattaaaggattatcctcagtttcaatcagtggcactcgcgatagagaaatccggcttcaagcatgttgaactacctcttatctgtcacgccaattcggctaggtccatacttgctttcttcgtgccaataacacttgcgttagtgtatgttggaacaactctaaaagacctttctgatgtaactcacaagtggagcgagttctcgccaggtcgctgggcgttcttgatttcgagccttgtaatatccgtgatattaatggtgtgtgttacaaaggtggcgaaggacgctctaagaaaagctttagcagagcacggaggagacatgaacgaagcggttgcagccttgccggagctgaccgttactgatgatgcttcgacggatttaaatgagcctctcttgataaagatagatgcacaacaacctcaagaccaagtaaaccatagtcattaa

SEQ ID NO: 74188 - protein, 262 aa, Arabidopsis thaliana
  peptide (1)..(262): Ceres Seq. ID no. 4995516
MAFTWGSALRISVLLILVAAIVLACYFLPVEKLLKDFLLWVEQDLGPWGPFALAVAYIPLTVLAVPASVLTLGGGYLFGLPIGFVADSVGATLGSGAAFLLGRTIGKPFVVAKLKDYPQFQSVALAIEKSGFKHVELPLICHANSARSILAFFVPITLALVYVGTTLKDLSDVTHKWSEFSPGRWAFLISSLVISVILMVCVTKVAKDALRKALAEHGGDMNEAVAALPELTVTDDASTDLNEPLLIKIDAQQPQDQVNHSH

SEQ ID NO: 74189 - DNA, 1872 bp, Arabidopsis thaliana
  misc_feature (1)..(1872): Ceres Seq. ID no. 4995660
  misc_feature (1)..(1872): Ortholog of  Ceres SEQ ID NO 14307030 as cited in SEQ ID NO 54041
  misc_feature (1)..(1872): Ortholog of  Ceres SEQ ID NO 14302891 as cited in SEQ ID NO 66282
atgctttttaatttgaacgatgaggcaagaattattgggatctcagggatgatcggttcagggaaaaccattcttgccaaggagcttgcgcgggacgaggaggtccgaggccattttgcgaaccgagttttgtttctgactgtgtcacaatctcccaatcttgaggagctgagatcccttatacgggattttcttactggtcatgaggctggctttggtaccgctcttccggaatccgttggtcatacacggaagctagtgatccttgatgatgttaggacaagggaatctctagaccagctgatgttcaatattcctggaaccacaacgcttgtggtctcacagtctaaactcgtagatcctagaaccacctatgatgtagagttattaaatgaacatgacgcaacatctctgttctgtctctctgctttcaaccagaaatcagttccttcagggttcagcaaaagtttggtcaagcaggttgttggggagtctaaaggtctacctttgtctctgaaagtccttggcgcttcattaaacgatcgacctgaaacatattgggcaattgcagtggagaggttatcaagaggtgaacctgttgatgaaactcatgagagtaaagtgtttgctcaaatcgaagcaactctagaaaatctcgatccaaaaaccaaagagtgtttcttggatatgggtgctttccctgaaggcaagaaaatccctgttgatgttctcatcaacatgttggtcaagatacatgatcttgaggacgcagccgcctttgatgttcttgttgatctagcaaataggaatcttcttactctcgtgaaagatccaacgtttgtcgctatgggcactagctactatgatatattcgtgacgcagcacgatgttttaagagatgtagcacttcatcttaccaatcgtggaaaagtaagtagaagagaccgcttattgatgccaaaaagagagaccatgcttcccagcgaatgggagaggagcaatgatgagccatacaatgcacgagtggtttccattcacacaggagaaatgactgagatggactggtttgacatggatttccccaaggcagaagttctgatagtaaacttctcttcagacaactatgtattgcctcctttcattgctaagatgggaatgcttagggtgttcgtgattataaacaacggtacctctccagcgcatctacatgacttccccatccctaccagtttgaccaatctaaggagtctctggcttgagagggttcatgtccctgaactctctagcagtatgatacccttgaaaaacctccacaagctatatctgattatttgcaagatcaataacagttttgatcagacagccatagacattgcccaaatcttcccaaaattgactgatatcacaatagattattgcgatgatcttgcggaactaccttcgaccatctgtggaataacctctctcaactccatcagcataacaaattgtcccaacatcaaggagttaccgaagaatataagtaagctacaagcccttcaacttttgaggctatacgcttgcccagagctaaaatctctgcctgtggaaatctgtgaattgccaagactagtgtatgtcgacatctctcactgtctcagcctaagttctcttccggaaaagataggaaatgtaaggacacttgagaaaatcgacatgagagaatgtagcttatcgagcataccaagttccgcagtttcattgacttccctatgctatgtaacatgctatagagaggctttgtggatgtggaaagaggttgagaaggcagttcccggacttcgtattgaagctactgaaaaatggttcaacatgacttggcccgacgagtag

SEQ ID NO: 74190 - protein, 623 aa, Arabidopsis thaliana
  peptide (1)..(623): Ceres Seq. ID no. 4995661
MLFNLNDEARIIGISGMIGSGKTILAKELARDEEVRGHFANRVLFLTVSQSPNLEELRSLIRDFLTGHEAGFGTALPESVGHTRKLVILDDVRTRESLDQLMFNIPGTTTLVVSQSKLVDPRTTYDVELLNEHDATSLFCLSAFNQKSVPSGFSKSLVKQVVGESKGLPLSLKVLGASLNDRPETYWAIAVERLSRGEPVDETHESKVFAQIEATLENLDPKTKECFLDMGAFPEGKKIPVDVLINMLVKIHDLEDAAAFDVLVDLANRNLLTLVKDPTFVAMGTSYYDIFVTQHDVLRDVALHLTNRGKVSRRDRLLMPKRETMLPSEWERSNDEPYNARVVSIHTGEMTEMDWFDMDFPKAEVLIVNFSSDNYVLPPFIAKMGMLRVFVIINNGTSPAHLHDFPIPTSLTNLRSLWLERVHVPELSSSMIPLKNLHKLYLIICKINNSFDQTAIDIAQIFPKLTDITIDYCDDLAELPSTICGITSLNSISITNCPNIKELPKNISKLQALQLLRLYACPELKSLPVEICELPRLVYVDISHCLSLSSLPEKIGNVRTLEKIDMRECSLSSIPSSAVSLTSLCYVTCYREALWMWKEVEKAVPGLRIEATEKWFNMTWPDE

SEQ ID NO: 74191 - protein, 607 aa, Arabidopsis thaliana
  peptide (1)..(607): Ceres Seq. ID no. 4995662
MIGSGKTILAKELARDEEVRGHFANRVLFLTVSQSPNLEELRSLIRDFLTGHEAGFGTALPESVGHTRKLVILDDVRTRESLDQLMFNIPGTTTLVVSQSKLVDPRTTYDVELLNEHDATSLFCLSAFNQKSVPSGFSKSLVKQVVGESKGLPLSLKVLGASLNDRPETYWAIAVERLSRGEPVDETHESKVFAQIEATLENLDPKTKECFLDMGAFPEGKKIPVDVLINMLVKIHDLEDAAAFDVLVDLANRNLLTLVKDPTFVAMGTSYYDIFVTQHDVLRDVALHLTNRGKVSRRDRLLMPKRETMLPSEWERSNDEPYNARVVSIHTGEMTEMDWFDMDFPKAEVLIVNFSSDNYVLPPFIAKMGMLRVFVIINNGTSPAHLHDFPIPTSLTNLRSLWLERVHVPELSSSMIPLKNLHKLYLIICKINNSFDQTAIDIAQIFPKLTDITIDYCDDLAELPSTICGITSLNSISITNCPNIKELPKNISKLQALQLLRLYACPELKSLPVEICELPRLVYVDISHCLSLSSLPEKIGNVRTLEKIDMRECSLSSIPSSAVSLTSLCYVTCYREALWMWKEVEKAVPGLRIEATEKWFNMTWPDE

SEQ ID NO: 74192 - protein, 522 aa, Arabidopsis thaliana
  peptide (1)..(522): Ceres Seq. ID no. 4995663
MFNIPGTTTLVVSQSKLVDPRTTYDVELLNEHDATSLFCLSAFNQKSVPSGFSKSLVKQVVGESKGLPLSLKVLGASLNDRPETYWAIAVERLSRGEPVDETHESKVFAQIEATLENLDPKTKECFLDMGAFPEGKKIPVDVLINMLVKIHDLEDAAAFDVLVDLANRNLLTLVKDPTFVAMGTSYYDIFVTQHDVLRDVALHLTNRGKVSRRDRLLMPKRETMLPSEWERSNDEPYNARVVSIHTGEMTEMDWFDMDFPKAEVLIVNFSSDNYVLPPFIAKMGMLRVFVIINNGTSPAHLHDFPIPTSLTNLRSLWLERVHVPELSSSMIPLKNLHKLYLIICKINNSFDQTAIDIAQIFPKLTDITIDYCDDLAELPSTICGITSLNSISITNCPNIKELPKNISKLQALQLLRLYACPELKSLPVEICELPRLVYVDISHCLSLSSLPEKIGNVRTLEKIDMRECSLSSIPSSAVSLTSLCYVTCYREALWMWKEVEKAVPGLRIEATEKWFNMTWPDE

SEQ ID NO: 74193 - DNA, 477 bp, Arabidopsis thaliana
  misc_feature (1)..(477): Ceres Seq. ID no. 4995888
  misc_feature (1)..(477): Ortholog of  Ceres SEQ ID NO 15226408 as cited in SEQ ID NO 55563
atggctctactgcaatatcaacgcgagaatctccattatctcagtgaagaggtgacaatccatggaatatttatcatgagtacttcatttctgaatcttgatgcttgtgatattctgcgtttgcaggagtccttaagtaaatatgaaacgaatggtagtagcacgcctcaggttgatctggcgcatcttgtggcaactcgagatcaggaattacgaacactatctgctgaggtggatcaactccattcagagcttaatctcgctcgatctctgatctctgagagagatagagagatacaacacgtccggaataccaataatcagtatgtagcagaaaatgaaaggttaagagctattcttggagaatggagtatgcgagctgcaaagcttgaacgagctctggaggtggagagaatatcaaatattgaactgcggaagaaagtttcagctctcagagaccagaggcaggtggcatga

SEQ ID NO: 74194 - protein, 158 aa, Arabidopsis thaliana
  peptide (1)..(158): Ceres Seq. ID no. 4995889
MALLQYQRENLHYLSEEVTIHGIFIMSTSFLNLDACDILRLQESLSKYETNGSSTPQVDLAHLVATRDQELRTLSAEVDQLHSELNLARSLISERDREIQHVRNTNNQYVAENERLRAILGEWSMRAAKLERALEVERISNIELRKKVSALRDQRQVA

SEQ ID NO: 74195 - protein, 133 aa, Arabidopsis thaliana
  peptide (1)..(133): Ceres Seq. ID no. 4995890
MSTSFLNLDACDILRLQESLSKYETNGSSTPQVDLAHLVATRDQELRTLSAEVDQLHSELNLARSLISERDREIQHVRNTNNQYVAENERLRAILGEWSMRAAKLERALEVERISNIELRKKVSALRDQRQVA

SEQ ID NO: 74196 - DNA, 1095 bp, Arabidopsis thaliana
  misc_feature (1)..(1095): Ceres Seq. ID no. 4995940
  misc_feature (1)..(1095): Ortholog of  Ceres SEQ ID NO 13595351 as cited in SEQ ID NO 55934
  misc_feature (1)..(1095): Ortholog of  Ceres SEQ ID NO 13639645 as cited in SEQ ID NO 57488
atgcaatttttttgtgtaaatttgtatcgatcggtgctcaatctccttgaggagaggatgaagacggagatgatagaagagatggtgatagtaggaggtttagtaatggttcaatttgtatacgcaggcaattctttgctcatgagttatttgatgtcactcggtcttggccctttcaccattgtcatcttttctacattcgccactttcataatcctctcccctttcgccattctcttcgaaaggaagcaatggccaaatgagcttagcttgaggctgattggtaagctagttttgatctcctttgcaggggttactctgttccagtctctgtttctagaaggaatcaggttgacatcaccagcaatggcaacagcgatgccaaatcttgctcctggtctcatttttttcatcgcttggatcgttgggttagagaagatgaatctgaaatgtgtgtacagcaagttgaagatcttagggacattgttgtgcgtatttggcgctttagctatgagcgtaatgcacagcacttcgatcagtcacaaagaagaagatgacactccaatattcgtctttgatcgagacaaggtcgttggatgtatctaccttcttggagccgtctttgttttatccaccaacgtcgttcttcaggcgtcaacgttggcagagttcccggcaccgatatcgttaagtgcaataacggcattactaggagtgttgataacaacggtggtactactattacaaaaccgaaaaacaaaagtacttgccagttcattaattagtttcggtaacctcgttggttattctgtcctggcaggggcagtgagtggagcatgtgttagctttaatggatgggccatgaagaaacgtggaccggttttcgtttcaatgtttagtcctttcgctaccgttatttcggttgctttcgccgttttgacattaggagagtccgttagccttggaagtgtgggagggatggtgttgatgttcgtagggctataccttgtgttatgggctaaaggcaaagaagggttctctgaaattgagagttttgagagtgagttcgactctaagaagcctcttttgtcttga

SEQ ID NO: 74197 - protein, 364 aa, Arabidopsis thaliana
  peptide (1)..(364): Ceres Seq. ID no. 4995941
MQFFCVNLYRSVLNLLEERMKTEMIEEMVIVGGLVMVQFVYAGNSLLMSYLMSLGLGPFTIVIFSTFATFIILSPFAILFERKQWPNELSLRLIGKLVLISFAGVTLFQSLFLEGIRLTSPAMATAMPNLAPGLIFFIAWIVGLEKMNLKCVYSKLKILGTLLCVFGALAMSVMHSTSISHKEEDDTPIFVFDRDKVVGCIYLLGAVFVLSTNVVLQASTLAEFPAPISLSAITALLGVLITTVVLLLQNRKTKVLASSLISFGNLVGYSVLAGAVSGACVSFNGWAMKKRGPVFVSMFSPFATVISVAFAVLTLGESVSLGSVGGMVLMFVGLYLVLWAKGKEGFSEIESFESEFDSKKPLLS

SEQ ID NO: 74198 - protein, 345 aa, Arabidopsis thaliana
  peptide (1)..(345): Ceres Seq. ID no. 4995942
MKTEMIEEMVIVGGLVMVQFVYAGNSLLMSYLMSLGLGPFTIVIFSTFATFIILSPFAILFERKQWPNELSLRLIGKLVLISFAGVTLFQSLFLEGIRLTSPAMATAMPNLAPGLIFFIAWIVGLEKMNLKCVYSKLKILGTLLCVFGALAMSVMHSTSISHKEEDDTPIFVFDRDKVVGCIYLLGAVFVLSTNVVLQASTLAEFPAPISLSAITALLGVLITTVVLLLQNRKTKVLASSLISFGNLVGYSVLAGAVSGACVSFNGWAMKKRGPVFVSMFSPFATVISVAFAVLTLGESVSLGSVGGMVLMFVGLYLVLWAKGKEGFSEIESFESEFDSKKPLLS

SEQ ID NO: 74199 - protein, 341 aa, Arabidopsis thaliana
  peptide (1)..(341): Ceres Seq. ID no. 4995943
MIEEMVIVGGLVMVQFVYAGNSLLMSYLMSLGLGPFTIVIFSTFATFIILSPFAILFERKQWPNELSLRLIGKLVLISFAGVTLFQSLFLEGIRLTSPAMATAMPNLAPGLIFFIAWIVGLEKMNLKCVYSKLKILGTLLCVFGALAMSVMHSTSISHKEEDDTPIFVFDRDKVVGCIYLLGAVFVLSTNVVLQASTLAEFPAPISLSAITALLGVLITTVVLLLQNRKTKVLASSLISFGNLVGYSVLAGAVSGACVSFNGWAMKKRGPVFVSMFSPFATVISVAFAVLTLGESVSLGSVGGMVLMFVGLYLVLWAKGKEGFSEIESFESEFDSKKPLLS

SEQ ID NO: 74200 - DNA, 1618 bp, Arabidopsis thaliana
  misc_feature (1)..(1618): Ceres Seq. ID no. 4996480
  misc_feature (1)..(1618): Ortholog of  Ceres SEQ ID NO 14303850 as cited in SEQ ID NO 53464
  misc_feature (1)..(1618): Ortholog of  Ceres SEQ ID NO 13656177 as cited in SEQ ID NO 64997
aagcatttgggggaaatcaatcgaaaaccctaggagagataaaaacaaaaatctagacggagatttatggcgacagcgaatcctggccgtggaggtggtagaagaggcggtggagctatggatgacgataagttggtcttcgagactaccgatggaattgagcccatcacgagcttcaatgatatgggcattaaggaagatgtgcttcgcggtgtctacgaatatggattcgagaagccttccgcgattcagcagagggctgttatgccgattcttcaaggacgtgatgttattgctcaagctcagtccggtaccgggaagacatctatgattgctctctccgtttgtcaagtcgttgatacttcttctagagaggttcaggccttgatattatccccaacaagagagctggctacacaaacagagaagacgatacaagctattggattacatgccaatattcaggcacatgcttgcatcggtgggaatagtgttggagaagacatcaggaagctggagcatggtgttcatgttgtgtctgggacacctggtcgtgtctgtgacatgataaagaggagaagtcttcgtaccagagctattaaacttctgattcttgatgaatcagatgaaatgctgagcagagggttcaaggaccagatctatgatgtttacagatatcttccaccagatcttcaggtttgcttggtttctgcaactcttcctcacgagattttggagatgacatccaagtttatgacagaaccagtgaagatacttgtgaagcgtgatgagttgactcttgaaggaatcaaacaattttttgttgctgttgagaaggaagagtggaaatttgatacactctgtgatctttatgacacgcttactatcactcaagctgttatcttctgcaatactaaacgaaaggtggattatcttagtgagaaaatgagaagtcacaacttcactgtctcatcaatgcatggagacatgcctcagaaggagagagacgccatcatgaatgagtttcggtcaggtgatagtcgtgttttgataacaacagatgtatgggcacgtgggattgatgtgcaacaagtttctcttgttatcaattatgatctccccaacaaccgtgagctctacatccatcgtattgggcggtctggtcgattcgggcgtaagggtgttgcaatcaactttgttaaaagcgacgacatcaagattctcagagacattgagcagtactacagtacccagattgatgagatgccaatgaatgtagctgatcttatctaaaagagcttgtctgagatttttgtgctttcagcggggaagtgtctggatgaaaaagtattgttgagcgcttctgtcaaattattgcactatcttaacggtgtatttcctttgatgtttctgtgggctcttttgaacaaacttaaactcgcgtgtggtaaatgtttaatgacttgagaagcgatttaggtttagggtttggaccgtttggtttttcgtttcctcgtaattgattctgggggctttgattgtggtttgtgggtcaaaactctcaactatcactacttgtaagacttttgctcgacagttgaaacggttcattgttatc

SEQ ID NO: 74201 - protein, 408 aa, Arabidopsis thaliana; identical to SEQ ID NO: 28696
  peptide (1)..(408): Ceres Seq. ID no. 4996481

SEQ ID NO: 74202 - protein, 391 aa, Arabidopsis thaliana; identical to SEQ ID NO: 28697
  peptide (1)..(391): Ceres Seq. ID no. 4996482

SEQ ID NO: 74203 - protein, 369 aa, Arabidopsis thaliana; identical to SEQ ID NO: 28698
  peptide (1)..(369): Ceres Seq. ID no. 4996483

SEQ ID NO: 74204 - DNA, 1132 bp, Arabidopsis thaliana
  misc_feature (1)..(1132): Ceres Seq. ID no. 4996634
  misc_feature (1)..(1132): Ortholog of  Ceres SEQ ID NO 13661768 as cited in SEQ ID NO 61427
  misc_feature (1)..(1132): Ortholog of  Ceres SEQ ID NO 15179176 as cited in SEQ ID NO 0
aatcgaattttgttgtgtgtgacctcaaactgacaacttccagtaattgtaatattaccaatttttttataaaaaagatgaacttcactttagagcaatagcaatccctcgagtctcccctatataaagattccaactccttaacgattcatctaatgaaaaaacacacacaccaaaaatatcagatatctcaaacaatgtcttcagtttttggatctgtccatatcttggccatgatagccatacaactcctccttacacacagtgtttcatctctgaaccttaccaatgcgtatctgcaccacaaatgcagcaacactcaaggaaaatataagcaggggagcgcgttcgagaaaaatctcaacttagtcctcagtaccatcacctcgattggaaattttcgtgacggtttccgctacaccgaagaaggtgaggatcccaataacgtctttgtcatgttccagtgtcgcggcgactcctactggtccaagtgccccccttgcattagcaccgccgtctctgggcttcgtaggagatgtccaagaaataagggagcaataatatggtatgaccaatgtcttttaaagatatcttcagttgcctccttcaataagatagattatgagaacgatttctatttgtccaacccaaacaacatgagtgatcgggggttgttcaacaaggagacgtcggctctcctggagaagctggcatataaagcctccgatagaaacaacttggatggtaaacaattggtgttgtacgcagcaggggagaagagaattgggacaaagaaggtgtatgcaatggtgcagtgtacgaaagacttaatatttacaaagtgctttgagtgtttggaagggattttgaggaagtttccacagtgttgtgacggtaaacgaggagggagagttttcggtacgagctgtaactttaggtatgagttatatccttttcttagaaactacagcaacagtacaatgagagctccatattaaatgaaagggttctagagataaacagtcttataatatacactgtgttgcattttagtacgtgaacttgagcgaataaatgtactttcctctttgtgatttttgttttttttttgtgaacttgagttattaagagg

SEQ ID NO: 74205 - protein, 280 aa, Arabidopsis thaliana; identical to SEQ ID NO: 71993
  peptide (1)..(280): Ceres Seq. ID no. 4996635

SEQ ID NO: 74206 - protein, 266 aa, Arabidopsis thaliana; identical to SEQ ID NO: 71994
  peptide (1)..(266): Ceres Seq. ID no. 4996636

SEQ ID NO: 74207 - protein, 254 aa, Arabidopsis thaliana; identical to SEQ ID NO: 71995
  peptide (1)..(254): Ceres Seq. ID no. 4996637

SEQ ID NO: 74208 - DNA, 1531 bp, Arabidopsis thaliana
  misc_feature (1)..(1531): Ceres Seq. ID no. 4996658
  misc_feature (1)..(1531): Ortholog of  Ceres SEQ ID NO 12578784 as cited in SEQ ID NO 20729
  misc_feature (1)..(1531): Ortholog of  Ceres SEQ ID NO 13658847 as cited in SEQ ID NO 66674
atcgtcgtcttctattttttcttctttcttcgatttcataccaaaacaagaactctctgttttcgacaaaaacgaaaccttgagatctattttgattgacttttaagaaagagagagatctttcttagaagattttgtctcgtcggcattgaagatccagggtttgtctttcgaaattcagagagaaaatgggtgatgaggcagagatcaaggaacatttaaagccacaagcttcatctgaaacaatggacaagaaacataatgtgaaagggaagaggttatggcagaaagtcaagtatcaattggtggagtttcattcattgcctgcttatttaagagacaatgagtacatcattggtcattaccgatccgaatggccgatcaaacagattcttctcagcatctttaccattcataatgagactttgaatgtttggacgcacttgattgggtttttcctgtttttggcgctcactatatacactgcaacgaaagtaccgagtgtcgtggatcttcattcgcttcaacaccgtttacccgatttgttgaggaaaacagatctccacaaacttcattctgagctcatggctcgccttccttctagtccatctagttggcatgtgatggaccttctttataactgtttgcctgaaagattttctcatggcaactacactgacatgtgtgttctgcattctgtgagggaagatcttgcaaacttgatagctcctttgatcttcaggccaattactcgatggccgttttatgcatttctaggtggtgctatgttctgtctattagcaagcagcacgtgccacctcctctcatgtcactccgagcgagtctcctacataatgcttaggcttgattacgccggcatcgcagctctaatagcgacttccttctaccctccggtttattactccttcatgtgtgatcctttcttctgcaacctctacttaggattcataaccatcttaggaatcgccactgtgcttgtttctctcctcccggttttccaaagcccggagtttcgggtggtgagggcgtctctgttctttggaatgggattctctggcttagctccgattcttcacaagctgataatcttttgggaccaacctgaagcccttcacacgacaggttatgagattttgatgggtttgctttatgggttaggagctctggtttatgcaactaggatcccagagagatggatgccgggtaaattcgatatagcaggacatagccatcagttgtttcatgttctggttgttgctggtgcgttcacgcactatagagctgggctagtgtatcttaagtggagagatattgaaggatgttgaagatgaagattgaagattagatggaatctttgaatcttgtttgtagtagcttcatataaaagttggattatgtaaagtcttatatgtaatcaaacgtttaattgtttcctttattcaacaaaggatttatattgttaatccacatatgtattactggttaaagaagctgaaggattcatattttt

SEQ ID NO: 74209 - protein, 385 aa, Arabidopsis thaliana; identical to SEQ ID NO: 37016
  peptide (1)..(385): Ceres Seq. ID no. 4996659

SEQ ID NO: 74210 - protein, 366 aa, Arabidopsis thaliana; identical to SEQ ID NO: 37017
  peptide (1)..(366): Ceres Seq. ID no. 4996660

SEQ ID NO: 74211 - protein, 253 aa, Arabidopsis thaliana; identical to SEQ ID NO: 37018
  peptide (1)..(253): Ceres Seq. ID no. 4996661

SEQ ID NO: 74212 - DNA, 1290 bp, Arabidopsis thaliana
  misc_feature (1)..(1290): Ceres Seq. ID no. 4996759
  misc_feature (1)..(1290): Ortholog of  Ceres SEQ ID NO 15170659 as cited in SEQ ID NO 67270
  misc_feature (1)..(1290): Ortholog of  Ceres SEQ ID NO 15177722 as cited in SEQ ID NO 0
gagagagctcctgtgaagtgacgaagagacgaagaagaaagagaacattaatggcggctactccgtggtactttgtcgcagtacttctcaccattcttaccagctctcaggggattctaacaactctttctcaaagtgatggaggttataagtatgattatgctactgttccctttcttgctgaagtttttaagctgatcatttctggtttatttctctggagagagatgcggacatcttcctcaacaacttcaaggattactacggattggaagagtgtgcgattatttgttattccgtctcttatttatctgatacataacaatgtgcagtttgctacattgacttatgtggatacgtccacttatcagataatgggtaatttgaagattgtgaccactggcatactgtttaggttatttttgaaaaggaaactatctaaacttcagtggatggcaattggtcttttagctgttggaacaactaccagccaggttaagggttgtggagaagcttcttgtgattctttattcacggcaccaatacaaggttatttgctgggcatcctctcagctggtttgtccgcgctagctggaatctacacagagtttctgatgaagagaaacaatgacaccttatactggcaaaacttgcagttatatacgtttggttcacttttcaacgtagctcgacttatagcagatgatttcagacacgggtttgaaaagggtccttggtggcaacgtatctttgatgggtacagcatcaccacttggctggtagttctgaatctcggatccactggcttactggtctcgtggttaatgaagtatgcagacaacatcgtcaaggtttattctacatcaatggcgatgctacttactatggttgcatccatatacctttttagcttcaaaccgacactgcagcttttcttgggtattgtcatatgcatcatgtcactccatatgtactttgctcctccacacacgctcgtggacttgcccgtgacaaacgaagcacatgccaagaccttaaagcaagttgtcgtagaagaaaagacagattcttgaattaaattggacgaaaaggttagttgaacacatagaaaacaatttgctaagtaaatgaacacaatgatcttcttctagcttcatttctattagagaatgagaaacttggatgtgagttcttttgaagaaatgatctgatagtttgtttattcacgtaccgattcttttctttgtaaatgtacatcgaggtgcctagaaatagtaaattcgattgttg

SEQ ID NO: 74213 - protein, 356 aa, Arabidopsis thaliana
  peptide (1)..(356): Ceres Seq. ID no. 4996760
ESSCEVTKRRRRKRTLMAATPWYFVAVLLTILTSSQGILTTLSQSDGGYKYDYATVPFLAEVFKLIISGLFLWREMRTSSSTTSRITTDWKSVRLFVIPSLIYLIHNNVQFATLTYVDTSTYQIMGNLKIVTTGILFRLFLKRKLSKLQWMAIGLLAVGTTTSQVKGCGEASCDSLFTAPIQGYLLGILSAGLSALAGIYTEFLMKRNNDTLYWQNLQLYTFGSLFNVARLIADDFRHGFEKGPWWQRIFDGYSITTWLVVLNLGSTGLLVSWLMKYADNIVKVYSTSMAMLLTMVASIYLFSFKPTLQLFLGIVICIMSLHMYFAPPHTLVDLPVTNEAHAKTLKQVVVEEKTDS

SEQ ID NO: 74214 - protein, 340 aa, Arabidopsis thaliana; identical to SEQ ID NO: 39084
  peptide (1)..(340): Ceres Seq. ID no. 4996761

SEQ ID NO: 74215 - protein, 281 aa, Arabidopsis thaliana; identical to SEQ ID NO: 39085
  peptide (1)..(281): Ceres Seq. ID no. 4996762

SEQ ID NO: 74216 - DNA, 1488 bp, Arabidopsis thaliana
  misc_feature (1)..(1488): Ceres Seq. ID no. 4997173
  misc_feature (1)..(1488): Ortholog of  Ceres SEQ ID NO 15172020 as cited in SEQ ID NO 59739
atgatagcagccgcagtgcattaccgtctgcggaggctacgtgacaccaaaatcatccctcgtctcaaatcatctcacaaacacaaaggccatgagaaactcgagagattctctcattacgtcgcaaggcaaatgggattcaaggacagaagagagtgtccaaatctctgcaagttagcagcagaatacataagtaaatctgaatgttgtgaagaagacatttacagctttttctctgaagaacctgatgctgataccctcttcattaagcttgttgaggagtttgaaagatgcattctcagctactttgcgtttcactggagccacgccgatctcatgattactcaggtactgagcgctgatgctgagccaaagaggaagctgaaacaaattgtgatggcagctacaagggagctgaggattaagagggtgactaagaacttaaaagtggcaagagtgttcaacactttggtagaggaaatgagagcaatggggctcgcgtctgtggatgactcgcagtgcacagaagttatggcaccagtggctcacaaagacagaagtccagtgctactccttatgggtggtgggatgggtgcagggaaaagcactgtgcttaaggacatactcaaagaagcattctgggcaggagcagactctgtggtgattgaagctgatgctttcaaagagtctgatgtcatttacagagccttaagctctcgtggccatgtcgatatgatccagacagctgaattggttcatcagtcatcaacagatgcagcttcatccctgctagtgacggctctgaacgaaggaagggatgtgataatggatgggacactctcttgggtaccttttgtggtgcagacaataacaatggcgaggaacgtacaccgacaccattacagaatgggagctggatacaaggttggtgatgatggagttataacagagaactattgggaacgaattggtgaaaggcaacagattcaagaggatggtcgtaggagaaaaccgtatagaatagaactagttggagttgtgtgcgatgcgtatttagcagttataagaggcattaggagagctatcatgtgcagaagagcagttagggtgagatcacagctgagatctcacaaacggtttgcggaagcatttcctacatattgcagccttgtcgacaatgctaggctctactgcactaacgcgctggaaggctctccaaagctgataggttggaaagaaaaggaaaagacattgctagtagatacagaagagatagattgtttgaagcgagtaggagggttaaacgagaacgcaggctccatttacgagctctatagacaacccaaccctgcttgtgaagcaggttcaatctggaaagacattgttctttcaccttcaaggtttagcattcaacaggaactcaaatattccattcagaaagttgaaaaaagatctaaacaacatctcatcaacaacaccaaaagctga

SEQ ID NO: 74217 - protein, 495 aa, Arabidopsis thaliana
  peptide (1)..(495): Ceres Seq. ID no. 4997174
MIAAAVHYRLRRLRDTKIIPRLKSSHKHKGHEKLERFSHYVARQMGFKDRRECPNLCKLAAEYISKSECCEEDIYSFFSEEPDADTLFIKLVEEFERCILSYFAFHWSHADLMITQVLSADAEPKRKLKQIVMAATRELRIKRVTKNLKVARVFNTLVEEMRAMGLASVDDSQCTEVMAPVAHKDRSPVLLLMGGGMGAGKSTVLKDILKEAFWAGADSVVIEADAFKESDVIYRALSSRGHVDMIQTAELVHQSSTDAASSLLVTALNEGRDVIMDGTLSWVPFVVQTITMARNVHRHHYRMGAGYKVGDDGVITENYWERIGERQQIQEDGRRRKPYRIELVGVVCDAYLAVIRGIRRAIMCRRAVRVRSQLRSHKRFAEAFPTYCSLVDNARLYCTNALEGSPKLIGWKEKEKTLLVDTEEIDCLKRVGGLNENAGSIYELYRQPNPACEAGSIWKDIVLSPSRFSIQQELKYSIQKVEKRSKQHLINNTKS

SEQ ID NO: 74218 - protein, 451 aa, Arabidopsis thaliana
  peptide (1)..(451): Ceres Seq. ID no. 4997175
MGFKDRRECPNLCKLAAEYISKSECCEEDIYSFFSEEPDADTLFIKLVEEFERCILSYFAFHWSHADLMITQVLSADAEPKRKLKQIVMAATRELRIKRVTKNLKVARVFNTLVEEMRAMGLASVDDSQCTEVMAPVAHKDRSPVLLLMGGGMGAGKSTVLKDILKEAFWAGADSVVIEADAFKESDVIYRALSSRGHVDMIQTAELVHQSSTDAASSLLVTALNEGRDVIMDGTLSWVPFVVQTITMARNVHRHHYRMGAGYKVGDDGVITENYWERIGERQQIQEDGRRRKPYRIELVGVVCDAYLAVIRGIRRAIMCRRAVRVRSQLRSHKRFAEAFPTYCSLVDNARLYCTNALEGSPKLIGWKEKEKTLLVDTEEIDCLKRVGGLNENAGSIYELYRQPNPACEAGSIWKDIVLSPSRFSIQQELKYSIQKVEKRSKQHLINNTKS

SEQ ID NO: 74219 - protein, 383 aa, Arabidopsis thaliana
  peptide (1)..(383): Ceres Seq. ID no. 4997176
MITQVLSADAEPKRKLKQIVMAATRELRIKRVTKNLKVARVFNTLVEEMRAMGLASVDDSQCTEVMAPVAHKDRSPVLLLMGGGMGAGKSTVLKDILKEAFWAGADSVVIEADAFKESDVIYRALSSRGHVDMIQTAELVHQSSTDAASSLLVTALNEGRDVIMDGTLSWVPFVVQTITMARNVHRHHYRMGAGYKVGDDGVITENYWERIGERQQIQEDGRRRKPYRIELVGVVCDAYLAVIRGIRRAIMCRRAVRVRSQLRSHKRFAEAFPTYCSLVDNARLYCTNALEGSPKLIGWKEKEKTLLVDTEEIDCLKRVGGLNENAGSIYELYRQPNPACEAGSIWKDIVLSPSRFSIQQELKYSIQKVEKRSKQHLINNTKS

SEQ ID NO: 74220 - DNA, 1173 bp, Arabidopsis thaliana
  misc_feature (1)..(1173): Ceres Seq. ID no. 4997839
  misc_feature (1)..(1173): Ortholog of  Ceres SEQ ID NO 13581775 as cited in SEQ ID NO 51066
  misc_feature (1)..(1173): Ortholog of  Ceres SEQ ID NO 13595727 as cited in SEQ ID NO 57082
  misc_feature (1)..(1173): Ortholog of  Ceres SEQ ID NO 15171152 as cited in SEQ ID NO 60275
atgtcgagcttattacactgtagaaatgtcgtagattgtgcgtttacttcttccactgttcgtcgcattgtcaatttagggtttttagtgggtagaataagaacgttgtgttcagtgtcacaagtgaaatcagagaatctcgaaaagcaaaaaccatgtttggaatcttttacagtttcttatctcgtggattcttgtggactgtctttggaatctgctaaatcgaattccagattcgtcaaattggtttcgtccaagaaaccagactctgttcttgctctcttcaaggaccatggcttcaccaatgaccagatcaccagtgtcatcaaatcctttcctcgtgttctgtcactgagcccggaagatgtaatctcgcccaagctcatgtttttcagttctatcgggttttcgacctcggatactgcgaaaatgatctcttcttccccgaaaatgctatcatatagcttgcacaaaagattgatcccttgctatgattccctcaagagcatactcgttgaggaagaaagtgttgtcaagtgtctcaagcgtggaatcagatgtttctcattgaagattacacattgtgtgtctcttcgtgtctccatttgtagagagcttggagttcctgacaaaagcatcaagtggttggttcaagcgtctccattcacttttttctctcgtgagagaagattcaacgaggtcttaaacagagtttgcagctacggttttgacccgaaaaaggcgggttttgttcacgctatggtagcctttgattgcacgagtgaatcagcaatggagcggaaatttaagttgttccaatgttttggttggtctaaagaagatttcgtcgcagcgatcatgagattcccaaactgtgtgacggtttcagatgagaagataatgtacacattggagtaccttgtaaacaacattggtctgcaagctcgtgacattgttgcaagaccggtggtgttatctctgagcatggagaagagaatcaaaccgaggaaccaggtcatctctttgcttctctccaaaggacttgtgaagaaggaagacatcaactatttcactatactaaagctgaaaagctccgagttcatggataagtttgtgctgaaatatcaggatgagatgccacaacttgtacaaccctttacaagtaatcgatga

SEQ ID NO: 74221 - protein, 390 aa, Arabidopsis thaliana
  peptide (1)..(390): Ceres Seq. ID no. 4997840
MSSLLHCRNVVDCAFTSSTVRRIVNLGFLVGRIRTLCSVSQVKSENLEKQKPCLESFTVSYLVDSCGLSLESAKSNSRFVKLVSSKKPDSVLALFKDHGFTNDQITSVIKSFPRVLSLSPEDVISPKLMFFSSIGFSTSDTAKMISSSPKMLSYSLHKRLIPCYDSLKSILVEEESVVKCLKRGIRCFSLKITHCVSLRVSICRELGVPDKSIKWLVQASPFTFFSRERRFNEVLNRVCSYGFDPKKAGFVHAMVAFDCTSESAMERKFKLFQCFGWSKEDFVAAIMRFPNCVTVSDEKIMYTLEYLVNNIGLQARDIVARPVVLSLSMEKRIKPRNQVISLLLSKGLVKKEDINYFTILKLKSSEFMDKFVLKYQDEMPQLVQPFTSNR

SEQ ID NO: 74222 - protein, 262 aa, Arabidopsis thaliana
  peptide (1)..(262): Ceres Seq. ID no. 4997841
MFFSSIGFSTSDTAKMISSSPKMLSYSLHKRLIPCYDSLKSILVEEESVVKCLKRGIRCFSLKITHCVSLRVSICRELGVPDKSIKWLVQASPFTFFSRERRFNEVLNRVCSYGFDPKKAGFVHAMVAFDCTSESAMERKFKLFQCFGWSKEDFVAAIMRFPNCVTVSDEKIMYTLEYLVNNIGLQARDIVARPVVLSLSMEKRIKPRNQVISLLLSKGLVKKEDINYFTILKLKSSEFMDKFVLKYQDEMPQLVQPFTSNR

SEQ ID NO: 74223 - protein, 247 aa, Arabidopsis thaliana
  peptide (1)..(247): Ceres Seq. ID no. 4997842
MISSSPKMLSYSLHKRLIPCYDSLKSILVEEESVVKCLKRGIRCFSLKITHCVSLRVSICRELGVPDKSIKWLVQASPFTFFSRERRFNEVLNRVCSYGFDPKKAGFVHAMVAFDCTSESAMERKFKLFQCFGWSKEDFVAAIMRFPNCVTVSDEKIMYTLEYLVNNIGLQARDIVARPVVLSLSMEKRIKPRNQVISLLLSKGLVKKEDINYFTILKLKSSEFMDKFVLKYQDEMPQLVQPFTSNR

SEQ ID NO: 74224 - DNA, 2442 bp, Arabidopsis thaliana
  misc_feature (1)..(2442): Ceres Seq. ID no. 4998133
  misc_feature (1)..(2442): Ortholog of  Ceres SEQ ID NO 14310620 as cited in SEQ ID NO 53662
atgggaggtagtagcggcggcggagtttcttatcgtagcggcggcgaatcagacgtggaattagaggattacgaggttgatgatttcagagatgggattgtagaatcgcgaggaaacagattcaatcctctcaccaatttcttagggttagacttcgccggcggtagcggtggaaagttcaccgtcattaatggaatcagagatatctccagaggctccattgttcatcccgataaccggtggtacaaggcgtggacgatgtttatattgatatgggcactttattcttccttcttcactccattggaattcggattcttcaggggattaccagagaatctgttcatcctcgatatcgctggccaaatcgctttcttagtagatattgtcttgacattcttcgttgcttatcgtgatagccgaacttatagaatgatctataaacgcagctcaattgctttacggtacttaaaatcaacttttataattgacttacttgcttgcatgccatgggatatcatctacaaggctgcaggcgaaaaagaagaagtgagatacctattgttgataaggctatatcgagttcatagagtaatcctgtttttccacaaaatggagaaagatataagaatcaattacctttttacaagaatcgtcaagcttatattcgtcgagctttattgcactcacaccgcagcttgtatcttctattacttggccacgacgcttcctgcttctcaagaagggtacacttggattggaagcttgaagttaggagattacagttactcgaagtttagagagatcgatctctggactcgatacactacttctatgtactttgcagttgttactatggcaactgttggttatggagatatacacgcggttaatatgcgggaaatgatattcgcgatggtctacatttcattcgatatgattctaggagcttacttgattggtaacatgacagctttgattgtaaaaggttcgaaaacagagagattccgggataagatggctgatatcatgcggtatatgaaccgaaacaaactcggtaggaacatccgtggtcagattaccggacatttgcggttgcagtacgaaagcagctacactgaagcagctgttcttcaagacattcctgtctctatccgtgctaagattgcgcaaactttatacttgccgtatattgagaaagttcctctctttcgcggatgctcatctgaattcattaaccagattgttataagacttcatgaagagttctttcttcctggagaagttataatggagcaaggaagcgtcgttgatcagctctactttgtttgtcacggtgtattggaggagataggtataacaaaggatggatctgaagaaatagtggcagttctacaaccagatcattcttttggagagatttcaatcctctgcaatattcctcagccttacacggttagagttgcagagctatgtcggattctaaggcttgacaagcaatctttcatgaacatactcgagatatttttccatgatggacggaggattctcaacaatctgcttgaagggaaagaatctaatgtccggattaagcaactagaatccgatataacctttcatatcagtaaacaagaggcagagctagctctgaagttgaatagtgcggctttctacggtgatctttatcagcttaagagtttgattcgagctggaggtgacccgaataagacagattatgacggaagatcgcctttgcatcttgcagcctctagaggatatgaagatattacattatatcttatacaagaatcagttgatgtaaatatcaaagataaattggggagcacacctttactagaagcaatcaagaatgggaatgatcgtgttgcggcgttgcttgttaaagaaggagctacgttgaacatagagaacgcagggactttcctttgcaccgtggttgcgaaaggagacagcgatttcttgaaacggcttcttagtaacggaattgatcctaattccaaagattatgatcacagaacacctcttcatgtagctgcctctgaaggattttatgtcttggcgatccaattggtagaagcaagtgctaatgttcttgcaaaagacagatggggaaacacacctcttgatgaagctttgggttgtgggaacaagatgttgataaagttactcgaagacgctaagaattctcaaatctcttcgtttccgagtggctccaaagagcctaaagataaagtctataagaagaaatgtacagtgtatttttcacatcctggtgattcgaaagagaaaagaaggcgcgggattgtactgtgggtacctcgaagcatcgaggagcttataagaacagcaaaggagcagctgaatgttccggaggcttcttgtgtattatctgaagatgaagccaaaattattgatatttga

SEQ ID NO: 74225 - protein, 813 aa, Arabidopsis thaliana
  peptide (1)..(813): Ceres Seq. ID no. 4998134
MGGSSGGGVSYRSGGESDVELEDYEVDDFRDGIVESRGNRFNPLTNFLGLDFAGGSGGKFTVINGIRDISRGSIVHPDNRWYKAWTMFILIWALYSSFFTPLEFGFFRGLPENLFILDIAGQIAFLVDIVLTFFVAYRDSRTYRMIYKRSSIALRYLKSTFIIDLLACMPWDIIYKAAGEKEEVRYLLLIRLYRVHRVILFFHKMEKDIRINYLFTRIVKLIFVELYCTHTAACIFYYLATTLPASQEGYTWIGSLKLGDYSYSKFREIDLWTRYTTSMYFAVVTMATVGYGDIHAVNMREMIFAMVYISFDMILGAYLIGNMTALIVKGSKTERFRDKMADIMRYMNRNKLGRNIRGQITGHLRLQYESSYTEAAVLQDIPVSIRAKIAQTLYLPYIEKVPLFRGCSSEFINQIVIRLHEEFFLPGEVIMEQGSVVDQLYFVCHGVLEEIGITKDGSEEIVAVLQPDHSFGEISILCNIPQPYTVRVAELCRILRLDKQSFMNILEIFFHDGRRILNNLLEGKESNVRIKQLESDITFHISKQEAELALKLNSAAFYGDLYQLKSLIRAGGDPNKTDYDGRSPLHLAASRGYEDITLYLIQESVDVNIKDKLGSTPLLEAIKNGNDRVAALLVKEGATLNIENAGTFLCTVVAKGDSDFLKRLLSNGIDPNSKDYDHRTPLHVAASEGFYVLAIQLVEASANVLAKDRWGNTPLDEALGCGNKMLIKLLEDAKNSQISSFPSGSKEPKDKVYKKKCTVYFSHPGDSKEKRRRGIVLWVPRSIEELIRTAKEQLNVPEASCVLSEDEAKIIDI

SEQ ID NO: 74226 - protein, 727 aa, Arabidopsis thaliana
  peptide (1)..(727): Ceres Seq. ID no. 4998135
MFILIWALYSSFFTPLEFGFFRGLPENLFILDIAGQIAFLVDIVLTFFVAYRDSRTYRMIYKRSSIALRYLKSTFIIDLLACMPWDIIYKAAGEKEEVRYLLLIRLYRVHRVILFFHKMEKDIRINYLFTRIVKLIFVELYCTHTAACIFYYLATTLPASQEGYTWIGSLKLGDYSYSKFREIDLWTRYTTSMYFAVVTMATVGYGDIHAVNMREMIFAMVYISFDMILGAYLIGNMTALIVKGSKTERFRDKMADIMRYMNRNKLGRNIRGQITGHLRLQYESSYTEAAVLQDIPVSIRAKIAQTLYLPYIEKVPLFRGCSSEFINQIVIRLHEEFFLPGEVIMEQGSVVDQLYFVCHGVLEEIGITKDGSEEIVAVLQPDHSFGEISILCNIPQPYTVRVAELCRILRLDKQSFMNILEIFFHDGRRILNNLLEGKESNVRIKQLESDITFHISKQEAELALKLNSAAFYGDLYQLKSLIRAGGDPNKTDYDGRSPLHLAASRGYEDITLYLIQESVDVNIKDKLGSTPLLEAIKNGNDRVAALLVKEGATLNIENAGTFLCTVVAKGDSDFLKRLLSNGIDPNSKDYDHRTPLHVAASEGFYVLAIQLVEASANVLAKDRWGNTPLDEALGCGNKMLIKLLEDAKNSQISSFPSGSKEPKDKVYKKKCTVYFSHPGDSKEKRRRGIVLWVPRSIEELIRTAKEQLNVPEASCVLSEDEAKIIDI

SEQ ID NO: 74227 - protein, 669 aa, Arabidopsis thaliana
  peptide (1)..(669): Ceres Seq. ID no. 4998136
MIYKRSSIALRYLKSTFIIDLLACMPWDIIYKAAGEKEEVRYLLLIRLYRVHRVILFFHKMEKDIRINYLFTRIVKLIFVELYCTHTAACIFYYLATTLPASQEGYTWIGSLKLGDYSYSKFREIDLWTRYTTSMYFAVVTMATVGYGDIHAVNMREMIFAMVYISFDMILGAYLIGNMTALIVKGSKTERFRDKMADIMRYMNRNKLGRNIRGQITGHLRLQYESSYTEAAVLQDIPVSIRAKIAQTLYLPYIEKVPLFRGCSSEFINQIVIRLHEEFFLPGEVIMEQGSVVDQLYFVCHGVLEEIGITKDGSEEIVAVLQPDHSFGEISILCNIPQPYTVRVAELCRILRLDKQSFMNILEIFFHDGRRILNNLLEGKESNVRIKQLESDITFHISKQEAELALKLNSAAFYGDLYQLKSLIRAGGDPNKTDYDGRSPLHLAASRGYEDITLYLIQESVDVNIKDKLGSTPLLEAIKNGNDRVAALLVKEGATLNIENAGTFLCTVVAKGDSDFLKRLLSNGIDPNSKDYDHRTPLHVAASEGFYVLAIQLVEASANVLAKDRWGNTPLDEALGCGNKMLIKLLEDAKNSQISSFPSGSKEPKDKVYKKKCTVYFSHPGDSKEKRRRGIVLWVPRSIEELIRTAKEQLNVPEASCVLSEDEAKIIDI

SEQ ID NO: 74228 - DNA, 972 bp, Arabidopsis thaliana
  misc_feature (1)..(972): Ceres Seq. ID no. 4998579
  misc_feature (1)..(972): Ortholog of  Ceres SEQ ID NO 13594193 as cited in SEQ ID NO 58558
  misc_feature (1)..(972): Ortholog of  Ceres SEQ ID NO 15177545 as cited in SEQ ID NO 0
atggctgagatttctgatattactactcagacacaaaccgttgtcttggacatcgaaaactatcaatccattgatgattcccggtcgtcggatttatccgctcctcttgtgtccgtatcgttcgttcaaaagttgattggagagttcgtggggacattcactatgatatttgccggttgctcagccatcgtggtaaatgagacgtatggcaaaccggtgacacttcccggtatagctttggtatggggactagtcgtaacggttatgatctactcaattggtcatgtctctggtgcacatttcaaccctgctgtttctattgcctttgcctcttctaagaagttcccttttaatcaggttccggggtacattgccgctcaacttctcggatcgaccttagcggctgcagttctacggcttgtgttccatctagacgacgatgtttgtagcctcaaaggcgatgtttatgtgggaacatatccgtcaaactcaaatacgacctcgttcgtaatggagttcatcgctactttcaatctaatgtttgttatatctgctgtcgcaaccgataaacgggccaccgggtcattcgctggaatcgctattggcgcaaccatagtactcgacatccttttctccgggccaatttcgggagcatctatgaatccagcaagaagcttagggcctgcacttatatggggatgttataaggatttatggttatacatagtttcacccgtgatcggggcattatcaggtgcatggacttatggtttgttacgatcgacaaagaaatcatatagtgagattattcgtccaaattgcaataaagtatcttcgagagatcgccaagaagcttcccaagatgagatttgtgttctacgagtggttgatccggctaatcaaaactattttatatgttcatcacctactgatatcaatggcaaatgtaatgttacatgtaagttggcgtga

SEQ ID NO: 74229 - protein, 323 aa, Arabidopsis thaliana
  peptide (1)..(323): Ceres Seq. ID no. 4998580
MAEISDITTQTQTVVLDIENYQSIDDSRSSDLSAPLVSVSFVQKLIGEFVGTFTMIFAGCSAIVVNETYGKPVTLPGIALVWGLVVTVMIYSIGHVSGAHFNPAVSIAFASSKKFPFNQVPGYIAAQLLGSTLAAAVLRLVFHLDDDVCSLKGDVYVGTYPSNSNTTSFVMEFIATFNLMFVISAVATDKRATGSFAGIAIGATIVLDILFSGPISGASMNPARSLGPALIWGCYKDLWLYIVSPVIGALSGAWTYGLLRSTKKSYSEIIRPNCNKVSSRDRQEASQDEICVLRVVDPANQNYFICSSPTDINGKCNVTCKLA

SEQ ID NO: 74230 - protein, 269 aa, Arabidopsis thaliana
  peptide (1)..(269): Ceres Seq. ID no. 4998581
MIFAGCSAIVVNETYGKPVTLPGIALVWGLVVTVMIYSIGHVSGAHFNPAVSIAFASSKKFPFNQVPGYIAAQLLGSTLAAAVLRLVFHLDDDVCSLKGDVYVGTYPSNSNTTSFVMEFIATFNLMFVISAVATDKRATGSFAGIAIGATIVLDILFSGPISGASMNPARSLGPALIWGCYKDLWLYIVSPVIGALSGAWTYGLLRSTKKSYSEIIRPNCNKVSSRDRQEASQDEICVLRVVDPANQNYFICSSPTDINGKCNVTCKLA

SEQ ID NO: 74231 - protein, 235 aa, Arabidopsis thaliana
  peptide (1)..(235): Ceres Seq. ID no. 4998582
MIYSIGHVSGAHFNPAVSIAFASSKKFPFNQVPGYIAAQLLGSTLAAAVLRLVFHLDDDVCSLKGDVYVGTYPSNSNTTSFVMEFIATFNLMFVISAVATDKRATGSFAGIAIGATIVLDILFSGPISGASMNPARSLGPALIWGCYKDLWLYIVSPVIGALSGAWTYGLLRSTKKSYSEIIRPNCNKVSSRDRQEASQDEICVLRVVDPANQNYFICSSPTDINGKCNVTCKLA

SEQ ID NO: 74232 - DNA, 942 bp, Arabidopsis thaliana
  misc_feature (1)..(942): Ceres Seq. ID no. 4998675
  misc_feature (1)..(942): Ortholog of  Ceres SEQ ID NO 14310713 as cited in SEQ ID NO 53582
atggagacacaaattcatcaacttgagcaggaagcatataccgctgttttaagggcttttaaagcgcagtctgatgcgatttcttgggaaaaagaaagcttgataaccgaattgcgtaaagaattgagagtatctgatgatgaacatcgagagcttctcagtagggtcaataaggatgatactatccagaggataagagattggagacagggaggcgcaagccaaattactagacatgcaactattcagccttttgatgttcttcctagtcccactttctcagctgcccgaaagaaacagaaaacatttccatcttataatccatcaattggtgcgactggaaataggtcattcaataatcgtctggtatccagtggcatatcaggaaatgaatctgctgaagctctgatcggaagaaaagtgtggacaaaatggcctgaagataaccacttctatgaagcaattataacccagtacaatgcagatgagggtcggcatgctttggtgtatgatatacacgcagctaatgaaacgtgggaatgggttgatctcaaggagataccaccggaagacataagatgggatggggaggagagtggggtagctttaaacattggacatggaagtgcatccttccgtggcaacagaagaggccaaatccatggtggtagagggagaggaccaagaattcatcaaccaagaagggaacttgtaccgccaccaacacaacagaatggtagtggtgggcggagaacttcctctgatgatattgagttgttcaacacagactcgcttgtgaaggaggtggagagagttttcgattctacgcatcctgatccactcgagctcgacaaggccaagaaaatgctcaaggaacatgaacaggcactcattgctgccattgcaaggcttgctgatacttcggatggcgaaatggcgtaa

SEQ ID NO: 74233 - protein, 313 aa, Arabidopsis thaliana
  peptide (1)..(313): Ceres Seq. ID no. 4998676
METQIHQLEQEAYTAVLRAFKAQSDAISWEKESLITELRKELRVSDDEHRELLSRVNKDDTIQRIRDWRQGGASQITRHATIQPFDVLPSPTFSAARKKQKTFPSYNPSIGATGNRSFNNRLVSSGISGNESAEALIGRKVWTKWPEDNHFYEAIITQYNADEGRHALVYDIHAANETWEWVDLKEIPPEDIRWDGEESGVALNIGHGSASFRGNRRGQIHGGRGRGPRIHQPRRELVPPPTQQNGSGGRRTSSDDIELFNTDSLVKEVERVFDSTHPDPLELDKAKKMLKEHEQALIAAIARLADTSDGEMA

SEQ ID NO: 74234 - DNA, 1365 bp, Arabidopsis thaliana
  misc_feature (1)..(1365): Ceres Seq. ID no. 4998936
  misc_feature (1)..(1365): Ortholog of  Ceres SEQ ID NO 12586556 as cited in SEQ ID NO 64667
  misc_feature (1)..(1365): Ortholog of  Ceres SEQ ID NO 13660894 as cited in SEQ ID NO 67475
atgttcacgtttcctccagtttttaaggcttgtgggaagttttcagggatcagagaagggaaacagattcatggaattgttacgaagatgggtttttacgatgatatctatgtgcaaaactcgcttgttcatttttatggtgtgtgtggagaatcaaggaatgcatgtaaagtgttcggtgaaatgcctgtgagagatgttgtttcgtggactgggattataactggtttcacgaggactgggttgtataaggaagctttggatacgttttcaaagatggatgttgagcctaatttggctacgtatgtttgtgtattggtctcaagtgggcgggtagggtgtttaagtttagggaaaggaatccatgggttgatcttaaaaagggcatctttgatcagcttagagactggtaatgctcttatagatatgtatgtgaaatgtgagcaattgtctgatgcgatgagagtttttggtgagttggaaaagaaagataaagtttcttggaatagtatgattagtgggttggttcactgtgaaagatctaaggaggcgattgacttgttttctctgatgcaaacgtcttctggtataaagccagatgggcatatacttacaagtgttctctctgcgtgtgctagcttaggagctgtggatcacggaagatgggttcatgagtatattttaaccgctggaatcaaatgggatacgcatattggaactgccattgttgatatgtatgcaaaatgtggctacatcgaaacagctttggagattttcaacggaattagaagtaagaatgtgtttacttggaatgctctgttaggtggtttagctatccatgggcatggacttgaatcccttagatactttgaagaaatggttaagctaggttttaagccgaacctggtaacttttctcgcggctctaaatgcttgttgccacacaggtttagtcgatgaagggagaagatatttccataaaatgaaaagcagagaatacaatctatttcctaagctagaacattatggatgcatgattgatttgctttgtagagctggattgttagatgaagcattggaactcgtcaaagcaatgccggttaaaccggatgtacgtatatgtggagctattcttagtgcttgtaagaatagagggacattaatggagcttcctaaagagatattagatagttttttagatattgagtttgaagatagtggtgtttatgtgttgctgtctaatatttttgctgctaatagaagatgggatgatgttgcgagaatcaggaggttgatgaaggtaaaaggtatctcgaaggttccaggatcaagttatatagagaagtttatgactttagaccaatga

SEQ ID NO: 74235 - protein, 454 aa, Arabidopsis thaliana; identical to SEQ ID NO: 69633
  peptide (1)..(454): Ceres Seq. ID no. 4998937

SEQ ID NO: 74236 - protein, 425 aa, Arabidopsis thaliana; identical to SEQ ID NO: 69634
  peptide (1)..(425): Ceres Seq. ID no. 4998938

SEQ ID NO: 74237 - protein, 393 aa, Arabidopsis thaliana
  peptide (1)..(393): Ceres Seq. ID no. 4998939
MPVRDVVSWTGIITGFTRTGLYKEALDTFSKMDVEPNLATYVCVLVSSGRVGCLSLGKGIHGLILKRASLISLETGNALIDMYVKCEQLSDAMRVFGELEKKDKVSWNSMISGLVHCERSKEAIDLFSLMQTSSGIKPDGHILTSVLSACASLGAVDHGRWVHEYILTAGIKWDTHIGTAIVDMYAKCGYIETALEIFNGIRSKNVFTWNALLGGLAIHGHGLESLRYFEEMVKLGFKPNLVTFLAALNACCHTGLVDEGRRYFHKMKSREYNLFPKLEHYGCMIDLLCRAGLLDEALELVKAMPVKPDVRICGAILSACKNRGTLMELPKEILDSFLDIEFEDSGVYVLLSNIFAANRRWDDVARIRRLMKVKGISKVPGSSYIEKFMTLDQ

SEQ ID NO: 74238 - DNA, 1074 bp, Arabidopsis thaliana
  misc_feature (1)..(1074): Ceres Seq. ID no. 4999492
  misc_feature (1)..(1074): Ortholog of  Ceres SEQ ID NO 14313666 as cited in SEQ ID NO 54618
  misc_feature (1)..(1074): Ortholog of  Ceres SEQ ID NO 13639645 as cited in SEQ ID NO 57488
atggccggaaccgcaagtccttggcggagagaggccgtgttcttgacggcaatgctggtggtcgaaaccagcgtcgtcggaataagtactttgtttaaatttgcaacttcaaagggactcaacatttatcctttcctcggctattcttatcttcttgcttctcttcttcttcttccttctcttttcttcactaacaggtcaagttcacttcctccactaagtgtctcaatactttcaaaaattggacttcttggatttctaggatcaatgtatgtgatcacaggatacataggcatcgaatacagcagcccaaccttagcctccgccataaacaatatcactcctgctcttaccttcatcctcgccattatcttcagaatggaaaaagtatctttcaaagagaggagtagtctagccaaattgatggggacgatattgtcactgataggtgcacttgtggtgattttctaccacggtccacgtgtcttcctcgcatcttctccgccctatgtaaacttccgtcagttttctccaccgttgtcatcttcaaactccgattggctcatcggtggagctcttctaaccatgcaaggcatattcgtttctgtttctttcattcttcaggcacatataatgagtgtatatccagcagcattcagagtctcctttctttacactgtatgtgtttcaatcgtgacctcgacgattggactagtagttgaaaagaacaacccaagcgtttggatcattcatttcgatattactttgattacaattgttaccatggcaatagtaacttcagtatactatgtgattcattcatggacagtacgacataaaggacctctgtacttagccatatttaaacctttgtccattttaatagcagtggttatgggggccatttttctcaatgattctctctatctcggatgtttgatcggaggaattttgataacattaggcttttacgctgtgatgtggggcaaagcaaacgaagagaaggatcagttatcattttcagaaaaagagaaaacgcctcttctattaaaccgcaaaaacgaccaagtttaa

SEQ ID NO: 74239 - protein, 357 aa, Arabidopsis thaliana
  peptide (1)..(357): Ceres Seq. ID no. 4999493
MAGTASPWRREAVFLTAMLVVETSVVGISTLFKFATSKGLNIYPFLGYSYLLASLLLLPSLFFTNRSSSLPPLSVSILSKIGLLGFLGSMYVITGYIGIEYSSPTLASAINNITPALTFILAIIFRMEKVSFKERSSLAKLMGTILSLIGALVVIFYHGPRVFLASSPPYVNFRQFSPPLSSSNSDWLIGGALLTMQGIFVSVSFILQAHIMSVYPAAFRVSFLYTVCVSIVTSTIGLVVEKNNPSVWIIHFDITLITIVTMAIVTSVYYVIHSWTVRHKGPLYLAIFKPLSILIAVVMGAIFLNDSLYLGCLIGGILITLGFYAVMWGKANEEKDQLSFSEKEKTPLLLNRKNDQV

SEQ ID NO: 74240 - protein, 340 aa, Arabidopsis thaliana
  peptide (1)..(340): Ceres Seq. ID no. 4999494
MLVVETSVVGISTLFKFATSKGLNIYPFLGYSYLLASLLLLPSLFFTNRSSSLPPLSVSILSKIGLLGFLGSMYVITGYIGIEYSSPTLASAINNITPALTFILAIIFRMEKVSFKERSSLAKLMGTILSLIGALVVIFYHGPRVFLASSPPYVNFRQFSPPLSSSNSDWLIGGALLTMQGIFVSVSFILQAHIMSVYPAAFRVSFLYTVCVSIVTSTIGLVVEKNNPSVWIIHFDITLITIVTMAIVTSVYYVIHSWTVRHKGPLYLAIFKPLSILIAVVMGAIFLNDSLYLGCLIGGILITLGFYAVMWGKANEEKDQLSFSEKEKTPLLLNRKNDQV

SEQ ID NO: 74241 - protein, 268 aa, Arabidopsis thaliana
  peptide (1)..(268): Ceres Seq. ID no. 4999495
MYVITGYIGIEYSSPTLASAINNITPALTFILAIIFRMEKVSFKERSSLAKLMGTILSLIGALVVIFYHGPRVFLASSPPYVNFRQFSPPLSSSNSDWLIGGALLTMQGIFVSVSFILQAHIMSVYPAAFRVSFLYTVCVSIVTSTIGLVVEKNNPSVWIIHFDITLITIVTMAIVTSVYYVIHSWTVRHKGPLYLAIFKPLSILIAVVMGAIFLNDSLYLGCLIGGILITLGFYAVMWGKANEEKDQLSFSEKEKTPLLLNRKNDQV

SEQ ID NO: 74242 - DNA, 2916 bp, Arabidopsis thaliana
  misc_feature (1)..(2916): Ceres Seq. ID no. 5000092
  misc_feature (1)..(2916): Ortholog of  Ceres SEQ ID NO 12586556 as cited in SEQ ID NO 64667
  misc_feature (1)..(2916): Ortholog of  Ceres SEQ ID NO 13660894 as cited in SEQ ID NO 67475
  misc_feature (1)..(2916): Ortholog of  Ceres SEQ ID NO 15177486 as cited in SEQ ID NO 0
atgctccatctcttcctcttctcctccgccgcctccaccaccaccgccgtagaagacaattccaccaccatgcccccttcttctagatccgccgctaatcaaaactcctcctcttctctccatctctgcaaacattcaccgtcggcgactctcgacctcttaatcctaatcctcgtcctcttctccggcacattcctcctctcctcttacttctcataccttatccactccttatctctcctctcctctcatttcccttcaatcaccatctccctctcctctctcctccctcctctaatcatcttcttctcctccgatcacagcaccgaagatgaagatcatcatcatccctcaggaaaaatccctcctccggcttcgttcttcttcgcattcgcagtttttttcgcggcttcaattgcgtttctcgacctgtgttgtggttcaagatcaaggaaatgtcgtaaccctaagtgtaaaggaatgaagaaagctatggagtttgatttgcagttacagacagaggaatgtgttaaatccggttcggttaaagagattgatcggttaccgtggaaaggaggtagtgagagtaatcctgattatgagtgtttgagagctgagctgaggaagatggctccggttaatggtcgagctgttttgattttccgatcaaaatgtggttgccctattgctaagcttgaaggttggggacctaagagaagtcggcgtcataaaaaatggaacttggtgactagtgaatttgtaggttctgtttatcctgttcttgcgacgtatttattgccattgatcattttgagaccagtttgtagtgaagatttatgtttatgtaatcctcctcactggctatggattttagacaagtctttaggctttgatactcgtttcttatcgataatggcgagatgcttctctgctccgagtcggacccacttcgatttctccggcgaaagctccgatactgaacgagctctcgtctctgctcttggatcgtgcgcttccagtaatgacgtcacttgtggtagacagattcattgccgtgtcttgaaatccggtcttgattctaatggatacatatgtaatagcgttcttaacatgtacgctaaatgccgtctcttggctgatgcggaatctgttttcagggatcacgcgaagcttgattctgcttcgttcaatattatggttgatgggtatgttagatctcgtagactttgggatgcgcttaagttgttcgacgtaatgcctgagagaagctgtgtctcgtatactactttgataaagggttatgctcaaaacaatcagtggagtgaagctatggagctttttagggagatgagaaatttgggaattatgctaaatgaagttactttagccactgttatatctgcttgctcacatttgggtgggatttgggattgtaggatgttgcagagtttggctattaaactcaagcttgaaggtcgtgtttttgtttcgacgaatttgctgcatatgtactgtctttgtttgtgtttgaaggatgctcggaagttgtttgatgaaatgcctgagagaaatttagttacttggaacgtgatgttaaatgggtactcaaaagctggacttattgaacaggctgaggaattgtttgatcagattactgagaaagatattgtctcgtggggtacaatgattgatgggtgtctccgaaagaatcagcttgacgaagctcttgtttactacaccgagatgctgcgctgtggaatgaagcctagtgaagttatgatggtggaccttctctcggcttcagctcgatcagttggtagctccaagggtttgcaacttcatggtaccattgtgaaaaggggttttgattgttatgatttcttacaagcaacgatcatacatttctacgctgtctctaatgacataaaactcgctcttcagcagtttgaagcgagtgttaaggaccacattgcgtcgagaaacgcgttgattgcaggatttgtgaagaatggaatggttgagcaggcaagagaagtatttgatcagactcatgataaagacatcttttcatggaacgctatgatatcgggttacgcgcaaagtctatcgcctcagttagctctacatctattccgcgaaatgatcagtagtagccaagtaaaaccagatgcaatcacaatggttagtgttttttctgcaatttcttctctaggatcgttggaagaagggaagagagcacatgattatctaaactttagcacgattcctcccaacgacaatctaaccgctgctataatcgacatgtacgccaaatgtggaagcatcgaaactgctctaaacattttccaccaaacaaagaacatttcttcttctacaatctctccctggaacgccatcatttgcggctcagcgacacatggccatgcaaaactagcgcttgatctctactccgatctccaatctctccccatcaaaccgaacagcatcacttttgtcggtgtcttgagcgcatgctgccatgcagggctagtggagttaggtaaaacgtatttcgaaagcatgaagagcgatcacgggatcgagccagacatcaaacattatggatgtatggttgatttattggggaaagctgggagattagaggaagctaaagaaatgatcaagaagatgcctgtaaaggctgatgtaatgatctgggggatgttattatcagcttcacgaactcacgggaacgtcgagatcgccgaacttgcggctactgagctagcagcgattgatccatctcatggaggatgcaaagttatgctttcgaacgtttatgcagacgcagggagatgggaagatgtagctttggttagagaagagatgcgaacgagagatgttgagtggtcacgtgccttcagtggtgttgtgtga

SEQ ID NO: 74243 - protein, 971 aa, Arabidopsis thaliana
  peptide (1)..(971): Ceres Seq. ID no. 5000093
MLHLFLFSSAASTTTAVEDNSTTMPPSSRSAANQNSSSSLHLCKHSPSATLDLLILILVLFSGTFLLSSYFSYLIHSLSLLSSHFPSITISLSSLLPPLIIFFSSDHSTEDEDHHHPSGKIPPPASFFFAFAVFFAASIAFLDLCCGSRSRKCRNPKCKGMKKAMEFDLQLQTEECVKSGSVKEIDRLPWKGGSESNPDYECLRAELRKMAPVNGRAVLIFRSKCGCPIAKLEGWGPKRSRRHKKWNLVTSEFVGSVYPVLATYLLPLIILRPVCSEDLCLCNPPHWLWILDKSLGFDTRFLSIMARCFSAPSRTHFDFSGESSDTERALVSALGSCASSNDVTCGRQIHCRVLKSGLDSNGYICNSVLNMYAKCRLLADAESVFRDHAKLDSASFNIMVDGYVRSRRLWDALKLFDVMPERSCVSYTTLIKGYAQNNQWSEAMELFREMRNLGIMLNEVTLATVISACSHLGGIWDCRMLQSLAIKLKLEGRVFVSTNLLHMYCLCLCLKDARKLFDEMPERNLVTWNVMLNGYSKAGLIEQAEELFDQITEKDIVSWGTMIDGCLRKNQLDEALVYYTEMLRCGMKPSEVMMVDLLSASARSVGSSKGLQLHGTIVKRGFDCYDFLQATIIHFYAVSNDIKLALQQFEASVKDHIASRNALIAGFVKNGMVEQAREVFDQTHDKDIFSWNAMISGYAQSLSPQLALHLFREMISSSQVKPDAITMVSVFSAISSLGSLEEGKRAHDYLNFSTIPPNDNLTAAIIDMYAKCGSIETALNIFHQTKNISSSTISPWNAIICGSATHGHAKLALDLYSDLQSLPIKPNSITFVGVLSACCHAGLVELGKTYFESMKSDHGIEPDIKHYGCMVDLLGKAGRLEEAKEMIKKMPVKADVMIWGMLLSASRTHGNVEIAELAATELAAIDPSHGGCKVMLSNVYADAGRWEDVALVREEMRTRDVEWSRAFSGVV

SEQ ID NO: 74244 - protein, 948 aa, Arabidopsis thaliana
  peptide (1)..(948): Ceres Seq. ID no. 5000094
MPPSSRSAANQNSSSSLHLCKHSPSATLDLLILILVLFSGTFLLSSYFSYLIHSLSLLSSHFPSITISLSSLLPPLIIFFSSDHSTEDEDHHHPSGKIPPPASFFFAFAVFFAASIAFLDLCCGSRSRKCRNPKCKGMKKAMEFDLQLQTEECVKSGSVKEIDRLPWKGGSESNPDYECLRAELRKMAPVNGRAVLIFRSKCGCPIAKLEGWGPKRSRRHKKWNLVTSEFVGSVYPVLATYLLPLIILRPVCSEDLCLCNPPHWLWILDKSLGFDTRFLSIMARCFSAPSRTHFDFSGESSDTERALVSALGSCASSNDVTCGRQIHCRVLKSGLDSNGYICNSVLNMYAKCRLLADAESVFRDHAKLDSASFNIMVDGYVRSRRLWDALKLFDVMPERSCVSYTTLIKGYAQNNQWSEAMELFREMRNLGIMLNEVTLATVISACSHLGGIWDCRMLQSLAIKLKLEGRVFVSTNLLHMYCLCLCLKDARKLFDEMPERNLVTWNVMLNGYSKAGLIEQAEELFDQITEKDIVSWGTMIDGCLRKNQLDEALVYYTEMLRCGMKPSEVMMVDLLSASARSVGSSKGLQLHGTIVKRGFDCYDFLQATIIHFYAVSNDIKLALQQFEASVKDHIASRNALIAGFVKNGMVEQAREVFDQTHDKDIFSWNAMISGYAQSLSPQLALHLFREMISSSQVKPDAITMVSVFSAISSLGSLEEGKRAHDYLNFSTIPPNDNLTAAIIDMYAKCGSIETALNIFHQTKNISSSTISPWNAIICGSATHGHAKLALDLYSDLQSLPIKPNSITFVGVLSACCHAGLVELGKTYFESMKSDHGIEPDIKHYGCMVDLLGKAGRLEEAKEMIKKMPVKADVMIWGMLLSASRTHGNVEIAELAATELAAIDPSHGGCKVMLSNVYADAGRWEDVALVREEMRTRDVEWSRAFSGVV

SEQ ID NO: 74245 - protein, 811 aa, Arabidopsis thaliana
  peptide (1)..(811): Ceres Seq. ID no. 5000095
MKKAMEFDLQLQTEECVKSGSVKEIDRLPWKGGSESNPDYECLRAELRKMAPVNGRAVLIFRSKCGCPIAKLEGWGPKRSRRHKKWNLVTSEFVGSVYPVLATYLLPLIILRPVCSEDLCLCNPPHWLWILDKSLGFDTRFLSIMARCFSAPSRTHFDFSGESSDTERALVSALGSCASSNDVTCGRQIHCRVLKSGLDSNGYICNSVLNMYAKCRLLADAESVFRDHAKLDSASFNIMVDGYVRSRRLWDALKLFDVMPERSCVSYTTLIKGYAQNNQWSEAMELFREMRNLGIMLNEVTLATVISACSHLGGIWDCRMLQSLAIKLKLEGRVFVSTNLLHMYCLCLCLKDARKLFDEMPERNLVTWNVMLNGYSKAGLIEQAEELFDQITEKDIVSWGTMIDGCLRKNQLDEALVYYTEMLRCGMKPSEVMMVDLLSASARSVGSSKGLQLHGTIVKRGFDCYDFLQATIIHFYAVSNDIKLALQQFEASVKDHIASRNALIAGFVKNGMVEQAREVFDQTHDKDIFSWNAMISGYAQSLSPQLALHLFREMISSSQVKPDAITMVSVFSAISSLGSLEEGKRAHDYLNFSTIPPNDNLTAAIIDMYAKCGSIETALNIFHQTKNISSSTISPWNAIICGSATHGHAKLALDLYSDLQSLPIKPNSITFVGVLSACCHAGLVELGKTYFESMKSDHGIEPDIKHYGCMVDLLGKAGRLEEAKEMIKKMPVKADVMIWGMLLSASRTHGNVEIAELAATELAAIDPSHGGCKVMLSNVYADAGRWEDVALVREEMRTRDVEWSRAFSGVV

SEQ ID NO: 74246 - DNA, 1416 bp, Arabidopsis thaliana
  misc_feature (1)..(1416): Ceres Seq. ID no. 5000617
  misc_feature (1)..(1416): Ortholog of  Ceres SEQ ID NO 13659033 as cited in SEQ ID NO 66372
  misc_feature (1)..(1416): Ortholog of  Ceres SEQ ID NO 13655724 as cited in SEQ ID NO 68973
  misc_feature (1)..(1416): Ortholog of  Ceres SEQ ID NO 12625899 as cited in SEQ ID NO 69079
atgaaacagaggaagaacagtaatctctcaatcttcgtcgtagtcttctctgttttcctcttcgggatcttcatgtacaatgaagacgtcaagtccatcgcagagtttcctttctccacctcaaaacctcacgacgtccacgacgaagcgacaccgatcacagagatcacaacactaccggttcaagagtcgatcaagaactcagacccaattcaggaatcgatcaaaaacgcagactcagttcaagattcagttaaagacgtagcagaaccagttcaagaggaggtatcgaaaacagaggaagttaaaaagattgagcttttcgctgcgacggaggatgaagaagacgtggaattgccgccggaggaatgcgatttgttcaccggagaatgggtttttgataacgagacgcatccattgtataaagaggatcaatgtgagttcttgacggcgcaagtcacttgcatgagaaatggaagaagagattctctgtatcagaactggagatggcaacctagagattgttctttaccaaagttcaaagcgaaattgctgttggagaagctaaggaacaagagaatgatgttcgttggagattccctaaaccggaaccaatgggaatcaatggtttgtttggttcaatcagtggttcctcccggtcgaaaaagcttgaacaaaaccggttctctctccgtcttccgagtcgaggattataatgcgacggtggagttttattgggcaccatttttggtggaatcgaattcagatgatccaaatatgcatagtatacttaaccgtataataatgcctgagtccattgaaaagcatggagtcaactggaaaggcgttgactttcttgttttcaacacttacatttggtggatgaacacattcgctatgaaagtcctacgaggatcgttcgataaaggagacaccgagtatgaggagatcgaacggccagtagcgtataggagagtgatgaggacttggggagattgggtggaacgaaatattgatcctctacgtaccactgtcttctttgctagcatgtctcctcttcacatcaagagcttggattgggagaatccagatgggatcaagtgtgcattagagacgacaccaatcctaaacatgtcaatgccattcagcgtaggaacagactacagactgttttcagtagcggaaaacgtcacgcattctcttaatgttccggtttactttctcaacattaccaaactctccgaataccggaaagatgctcacacttcggttcacacaatccgacaaggcaaaatgctgacgccggagcaacaagccgatcccaacacttacgccgattgtatccattggtgtcttcccggtttacctgacacgtggaatgagttcctttacacacgtatcatttcccgttcgtga

SEQ ID NO: 74247 - protein, 471 aa, Arabidopsis thaliana
  peptide (1)..(471): Ceres Seq. ID no. 5000618
MKQRKNSNLSIFVVVFSVFLFGIFMYNEDVKSIAEFPFSTSKPHDVHDEATPITEITTLPVQESIKNSDPIQESIKNADSVQDSVKDVAEPVQEEVSKTEEVKKIELFAATEDEEDVELPPEECDLFTGEWVFDNETHPLYKEDQCEFLTAQVTCMRNGRRDSLYQNWRWQPRDCSLPKFKAKLLLEKLRNKRMMFVGDSLNRNQWESMVCLVQSVVPPGRKSLNKTGSLSVFRVEDYNATVEFYWAPFLVESNSDDPNMHSILNRIIMPESIEKHGVNWKGVDFLVFNTYIWWMNTFAMKVLRGSFDKGDTEYEEIERPVAYRRVMRTWGDWVERNIDPLRTTVFFASMSPLHIKSLDWENPDGIKCALETTPILNMSMPFSVGTDYRLFSVAENVTHSLNVPVYFLNITKLSEYRKDAHTSVHTIRQGKMLTPEQQADPNTYADCIHWCLPGLPDTWNEFLYTRIISRS

SEQ ID NO: 74248 - protein, 447 aa, Arabidopsis thaliana
  peptide (1)..(447): Ceres Seq. ID no. 5000619
MYNEDVKSIAEFPFSTSKPHDVHDEATPITEITTLPVQESIKNSDPIQESIKNADSVQDSVKDVAEPVQEEVSKTEEVKKIELFAATEDEEDVELPPEECDLFTGEWVFDNETHPLYKEDQCEFLTAQVTCMRNGRRDSLYQNWRWQPRDCSLPKFKAKLLLEKLRNKRMMFVGDSLNRNQWESMVCLVQSVVPPGRKSLNKTGSLSVFRVEDYNATVEFYWAPFLVESNSDDPNMHSILNRIIMPESIEKHGVNWKGVDFLVFNTYIWWMNTFAMKVLRGSFDKGDTEYEEIERPVAYRRVMRTWGDWVERNIDPLRTTVFFASMSPLHIKSLDWENPDGIKCALETTPILNMSMPFSVGTDYRLFSVAENVTHSLNVPVYFLNITKLSEYRKDAHTSVHTIRQGKMLTPEQQADPNTYADCIHWCLPGLPDTWNEFLYTRIISRS

SEQ ID NO: 74249 - protein, 316 aa, Arabidopsis thaliana
  peptide (1)..(316): Ceres Seq. ID no. 5000620
MRNGRRDSLYQNWRWQPRDCSLPKFKAKLLLEKLRNKRMMFVGDSLNRNQWESMVCLVQSVVPPGRKSLNKTGSLSVFRVEDYNATVEFYWAPFLVESNSDDPNMHSILNRIIMPESIEKHGVNWKGVDFLVFNTYIWWMNTFAMKVLRGSFDKGDTEYEEIERPVAYRRVMRTWGDWVERNIDPLRTTVFFASMSPLHIKSLDWENPDGIKCALETTPILNMSMPFSVGTDYRLFSVAENVTHSLNVPVYFLNITKLSEYRKDAHTSVHTIRQGKMLTPEQQADPNTYADCIHWCLPGLPDTWNEFLYTRIISRS

SEQ ID NO: 74250 - DNA, 1008 bp, Arabidopsis thaliana
  misc_feature (1)..(1008): Ceres Seq. ID no. 5000639
  misc_feature (1)..(1008): Ortholog of  Ceres SEQ ID NO 15171717 as cited in SEQ ID NO 57090
atggtgaattcgtacgttcctcttcgtttcaccattttcatctccttctccatcgcagcagcttcatccttcaaactccactccgcttctcattctccgtcgtcatttccgaaagccaccggcgacgatctactctccgttctcggacctccctccgccgcgtcgtgcctcaacccaatcgtctctcgagagatcaaatcgtgtcttaaattcctcgtcccattcaaatcggataaacctaaacccgaatttggacgatgctcgcctcgtactggactctgttccggaaaaattgacgccgttgagagacggagcaagtttgaagaggagaattctctaatctggtggccaccggaatcggttctagagcttgctcgtctcgctgttgactccggtggtgatcccggttcaattcagcgaactctcaatccgaaaatgatcccggttcctgatgttgaacgatcaagaaaagataaatgtcaacttactagaactccttatggtcgtcattttatagcagaggaagtgaactcatatttcgagttcttgtttcatctaattgaatctaggggacctagtgttggattgaatgtttcattgagtagatatgatttgttccatggccatttattccttgcctcagaatctggacgccttggaatattgtttcatgctaaagagtatccagcctatgacaagaaagtgtttccttacaacatgggatattgccagagaggatctgacgtgaaatacaatgattcaatgaacttgaggaatatcctttggcttgcaccattacctagcaactcttctccagattgggttgctccaggtgtacttgtggttcttgatgcgcatccggatggaatcatataccgagatctcatccctgactatgttaagtttgtaagaacaatatacgaagatgatttgggaacaaccgcagttgatgtcaattacttgaatgtcggagctcacgaacctgactatcagcttttcatgtgctga

SEQ ID NO: 74251 - protein, 335 aa, Arabidopsis thaliana
  peptide (1)..(335): Ceres Seq. ID no. 5000640
MVNSYVPLRFTIFISFSIAAASSFKLHSASHSPSSFPKATGDDLLSVLGPPSAASCLNPIVSREIKSCLKFLVPFKSDKPKPEFGRCSPRTGLCSGKIDAVERRSKFEEENSLIWWPPESVLELARLAVDSGGDPGSIQRTLNPKMIPVPDVERSRKDKCQLTRTPYGRHFIAEEVNSYFEFLFHLIESRGPSVGLNVSLSRYDLFHGHLFLASESGRLGILFHAKEYPAYDKKVFPYNMGYCQRGSDVKYNDSMNLRNILWLAPLPSNSSPDWVAPGVLVVLDAHPDGIIYRDLIPDYVKFVRTIYEDDLGTTAVDVNYLNVGAHEPDYQLFMC

SEQ ID NO: 74252 - protein, 190 aa, Arabidopsis thaliana
  peptide (1)..(190): Ceres Seq. ID no. 5000641
MIPVPDVERSRKDKCQLTRTPYGRHFIAEEVNSYFEFLFHLIESRGPSVGLNVSLSRYDLFHGHLFLASESGRLGILFHAKEYPAYDKKVFPYNMGYCQRGSDVKYNDSMNLRNILWLAPLPSNSSPDWVAPGVLVVLDAHPDGIIYRDLIPDYVKFVRTIYEDDLGTTAVDVNYLNVGAHEPDYQLFMC

SEQ ID NO: 74253 - DNA, 1284 bp, Arabidopsis thaliana
  misc_feature (1)..(1284): Ceres Seq. ID no. 5000819
  misc_feature (1)..(1284): Ortholog of  Ceres SEQ ID NO 13656435 as cited in SEQ ID NO 65853
atgtcgcatcttgatgatattccttcgacgcctggcaagttcaagccctacttccaccgtacgcggtggcaatcctccgtcgccaagctcgccttttggtctctcgtcttcgttggtttgatcttcatcttcttctaccgatctcccgtttcctccaatcccgccgatccttctcgccgttctcttcgtacctactcctggggtggacccgcttgggagaaacgggtcagatcctccgcccgtctccgtacccgccgcggtttctctgttctcgtcaccggagccgccggtttcgtcggtacccatgtctccgccgctctcaaacgccgcggagatggcgttctggggcttgacaacttcaacgattactacgatccatcgctcaagagagcaaggcaagcccttttggagagaagcggagtgtttgttgttgaaggagacatcaatgacgctgctctcttgaagaagctctttgaagttgttccctttacccacgttatgcatttggctgctcaagctggtgtcaggtacgccatggaaaatcctagctcttatgttcacagtaacatcgctggcttcgtcaatctccttgaggtttgcaaatctgccaatccccaacccgccattgtctgggcttcctctagctctgtctacgggctcaacactaaggtccccttctccgagaaagacagaactgaccaaccagctagtctctatgctgctactaagaaggctggtgaagagattgctcacacttacaatcacatctatggactctctcttactggcttgaggtttttcaccgtctatggtccttggggaaggcctgacatggcctatttcttcttcaccagagacattctcaaagggaaagccatttcaatctttgagggggtcaaccatggaaccgtggctagggacttcacttacattgatgacattgtcaaggggtgtttaggggctttggacacggctgagaagagcactggtagtggtggtaagaagcgcggtgcggctcagttacgggttttcaatctcggcaacacttcgcccgttccagtgactgatcttgtcaccattcttgagagacttctcaaagtcaaggccaagaggaacattatgaagttgccgaggaacggggatgtgcagttcactcatgctaatatcagttctgcgcagagagagctcggctacaaacccaccaccgatcttcagacgggtctcaagaagtttgcgagatggtatttgggttactacaatggcggaaagaaagctgcaagctga

SEQ ID NO: 74254 - protein, 427 aa, Arabidopsis thaliana; identical to SEQ ID NO: 48569
  peptide (1)..(427): Ceres Seq. ID no. 5000820

SEQ ID NO: 74255 - protein, 261 aa, Arabidopsis thaliana
  peptide (1)..(261): Ceres Seq. ID no. 5000821
MHLAAQAGVRYAMENPSSYVHSNIAGFVNLLEVCKSANPQPAIVWASSSSVYGLNTKVPFSEKDRTDQPASLYAATKKAGEEIAHTYNHIYGLSLTGLRFFTVYGPWGRPDMAYFFFTRDILKGKAISIFEGVNHGTVARDFTYIDDIVKGCLGALDTAEKSTGSGGKKRGAAQLRVFNLGNTSPVPVTDLVTILERLLKVKAKRNIMKLPRNGDVQFTHANISSAQRELGYKPTTDLQTGLKKFARWYLGYYNGGKKAAS

SEQ ID NO: 74256 - protein, 249 aa, Arabidopsis thaliana
  peptide (1)..(249): Ceres Seq. ID no. 5000822
MENPSSYVHSNIAGFVNLLEVCKSANPQPAIVWASSSSVYGLNTKVPFSEKDRTDQPASLYAATKKAGEEIAHTYNHIYGLSLTGLRFFTVYGPWGRPDMAYFFFTRDILKGKAISIFEGVNHGTVARDFTYIDDIVKGCLGALDTAEKSTGSGGKKRGAAQLRVFNLGNTSPVPVTDLVTILERLLKVKAKRNIMKLPRNGDVQFTHANISSAQRELGYKPTTDLQTGLKKFARWYLGYYNGGKKAAS

SEQ ID NO: 74257 - DNA, 2022 bp, Arabidopsis thaliana
  misc_feature (1)..(2022): Ceres Seq. ID no. 5001156
  misc_feature (1)..(2022): Ortholog of  Ceres SEQ ID NO 14302621 as cited in SEQ ID NO 0
atgagtgtgacagagtacaatgcaatgattggtgtttacttagagcatgctgagaaaagcaatgatctagattatgctcttggccatattgagaaggcttttgagcttttgaaatctatgagagatcgtggatttttgattgaagaaagagtttatggtcctcttcttggttatttgattggtatggatatggtagatgagtttcatagtttcaaggatgtgattagggaggctagtcccggttccgttgagagacttggttactatgaaatgcttctttggatccatcttggtgatggagagaagattgaggaactttgcagtacaattgatggtgataacggtgaaagcttatcagtcttgcaagaaaattatctgcttgcactatgtaaaaaagaccaaaagtaccatcttgagaggctcttagagattgtagacataacaaaagttcgttcgtcggacctattggcaaacatatttgaatatcttgggaggttttcattggattctgttgcgagtagattcctttgggagctaagagaaagtgatgaaggagtgaagaacgtttctgatctcatctctatctattctacttgcaccccaaatccaacggttgaggatacaatcttaaaatttaacaagatgcatgaagaacttgatgttatgccttcatctacatcgtacgaaaagcttgttaagtatagctgtgactcgaatgaggtagtcactgctcttgatgtagttgaaaaaatgggtgaagcaggtttgatgatatccgcagatatcctacattcattgttacatgccattgatgaagttcttgagtttgatttggtgcgaagaatccattcaattatgtgcacaaagagtgtgaaacctaatactgagaacttccggagcattatacgtttgtgcacaagaatcaaagattttgaaggtgcatataatatgcttggtaatttaaagaacttcaatttggaaccaaactctagcatgttcaattgtatattggctggatattttagggagaaaaatgtgagtagtgcgttaatggtcgtcaagcaaatgaaggaagctggcgttaaacctgattccataacttttggttatctaataaacaactgtacccaggaggacgctattactaagtactatgaggagatgaagcaagcaggagttcaagctactaagcgaatttacatgtccctgatagatgcatatgcagcatctgggaagtttgagaaggcgaaacaggtgctcgtagatccagatgttccggctataaaccaaaatgaactgaaaagtgtgcttatttcggctcttgcatcacgtggaaaatgggcagatgccttacatatatatgaagaaatgaggaaagccgaatgccacgtagacccgaaatcgattatatctcttatagaatactctgattcaaagggagagttaagtacgctagttcaactggctgatgacctacaagatgatactagttggatcgacggtttcttcagaatgattttgttcgctgtccgcaataaaaagtcaagcgatattgttgatctgctgaaacggaacaaggtccggttgttaaagaaaggcatacctgtggaagctcattttgacgaggtgttttgggcaatcgcagagacagagccatccaaagtgcatctaggaatggatttgctaagatttatgaaagatgagctcgggtttgttccttcaagaaaatgtctagattttctcttacatgcatgtgttaatgccaaggacctggagcacggtctattggtgtggaaagagtaccaatctgcagcattcccttgcaacgtcctgagctttctgaggatgtatcaggttctactagctgcaggggattcagaaggtgccaaggcattggtgtcaaaaattccaaaagatgataaagatgtacaacatatcatcgaagaaagtcagtctgcattttctcaagcacccaacaagaagaaaccaaaaaagaaaatgattgttttatcaacaaagtag

SEQ ID NO: 74258 - protein, 673 aa, Arabidopsis thaliana
  peptide (1)..(673): Ceres Seq. ID no. 5001157
MSVTEYNAMIGVYLEHAEKSNDLDYALGHIEKAFELLKSMRDRGFLIEERVYGPLLGYLIGMDMVDEFHSFKDVIREASPGSVERLGYYEMLLWIHLGDGEKIEELCSTIDGDNGESLSVLQENYLLALCKKDQKYHLERLLEIVDITKVRSSDLLANIFEYLGRFSLDSVASRFLWELRESDEGVKNVSDLISIYSTCTPNPTVEDTILKFNKMHEELDVMPSSTSYEKLVKYSCDSNEVVTALDVVEKMGEAGLMISADILHSLLHAIDEVLEFDLVRRIHSIMCTKSVKPNTENFRSIIRLCTRIKDFEGAYNMLGNLKNFNLEPNSSMFNCILAGYFREKNVSSALMVVKQMKEAGVKPDSITFGYLINNCTQEDAITKYYEEMKQAGVQATKRIYMSLIDAYAASGKFEKAKQVLVDPDVPAINQNELKSVLISALASRGKWADALHIYEEMRKAECHVDPKSIISLIEYSDSKGELSTLVQLADDLQDDTSWIDGFFRMILFAVRNKKSSDIVDLLKRNKVRLLKKGIPVEAHFDEVFWAIAETEPSKVHLGMDLLRFMKDELGFVPSRKCLDFLLHACVNAKDLEHGLLVWKEYQSAAFPCNVLSFLRMYQVLLAAGDSEGAKALVSKIPKDDKDVQHIIEESQSAFSQAPNKKKPKKKMIVLSTK

SEQ ID NO: 74259 - protein, 665 aa, Arabidopsis thaliana
  peptide (1)..(665): Ceres Seq. ID no. 5001158
MIGVYLEHAEKSNDLDYALGHIEKAFELLKSMRDRGFLIEERVYGPLLGYLIGMDMVDEFHSFKDVIREASPGSVERLGYYEMLLWIHLGDGEKIEELCSTIDGDNGESLSVLQENYLLALCKKDQKYHLERLLEIVDITKVRSSDLLANIFEYLGRFSLDSVASRFLWELRESDEGVKNVSDLISIYSTCTPNPTVEDTILKFNKMHEELDVMPSSTSYEKLVKYSCDSNEVVTALDVVEKMGEAGLMISADILHSLLHAIDEVLEFDLVRRIHSIMCTKSVKPNTENFRSIIRLCTRIKDFEGAYNMLGNLKNFNLEPNSSMFNCILAGYFREKNVSSALMVVKQMKEAGVKPDSITFGYLINNCTQEDAITKYYEEMKQAGVQATKRIYMSLIDAYAASGKFEKAKQVLVDPDVPAINQNELKSVLISALASRGKWADALHIYEEMRKAECHVDPKSIISLIEYSDSKGELSTLVQLADDLQDDTSWIDGFFRMILFAVRNKKSSDIVDLLKRNKVRLLKKGIPVEAHFDEVFWAIAETEPSKVHLGMDLLRFMKDELGFVPSRKCLDFLLHACVNAKDLEHGLLVWKEYQSAAFPCNVLSFLRMYQVLLAAGDSEGAKALVSKIPKDDKDVQHIIEESQSAFSQAPNKKKPKKKMIVLSTK

SEQ ID NO: 74260 - protein, 634 aa, Arabidopsis thaliana
  peptide (1)..(634): Ceres Seq. ID no. 5001159
MRDRGFLIEERVYGPLLGYLIGMDMVDEFHSFKDVIREASPGSVERLGYYEMLLWIHLGDGEKIEELCSTIDGDNGESLSVLQENYLLALCKKDQKYHLERLLEIVDITKVRSSDLLANIFEYLGRFSLDSVASRFLWELRESDEGVKNVSDLISIYSTCTPNPTVEDTILKFNKMHEELDVMPSSTSYEKLVKYSCDSNEVVTALDVVEKMGEAGLMISADILHSLLHAIDEVLEFDLVRRIHSIMCTKSVKPNTENFRSIIRLCTRIKDFEGAYNMLGNLKNFNLEPNSSMFNCILAGYFREKNVSSALMVVKQMKEAGVKPDSITFGYLINNCTQEDAITKYYEEMKQAGVQATKRIYMSLIDAYAASGKFEKAKQVLVDPDVPAINQNELKSVLISALASRGKWADALHIYEEMRKAECHVDPKSIISLIEYSDSKGELSTLVQLADDLQDDTSWIDGFFRMILFAVRNKKSSDIVDLLKRNKVRLLKKGIPVEAHFDEVFWAIAETEPSKVHLGMDLLRFMKDELGFVPSRKCLDFLLHACVNAKDLEHGLLVWKEYQSAAFPCNVLSFLRMYQVLLAAGDSEGAKALVSKIPKDDKDVQHIIEESQSAFSQAPNKKKPKKKMIVLSTK

SEQ ID NO: 74261 - DNA, 1839 bp, Arabidopsis thaliana
  misc_feature (1)..(1839): Ceres Seq. ID no. 5001411
  misc_feature (1)..(1839): Ortholog of  Ceres SEQ ID NO 12586556 as cited in SEQ ID NO 64667
  misc_feature (1)..(1839): Ortholog of  Ceres SEQ ID NO 13660894 as cited in SEQ ID NO 67475
atgagtagaatcgggaaacatccggctatcgctctgttggattccggcattacgtttaaagaagtccggcaaatccatgccaaactctatgtcgacgggacactcaaggatgaccatctcgtgggtcactttgtaaaggcagtggctttgagtgaccacaagtacttagattatgcgaatcagattcttgataggtctgaaaagcctacattgtttgctctcaattctatgattagagcacattgcaagagccctgttccagaaaaaagctttgatttttataggaggatactctcttcgggaaatgatcttaaaccggataattacactgtcaacttcttggttcaggcgtgtacggggttaaggatgcgtgagacagggcttcaagttcatggtatgactatcagacgtggttttgacaatgacccgcatgtccagactgggttgatttctttgtatgcggagcttggctgtctggattcttgtcataaggtttttaattctattccgtgcccggattttgtgtgtcggacagcgatggtcactgcctgtgcgagatgtggggatgtcgtttttgcgcggaagttgtttgaggggatgccggaaagagacccgattgcctggaacgcgatgatctctggctatgctcaggttggtgagtcaagagaagctctaaacgtgtttcacttgatgcagttggaaggtgtgaaagtcaatggggttgctatgatttctgttttatcggcttgcactcaattgggtgctttagaccaagggagatgggctcattcttacatagagagaaacaaaatcaaaatcactgtgaggcttgctactacgttggtcgacttgtatgcaaaatgtggtgacatggaaaaggctatggaagttttctggggtatggaagagaagaatgtgtatacatggagtagcgccctgaatgggttagccatgaatgggttcggggagaaatgtctcgagcttttctctcttatgaaacaagatggtgttactccaaacgctgtcacattcgtctctgttctcagaggttgtagtgtggttggttttgtagatgaagggcaaagacattttgattcgatgaggaatgagttcgggatagaacctcagctcgagcactatggctgcttggttgatttgtatgctcgtgcaggccgcttagaagacgcagtaagtatcatccagcaaatgcccatgaagcctcatgctgctgtttggagttctctgctccacgcatccagaatgtacaagaaccttgagcttggcgtgcttgcatctaaaaaaatgctcgagctagagaccgcaaatcacggagcttatgtcctcttatcaaacatatatgcagattcaaacgattgggacaatgttagtcacgttagacagtcaatgaaatctaaaggagtcagaaagcaaccagggtgcagtgtaatggaggtcaatggagaagtccatgaattctttgtaggagacaaatctcacccaaagtatacacaaatcgacgcggtttggaaggatatctcgagaaggctgagactcgctggttataaggcggacacaaccccggttatgttcgatatagatgaagaagagaaagaggatgcattgtgtttgcatagcgaaaaggcagcgattgcatttggtataatgagtttgaaagaagatgttccgattcggatcgtgaagaaccttcgggtttgtggagattgtcatcaggtttctatgatgatctccaagatttttaacagagagatcattgtcagagacagaaacaggttccaccatttcaaagatggtcactgttcttgtaatggcttttggtga

SEQ ID NO: 74262 - protein, 612 aa, Arabidopsis thaliana
  peptide (1)..(612): Ceres Seq. ID no. 5001412
MSRIGKHPAIALLDSGITFKEVRQIHAKLYVDGTLKDDHLVGHFVKAVALSDHKYLDYANQILDRSEKPTLFALNSMIRAHCKSPVPEKSFDFYRRILSSGNDLKPDNYTVNFLVQACTGLRMRETGLQVHGMTIRRGFDNDPHVQTGLISLYAELGCLDSCHKVFNSIPCPDFVCRTAMVTACARCGDVVFARKLFEGMPERDPIAWNAMISGYAQVGESREALNVFHLMQLEGVKVNGVAMISVLSACTQLGALDQGRWAHSYIERNKIKITVRLATTLVDLYAKCGDMEKAMEVFWGMEEKNVYTWSSALNGLAMNGFGEKCLELFSLMKQDGVTPNAVTFVSVLRGCSVVGFVDEGQRHFDSMRNEFGIEPQLEHYGCLVDLYARAGRLEDAVSIIQQMPMKPHAAVWSSLLHASRMYKNLELGVLASKKMLELETANHGAYVLLSNIYADSNDWDNVSHVRQSMKSKGVRKQPGCSVMEVNGEVHEFFVGDKSHPKYTQIDAVWKDISRRLRLAGYKADTTPVMFDIDEEEKEDALCLHSEKAAIAFGIMSLKEDVPIRIVKNLRVCGDCHQVSMMISKIFNREIIVRDRNRFHHFKDGHCSCNGFW

SEQ ID NO: 74263 - protein, 536 aa, Arabidopsis thaliana
  peptide (1)..(536): Ceres Seq. ID no. 5001413
MIRAHCKSPVPEKSFDFYRRILSSGNDLKPDNYTVNFLVQACTGLRMRETGLQVHGMTIRRGFDNDPHVQTGLISLYAELGCLDSCHKVFNSIPCPDFVCRTAMVTACARCGDVVFARKLFEGMPERDPIAWNAMISGYAQVGESREALNVFHLMQLEGVKVNGVAMISVLSACTQLGALDQGRWAHSYIERNKIKITVRLATTLVDLYAKCGDMEKAMEVFWGMEEKNVYTWSSALNGLAMNGFGEKCLELFSLMKQDGVTPNAVTFVSVLRGCSVVGFVDEGQRHFDSMRNEFGIEPQLEHYGCLVDLYARAGRLEDAVSIIQQMPMKPHAAVWSSLLHASRMYKNLELGVLASKKMLELETANHGAYVLLSNIYADSNDWDNVSHVRQSMKSKGVRKQPGCSVMEVNGEVHEFFVGDKSHPKYTQIDAVWKDISRRLRLAGYKADTTPVMFDIDEEEKEDALCLHSEKAAIAFGIMSLKEDVPIRIVKNLRVCGDCHQVSMMISKIFNREIIVRDRNRFHHFKDGHCSCNGFW

SEQ ID NO: 74264 - protein, 490 aa, Arabidopsis thaliana
  peptide (1)..(490): Ceres Seq. ID no. 5001414
MRETGLQVHGMTIRRGFDNDPHVQTGLISLYAELGCLDSCHKVFNSIPCPDFVCRTAMVTACARCGDVVFARKLFEGMPERDPIAWNAMISGYAQVGESREALNVFHLMQLEGVKVNGVAMISVLSACTQLGALDQGRWAHSYIERNKIKITVRLATTLVDLYAKCGDMEKAMEVFWGMEEKNVYTWSSALNGLAMNGFGEKCLELFSLMKQDGVTPNAVTFVSVLRGCSVVGFVDEGQRHFDSMRNEFGIEPQLEHYGCLVDLYARAGRLEDAVSIIQQMPMKPHAAVWSSLLHASRMYKNLELGVLASKKMLELETANHGAYVLLSNIYADSNDWDNVSHVRQSMKSKGVRKQPGCSVMEVNGEVHEFFVGDKSHPKYTQIDAVWKDISRRLRLAGYKADTTPVMFDIDEEEKEDALCLHSEKAAIAFGIMSLKEDVPIRIVKNLRVCGDCHQVSMMISKIFNREIIVRDRNRFHHFKDGHCSCNGFW

SEQ ID NO: 74265 - DNA, 1902 bp, Arabidopsis thaliana
  misc_feature (1)..(1902): Ceres Seq. ID no. 5001700
  misc_feature (1)..(1902): Ortholog of  Ceres SEQ ID NO 15175771 as cited in SEQ ID NO 55443
atgtcaggtccacttgatcgatttgcaagaccatgttttgagggattcttgagcagtgatgagaaaaaggaaagaaagtcagattttgagaattcagaggatgagaggagaacaagaatcggttccttgaaaaagaaagccattaatgcctctactaagttcaagcattctcttaagaaaaagagcggaagaagaaaaagtgatggtcgagtgagttctgtatccattgaggatgtgagggatgtcgaggagctacaagctgttgatgcgtttcgacagtcgttgttaatggacgagttgcttcctgatagacacgatgattatcatatgatgttgaggttcttgaaagcgaggaaatttgatgttgagaaagctaaacaaatgtgggctgatatgattcaatggaggaaagagtttggtactgacactattattcaggattttgatttcgaagagattaatgaagttttgaaacattacccacaatgttatcacggtgttgacaaagaaggtagacctatttacattgaaaggctagggaaagttgatcctaacagactcatgcaagttacaagcatggatcgatatgtaagatatcatgtaaaggagtttgagaggagctttatgatcaagtttccttcctgcactatttctgcaaagaggcatattgattcaagtacaactattcttgatgttcaaggagtgggattgaaaaactttaacaagtctgctcgagatcttatcacacgattacaaaagattgatggagacaattatcctgagactctccaccaaatgtttattatcaatgcagggcctggatttaggctactctggaacactgtcaagagctttcttgaccctaagacatctgctaaaattcatgtactcggatacaagtatctaagcaaattgcttgaagtcattgatgtcaacgagttgcctgagttcttgggaggtgcatgtacttgcgcagatcaaggcggttgcatgctttctgacaagggaccttggaaaaacccggaaattgtgaagatggtgcttcatggaggagcacatcgagcgaggcaggtggtgaaagtgttgaacagcgaagggaaagtcattgcttatgcaaaaccttcatatacatggataaagggaagtgacacatccactgcagagtcaggatctgacgctgaagatatcggttctccgaaggctataaagagtttctctcatctccgcttgacacctgttcgtgaggaggcaaagatagctggtgaaacaagcttggctggtagttttccgggttatgacgagtatgtacctatggtggacaaagccgttgacgccacctggaaggtgaaacccgccatccagagagttgcctcaagaggagctttaatgtctcccaccgttccaaaagatcatgaaggcatcaaggctcgagtcctagtaatgttcatggcattcttgatggcggttttcacattcttccgcactgtaacaaagaaacttccagcgactactacttcttccccagcagaaacccaaggaaacgcaatagaacttggttctaacggtgaaggagttaaagaggagtgtcgtcctccttctcctgtaccagacctcacggaaactgatctactaaactgtgtgacgaagaaactgacagagctggaaggtaaaatcggaacgctccaatcaaagccaaatgagatgccatacgagaaagaagaactgttaaacgcagccgtctgcagagtagacgcacttgaagcagagctcatagctactaaaaaggccctttacgaagctttgatgagacaggaagagttacttgcttacattgatcgtcaagaagaagctcagttccagaagatgaagaagaagaagaagaaacatctcttttgcttctga

SEQ ID NO: 74266 - protein, 633 aa, Arabidopsis thaliana
  peptide (1)..(633): Ceres Seq. ID no. 5001701
MSGPLDRFARPCFEGFLSSDEKKERKSDFENSEDERRTRIGSLKKKAINASTKFKHSLKKKSGRRKSDGRVSSVSIEDVRDVEELQAVDAFRQSLLMDELLPDRHDDYHMMLRFLKARKFDVEKAKQMWADMIQWRKEFGTDTIIQDFDFEEINEVLKHYPQCYHGVDKEGRPIYIERLGKVDPNRLMQVTSMDRYVRYHVKEFERSFMIKFPSCTISAKRHIDSSTTILDVQGVGLKNFNKSARDLITRLQKIDGDNYPETLHQMFIINAGPGFRLLWNTVKSFLDPKTSAKIHVLGYKYLSKLLEVIDVNELPEFLGGACTCADQGGCMLSDKGPWKNPEIVKMVLHGGAHRARQVVKVLNSEGKVIAYAKPSYTWIKGSDTSTAESGSDAEDIGSPKAIKSFSHLRLTPVREEAKIAGETSLAGSFPGYDEYVPMVDKAVDATWKVKPAIQRVASRGALMSPTVPKDHEGIKARVLVMFMAFLMAVFTFFRTVTKKLPATTTSSPAETQGNAIELGSNGEGVKEECRPPSPVPDLTETDLLNCVTKKLTELEGKIGTLQSKPNEMPYEKEELLNAAVCRVDALEAELIATKKALYEALMRQEELLAYIDRQEEAQFQKMKKKKKKHLFCF

SEQ ID NO: 74267 - protein, 537 aa, Arabidopsis thaliana
  peptide (1)..(537): Ceres Seq. ID no. 5001702
MDELLPDRHDDYHMMLRFLKARKFDVEKAKQMWADMIQWRKEFGTDTIIQDFDFEEINEVLKHYPQCYHGVDKEGRPIYIERLGKVDPNRLMQVTSMDRYVRYHVKEFERSFMIKFPSCTISAKRHIDSSTTILDVQGVGLKNFNKSARDLITRLQKIDGDNYPETLHQMFIINAGPGFRLLWNTVKSFLDPKTSAKIHVLGYKYLSKLLEVIDVNELPEFLGGACTCADQGGCMLSDKGPWKNPEIVKMVLHGGAHRARQVVKVLNSEGKVIAYAKPSYTWIKGSDTSTAESGSDAEDIGSPKAIKSFSHLRLTPVREEAKIAGETSLAGSFPGYDEYVPMVDKAVDATWKVKPAIQRVASRGALMSPTVPKDHEGIKARVLVMFMAFLMAVFTFFRTVTKKLPATTTSSPAETQGNAIELGSNGEGVKEECRPPSPVPDLTETDLLNCVTKKLTELEGKIGTLQSKPNEMPYEKEELLNAAVCRVDALEAELIATKKALYEALMRQEELLAYIDRQEEAQFQKMKKKKKKHLFCF

SEQ ID NO: 74268 - protein, 524 aa, Arabidopsis thaliana
  peptide (1)..(524): Ceres Seq. ID no. 5001703
MMLRFLKARKFDVEKAKQMWADMIQWRKEFGTDTIIQDFDFEEINEVLKHYPQCYHGVDKEGRPIYIERLGKVDPNRLMQVTSMDRYVRYHVKEFERSFMIKFPSCTISAKRHIDSSTTILDVQGVGLKNFNKSARDLITRLQKIDGDNYPETLHQMFIINAGPGFRLLWNTVKSFLDPKTSAKIHVLGYKYLSKLLEVIDVNELPEFLGGACTCADQGGCMLSDKGPWKNPEIVKMVLHGGAHRARQVVKVLNSEGKVIAYAKPSYTWIKGSDTSTAESGSDAEDIGSPKAIKSFSHLRLTPVREEAKIAGETSLAGSFPGYDEYVPMVDKAVDATWKVKPAIQRVASRGALMSPTVPKDHEGIKARVLVMFMAFLMAVFTFFRTVTKKLPATTTSSPAETQGNAIELGSNGEGVKEECRPPSPVPDLTETDLLNCVTKKLTELEGKIGTLQSKPNEMPYEKEELLNAAVCRVDALEAELIATKKALYEALMRQEELLAYIDRQEEAQFQKMKKKKKKHLFCF

SEQ ID NO: 74269 - DNA, 1107 bp, Arabidopsis thaliana
  misc_feature (1)..(1107): Ceres Seq. ID no. 5001829
  misc_feature (1)..(1107): Ortholog of  Ceres SEQ ID NO 15225673 as cited in SEQ ID NO 57784
  misc_feature (1)..(1107): Ortholog of  Ceres SEQ ID NO 13594185 as cited in SEQ ID NO 58882
atgaaaaatctctcctttttctcccgatatgggtacgcgactgttgcgccggcggcagctgatcctccgtcgcagaaggatttccccagtaaatctccgctgttaatgcgtagttgttgtgaatgtttaggtctcactatagtattcgaacctaagctcaatttgattctctctgtttctagtttcatcgaatgcgggactaaaataaacttggataagatgttttggtcaaagccatgttcattggctctgcctaaagactctcctctcagaattgatgaaccagactatgtagggattcgtcgtttcatactaaagatgatgatgttctatagcaaacagagcatgtctatccgtggggctaacgtgatctacaagcggatcattgcacaagttgataaacctgcaatatatgatgtattcaacttggagaaaacattcaaaataacgtattcgctgcttgtccttcatatgtggcttgttttacgccgcttgaaggaagatggacaggaaggtgttgaccttggtcaatacgtctatgagatctacaatcatgatgttgaactcagggtatctaaagccggggttaacttgctgctagccaagtggatgaaggagttggagagaatattttatggaaatgttgttgcctatgatgctgcgctacttccggaagctaaaccaaatgacctacaaatcaaattatggaggaacgtattttctgatgatggaacaacaacacctgataacacagatttaaaaacagcacaggcaatggcaagatatgtccggagagaacttggttctctttctttaacaggtacctatgacgctatagttggaatgcctcattatgttactcgcatttgcatttcgaatagacatgccttttcttatatggttcttttttgtcatacacagataaagagtccatattctccggcaatttctccttcacccctttggagaacaagcccctgtgatttgaatgaaattagaagaagctgtggtgctttgcgaatcaatctttcatttgtttctctgtttcatttgatttacttatatcaaaccaaagaaacctacacaagggaatgtgctagctgttag

SEQ ID NO: 74270 - protein, 368 aa, Arabidopsis thaliana; identical to SEQ ID NO: 74166
  peptide (1)..(368): Ceres Seq. ID no. 5001830

SEQ ID NO: 74271 - protein, 333 aa, Arabidopsis thaliana; identical to SEQ ID NO: 74167
  peptide (1)..(333): Ceres Seq. ID no. 5001831

SEQ ID NO: 74272 - protein, 295 aa, Arabidopsis thaliana
  peptide (1)..(295): Ceres Seq. ID no. 5001832
MFWSKPCSLALPKDSPLRIDEPDYVGIRRFILKMMMFYSKQSMSIRGANVIYKRIIAQVDKPAIYDVFNLEKTFKITYSLLVLHMWLVLRRLKEDGQEGVDLGQYVYEIYNHDVELRVSKAGVNLLLAKWMKELERIFYGNVVAYDAALLPEAKPNDLQIKLWRNVFSDDGTTTPDNTDLKTAQAMARYVRRELGSLSLTGTYDAIVGMPHYVTRICISNRHAFSYMVLFCHTQIKSPYSPAISPSPLWRTSPCDLNEIRRSCGALRINLSFVSLFHLIYLYQTKETYTRECASC

SEQ ID NO: 74273 - DNA, 1020 bp, Arabidopsis thaliana
  misc_feature (1)..(1020): Ceres Seq. ID no. 5001841
  misc_feature (1)..(1020): Ortholog of  Ceres SEQ ID NO 14313038 as cited in SEQ ID NO 59520
  misc_feature (1)..(1020): Ortholog of  Ceres SEQ ID NO 13595464 as cited in SEQ ID NO 59792
  misc_feature (1)..(1020): Ortholog of  Ceres SEQ ID NO 14316416 as cited in SEQ ID NO 60078
atgatgagaaacaaaccgacaaatcttccgacggcgggtatgactaatggcggtagaggttccggcggcggtggtggtggcggcggcagggagtcaggcggtcgtgatttggaaattagacctggtggtatgttggttcagaaacgtaacccggatttggatcctgtcggacctccaccaccaccgatgatcagagttagaatcaagtacggtgccgtctaccatgagatcaatattagtcctcaagcttcttttggggagctaaagaagatgttgactggaccaacgggtattcatcatcaagatcagaagctaatgtataaagataaagagagggattcgaaggcgttcctcgatgtttcgggagtgaaagataaatctaagatggtgcttatagaagacccgcttagccaagagaaacggtttttggagatgaggaagattgctaaaaccgaaaaggcgtctaaagcgatatcggatattagccttgaagttgataggctcggcggacgagtttcggcttttgagatggtaactaaaaaaggagggaagattgcggagaaagatcttgtaacggttatcgaattgctgatgaatgagttgattaagttggatgcgattgtagctgaaggagatgtcaagttacaaagaaagatgcaggtgaagagagtgcagaattatgtggaaacactcgatgccttgaaggtgaaaaactccatggctaatgggcaacagaaacagtcaagtactgctcagagacttgcaccgattcaagaacataacaatgaagagagacaagaacagaaaccgatacaatcgctcatggacatgccgatacaatacaaagagaagaagcaagagattgaagaggagcctaggaattcaggggaaggaccatttgtgttagattcttctgctaaatgggaaacattcgatcatcatcccgtgacgccattgagctcgactactgcgaaaaataacgcgatcccgcccaggtttaattgggaattctttgattga

SEQ ID NO: 74274 - protein, 339 aa, Arabidopsis thaliana
  peptide (1)..(339): Ceres Seq. ID no. 5001842
MMRNKPTNLPTAGMTNGGRGSGGGGGGGGRESGGRDLEIRPGGMLVQKRNPDLDPVGPPPPPMIRVRIKYGAVYHEINISPQASFGELKKMLTGPTGIHHQDQKLMYKDKERDSKAFLDVSGVKDKSKMVLIEDPLSQEKRFLEMRKIAKTEKASKAISDISLEVDRLGGRVSAFEMVTKKGGKIAEKDLVTVIELLMNELIKLDAIVAEGDVKLQRKMQVKRVQNYVETLDALKVKNSMANGQQKQSSTAQRLAPIQEHNNEERQEQKPIQSLMDMPIQYKEKKQEIEEEPRNSGEGPFVLDSSAKWETFDHHPVTPLSSTTAKNNAIPPRFNWEFFD

SEQ ID NO: 74275 - protein, 338 aa, Arabidopsis thaliana
  peptide (1)..(338): Ceres Seq. ID no. 5001843
MRNKPTNLPTAGMTNGGRGSGGGGGGGGRESGGRDLEIRPGGMLVQKRNPDLDPVGPPPPPMIRVRIKYGAVYHEINISPQASFGELKKMLTGPTGIHHQDQKLMYKDKERDSKAFLDVSGVKDKSKMVLIEDPLSQEKRFLEMRKIAKTEKASKAISDISLEVDRLGGRVSAFEMVTKKGGKIAEKDLVTVIELLMNELIKLDAIVAEGDVKLQRKMQVKRVQNYVETLDALKVKNSMANGQQKQSSTAQRLAPIQEHNNEERQEQKPIQSLMDMPIQYKEKKQEIEEEPRNSGEGPFVLDSSAKWETFDHHPVTPLSSTTAKNNAIPPRFNWEFFD

SEQ ID NO: 74276 - protein, 326 aa, Arabidopsis thaliana; identical to SEQ ID NO: 70053
  peptide (1)..(326): Ceres Seq. ID no. 5001844

SEQ ID NO: 74277 - DNA, 1227 bp, Arabidopsis thaliana
  misc_feature (1)..(1227): Ceres Seq. ID no. 5001990
  misc_feature (1)..(1227): Ortholog of  Ceres SEQ ID NO 13659033 as cited in SEQ ID NO 66372
  misc_feature (1)..(1227): Ortholog of  Ceres SEQ ID NO 13655724 as cited in SEQ ID NO 68973
  misc_feature (1)..(1227): Ortholog of  Ceres SEQ ID NO 12625899 as cited in SEQ ID NO 69079
  misc_feature (1)..(1227): Ortholog of  Ceres SEQ ID NO 15180366 as cited in SEQ ID NO 0
atgtttggtggaaaaagtcatatactcagagggagtgtatcactggccttgatcgtccttattcttttggtcattatactcctggtttctgaggaaaacccgcttcgtgattctctctttgaagtaaaacgtcagttttcatcttcttcttcttcttcttcttcagtttgtaactttgcaaagggaaaatgggttgaagaccggaagagaccattgtattctggttttgaatgtaaacaatggttatcatccatgtggtcatgtagaataatgggcagacccgatttctcatttgagggttaccgttggcagccagaaggttgcaacatgccacagtttgacagattcactttcttgacaagaatgcagaacaagacgatagcatttataggagactcattggggcggcaacagtttcaatccctaatgtgtatggccagtggtggtgaagatagcccagaggttcaaaacgtgggatgggagtacggtttggtgaaagccaaaggagctctccgtcctgatggttgggcttatcggttcccaaccacaaacacgacgatcttgtattattggtcagctagcttatcagatttggtacccatgaacaatacagatccacctagtcttactgcaatgcatctagatcgtccaccagcattcatgagaaactaccttcaccgtttcgatgtattggttctaaacactggtcaccattggaacagaggtaagattgaaggaaaccattgggtgatgcatgtaaatggaacacaggtcgaaggcgaatatctcaaagatatcagaaacgccaaggattttacaatacacagcgttgcgaagtggctcgatgcacagcttccattgcatccgcggttgaaagctttctttaggacaatttctccgaggcattttaaaaacggagattggaatacaggtggaaactgtaacaacacggttcctttgtctagaggcagcgaaatcacaggggatgatggatcgatcgatgcaacagttgagagtgctgtgaacgggacaaggatcaagattcttgacataactgcactttctgagctaagagacgaagctcatatctcagggtctaaactcaaaccccgaaaaccgaagaaggcaagtaacgtgacctcaactccaacgatcaacgattgcttgcattggtgcttaccagggatcccagatacttggaatgaacttttcattgctcagatttga

SEQ ID NO: 74278 - protein, 408 aa, Arabidopsis thaliana
  peptide (1)..(408): Ceres Seq. ID no. 5001991
MFGGKSHILRGSVSLALIVLILLVIILLVSEENPLRDSLFEVKRQFSSSSSSSSSVCNFAKGKWVEDRKRPLYSGFECKQWLSSMWSCRIMGRPDFSFEGYRWQPEGCNMPQFDRFTFLTRMQNKTIAFIGDSLGRQQFQSLMCMASGGEDSPEVQNVGWEYGLVKAKGALRPDGWAYRFPTTNTTILYYWSASLSDLVPMNNTDPPSLTAMHLDRPPAFMRNYLHRFDVLVLNTGHHWNRGKIEGNHWVMHVNGTQVEGEYLKDIRNAKDFTIHSVAKWLDAQLPLHPRLKAFFRTISPRHFKNGDWNTGGNCNNTVPLSRGSEITGDDGSIDATVESAVNGTRIKILDITALSELRDEAHISGSKLKPRKPKKASNVTSTPTINDCLHWCLPGIPDTWNELFIAQI

SEQ ID NO: 74279 - protein, 324 aa, Arabidopsis thaliana; identical to SEQ ID NO: 74146
  peptide (1)..(324): Ceres Seq. ID no. 5001992

SEQ ID NO: 74280 - protein, 318 aa, Arabidopsis thaliana; identical to SEQ ID NO: 74147
  peptide (1)..(318): Ceres Seq. ID no. 5001993

SEQ ID NO: 74281 - DNA, 2193 bp, Arabidopsis thaliana
  misc_feature (1)..(2193): Ceres Seq. ID no. 5002027
  misc_feature (1)..(2193): Ortholog of  Ceres SEQ ID NO 13657677 as cited in SEQ ID NO 66119
atggttatgctagcgagatcaaagctagctctagatgtgagcagaagatcacagtctttgcaaagaatctgctactacgcaagtctctcctctagattttccggcggcggcggagatgatggcggcggcagctcaccggaaatcggtggtaccgattcagcaaacgaatgggagaagctccttaaaccattcgatctggattctctaaggaattcatttcacaagataactccctttcagctctataagctacttgagttacctctcaatgtatccacttcaatggagttgttctcatggaccggttctcaaaacggttatcgtcactccttcgatgtgtatcaagttcttataggtaagcttggtgcgaatggtgagtttaaaaccattgatagattgttaattcagatgaaagatgaaggaatcgtttttaaagaatctcttttcatttcgattatgagagattacgacaaagctggttttcctggacagacaacgagattgatgttggagatgaggaatgtctattcctgtgaacccacttttaaatcttacaatgttgtcttggagattttggtttctggtaattgtcataaagttgcagctaatgtgttctacgatatgcttagccgaaagattcctccaacgcttttcacatttggtgttgtgatgaaagctttttgtgctgttaatgagatagattcggctctgtctctgcttagggacatgacgaaacatggatgtgtcccaaactctgttatttaccagactcttatacattcgttatcgaagtgtaatagagtgaacgaagcgcttcagcttttagaggagatgtttctgatgggatgtgttcctgatgctgagactttcaacgatgttatccttggtctctgtaagtttgatcggattaacgaagctgctaaaatggtgaaccggatgctgattagagggtttgctcctgatgatataacttatggttatttgatgaatggtctatgtaagataggccgggttgatgctgcaaaagatcttttttacagaattccgaagccggaaattgtgatcttcaatactcttattcacgggtttgtgactcacggaagacttgatgatgctaaagctgttttatcagatatggtcacgtcttatggcattgttcctgatgtctgcacatataactcactgatctatggatattggaaggagggtcttgtaggtttagctctggaagttcttcatgacatgaggaataagggatgtaagcctaacgtctactcttatactattttagttgatggtttctgtaaattaggaaagatagatgaagcctacaatgttcttaatgaaatgtctgccgatggactgaaacccaacactgttggttttaactgtttgatatcggctttctgcaaggaacacagaatccccgaggccgtagagattttcagagagatgccgagaaaaggctgtaaacccgatgtgtatacatttaattcgctgatatctggactatgtgaggtcgacgaaataaagcatgccttgtggttacttagagatatgatatcagaaggtgttgttgctaatactgttacttacaacacgctgatcaacgcgtttcttagaagaggtgaaatcaaagaagctcgtaaactagtaaacgagatggttttccagggatccccgcttgatgagataacctacaacagtctgataaaagggctgtgcagggccggggaggtagataaggcgagaagcttgtttgaaaagatgttaagagacgggcatgcaccaagcaacatctcctgcaacatacttataaacgggctctgcagaagcgggatggtggaagaagcggttgagtttcagaaagagatggttctgagaggatcgacaccggacattgtgacatttaacagtctgataaacggtctgtgtagggccggtaggatcgaagatggtttgacgatgtttaggaagcttcaggctgaaggaataccgcctgatacggtgacgtttaacactttgatgagttggttgtgcaaaggaggttttgtttatgatgcttgcttacttctggatgaaggtattgaagatggttttgttccaaatcatagaacttggtcaattttgttacagagtattattccccaagaaacacttgatagacgaaggttttataatgcagctttttga

SEQ ID NO: 74282 - protein, 730 aa, Arabidopsis thaliana
  peptide (1)..(730): Ceres Seq. ID no. 5002028
MVMLARSKLALDVSRRSQSLQRICYYASLSSRFSGGGGDDGGGSSPEIGGTDSANEWEKLLKPFDLDSLRNSFHKITPFQLYKLLELPLNVSTSMELFSWTGSQNGYRHSFDVYQVLIGKLGANGEFKTIDRLLIQMKDEGIVFKESLFISIMRDYDKAGFPGQTTRLMLEMRNVYSCEPTFKSYNVVLEILVSGNCHKVAANVFYDMLSRKIPPTLFTFGVVMKAFCAVNEIDSALSLLRDMTKHGCVPNSVIYQTLIHSLSKCNRVNEALQLLEEMFLMGCVPDAETFNDVILGLCKFDRINEAAKMVNRMLIRGFAPDDITYGYLMNGLCKIGRVDAAKDLFYRIPKPEIVIFNTLIHGFVTHGRLDDAKAVLSDMVTSYGIVPDVCTYNSLIYGYWKEGLVGLALEVLHDMRNKGCKPNVYSYTILVDGFCKLGKIDEAYNVLNEMSADGLKPNTVGFNCLISAFCKEHRIPEAVEIFREMPRKGCKPDVYTFNSLISGLCEVDEIKHALWLLRDMISEGVVANTVTYNTLINAFLRRGEIKEARKLVNEMVFQGSPLDEITYNSLIKGLCRAGEVDKARSLFEKMLRDGHAPSNISCNILINGLCRSGMVEEAVEFQKEMVLRGSTPDIVTFNSLINGLCRAGRIEDGLTMFRKLQAEGIPPDTVTFNTLMSWLCKGGFVYDACLLLDEGIEDGFVPNHRTWSILLQSIIPQETLDRRRFYNAAF

SEQ ID NO: 74283 - protein, 728 aa, Arabidopsis thaliana
  peptide (1)..(728): Ceres Seq. ID no. 5002029
MLARSKLALDVSRRSQSLQRICYYASLSSRFSGGGGDDGGGSSPEIGGTDSANEWEKLLKPFDLDSLRNSFHKITPFQLYKLLELPLNVSTSMELFSWTGSQNGYRHSFDVYQVLIGKLGANGEFKTIDRLLIQMKDEGIVFKESLFISIMRDYDKAGFPGQTTRLMLEMRNVYSCEPTFKSYNVVLEILVSGNCHKVAANVFYDMLSRKIPPTLFTFGVVMKAFCAVNEIDSALSLLRDMTKHGCVPNSVIYQTLIHSLSKCNRVNEALQLLEEMFLMGCVPDAETFNDVILGLCKFDRINEAAKMVNRMLIRGFAPDDITYGYLMNGLCKIGRVDAAKDLFYRIPKPEIVIFNTLIHGFVTHGRLDDAKAVLSDMVTSYGIVPDVCTYNSLIYGYWKEGLVGLALEVLHDMRNKGCKPNVYSYTILVDGFCKLGKIDEAYNVLNEMSADGLKPNTVGFNCLISAFCKEHRIPEAVEIFREMPRKGCKPDVYTFNSLISGLCEVDEIKHALWLLRDMISEGVVANTVTYNTLINAFLRRGEIKEARKLVNEMVFQGSPLDEITYNSLIKGLCRAGEVDKARSLFEKMLRDGHAPSNISCNILINGLCRSGMVEEAVEFQKEMVLRGSTPDIVTFNSLINGLCRAGRIEDGLTMFRKLQAEGIPPDTVTFNTLMSWLCKGGFVYDACLLLDEGIEDGFVPNHRTWSILLQSIIPQETLDRRRFYNAAF

SEQ ID NO: 74284 - protein, 636 aa, Arabidopsis thaliana
  peptide (1)..(636): Ceres Seq. ID no. 5002030
MELFSWTGSQNGYRHSFDVYQVLIGKLGANGEFKTIDRLLIQMKDEGIVFKESLFISIMRDYDKAGFPGQTTRLMLEMRNVYSCEPTFKSYNVVLEILVSGNCHKVAANVFYDMLSRKIPPTLFTFGVVMKAFCAVNEIDSALSLLRDMTKHGCVPNSVIYQTLIHSLSKCNRVNEALQLLEEMFLMGCVPDAETFNDVILGLCKFDRINEAAKMVNRMLIRGFAPDDITYGYLMNGLCKIGRVDAAKDLFYRIPKPEIVIFNTLIHGFVTHGRLDDAKAVLSDMVTSYGIVPDVCTYNSLIYGYWKEGLVGLALEVLHDMRNKGCKPNVYSYTILVDGFCKLGKIDEAYNVLNEMSADGLKPNTVGFNCLISAFCKEHRIPEAVEIFREMPRKGCKPDVYTFNSLISGLCEVDEIKHALWLLRDMISEGVVANTVTYNTLINAFLRRGEIKEARKLVNEMVFQGSPLDEITYNSLIKGLCRAGEVDKARSLFEKMLRDGHAPSNISCNILINGLCRSGMVEEAVEFQKEMVLRGSTPDIVTFNSLINGLCRAGRIEDGLTMFRKLQAEGIPPDTVTFNTLMSWLCKGGFVYDACLLLDEGIEDGFVPNHRTWSILLQSIIPQETLDRRRFYNAAF

SEQ ID NO: 74285 - DNA, 704 bp, Arabidopsis thaliana
  misc_feature (1)..(704): Ceres Seq. ID no. 5002197
  misc_feature (1)..(704): Ortholog of  Ceres SEQ ID NO 13657008 as cited in SEQ ID NO 69164
aggagccagaaagaatagtcttccatgtcgtgactgattcacttaattacccagcaatctcaatgtggtttctgctaaacattcaaaattcatttctacactcaatcacgcacgcttctatctcccggatatattcccgggtttgaacaagatggtactcttggaccatgatgtagttgttcaaagagatttaagtagactgtggagcattgatatgaaaggaaaggtggttggagctgtagagacttgtcttgaaggtgaatcttcatttcgatcaatgagcacatttattaatttctcagacacatgggtcgctgggaaatttagtcctagagcttgcacatgggctttcgggatgaatctaattgatctcgaagaatggagaatacggaagttgacttctacatacataaaatacttcaacctgggaacaaagagaccattgtggaaagctgggagcttaccaataggttggttgactttctataggcaaacattagcattggacaagagatggcatgtgatggggttaggtcgcgaatcaggagtcaaagcggttgacatcgaacaagcggcagttatacactacgatggggtcatgaagccgtggttggacattggaaaagagaattacaaacgttactggaacatacacgtcccttaccatcacacctacttgcaacagtgcaatcttcaagcttgat

SEQ ID NO: 74286 - protein, 183 aa, Arabidopsis thaliana; identical to SEQ ID NO: 27848
  peptide (1)..(183): Ceres Seq. ID no. 5002198

SEQ ID NO: 74287 - protein, 162 aa, Arabidopsis thaliana; identical to SEQ ID NO: 27849
  peptide (1)..(162): Ceres Seq. ID no. 5002199

SEQ ID NO: 74288 - protein, 141 aa, Arabidopsis thaliana; identical to SEQ ID NO: 27850
  peptide (1)..(141): Ceres Seq. ID no. 5002200

SEQ ID NO: 74289 - DNA, 343 bp, Arabidopsis thaliana
  misc_feature (1)..(343): Ceres Seq. ID no. 5002221
  misc_feature (1)..(343): Ortholog of  Ceres SEQ ID NO 13639704 as cited in SEQ ID NO 51325
  misc_feature (1)..(343): Ortholog of  Ceres SEQ ID NO 13599646 as cited in SEQ ID NO 0
aacttaatcacacacaaggagagaagagagaaagagagaaagagagacagagataatggcgtacagtgcgtgtttcctacaccagagcgcattggcttcatcagccgcacgatcatcatcttcctcctcatcccagcgtcacgtgtcgctctccaaacctgttcagatcatctgtaaagcacaagctggagacaagaggtggttcaagggagccaggaaatttgtcgagagcgcagccacttctttcagtgttgcttgagtgaaagcaacacaacgtaacaatgctctgcttgctttcttcatttgtctcttgtaaaaaatggaaaatgaaactgagcttttg

SEQ ID NO: 74290 - protein, 67 aa, Arabidopsis thaliana
  peptide (1)..(67): Ceres Seq. ID no. 5002222
MAYSACFLHQSALASSAARSSSSSSSQRHVSLSKPVQIICKAQAGDKRWFKGARKFVESAATSFSVA

SEQ ID NO: 74291 - protein, 58 aa, Arabidopsis thaliana; identical to SEQ ID NO: 29639
  peptide (1)..(58): Ceres Seq. ID no. 5002223

SEQ ID NO: 74292 - DNA, 1216 bp, Arabidopsis thaliana
  misc_feature (1)..(1216): Ceres Seq. ID no. 5002258
  misc_feature (1)..(1216): Ortholog of  Ceres SEQ ID NO 14311731 as cited in SEQ ID NO 51632
atataagaaaataggcttcaataggcaaaatattcttcctgtgatgcagtgaggatgaagaatatgctgatgtagattgggacaaccttggattcagtcttgtacggacagatttcatgttcgccaccaaaagttgcagagacggaaacttcgaacagggttaccttagccgttacggcaacatcgagctcaaccctgctgctggaattctcaactatggccagggactaatagaggggatgaaagcgtacagaggagaagacggtagggttcttctcttccgtccagagctaaacgcgatgcgtatgaagataggagctgagagaatgtgtatgcattctccttctgttcatcagtttattgaaggtgttaagcagaccgttcttgcaaacaggcgttgggttcctcctccgggcaaaggctcgttgtatctcagaccgttgttgttcggaagtggagcaagcttgggtgtggctgcagcatcagagtacacgtttcttgtgtttggctctcctgttcaaaactacttcaaggaaggcacagcggcgttgaacctgtatgtggaggaggtgattccacgcgcttatcttggaggaactggtggtgtaaaggcaatatccaattacggtccagtgcttgaagtgatgagaagagcaaaatcaagagggttttcggatgttttgtatcttgatgcagatactgggaagaacatagaagaagtctctgctgctaatatattccttgtgaagggcaatacaatagtgacaccagctacgagcggaacgattctcggagggatcacacgtaagagcataatcgaaatcgcccttgatcttggttacaaagtggaagaacgaagtgttccggtagaagaactgaaggaagctgaagaagttttctgcactggaactgccgctggagttgcttctgttggaagcatcacttttaagaacacaaggactgagtacaaagttggagatgggattgttacacagcaacttcgatctattcttgtcggaatacaaactggttctatccaagacactaaagattgggttttgcagattgcctaagttactttcatatcctataaataatgttgcactctcttgatcacccatcaaaagcttttgaaatagtttttggtaaatttgtgacataaatttgtgatatatcaccacatcgtattagtattaaacatttgtttcactcttcc

SEQ ID NO: 74293 - protein, 318 aa, Arabidopsis thaliana; identical to SEQ ID NO: 23289
  peptide (1)..(318): Ceres Seq. ID no. 5002259

SEQ ID NO: 74294 - protein, 277 aa, Arabidopsis thaliana; identical to SEQ ID NO: 23290
  peptide (1)..(277): Ceres Seq. ID no. 5002260

SEQ ID NO: 74295 - protein, 257 aa, Arabidopsis thaliana; identical to SEQ ID NO: 23291
  peptide (1)..(257): Ceres Seq. ID no. 5002261

SEQ ID NO: 74296 - DNA, 1272 bp, Arabidopsis thaliana
  misc_feature (1)..(1272): Ceres Seq. ID no. 5002281
  misc_feature (1)..(1272): Ortholog of  Ceres SEQ ID NO 13597416 as cited in SEQ ID NO 60674
agataagagcgaaacaaattacaaaattgaattacacaataatgtcctctaagcgacgactaccggtgaaatattttataagaaaacaaaaacaataattaacaaacaaaggcgacacctttagattcgacaagacgaccattttagaaaaagcttctcaaattctctccttatccccaaaaattcaaacttttttctctttggaaaattctgaggcaaaaatgcggcgtaattgctgccatgtttcatttgcttcaaccctcaagatccttaattttgtccaagctttcattggtgtttcgatcattatctactccatatggatgctccatgaatacagccgtcaccttcccgtggacccgcctccgtcagcttcatcaagctccggaaccgagatcgctactagtgtatctgagcccttgaagaatcctattgattttgtggcgagtatcattctcgggtctaatggtggtgatcatgggtttaacctacgctcgttggaccttcctgctccatggttcatctactctttcatggcggttggtatattggtctgcattgttaccttcattggtttcatagcagctgaagcaatcaatggctgttgcttgtgtttttactctattctcaaaactctgctcattctacttgaagctgcacttgttgcatacatcgctattgaccgtcactgggaaaaggatcttccgtatgatccaactggagaacttagtagtcttagggctttcattgaagaaaacatcgatatatgcaaatgggtggggattgctgtggtagcagtccagctactgtcattgctactagccatggttctcagagcgatggtttcaaccccgaaacccgaacttgacgaagaggaagatgatgagaacccaaggagtagaacttgggacccacttcttggtccgcaaggaaaccaagcgcctgctggctcaagcaagattgaaaactggagctcccgaatcagagaaaagtatggtttgaaccagagtccaccggtgaacccgaaaggttgatgaagccaaataatcatgtttctaaaactgcatgtgtccatatggtctctgtgaagctctctttctctatgttttgctctttgcaacttctcgagtgtgcataaacatttactcaaaacagtgctgtattgtgtttacacaaacggcataagcatcttcgtttgtgtgtttgcttgtacaaacaatcctgtgaacagtttgaagttagcatttccactataacgtttcgattcaattt

SEQ ID NO: 74297 - protein, 270 aa, Arabidopsis thaliana; identical to SEQ ID NO: 27674
  peptide (1)..(270): Ceres Seq. ID no. 5002282

SEQ ID NO: 74298 - protein, 236 aa, Arabidopsis thaliana; identical to SEQ ID NO: 27675
  peptide (1)..(236): Ceres Seq. ID no. 5002283

SEQ ID NO: 74299 - protein, 166 aa, Arabidopsis thaliana; identical to SEQ ID NO: 27676
  peptide (1)..(166): Ceres Seq. ID no. 5002284

SEQ ID NO: 74300 - DNA, 1453 bp, Arabidopsis thaliana
  misc_feature (1)..(1453): Ceres Seq. ID no. 5002479
  misc_feature (1)..(1453): Ortholog of  Ceres SEQ ID NO 13654928 as cited in SEQ ID NO 62546
ctgggtgaaacatagaaaagtttctcttgctcaagttaatgataaaagggtgagagcaataaacgctgataagccttgtctggtccttggaattttgaattttctttttctatcttacttatagtattggtagttgagggtgtcgtcgataagttgttgtaggatttgttgctctggctctggtggtaggtctatgaaatcaacccatatcgtgaatggactgcaacatggtatcttcgtcccagtgggattgggagcatttgatcatgtccaatccgtcaaggactgaagatgacagcaaacagctacctactgagtgggaaattgaaaaaggtgaaggaattgaatctatagttccacatttctcaggccttgagagagtcagtagtggctctgccaccagcttctggcacactgctgtatcgaaaagctcacagtcgacctctatcaactcatcatctcccgaagccaaacgatgcaagcttgcatcagaaagttcccctggagattcttgcagcaacatagactttgtccaggtgaaggctcccacagctctcgaggtatccgttgcctcagctgaatcagatctttgtttaaaactaggaaagcggacatactctgaagaatactggggtagaaacaataatgaaatttcagcggtttctatgaagttgttaactccatctgttgtcgctgggaaatccaaattgtgtggtcagagcatgccagtcccgcgttgccaaattgatggctgtgaactggatctctcatctgctaagggttatcatcgtaagcacaaagtctgcgaaaagcattcaaagtgcccaaaagttagcgtgagtggcctggaacgtcggttctgccaacagtgtagcaggttccatgctgtctctgaatttgatgagaagaaacgaagctgccgaaaacgtctttctcatcataatgcgaggcgtcgtaagccacaaggagtattttcaatgaatcccgagagggtgtatgatcgaagacagcatacaaatatgttgtggaatggggtgtcccttaacgcgagatctgaagaaatgtatgaatggggtaataacacttatgatacaaagcctagacaaacggaaaaaagctttactctgagcttccagagaggtaatggctctgaggaccagctggttgctagtagcagccgtatgttctctacatctcaaacctcaggtgggttcccagcaggaaagtccaagtttcaacttcatggcgaagatgtgggagaatactcaggagtcctccatgaatctcaagatatccaccgtgctctctctcttctgtcaacctcttcggatcccctggcccaaccacatgtgcagccattttctctactctgttcatatgatgttgtaccaaaatagatgagtaagtaatgtgtaatttgtaaacctgttactcagttggtggatacttttcc

SEQ ID NO: 74301 - protein, 393 aa, Arabidopsis thaliana; identical to SEQ ID NO: 24209
  peptide (1)..(393): Ceres Seq. ID no. 5002480

SEQ ID NO: 74302 - protein, 389 aa, Arabidopsis thaliana; identical to SEQ ID NO: 24210
  peptide (1)..(389): Ceres Seq. ID no. 5002481

SEQ ID NO: 74303 - protein, 376 aa, Arabidopsis thaliana; identical to SEQ ID NO: 24211
  peptide (1)..(376): Ceres Seq. ID no. 5002482

SEQ ID NO: 74304 - DNA, 1086 bp, Arabidopsis thaliana
  misc_feature (1)..(1086): Ceres Seq. ID no. 5002549
  misc_feature (1)..(1086): Ortholog of  Ceres SEQ ID NO 15177067 as cited in SEQ ID NO 52085
  misc_feature (1)..(1086): Ortholog of  Ceres SEQ ID NO 14309480 as cited in SEQ ID NO 0
  misc_feature (1)..(1086): Ortholog of  Ceres SEQ ID NO 14312472 as cited in SEQ ID NO 0
gcaattcaccggaacttagccgacgagcgctgatcaaatcaaccggagaagcaaagctatagatctactatctccttcacagttgctatcagagatgtataataatatgggaccccggcctggaatggcaatgcctcaggcaaatcctcagcctagcccatttgggaatccgttctctggacctggctctggacttatccggagtggcttgggagcttatggggagaagattttcggttctagctctgagtatgtgcagagcaacataagtcgctacttctccgatcctcaatactattttcaagtgaatgaccagtatgtgaggaacaagttgaagattgttctacttccattccttcacaggggacactggactcgaatatcagaaccagttgggggtagactttcatacaaaccaccgatatacgatataaatgcaccagacttatacattccgcttatggcctttggcacttacgttgttcttgctggtttgtcactaggactctatggaaagtttactccagaagctctgaactggctttttgtgaaaggaatggttggctggtttttgcaagtgatgctgctgaagataacattgctttcacttggaagcggagaagcccctctcttggatattgtggcatatgcaggctatactttcacaggcctttgtctagctgttcttggcaagataatctggggatactcttactatgttttgattccgtggacctgcttatgcactggggtattcttagtgaagacaatgaagcgagttctctttgcagaatctaggagttatgactcaagcaggcatcactatctcttgatctttgttgctttagcccagtttcctcttttgatctggcttggtaacattagtgtgaattggctcttttgaaacgcattacgtttatattgttgtgaaaaacacctctgaggttatgtagcagaatttggaatgtcctcctgatggatatattatatggtagttgagcttttttggtttagacttctgtatgtcaaacatcaatatggaaagaaaagtgttatctcccttcccttttctgaatctcacttttc

SEQ ID NO: 74305 - protein, 269 aa, Arabidopsis thaliana; identical to SEQ ID NO: 39420
  peptide (1)..(269): Ceres Seq. ID no. 5002550

SEQ ID NO: 74306 - protein, 265 aa, Arabidopsis thaliana; identical to SEQ ID NO: 39421
  peptide (1)..(265): Ceres Seq. ID no. 5002551

SEQ ID NO: 74307 - protein, 259 aa, Arabidopsis thaliana; identical to SEQ ID NO: 39422
  peptide (1)..(259): Ceres Seq. ID no. 5002552

SEQ ID NO: 74308 - DNA, 1263 bp, Arabidopsis thaliana
  misc_feature (1)..(1263): Ceres Seq. ID no. 5002553
  misc_feature (1)..(1263): Ortholog of  Ceres SEQ ID NO 15178027 as cited in SEQ ID NO 55634
  misc_feature (1)..(1263): Ortholog of  Ceres SEQ ID NO 14314739 as cited in SEQ ID NO 59911
ggaatcgcttctacttcactctcaccttcctcctattctctctctctttctatgtcaagttagcttagccgtctcaccagaaagctaaccttacctcacaaacattgattgtgttacactaatctcttaaatagagagccgtaatttctacacactctgatcgctagatggaaacggagatatcaggaatggataatccagctatgaccttggacgaggtttccatggaacgcaacaagagcttcgttaaggcattgcaggagctcaagaacttgaggcctcaactttattcagctgctgattactgtgaaaagtcttatcttcatagcgagcaaaagcaaatggtattggacaatttgaaagactacactgtgaaggctctagttaatgctgttgatcaccttggaactgtagcttccaagcttactgatctttttgatcaccaaaattcagacatatcaactatggaaatgagagcttcttgtgttagccagcaactgcttacatgccggacatatatcgacaaagaaggtcttagacagcaacagctattagcagttatcccattgcatcacaagcattacattcttcccaattctgttaacaagcgggtacactttagtcctctcagacgaactgacacaagacagaatcattaccaagctatatcccgtcttcaaccttcagatgcccctgcatcgaaatcactctcctggcatttaggctcagagaccaagtctaccctcaaaggaacatccacagttgcaccaagctccaaagattcaaaagctttctcaaagacatctggagtgttccatctcttaggtgatgatgaaaacatagcaaacaagaagcctttggctggttctcaggtctcaggtgttcctgctgcatccactgcccataaggatttggaggttccgaaacttctaactgcacacaggtcacttgataacaacccgcgacgagagatcattcaagctcctgtccggacaaagagtgttctttctgcgttctttgttaaacagaaaactccaaagctcaaagctggctatgtctcgtgaaaacaccaactctttgtactgagaaggaaatttcaatctcataccacgtttcttttaccttatataataacatgttgattttcatgtaattatcttaatcaccacatcaacgtacgaagtccagtaagacatgattttggtctatcattaacaaaactgtgtaatagattaagaatgtgtttttagaatgtaaaagctt

SEQ ID NO: 74309 - protein, 298 aa, Arabidopsis thaliana; identical to SEQ ID NO: 29206
  peptide (1)..(298): Ceres Seq. ID no. 5002554

SEQ ID NO: 74310 - protein, 291 aa, Arabidopsis thaliana; identical to SEQ ID NO: 29207
  peptide (1)..(291): Ceres Seq. ID no. 5002555

SEQ ID NO: 74311 - protein, 286 aa, Arabidopsis thaliana; identical to SEQ ID NO: 29208
  peptide (1)..(286): Ceres Seq. ID no. 5002556

SEQ ID NO: 74312 - DNA, 1407 bp, Arabidopsis thaliana
  misc_feature (1)..(1407): Ceres Seq. ID no. 5002641
  misc_feature (1)..(1407): Ortholog of  Ceres SEQ ID NO 15171382 as cited in SEQ ID NO 51642
  misc_feature (1)..(1407): Ortholog of  Ceres SEQ ID NO 15168545 as cited in SEQ ID NO 57829
  misc_feature (1)..(1407): Ortholog of  Ceres SEQ ID NO 15168468 as cited in SEQ ID NO 58115
  misc_feature (1)..(1407): Ortholog of  Ceres SEQ ID NO 15179784 as cited in SEQ ID NO 64755
  misc_feature (1)..(1407): Ortholog of  Ceres SEQ ID NO 13596440 as cited in SEQ ID NO 68769
  misc_feature (1)..(1407): Ortholog of  Ceres SEQ ID NO 15180012 as cited in SEQ ID NO 0
tctttcaattactgtaatgttgaatttgggtttcatctactaactaagatgaagtttcttgtctctttctgtctccctctttcttaattcctctctacttttcggttaattgctcctcttcagctaactttggggctttaaagtgataggatggctcgcttcagttttccttgttttccaaattttgggggttttaatcagcacaggatgagagaggcacagctaggcggtcacactctgaggtcccatggaatgactgttgcaaggactcacatgcatgattggatcattctcgtgttacttgttattctcgagtgtgtactccttataatccacccattttatcgctttgttggtaaagatatgatgactgatctaagttacccgttaaagagtaacaccgtaccaatttggtctgtcccggtatatgcgatgctgttacctttggtaatcttcatctttatctacttccgtcgaagagatgtttatgatcttcatcacgcggtgctaggtctcttatactctgttctggtgacagcagtacttaccgatgcaataaagaatgcagttggtcgaccacgtcctgacttcttctggcgttgttttccagatggcaaagctctttatgatagccttggagatgttatatgccatggtgataaaagcgtcataagggaaggtcacaaaagctttccaagtggacacacgtcatggtctttttcgggtctcggatttctttcgctttacttatcgggaaagattcaagcatttgacggtaaaggccacgttgcaaagctatgcatagtcatactccctttgctatttgcagctcttgtcggcatttcccgtgttgatgactattggcatcattggcaagacgtctttgcaggaggcttgctaggtcttgcgatctctacaatctgttatcttcaatttttcccgccaccatatcacaccgaaggttggggaccatatgcttacttccaagtgttggaggctgcgagagtgcaaggagcagcgaatggagcagtgcagcagccgccgccccaagttaacaacggtgaagaagaagacggtgggtttatgggtttacatttggtggataatccgactatgaggagagaagaggatgtagaaactggtagaggctgagatgaagaaactctgaagctggtttggttacttgttaggacactttctcttgttcttttgattctttgttggacaactttagtagatttctctaagataactaatagagtcgtttggttttggttttggtttaaatggatgaccggttttatggttccggtattggtggttaaagtttatgtttttcaaaaaagttcactggataaatgtagctttattttcaatattttaaggattgaaatcggatttgaactt

SEQ ID NO: 74313 - protein, 333 aa, Arabidopsis thaliana; identical to SEQ ID NO: 40140
  peptide (1)..(333): Ceres Seq. ID no. 5002642

SEQ ID NO: 74314 - protein, 314 aa, Arabidopsis thaliana; identical to SEQ ID NO: 27353
  peptide (1)..(314): Ceres Seq. ID no. 5002643

SEQ ID NO: 74315 - protein, 299 aa, Arabidopsis thaliana; identical to SEQ ID NO: 27354
  peptide (1)..(299): Ceres Seq. ID no. 5002644

SEQ ID NO: 74316 - DNA, 1461 bp, Arabidopsis thaliana
  misc_feature (1)..(1461): Ceres Seq. ID no. 5002667
  misc_feature (1)..(1461): Ortholog of  Ceres SEQ ID NO 15171382 as cited in SEQ ID NO 51642
  misc_feature (1)..(1461): Ortholog of  Ceres SEQ ID NO 15168545 as cited in SEQ ID NO 57829
  misc_feature (1)..(1461): Ortholog of  Ceres SEQ ID NO 15168468 as cited in SEQ ID NO 58115
  misc_feature (1)..(1461): Ortholog of  Ceres SEQ ID NO 15179784 as cited in SEQ ID NO 64755
  misc_feature (1)..(1461): Ortholog of  Ceres SEQ ID NO 13596440 as cited in SEQ ID NO 68769
  misc_feature (1)..(1461): Ortholog of  Ceres SEQ ID NO 15180012 as cited in SEQ ID NO 0
agattgtccctaggagtcactgttatcgctctttcaattactgtaatgttgaatttgggtttcatctactaactaagatgaagtttctttgataggatggctcgcttcagttttccttgttttccaaattttgggggttttaatcaggtccaagtaattaggtgaagtttgcctctctctttttttggatctcattggtctgcaatagtctcaattaaaccttctagtttgcatattaccagttgagtgactcttggttccagattcgtttttggtggtcatagtcgcgagctgtgacaaatcgggggcctgagatttcagaaactgctgataattgggtctcaccatctgacattccactcatagaacctaatagtaaagaggatgagagaggcacagctaggcggtcacactctgaggtcccatggaatgactgttgcaaggactcacatgcatgattggatcattctcgtgttacttgttattctcgagtgtgtactccttataatccacccattttatcgctttgttggtaaagatatgatgactgatctaagttacccgttaaagagtaacaccgtaccaatttggtctgtcccggtatatgcgatgctgttacctttggtaatcttcatctttatctacttccgtcgaagagatgtttatgatcttcatcacgcggtgctaggtctcttatactctgttctggtgacagcagtacttaccgatgcaataaagaatgcagttggtcgaccacgtcctgacttcttctggcgttgttttccagatggcaaagctctttatgatagccttggagatgttatatgccatggtgataaaagcgtcataagggaaggtcacaaaagctttccaagtggacacacgtcatggtctttttcgggtctcggatttctttcgctttacttatcgggaaagattcaagcatttgacggtaaaggccacgttgcaaagctatgcatagtcatactccctttgctatttgcagctcttgtcggcatttcccgtgttgatgactattggcatcattggcaagacgtctttgcaggaggcttgctaggtcttgcgatctctacaatctgttatcttcaatttttcccgccaccatatcacaccgaaggttggggaccatatgcttacttccaagtgttggaggctgcgagagtgcaaggagcagcgaatggagcagtgcagcagccgccgccccaagttaacaacggtgaagaagaagacggtgggtttatgggtttacatttggtggataatccgactatgaggagagaagaggatgtagaaactggtagaggctgagatgaagaaactctgaagctggtttggttacttgttaggacactttctcttgttcttttgattctttgttggacaactttagtagatttctctaagataactaatagagtcgtttggttttggttttggttt

SEQ ID NO: 74317 - protein, 314 aa, Arabidopsis thaliana; identical to SEQ ID NO: 27353
  peptide (1)..(314): Ceres Seq. ID no. 5002668

SEQ ID NO: 74318 - protein, 299 aa, Arabidopsis thaliana; identical to SEQ ID NO: 27354
  peptide (1)..(299): Ceres Seq. ID no. 5002669

SEQ ID NO: 74319 - protein, 292 aa, Arabidopsis thaliana; identical to SEQ ID NO: 27355
  peptide (1)..(292): Ceres Seq. ID no. 5002670

SEQ ID NO: 74320 - DNA, 1436 bp, Arabidopsis thaliana
  misc_feature (1)..(1436): Ceres Seq. ID no. 5002697
  misc_feature (1)..(1436): Ortholog of  Ceres SEQ ID NO 13595351 as cited in SEQ ID NO 55934
  misc_feature (1)..(1436): Ortholog of  Ceres SEQ ID NO 13639645 as cited in SEQ ID NO 57488
atatacacaaaccccttagagaaacaaaaagaatacaaaaagaagagagagattagttattaacttattcataataagtgtaattacttcgtatttacttttttttggttagcagtcgactagtaatcaataatgggttactgcgatggtaaatggacaccggtgattattatggttatgatcaattcagcgctgggtttagctaatgctttggttaaaaaagtactcgatggtggtgttaaccatatggttatcgcaacatatcgtcttgctatttcaaccctatttttggcaccaatcgcatttttttgggaacggaaaacgagaccgacactaacgctcaacatcttggttcagcttttcttcagtgctcttgttggggcaagtttgactcagtatttcttcctattggggctatcatacacatcggctacgttggcatgtgcttttattagcatgacgcctgcgattacattcgttatggctctaatattcagggtagagaagctaaacatgaaaagcaaagcaggtatggggatggtgatgggcgcgttgatatgcataggaggagctttattattaacaatgtacaaaggtgttcccttgacaaaacttcggaaactagaaacccatcagttgataaacaataaccacgctatgaaaccagagaattggataataggatgcgtacttctctttgcgggtagtagctgtttcgggtcgtggatgctgatacaagccaaagtgaacgagaaatacccttgtcaatactcgagtactgtcgtattatccttctttggcaccatccaatgcgcccttctaagcctcatcaaatctcgagatatcacggcttggatcctcacagataaacttgatatcgttaccattgtttacgcgggagcagtagcacaaggaatatgtacggttggaacgtcttggtgcatcagaaagagaggacctatctttacttctatatttaccccggtggggcttatatttgcaacactatttgatttcttgatccttcatcgtcaaattttcctaggaagtgttgtcggatctggggttgtaatcttcggactatacatattcttgttgggaaaagtcaggctaatgaaagaagagtgtgaaaagaagttaccttgtcgttttaatgaagatgatcaagaagaagatgatgatgaacaatacaaaaagggtcatcttatggttgttccaatgactccttgataagattagacttttttttttttcttcttcttcacttcgtacattatttagtaaaaccattgaccggtgaaaattacatggactagtctaacaacggttcaaaaaactagtcacatgtttttttttttttgctttttcttttctttcccttttttttgttttgcaatgtaaaacttttattgcaataataaaaaaatctcctttgc

SEQ ID NO: 74321 - protein, 365 aa, Arabidopsis thaliana; identical to SEQ ID NO: 25404
  peptide (1)..(365): Ceres Seq. ID no. 5002698

SEQ ID NO: 74322 - protein, 352 aa, Arabidopsis thaliana; identical to SEQ ID NO: 25405
  peptide (1)..(352): Ceres Seq. ID no. 5002699

SEQ ID NO: 74323 - protein, 350 aa, Arabidopsis thaliana; identical to SEQ ID NO: 25406
  peptide (1)..(350): Ceres Seq. ID no. 5002700

SEQ ID NO: 74324 - DNA, 1278 bp, Arabidopsis thaliana
  misc_feature (1)..(1278): Ceres Seq. ID no. 5002711
  misc_feature (1)..(1278): Ortholog of  Ceres SEQ ID NO 15176423 as cited in SEQ ID NO 53228
accattccaaaatagtcaccgcccaaaaaaaaaaaaaaaaaaaaaaatcctttttttctcttcttgagagagagaaagagagagggagacaagtttgttctggataaaaagacaattcatttctattttaattgtctgcaaaattctcacgggccatcggagagaggagacagaggtggtgctgcacaagaatccttcctcctatatcctacaagactttggaatgggaagagaagttgttgaggtgcttatggaccgaaacgccgacgtttcaagcgctagagttcatgttgctcctaagatagctgcagaggagactgatgaggaatttgaagtcaaagaatgcacagaggagaagtctctttctgagaatgcaccaaatgttggatctgctgagagagttggagctcagaaatcacctaaaacccgtaatggaaatgctaaagtttcaaagcaggatgctcctcttctcgcggtgaggaagccattgcaacccgagaacaagaagcatattgatgacgaagataattgctccattgcttcttccgttgcaacttccatgaggatgggtaagtctggattgacttatggaagtgctccaacgtttaggagtgctcaacgtgctgagaaacgcaaggagtattaccaaaagctcgaggagaaaaaccaagcgcttgaagctgagaggaacgagcttgaacagaggcaaaaggatgaacaagaagcagccttgaagcaacttagaaagaatctcaagttcaaggctaaacccgtccccaacttctactacgaggcacctcctgcgaaacctgagctcaagaagcttcctttgacacgtcccaagtcgccaaaactgatcctttctcggagaaaaagcttcagcgacgcagtcagctcgtcttcccgtgaagagattctgaagacagtctctaaccggaaccgacacagcactggaacagttcagaacaaagacgatgatcacaggaacaagaacaccaatgctgcgcacgacagccctcgtgtcagatcaggcaaaggtaaatccggattgaaaccagtgaacgagtcctcagaagaagcttgaaatttcaaaagatgatgctttgttggtctaacttgatcttgccggagaaaatgtaaaatcaaagactctttgtttttcggttatttccggtatacgtttggttcactatgtaactgtcttttttcgattttaagttttaacatgaaaaactttatgttgattgttgaacaactcctcctaatgttgaaatttgt

SEQ ID NO: 74325 - protein, 286 aa, Arabidopsis thaliana; identical to SEQ ID NO: 41332
  peptide (1)..(286): Ceres Seq. ID no. 5002712

SEQ ID NO: 74326 - protein, 277 aa, Arabidopsis thaliana; identical to SEQ ID NO: 41333
  peptide (1)..(277): Ceres Seq. ID no. 5002713

SEQ ID NO: 74327 - protein, 174 aa, Arabidopsis thaliana; identical to SEQ ID NO: 41334
  peptide (1)..(174): Ceres Seq. ID no. 5002714

SEQ ID NO: 74328 - DNA, 706 bp, Arabidopsis thaliana
  misc_feature (1)..(706): Ceres Seq. ID no. 5002745
  misc_feature (1)..(706): Ortholog of  Ceres SEQ ID NO 15172974 as cited in SEQ ID NO 67643
gtacaagtggaattttgaaaaaagaagcagagagcgatggagaaagtggttgatctcttcggagtcggagaagctaattcccagaagctactcgaaggaggcaaagatctcagcgagatccaacagggattgttcataggatcagtagctgaagcgaataacaaggattttctcaaaagctctaatatcactcatgtcttaaccgttgctgtggccttggctcctccttatcctgatgattttgtctacaaagtcattgaagtatatttcgatgagtgttatagcttcatcgaccaagctattcaatctggtggtggtgttttggttcattgcttcatgggaatgtctaggagtgtgactatagtggtggcttacctgatgaaaaagcatggaatgggattctctaaagctatggaacttgtaaggagccgacgacatcaggcatatcctaatcccggtttcatttcgcagctccagcaatttgaaaaatccatccaaggtaatgcatgattgcttcagctgataagaagattcaagatagtggcatgatgaactctcatgaaattccggcaagtgtcttcagccccatgttggccaaaaaagttgattggtttcgtgctgtgaaggattttttcttgtgaactattgatggtgagcactttgccatgtccattagccaattgaaatgaatgaaaacgcagaattt

SEQ ID NO: 74329 - protein, 157 aa, Arabidopsis thaliana; identical to SEQ ID NO: 30460
  peptide (1)..(157): Ceres Seq. ID no. 5002746

SEQ ID NO: 74330 - DNA, 1264 bp, Arabidopsis thaliana
  misc_feature (1)..(1264): Ceres Seq. ID no. 5002763
  misc_feature (1)..(1264): Ortholog of  Ceres SEQ ID NO 12616332 as cited in SEQ ID NO 63449
  misc_feature (1)..(1264): Ortholog of  Ceres SEQ ID NO 13597498 as cited in SEQ ID NO 64648
gaccggatccgaataattggatccaccggatcggagggaaaaaaaacaaacccgtgacgccattaacgaaggtcgagcttccttgacaccacacaatgcattctcctcgtaagctatttcacgcgcggtcatcactcgccacgcgccgatcaacggctcttgtcgtattaacttccctagctattggaatcgccggtttcacatttggactcgccgtaattcttataccgggtctccgattaaccggtcgtaattgcttgacgaacactcctccgaagacggtgcgagtcgtttgggacgtcgccggaaatagtaatggcgttgttagtggcgaaaagaagaggcataaggttatgggattcgttggtattcaaaccggatttggatctgctggccggagacgatcacttagaaagacatggatgccgtcagatccagaaggtcttcgacgtttggaagaatctacggggttagccatcaggtttatgataggaaaaacgaaaagtgaggagaaaatggctcagctcagaagagaaatcgcagagtatgatgacttcgtactgctagatatcgaagaggagtacagtaagcttccttacaaaactttggctttcttcaaagctgcgtacgcgctttatgattctgagttctatgtcaaagctgatgatgatatatacttgaggccagatcgactctctctgctattggcgaaagagcggagtcactctcagacgtacctaggatgcttgaaaaagggtccggttttcacagatcctaagctcaaatggtatgaaccattgtctcatctgctgggaaaagagtactttcttcatgcttatggcccgatttatgctctctctgctgatgtggtagccagtttggttgccctcaagaataacagtttcaggatgtttaacaacgaggacgtaacaataggtgcgtggatgctggcaatgaatgtcaaccacgagaaccatcacatcctttgcgaaccagaatgctcaccttcttctgttgctgtttgggacatccctaaatgctcaggtctttgtaacccagagaaaaggatgttggaacttcacaagcaagaaagctgctcgaaaagcccaactttgccatcagatgatgaatgatattatttctcttatcaaatgtctttataaacctcttctcagtggtcgaagctctatcacttgcagattcatttcttcgagcgaacctgcaacgagattatttcacatagattcaagtttagagttcactt

SEQ ID NO: 74331 - protein, 345 aa, Arabidopsis thaliana; identical to SEQ ID NO: 27786
  peptide (1)..(345): Ceres Seq. ID no. 5002764

SEQ ID NO: 74332 - protein, 259 aa, Arabidopsis thaliana; identical to SEQ ID NO: 27787
  peptide (1)..(259): Ceres Seq. ID no. 5002765

SEQ ID NO: 74333 - protein, 236 aa, Arabidopsis thaliana; identical to SEQ ID NO: 27788
  peptide (1)..(236): Ceres Seq. ID no. 5002766

SEQ ID NO: 74334 - DNA, 1121 bp, Arabidopsis thaliana
  misc_feature (1)..(1121): Ceres Seq. ID no. 5002819
  misc_feature (1)..(1121): Ortholog of  Ceres SEQ ID NO 15170617 as cited in SEQ ID NO 52614
gagatcttgattagagagagttcttgcaaaaagggtctctgtatttagttattaaattcttcaatcttgtttctgtaaatttcggatatttttgagaacaagcaaagatgtgtagtttggctacaaatctgttactaccatcgaagatgaaaccagtttttccagagaaactgagcactagctcactctgtgtcaccactagaagatctaagatgaagaaccgatctattgttcctgttgcaagattgtttggaccggcgatttttgaagcctccaaattgaaagtgttattcttaggagttgatgagaagaagcatccagcaaaacttccaagaacttacactcttactcacagtgacataaccgctaaattaactttagctatatctcaatccattaataactctcagttgcaaggatgggcaaataaattgttccgggacgaagtagtgggcgagtggaagaaagtgaaaggtaaaatgtcgcttcatgttcattgccacattagcggaggccacttcttcttgaatctcatcgcgaagcttcggtactacatcttttgcaaagaattacctgtggtactggaagcttttgcccatggagatgagtatttgttaaataatcaccccgagctacaagaatctcctgtttgggtttatttccattccaacatcccggagtacaacaaggtcgaatgttggggaccgctttgggaggccatgtcgcagcaccagcacgacggaaggacccacaagaagagtgaaactctaccggagctaccttgtcctgatgagtgcaagtgttgctttccgacggttagcacgattccgtggtctcatcgtcattatcaacataccgcagcggatgagaatgttgcggatggcctgttggaaatacctaaccctgggaaatcaaagggatagatctaatgtaaatgtgttttttctttttctttggtggttaggaatgttagaaggagcatgaaaatctatttggtcggtgttaatagggagtgacaattgtataacataagtttcagtattttacaaattccttatatattagttttataaggtgattagttacccatccacgtgttatacatgtctttttattgtatg

SEQ ID NO: 74335 - protein, 271 aa, Arabidopsis thaliana
  peptide (1)..(271): Ceres Seq. ID no. 5002820
MCSLATNLLLPSKMKPVFPEKLSTSSLCVTTRRSKMKNRSIVPVARLFGPAIFEASKLKVLFLGVDEKKHPAKLPRTYTLTHSDITAKLTLAISQSINNSQLQGWANKLFRDEVVGEWKKVKGKMSLHVHCHISGGHFFLNLIAKLRYYIFCKELPVVLEAFAHGDEYLLNNHPELQESPVWVYFHSNIPEYNKVECWGPLWEAMSQHQHDGRTHKKSETLPELPCPDECKCCFPTVSTIPWSHRHYQHTAADENVADGLLEIPNPGKSKG

SEQ ID NO: 74336 - protein, 258 aa, Arabidopsis thaliana
  peptide (1)..(258): Ceres Seq. ID no. 5002821
MKPVFPEKLSTSSLCVTTRRSKMKNRSIVPVARLFGPAIFEASKLKVLFLGVDEKKHPAKLPRTYTLTHSDITAKLTLAISQSINNSQLQGWANKLFRDEVVGEWKKVKGKMSLHVHCHISGGHFFLNLIAKLRYYIFCKELPVVLEAFAHGDEYLLNNHPELQESPVWVYFHSNIPEYNKVECWGPLWEAMSQHQHDGRTHKKSETLPELPCPDECKCCFPTVSTIPWSHRHYQHTAADENVADGLLEIPNPGKSKG

SEQ ID NO: 74337 - protein, 236 aa, Arabidopsis thaliana
  peptide (1)..(236): Ceres Seq. ID no. 5002822
MKNRSIVPVARLFGPAIFEASKLKVLFLGVDEKKHPAKLPRTYTLTHSDITAKLTLAISQSINNSQLQGWANKLFRDEVVGEWKKVKGKMSLHVHCHISGGHFFLNLIAKLRYYIFCKELPVVLEAFAHGDEYLLNNHPELQESPVWVYFHSNIPEYNKVECWGPLWEAMSQHQHDGRTHKKSETLPELPCPDECKCCFPTVSTIPWSHRHYQHTAADENVADGLLEIPNPGKSKG

SEQ ID NO: 74338 - DNA, 1442 bp, Arabidopsis thaliana
  misc_feature (1)..(1442): Ceres Seq. ID no. 5002869
  misc_feature (1)..(1442): Ortholog of  Ceres SEQ ID NO 13597805 as cited in SEQ ID NO 64186
gacacgatccatcctaagaaacttcaattttggggtttctcttcgtcttcttcttcttcttcttctagatcgagagggacatgggtcttaccagccgccgttgacgactacgacgaccattctcttcctcttcatcttctctccttctgcttttctctatttcctattctctccaaattcaccatttccttccaccactcagagatctccctttcttattagctatgtcttcttctaacacgccatcttctagcgccgccgctgccggatcgatagattcttccgccgcccggagaaattccaagagacccaagtattcgaaatttactcagcaggagcttcctgcttgcaaaccaattcttacgcctggttgggtgatttcaacgtttttgatcattagtgttatcttcattccccttggtgttatttctctctttgcttctcaggatgttgttgagatcgttgatcggtatgatagtgcatgcatacctctatctgatagggctaacaaggttgcatacattcaaggaactggaaataaatcttgtacccggacgctaattgtgcctaagcgtatgaagcagcctatctacgtatattaccagcttgagaacttctaccagaatcaccgcaggtatgtgaaaagccgaagtgattcgcaattgagaagtgtgaaagatgagaatcaaatagacgcatgcaagcctgaggatgattttggtgggcagccaattgtgccatgtggtctaattgcttggagtctctttaatgacacatacgttctatcaagaaataaccagggtttaacggtaaacaagaaaggaattgcatggaagagcgacaaggaacacaagtttgggaaaaatgtgtttcccaagaactttcagaagggcaatctcactggtggtgccagtctagatccaaataaaccattgagtgatcaagaggatctgatcgtgtggatgaggactgctgcgttgccaacatttagaaaattatacgggaagatagagagtgacttggagaagggtgagaacatacaagtgactctgcagaacaactacaacacatacagtttcagtgggaagaagaagcttgttctgtcaacaacaagttggcttggtggaaagaacgacttcctcggcattgcttacctcaccgttgggggaatctgtttcgtcttggcacttgcatttaccgtcatgtatcttgtgaaacccaggcgactcggtgatcctacctacttgtcgtggaacagaattcctggaggtcgttaaacagatgactgcatcatctgcgtatataaatctacttatctctggttgtaatttgatccaaaattgaaagtgatgatctttttttttttaatatagatgtgaaatgtatgtatgatgttacagttggaatatgctcattacatagaatgattgatgcttcctatc

SEQ ID NO: 74339 - protein, 350 aa, Arabidopsis thaliana; identical to SEQ ID NO: 23752
  peptide (1)..(350): Ceres Seq. ID no. 5002870

SEQ ID NO: 74340 - protein, 233 aa, Arabidopsis thaliana; identical to SEQ ID NO: 23753
  peptide (1)..(233): Ceres Seq. ID no. 5002871

SEQ ID NO: 74341 - DNA, 590 bp, Arabidopsis thaliana
  misc_feature (1)..(590): Ceres Seq. ID no. 5002934
  misc_feature (1)..(590): Ortholog of  Ceres SEQ ID NO 13594809 as cited in SEQ ID NO 51847
  misc_feature (1)..(590): Ortholog of  Ceres SEQ ID NO 15173998 as cited in SEQ ID NO 0
  misc_feature (1)..(590): Ortholog of  Ceres SEQ ID NO 15178333 as cited in SEQ ID NO 0
attctacatttcctctgcctctttctcagatcacaaaaccctaatttcgaatctttattcttcagaatggctttctgtaacaaactcggtggtctattgagacagaacatttcttctaacggaaatgttccggttacgtctatgctcggatctctccggttgatgtctaccaagcttttcatcggaggtctctcatggggaaccgatgacgcatccttaagggatgcttttgctcacttcggtgacgttgttgatgctaaagttatcgttgatagagagacaggaagatcaagggggtttggatttgtcaacttcaatgatgagggtgctgcaactgctgccatatcagagatggacggaaaggaactgaatggtcgtcacatccgagtgaatcctgctaatgatagaccagtggaggctacggtggtgatggtggtggtggtttctaaacagaggaggtgcttgtgaagaagaagagttaatggttctgtttagttggtttcttctattgaatcttatgttagtacaaaacctgaatgggatttgctgaaaactctttactctttttttggttaccaatcaattcggtt

SEQ ID NO: 74342 - protein, 155 aa, Arabidopsis thaliana
  peptide (1)..(155): Ceres Seq. ID no. 5002935
ILHFLCLFLRSQNPNFESLFFRMAFCNKLGGLLRQNISSNGNVPVTSMLGSLRLMSTKLFIGGLSWGTDDASLRDAFAHFGDVVDAKVIVDRETGRSRGFGFVNFNDEGAATAAISEMDGKELNGRHIRVNPANDRPVEATVVMVVVVSKQRRCL

SEQ ID NO: 74343 - protein, 133 aa, Arabidopsis thaliana
  peptide (1)..(133): Ceres Seq. ID no. 5002936
MAFCNKLGGLLRQNISSNGNVPVTSMLGSLRLMSTKLFIGGLSWGTDDASLRDAFAHFGDVVDAKVIVDRETGRSRGFGFVNFNDEGAATAAISEMDGKELNGRHIRVNPANDRPVEATVVMVVVVSKQRRCL

SEQ ID NO: 74344 - protein, 108 aa, Arabidopsis thaliana
  peptide (1)..(108): Ceres Seq. ID no. 5002937
MLGSLRLMSTKLFIGGLSWGTDDASLRDAFAHFGDVVDAKVIVDRETGRSRGFGFVNFNDEGAATAAISEMDGKELNGRHIRVNPANDRPVEATVVMVVVVSKQRRCL

SEQ ID NO: 74345 - DNA, 1667 bp, Arabidopsis thaliana
  misc_feature (1)..(1667): Ceres Seq. ID no. 5003066
  misc_feature (1)..(1667): Ortholog of  Ceres SEQ ID NO 13581273 as cited in SEQ ID NO 54551
  misc_feature (1)..(1667): Ortholog of  Ceres SEQ ID NO 13594209 as cited in SEQ ID NO 59089
  misc_feature (1)..(1667): Ortholog of  Ceres SEQ ID NO 13502874 as cited in SEQ ID NO 66298
  misc_feature (1)..(1667): Ortholog of  Ceres SEQ ID NO 12614124 as cited in SEQ ID NO 68392
atcacaaccaaattccttagagaaaaaggaagagaaaggtcaaagatgttttactatgtgattgtccttcctttagctctctttctcttggcttacaaattattcttcacctccaaaacgaagcgtttcaacctccctccctctccaccttactctctcccaatcctaggccaccacaacctcctcaagccgccggtccaccgtctcttccaccgcctctccaaaacacacggcccaatcttctccctccaatttggctcccgccgtgccgtcgtaatctcctcctcctcactcgcaacacaatgcttcacaggccaaaacgacatcattctctcaaaccggccttgtttcctaaccgctaaatacgtcgcttacaactacacaaccgtaggaaccgcgccttatggcgaccactggcgtaacctccgccgcatttgctccctggaaatcctctcctcgaaccgtctcacaaacttcctccacatccgtaaagacgaaatccaccgcatgctcacgagactctcacgcgacgtcaacaaagagatcgagctcgagccgctcttgtccgatctaacgttcaacaacatagtaagaatggttacagggaagagatactacggcgacgaagtccataacgaagaagaggcaaatgttttcaagaaactcgtcgccgatatcaacgactgtagcggcgcgagacatcccggagattacttgcccttcatgaagatgttcggagggagctttgagaagaaagtgaaagctcttgcggaagccatggatgagatcttgcagcgtttgcttgaagaatgcaagagagataaagatggtaacactatggttaatcatttgctctctctgcaacaaaatgaaccagagtattacactgacgtcactatcaaaggcctaatgctgggcatgatgatcgccggaacagacacttccgctgtgacgctggagtgggcgatgtcgagcttgctaaatcatcccgaggctttggaaaaagcaaaactagagattgacgagaaaatcggacaagaacgtttgatcgatgaaccagacatcgcaaacttgccttaccttcaaaacatagtgtcggaaacattccgattatatccagcggcaccgcttctagtaccaagatcaccaacagaggatattaaagtcggaggatacgatgtgccacgtggcacaatggtgatggttaatgcgtgggctatacacagagatccagagctctggaacgaaccggagaagtttaaaccagagaggtttaatggcggagaaggtggaggaagaggagaagacgttcataagctgatgccgtttgggaatggacggagatcgtgtcccggcgccggactagggcagaagatcgtgacattagcgttaggttcgttgatccaatgctttgactggcaaaaagtcaacggcgaagcaatcgatatgacggagactccggggatggcaatgcgtaagaaaatacctctatctgctttgtgtcaatctcggcccattatgagtaagcttcaggcccatttaaaaggttaggtttgttttcttcttaaagttctttttagttttctgttttctatgcatggagatgtgagattttgctgcgtttgtgtaacgaaggatatttgtgtaatgcgaacaaatgaaattcc

SEQ ID NO: 74346 - protein, 516 aa, Arabidopsis thaliana
  peptide (1)..(516): Ceres Seq. ID no. 5003067
ITTKFLREKGRERSKMFYYVIVLPLALFLLAYKLFFTSKTKRFNLPPSPPYSLPILGHHNLLKPPVHRLFHRLSKTHGPIFSLQFGSRRAVVISSSSLATQCFTGQNDIILSNRPCFLTAKYVAYNYTTVGTAPYGDHWRNLRRICSLEILSSNRLTNFLHIRKDEIHRMLTRLSRDVNKEIELEPLLSDLTFNNIVRMVTGKRYYGDEVHNEEEANVFKKLVADINDCSGARHPGDYLPFMKMFGGSFEKKVKALAEAMDEILQRLLEECKRDKDGNTMVNHLLSLQQNEPEYYTDVTIKGLMLGMMIAGTDTSAVTLEWAMSSLLNHPEALEKAKLEIDEKIGQERLIDEPDIANLPYLQNIVSETFRLYPAAPLLVPRSPTEDIKVGGYDVPRGTMVMVNAWAIHRDPELWNEPEKFKPERFNGGEGGGRGEDVHKLMPFGNGRRSCPGAGLGQKIVTLALGSLIQCFDWQKVNGEAIDMTETPGMAMRKKIPLSALCQSRPIMSKLQAHLKG

SEQ ID NO: 74347 - protein, 501 aa, Arabidopsis thaliana
  peptide (1)..(501): Ceres Seq. ID no. 5003068
MFYYVIVLPLALFLLAYKLFFTSKTKRFNLPPSPPYSLPILGHHNLLKPPVHRLFHRLSKTHGPIFSLQFGSRRAVVISSSSLATQCFTGQNDIILSNRPCFLTAKYVAYNYTTVGTAPYGDHWRNLRRICSLEILSSNRLTNFLHIRKDEIHRMLTRLSRDVNKEIELEPLLSDLTFNNIVRMVTGKRYYGDEVHNEEEANVFKKLVADINDCSGARHPGDYLPFMKMFGGSFEKKVKALAEAMDEILQRLLEECKRDKDGNTMVNHLLSLQQNEPEYYTDVTIKGLMLGMMIAGTDTSAVTLEWAMSSLLNHPEALEKAKLEIDEKIGQERLIDEPDIANLPYLQNIVSETFRLYPAAPLLVPRSPTEDIKVGGYDVPRGTMVMVNAWAIHRDPELWNEPEKFKPERFNGGEGGGRGEDVHKLMPFGNGRRSCPGAGLGQKIVTLALGSLIQCFDWQKVNGEAIDMTETPGMAMRKKIPLSALCQSRPIMSKLQAHLKG

SEQ ID NO: 74348 - protein, 347 aa, Arabidopsis thaliana
  peptide (1)..(347): Ceres Seq. ID no. 5003069
MLTRLSRDVNKEIELEPLLSDLTFNNIVRMVTGKRYYGDEVHNEEEANVFKKLVADINDCSGARHPGDYLPFMKMFGGSFEKKVKALAEAMDEILQRLLEECKRDKDGNTMVNHLLSLQQNEPEYYTDVTIKGLMLGMMIAGTDTSAVTLEWAMSSLLNHPEALEKAKLEIDEKIGQERLIDEPDIANLPYLQNIVSETFRLYPAAPLLVPRSPTEDIKVGGYDVPRGTMVMVNAWAIHRDPELWNEPEKFKPERFNGGEGGGRGEDVHKLMPFGNGRRSCPGAGLGQKIVTLALGSLIQCFDWQKVNGEAIDMTETPGMAMRKKIPLSALCQSRPIMSKLQAHLKG

SEQ ID NO: 74349 - DNA, 1059 bp, Arabidopsis thaliana
  misc_feature (1)..(1059): Ceres Seq. ID no. 5665864
  misc_feature (1)..(1059): Ortholog of  Ceres SEQ ID NO 13594548 as cited in SEQ ID NO 51267
  misc_feature (1)..(1059): Ortholog of  Ceres SEQ ID NO 12614847 as cited in SEQ ID NO 61970
cataaacatcaaatggttctaattggtctttgatcttaaacccatttgattatggtatctaaagtttgatccttttgatgcactctcatcgcagtttctcgtgattttaatattattgaactcttttgatttgtggtgaagcaaaccttctctgtcacaactagctccattagaagccattctgtttgatgttgatggaacactctgtgactcagatcccatccaccttattgccttccaagaactgcttcaagagattggttttaacaatggtgtcccaatcgatgagaaattctttgttgagaacattgctggaaaacacaattctgaaattgctctacttctgttccctgatgatgtttcaagagggttaaaattctgtgatgaaaaggaagctctttaccgcaaaattgttgcagagaagataaagccacttgatgggcttataaaactgaccaaatggatcgaagatcgtggattgaaacgagctgcggtaacaaacgctccaaaagaaaacgcagagctcatgatatcgaaacttggtctgactgatttctttcaagcagtgattcttggctctgaatgtgaatttcccaaaccacaccctggaccttacttgaaggctcttgaagtgcttaacgtgtcaaaggagcacacgctagttttcgaagactcgatctctgggataaaagctggagttgcagctggaatgccagtgattggactgactacagggaatccagcaagcctgcttatgcaagcaaaacccgcttttctcatcgagaactatgcggatccaaaactgtgggctgtgttggaagaacttgataacaagtcttaagtctcacttgtttggcttatggaaacccacacatgcatgagcagcctctgaagtttaccttatgtcttagatgatcattgttgaataattcattgggagtttatgacaatgggagctttcaaatatctgattattttgtattgatacatgcacaatgctagatttgtatccaggagatagttgcataaaccaatatactataccctcggatcttagct

SEQ ID NO: 74350 - protein, 104 aa, Arabidopsis thaliana; identical to SEQ ID NO: 36387
  peptide (1)..(104): Ceres Seq. ID no. 5665865

SEQ ID NO: 74351 - protein, 61 aa, Arabidopsis thaliana
  peptide (1)..(61): Ceres Seq. ID no. 5665866
MLMEHSVTQIPSTLLPSKNCFKRLVLTMVSQSMRNSLLRTLLENTILKLLYFCSLMMFQEG

SEQ ID NO: 74352 - protein, 59 aa, Arabidopsis thaliana
  peptide (1)..(59): Ceres Seq. ID no. 5665867
MEHSVTQIPSTLLPSKNCFKRLVLTMVSQSMRNSLLRTLLENTILKLLYFCSLMMFQEG

SEQ ID NO: 74353 - DNA, 1227 bp, Arabidopsis thaliana
  misc_feature (1)..(1227): Ceres Seq. ID no. 5666068
  misc_feature (1)..(1227): Ortholog of  Ceres SEQ ID NO 14309287 as cited in SEQ ID NO 0
atctctctctctctctaccctttggatctttcttctcgatcaattatccattttgcccagattttttccagaagctcatcgaattcatcgaatcacaatgtttgaaatttggtttcactgttgctgagtgtgtttggaggagaagcttgattggttcggtgtttcactgtttgaagattataagagttatggagaatggtggtcagtatgataatgcgcggttcaagcccgattacttcaaaggtgcacaatctatgtggaatatgattccccagcatcagattaaggaacaacataatgcgttggtgatgaataagaagatcatgtccatccttgctgagagagacgctgctgtacatgaaagaaatcaagctgtctctgctaaaaaggaagctgtcgctgctcgggacgaagcgcttcagcaacgtgacaaagctctttctgagagagataaagctttgatagagagagataatgcttatgctgctcttcaacaccatgaaaatagtctcaactttgctttgtctggtgggaagtgtgttgatggagatgattgttttggtattggggaaccccacaaacttgaagtcttccctttgtcaactattccgcctgaggttacaaacacgaaggtggtgaacaaaaggaagaaagagaacaagcagggactatcaaaggtgaaaaaagtgggtgaagatctgaaccgtcgagttcctgctcctggaaagaaatctagaacagattgggacagtcaagatgtcggtttgaacttagtcaccttcgatgagacgacaatgcctgtacccatgtgttcgtgcacaggctctacgcgtcagtgttacaaatggggaaatggcggctggcaatcgtcttgctgcacaaccaccttatcccagtatccattaccgcagatgccaaacaagaggcattctcggatgggcggtaggaaaatgagcggaaacgttttctcgagattactcagccgtttatcagcagaaggatatgatctctcgtgtcctgttgatcttaaagactattgggctaggcacgggacaaaccgctacatcactatcaagtagcctctgttgtttacacagtccaagtatgtttctctcgtcttcttaagattaggtgttgtctttgtctttattgtccatagtttgttctttgttgtgtatggtaaaaccattgttatgtgtatcttttggatgggcaaaaatggtttgc

SEQ ID NO: 74354 - protein, 358 aa, Arabidopsis thaliana
  peptide (1)..(358): Ceres Seq. ID no. 5666069
LSLSLPFGSFFSINYPFCPDFFQKLIEFIESQCLKFGFTVAECVWRRSLIGSVFHCLKIIRVMENGGQYDNARFKPDYFKGAQSMWNMIPQHQIKEQHNALVMNKKIMSILAERDAAVHERNQAVSAKKEAVAARDEALQQRDKALSERDKALIERDNAYAALQHHENSLNFALSGGKCVDGDDCFGIGEPHKLEVFPLSTIPPEVTNTKVVNKRKKENKQGLSKVKKVGEDLNRRVPAPGKKSRTDWDSQDVGLNLVTFDETTMPVPMCSCTGSTRQCYKWGNGGWQSSCCTTTLSQYPLPQMPNKRHSRMGGRKMSGNVFSRLLSRLSAEGYDLSCPVDLKDYWARHGTNRYITIK

SEQ ID NO: 74355 - protein, 296 aa, Arabidopsis thaliana; identical to SEQ ID NO: 39962
  peptide (1)..(296): Ceres Seq. ID no. 5666070

SEQ ID NO: 74356 - protein, 274 aa, Arabidopsis thaliana; identical to SEQ ID NO: 39963
  peptide (1)..(274): Ceres Seq. ID no. 5666071

SEQ ID NO: 74357 - DNA, 883 bp, Arabidopsis thaliana
  misc_feature (1)..(883): Ceres Seq. ID no. 5666180
  misc_feature (1)..(883): Ortholog of  Ceres SEQ ID NO 12609185 as cited in SEQ ID NO 55761
  misc_feature (1)..(883): Ortholog of  Ceres SEQ ID NO 12615291 as cited in SEQ ID NO 62444
ctcccgacacaacacaaagttcatataataagaaaaacagagagaaacacacagagagctagaggagagtgagtgtcatgggttgtgttcgctgcaaatcatcagatccatggcaaacatctgccaatgcctttgaatccgtcgatgaatccggaatcaacgaagcctgggttgagatctccagccgcagatcatttgtcgccggcgaaggtagtcggaagaagctagagaggaagaagagccaagtgttactggaaggttacgttgagactgcttcttcttcctcggtggatgatcaaaaggacgatctgacgagatccaagagtttgacggatgacgacctcgaagatcttagaggttgtttagatctagggtttggttttagctacgacgagatccctgagctctgcaacactttacctgctttggagctttgctattcaatgagccagaagttcttagacgataagcaaaataaatcaccggaaacttcgtcggtggaagattgtccgtcgcctccactggtcaccgccactccgattgccaattggaagatctctagtcccggtgataatccggatgatgtgaaagctaggctcaaatactgggcacaagccgttgcctgtactgtccaattgtgcagctgaatgaatcattgtcacgtctgaaccaggaatactagcgaatgagcaatatctcaagcattggtagcggaggaggagatttcagaaagtggcattggaaggtctaaaattgaactgaatatcaacaatggttctcacttaattccatgtatgtgtactagtagttagtagtatctagtctaatgattttatgaacggaaataaaagatatcacttgaataaaaccatcaaattctttc

SEQ ID NO: 74358 - protein, 189 aa, Arabidopsis thaliana
  peptide (1)..(189): Ceres Seq. ID no. 5666181
MGCVRCKSSDPWQTSANAFESVDESGINEAWVEISSRRSFVAGEGSRKKLERKKSQVLLEGYVETASSSSVDDQKDDLTRSKSLTDDDLEDLRGCLDLGFGFSYDEIPELCNTLPALELCYSMSQKFLDDKQNKSPETSSVEDCPSPPLVTATPIANWKISSPGDNPDDVKARLKYWAQAVACTVQLCS

SEQ ID NO: 74359 - DNA, 1357 bp, Arabidopsis thaliana
  misc_feature (1)..(1357): Ceres Seq. ID no. 5666551
  misc_feature (1)..(1357): Ortholog of  Ceres SEQ ID NO 13582619 as cited in SEQ ID NO 56520
  misc_feature (1)..(1357): Ortholog of  Ceres SEQ ID NO 14314632 as cited in SEQ ID NO 59923
  misc_feature (1)..(1357): Ortholog of  Ceres SEQ ID NO 13660872 as cited in SEQ ID NO 60830
  misc_feature (1)..(1357): Ortholog of  Ceres SEQ ID NO 12616221 as cited in SEQ ID NO 63291
ctaacttctctgttcatctttttctctctttatttataaatttatctgcatagtactctctgaatctatatcttcaaaaaaaaaaaacgtccaagatcaaatcaagaaacccattaaaaaaaaaaatcaggttttggtttcagttttaagggtttaaggtttcttggggaagaaacgatggagactttttgtgggtttcaaaaggaggaagagcagatggatttacctcctgggttcaggtttcatccaacagatgaagaactcataactcactatctccataagaaggttcttgacaccagcttctcagctaaagctatcggtgaagttgatttaaacaaatcagagccatgggagttaccatggatggcaaaaatgggtgagaaagaatggtattttttctgtgtgagagacagaaagtatcccaccggtttaagaactaaccgagcaactgaagccggttattggaaggcgaccgggaaggataaagagatataccgaggcaaatcacttgttgggatgaagaagacacttgttttctatagaggaagagctcctaaaggtcagaaaaccaactgggtgatgcatgagtacaggcttgaaggaaaattctctgcccataacttgccgaaaaccgcaaagaatgaatgggtgatatgcagggtgttccaaaagagtgctggagggaagaagatcccgatttcgagtctaatccgaatcggttcactcggaaccgactttaacccttcgcttttgccctctttaaccgattcttcgccttacaacgataaaaccaaaacagaaccggtctacgtgccctgcttctccaaccaaacggatcaaaaccaaggaaccacactcaattgcttcagcagccctgttcttaactcgatccaagccgacatttttcacaggattccactctatcaaactcagtccctccaggtttctatgaatctacagagcccggttctcacgcaagaacactcagttctacatgctatgatcgagaacaacagaagacaaagtctcaaaacgatgagtgtctcacaagaaaccggagtttcaactgacatgaacactgatatctcatcggattttgaatttggtaagagacggtttgattctcaagaagatccgtcttcctctactggaccggttgatcttgaacctttctggaattactgaagatgattcaagattctcatgtccattaatttactgtggtgtgttaaagtttgtataggctattgtcatatactctcatatcaacttccactatatattataacaatttaaagaaacttaaaaatatgatttgatatatgactaaagtattataatacaattttgtacc

SEQ ID NO: 74360 - protein, 336 aa, Arabidopsis thaliana; identical to SEQ ID NO: 29064
  peptide (1)..(336): Ceres Seq. ID no. 5666552

SEQ ID NO: 74361 - protein, 323 aa, Arabidopsis thaliana; identical to SEQ ID NO: 29065
  peptide (1)..(323): Ceres Seq. ID no. 5666553

SEQ ID NO: 74362 - protein, 273 aa, Arabidopsis thaliana; identical to SEQ ID NO: 40495
  peptide (1)..(273): Ceres Seq. ID no. 5666554

SEQ ID NO: 74363 - DNA, 1359 bp, Arabidopsis thaliana
  misc_feature (1)..(1359): Ceres Seq. ID no. 5666952
  misc_feature (1)..(1359): Ortholog of  Ceres SEQ ID NO 12636774 as cited in SEQ ID NO 372
  misc_feature (1)..(1359): Ortholog of  Ceres SEQ ID NO 12578315 as cited in SEQ ID NO 62451
  misc_feature (1)..(1359): Ortholog of  Ceres SEQ ID NO 12617090 as cited in SEQ ID NO 64005
  misc_feature (1)..(1359): Ortholog of  Ceres SEQ ID NO 13597233 as cited in SEQ ID NO 64370
  misc_feature (1)..(1359): Ortholog of  Ceres SEQ ID NO 13584577 as cited in SEQ ID NO 65298
acgcttctgtctttacttcctctctcaacgtacgtagacagaaaaaaacaaaacatcatgacagaaaaatctgcagaactcgttcgtttgaacgaactcaaggcttttgtatcgacaaaagcaggtgtgaaaggacttgtcgataccaaaataaccgaagttcctcgaatcttccatatcccttcttcttcaactttatctaacaacaaaccttctgatatctttggcttaaacctcactgtcccaatcattgacctcggagatggtaacacatctgctgcaagaaacgtcctcgtttccaagattaaagaagcagctgagaattggggatttttccaagtaatcaatcatggtattcctttaactgttcttaaagatatcaaacaaggtgttcgaagatttcatgaggaagatccagaggtcaagaaacagtattttgctacagatttcaatacaagatttgcttacaacaccaacttcgatattcattattcttctcctatgaattggaaagactctttcacttgctacacttgtcctcaagatcctctaaagccagaggaaatcccactagcttgcagggatgttgtgattgaatactcgaagcatgtaatggaattaggaggtttactcttccaacttctctcagaagctttaggtttagactctgagattcttaagaacatggattgtctcaagggtttgcttatgctctgccattattatccaccttgtccacaacctgacctaactttgggcataagtaaacacaccgacaattccttcataacaattcttcttcaagatcaaatcggtggtcttcaagttcttcatcaagattcttgggttgatgtaactcctgttcctggagctcttgtcatcagtatcggtgatttcatgcaggcaagctcgattgatgcttccttttaactcaaaacagagtctttctttatcaatacacttgagtcattttgttttgcagctgatcacaaacgataagttcttaagtatggagcatagggtacgggcaaacagagatggaccgcggatttcagttgcttgcttcgttagctcgggagtgtttccaaattccactgtttatggaccgataaaagagcttctttctgatgaaaaccctgcaaagtacagagacatcactataccagaatacactgtaggatacctagcaagcatcttcgatggaaaatcgcatttgtctaagttccggatatgaagaaattacttgtatggcttagttaaaaacagatatgtgtgttttgctgctctcttctcgctcgagaggacatcaactattttgttaataagaaagaattttttacagtgaagacattgaattac

SEQ ID NO: 74364 - protein, 309 aa, Arabidopsis thaliana
  peptide (1)..(309): Ceres Seq. ID no. 5666953
TLLSLLPLSTYVDRKKQNIMTEKSAELVRLNELKAFVSTKAGVKGLVDTKITEVPRIFHIPSSSTLSNNKPSDIFGLNLTVPIIDLGDGNTSAARNVLVSKIKEAAENWGFFQVINHGIPLTVLKDIKQGVRRFHEEDPEVKKQYFATDFNTRFAYNTNFDIHYSSPMNWKDSFTCYTCPQDPLKPEEIPLACRDVVIEYSKHVMELGGLLFQLLSEALGLDSEILKNMDCLKGLLMLCHYYPPCPQPDLTLGISKHTDNSFITILLQDQIGGLQVLHQDSWVDVTPVPGALVISIGDFMQASSIDASF

SEQ ID NO: 74365 - protein, 290 aa, Arabidopsis thaliana
  peptide (1)..(290): Ceres Seq. ID no. 5666954
MTEKSAELVRLNELKAFVSTKAGVKGLVDTKITEVPRIFHIPSSSTLSNNKPSDIFGLNLTVPIIDLGDGNTSAARNVLVSKIKEAAENWGFFQVINHGIPLTVLKDIKQGVRRFHEEDPEVKKQYFATDFNTRFAYNTNFDIHYSSPMNWKDSFTCYTCPQDPLKPEEIPLACRDVVIEYSKHVMELGGLLFQLLSEALGLDSEILKNMDCLKGLLMLCHYYPPCPQPDLTLGISKHTDNSFITILLQDQIGGLQVLHQDSWVDVTPVPGALVISIGDFMQASSIDASF

SEQ ID NO: 74366 - DNA, 1047 bp, Arabidopsis thaliana
  misc_feature (1)..(1047): Ceres Seq. ID no. 5667048
  misc_feature (1)..(1047): Ortholog of  Ceres SEQ ID NO 15178816 as cited in SEQ ID NO 405
acatcttagttcatgttcgagtttctctggtctcttactctttcacctagaaatttgtttggtctcccaacaacataaacgcatgtatacattttcatgtgtctttgtaaggatattgattcatttttttgggcaaatagataatcaattcaatgctatgttttgtctgaaatgtgcagcttcaattacaaagaatggctgcttcaagtgctgtcaccgcaaactacgtcctcaagccacctccattcgcactggatgctttggagccgcatatgagcaaacaaactctggagtttcactggggaaaacatcacagagcttacgtggacaacctcaagaaacaggttcttggaaccgagcttgaaggcaagcccttagagcacattatccacagcacttacaacaatggtgatctcctccctgctttcaacaacgctgctcaggcgtggaaccacgagttcttctgggagtcaatgaaaccaggtggtggaggaaaaccatcaggagagcttcttgctttgcttgaaagagatttcacttcttatgagaagttctatgaagagttcaatgctgctgcagccactcagtttggagctggctgggcctggcttgcttattcaaatgaaaaactcaaagtagtgaaaactcccaatgctgtgaatccccttgtgctcggctctttcccattgcttaccattgatgtctgggagcatgcttactaccttgacttccagaaccgaagaccagattacataaagacattcatgaccaatcttgtgtcttgggaagctgtaagtgccagacttgaggccgccaaggctgcttctgcttaagcaaatttctgaacaatttgacttcagtgacagtgagttctgcatcaccgaagtctcttataaaatattggtcgctgtaataaggacacagctctcttgttgtgtatgtgtcacagagttcttcattttgcttgtgtaatgaacaattaaacatgctcttttctgagtgtgtgtgcgttttgtgtgtgtcaagtttttcatcgtctcctttatt

SEQ ID NO: 74367 - protein, 212 aa, Arabidopsis thaliana; identical to SEQ ID NO: 21185
  peptide (1)..(212): Ceres Seq. ID no. 5667049

SEQ ID NO: 74368 - protein, 186 aa, Arabidopsis thaliana; identical to SEQ ID NO: 21186
  peptide (1)..(186): Ceres Seq. ID no. 5667050

SEQ ID NO: 74369 - protein, 120 aa, Arabidopsis thaliana
  peptide (1)..(120): Ceres Seq. ID no. 5667051
HLSSCSSFSGLLLFHLEICLVSQQHKRMYTFSCVFVRILIHFFGQIDNQFNAMFCLKCAASITKNGCFKCCHRKLRPQATSIRTGCFGAAYEQTNSGVSLGKTSQSLRGQPQETGSWNRA

SEQ ID NO: 74370 - DNA, 1198 bp, Arabidopsis thaliana
  misc_feature (1)..(1198): Ceres Seq. ID no. 5667466
  misc_feature (1)..(1198): Ortholog of  Ceres SEQ ID NO 13595658 as cited in SEQ ID NO 59888
  misc_feature (1)..(1198): Ortholog of  Ceres SEQ ID NO 13661330 as cited in SEQ ID NO 61614
  misc_feature (1)..(1198): Ortholog of  Ceres SEQ ID NO 13596025 as cited in SEQ ID NO 62024
  misc_feature (1)..(1198): Ortholog of  Ceres SEQ ID NO 13662324 as cited in SEQ ID NO 62162
  misc_feature (1)..(1198): Ortholog of  Ceres SEQ ID NO 12625713 as cited in SEQ ID NO 64160
  misc_feature (1)..(1198): Ortholog of  Ceres SEQ ID NO 14303564 as cited in SEQ ID NO 65360
  misc_feature (1)..(1198): Ortholog of  Ceres SEQ ID NO 15170103 as cited in SEQ ID NO 66345
  misc_feature (1)..(1198): Ortholog of  Ceres SEQ ID NO 14313495 as cited in SEQ ID NO 0
atcgactactctcactctctttctattctctcttccgccgctttttccatcgttcgaaagtaaagttgctcgctttactcgttcaagcattcaactttagaatccgatcgaatcctcctgtaacagcaatgatgaatcggatcctcttgtttatgatcctggcttttgtctcatctctttcagaagttgagccaatttcgttcaagatcacgaatcgttgccggaacacgatatggcccggtttgctctctggtgctaactcagcgccgctccccacaactggctttcgtctctctagaggaaaatctaaaaccgtcgcaataccagagtcgtggtccggtcgtctctgggcacgaaccttgtgttcacaagatcggagttccggttctttcgtctgcttaaccggagattgcggctcgggaaaagtcgaatgttcaggctccggagctaaacctccagcaactctcgccgagtttactctcaacggcacaggaggactagatttttacgacgttagcctcgtcgacggttacaatctcccgatgctaatcttgcccaagaaaatcgtcattggaggatgcggagccaccgggtgtctcgtggacttgaacggcgcgtgtcccagagacctaaagctggtgacgcgtgggaatgggaacggtgttgcttgccgtagcgcgtgcgaggcattcggagacccaaggtattgctgcagcgatgcgtacgccacgccggacacgtgtcagccttcggtttactcgctcttctttaagcatgcgtgcccacgagcatacagctacgcctatgacgataagacgagcacttacacttgcgccaccggagccgattacttcatcatcttctgtccgccaccgtatacaagcgagaagcttttaggatcgaggaaagatggtgcaacactgccactagtaaacaagagcatgattcatttgccgcatccgcacagcagctgagccatcttcttattatatgtcttaagtccttcttacatcaggtccgtcttacatgggtactcgcattgtctgttgaggttactatactgttttcatttcctctttcttgttgcaggcagatagaaaattcatgtgtagaaaaatgtcattacggttaataccaaggtagaattactgtaaatctttacttgttttacacttgttacttctttcgaaattgttcc

SEQ ID NO: 74371 - protein, 323 aa, Arabidopsis thaliana
  peptide (1)..(323): Ceres Seq. ID no. 5667467
RLLSLSFYSLFRRFFHRSKVKLLALLVQAFNFRIRSNPPVTAMMNRILLFMILAFVSSLSEVEPISFKITNRCRNTIWPGLLSGANSAPLPTTGFRLSRGKSKTVAIPESWSGRLWARTLCSQDRSSGSFVCLTGDCGSGKVECSGSGAKPPATLAEFTLNGTGGLDFYDVSLVDGYNLPMLILPKKIVIGGCGATGCLVDLNGACPRDLKLVTRGNGNGVACRSACEAFGDPRYCCSDAYATPDTCQPSVYSLFFKHACPRAYSYAYDDKTSTYTCATGADYFIIFCPPPYTSEKLLGSRKDGATLPLVNKSMIHLPHPHSS

SEQ ID NO: 74372 - protein, 281 aa, Arabidopsis thaliana
  peptide (1)..(281): Ceres Seq. ID no. 5667468
MMNRILLFMILAFVSSLSEVEPISFKITNRCRNTIWPGLLSGANSAPLPTTGFRLSRGKSKTVAIPESWSGRLWARTLCSQDRSSGSFVCLTGDCGSGKVECSGSGAKPPATLAEFTLNGTGGLDFYDVSLVDGYNLPMLILPKKIVIGGCGATGCLVDLNGACPRDLKLVTRGNGNGVACRSACEAFGDPRYCCSDAYATPDTCQPSVYSLFFKHACPRAYSYAYDDKTSTYTCATGADYFIIFCPPPYTSEKLLGSRKDGATLPLVNKSMIHLPHPHSS

SEQ ID NO: 74373 - protein, 280 aa, Arabidopsis thaliana
  peptide (1)..(280): Ceres Seq. ID no. 5667469
MNRILLFMILAFVSSLSEVEPISFKITNRCRNTIWPGLLSGANSAPLPTTGFRLSRGKSKTVAIPESWSGRLWARTLCSQDRSSGSFVCLTGDCGSGKVECSGSGAKPPATLAEFTLNGTGGLDFYDVSLVDGYNLPMLILPKKIVIGGCGATGCLVDLNGACPRDLKLVTRGNGNGVACRSACEAFGDPRYCCSDAYATPDTCQPSVYSLFFKHACPRAYSYAYDDKTSTYTCATGADYFIIFCPPPYTSEKLLGSRKDGATLPLVNKSMIHLPHPHSS

SEQ ID NO: 74374 - DNA, 1071 bp, Arabidopsis thaliana
  misc_feature (1)..(1071): Ceres Seq. ID no. 5668481
  misc_feature (1)..(1071): Ortholog of  Ceres SEQ ID NO 13593855 as cited in SEQ ID NO 53838
  misc_feature (1)..(1071): Ortholog of  Ceres SEQ ID NO 14302247 as cited in SEQ ID NO 62154
  misc_feature (1)..(1071): Ortholog of  Ceres SEQ ID NO 13539874 as cited in SEQ ID NO 64069
atgaaccaagacgagaatctgtctaggttccttcttcttcttccacaatataattatatctttcttcacacacccctagagagagaaaggaaggtgttaccggatttaggagagataaagaaggtttcttcatttagaaacagagacacgaagtttgcgatgatgatgatgattcagagaagaggaggtgagagacaagactcgtcggcggcggcgtacaacgttgtccataagttgcctcacggagacagtccttatgtccgagcgaagcatgttcagttggtggagaaagatgcagaagcagcgatagagttgttttggatagcgattaaagcgagagatagagttgatagtgctcttaaagacatggccttgttaatgaaacaacagaacagagctgaagaagccattgacgctattcaatcctttagagatctttgttcaagacaagctcaagagtcattagacaatgtcctcatcgatctatataagaaatgtgggagaatagaagagcaagttgagttattgaagcaaaagctttggatgatatatcaaggagaagcattcaatggcaaaccaacaaagactgcgagatctcatggcaagaagtttcaggtcaccgtcgagaaggaaacctctaggatcttggggaacttgggatgggcttatatgcaactaatggactatacagcagctgaagctgtgtatcggaaagctcaattgatagagccagatgcaaacaaggcttgcaatttatgcacatgtctcatcaagcaagggaagcacgatgaggcgaggtcgattctctttcgtgatgtactaatggagaacaaagaagggtctggtgatccgaggttgatggctcgggttcaagagctattgagtgagctaaagccacaggaagaagaagcagcggcttctgtgtctgtggaatgtgaagttggtatagatgagatagcggttgtcgaaggacttgatgagtttgtgaaggaatggaggaggccttataggacaagaagacttccgattttcgaagagatcttaccactgagagatcaattggcttgttga

SEQ ID NO: 74375 - protein, 356 aa, Arabidopsis thaliana
  peptide (1)..(356): Ceres Seq. ID no. 5668482
MNQDENLSRFLLLLPQYNYIFLHTPLERERKVLPDLGEIKKVSSFRNRDTKFAMMMMIQRRGGERQDSSAAAYNVVHKLPHGDSPYVRAKHVQLVEKDAEAAIELFWIAIKARDRVDSALKDMALLMKQQNRAEEAIDAIQSFRDLCSRQAQESLDNVLIDLYKKCGRIEEQVELLKQKLWMIYQGEAFNGKPTKTARSHGKKFQVTVEKETSRILGNLGWAYMQLMDYTAAEAVYRKAQLIEPDANKACNLCTCLIKQGKHDEARSILFRDVLMENKEGSGDPRLMARVQELLSELKPQEEEAAASVSVECEVGIDEIAVVEGLDEFVKEWRRPYRTRRLPIFEEILPLRDQLAC

SEQ ID NO: 74376 - protein, 303 aa, Arabidopsis thaliana; identical to SEQ ID NO: 29388
  peptide (1)..(303): Ceres Seq. ID no. 5668483

SEQ ID NO: 74377 - protein, 302 aa, Arabidopsis thaliana; identical to SEQ ID NO: 29389
  peptide (1)..(302): Ceres Seq. ID no. 5668484

SEQ ID NO: 74378 - DNA, 1024 bp, Arabidopsis thaliana
  misc_feature (1)..(1024): Ceres Seq. ID no. 5670799
  misc_feature (1)..(1024): Ortholog of  Ceres SEQ ID NO 14305363 as cited in SEQ ID NO 1276
  misc_feature (1)..(1024): Ortholog of  Ceres SEQ ID NO 14314743 as cited in SEQ ID NO 56854
accccaccaaactttactttctattcagacaagacatctcgatagcttatttctatggtctgatcacacgatagtgtattctgatatcatcactctaccaaagagataccaaattatggaaggaggatctatcactcccggtgaagataaaccggagatccaatctccaattccaccaaatcagatcttcatactctctggacaaagcaatatggcaggacgcggcggcgtcttcaaagaccaccacaacaatcgctgggtgtgggataaaatccttccaccggaatgcgcaccaaactcatcgatcctccgcctgtccgcagatctccggtgggaagaagcacacgagccactacacgttgacattgacacaggtaaagtgtgtggagtaggtccaggaatggcgttcgctaacgcggtgaagaatcgcctggaaacagattcggctgtgatcgggttggtgccgtgcgcttccggtggaacggcgataaaagagtgggagcgtggaagccacttgtacgagaggatggtcaagagaacggaggagagtaggaaatgcggcggagagatcaaggcggtgttgtggtatcaaggagagagtgacgtgttggacatccatgacgccgagagctacgggaacaatatggatcgtttgattaagaacctccgtcatgatctcaaccttccttctcttcccattattcaggtggcaatagcatcgggaggaggatacatagataaggtgagagaagcacagttgggactgaaactgtcgaatgtggtctgtgtagatgctaagggattgccgctaaagtccgacaatcttcacttaaccaccgaggctcaagtccagcttggtctctccttagctcaagcttacctttccaacttctgctagacaatcaagtaagttcgtgataaggttcatgaatctttctgaatgtgtgtggtggactagttatatggatatcacaaaactttgtaataatggattggtaaaacattgatgttcatagtgaagaac

SEQ ID NO: 74379 - protein, 298 aa, Arabidopsis thaliana
  peptide (1)..(298): Ceres Seq. ID no. 5670800
PHQTLLSIQTRHLDSLFLWSDHTIVYSDIITLPKRYQIMEGGSITPGEDKPEIQSPIPPNQIFILSGQSNMAGRGGVFKDHHNNRWVWDKILPPECAPNSSILRLSADLRWEEAHEPLHVDIDTGKVCGVGPGMAFANAVKNRLETDSAVIGLVPCASGGTAIKEWERGSHLYERMVKRTEESRKCGGEIKAVLWYQGESDVLDIHDAESYGNNMDRLIKNLRHDLNLPSLPIIQVAIASGGGYIDKVREAQLGLKLSNVVCVDAKGLPLKSDNLHLTTEAQVQLGLSLAQAYLSNFC

SEQ ID NO: 74380 - protein, 260 aa, Arabidopsis thaliana
  peptide (1)..(260): Ceres Seq. ID no. 5670801
MEGGSITPGEDKPEIQSPIPPNQIFILSGQSNMAGRGGVFKDHHNNRWVWDKILPPECAPNSSILRLSADLRWEEAHEPLHVDIDTGKVCGVGPGMAFANAVKNRLETDSAVIGLVPCASGGTAIKEWERGSHLYERMVKRTEESRKCGGEIKAVLWYQGESDVLDIHDAESYGNNMDRLIKNLRHDLNLPSLPIIQVAIASGGGYIDKVREAQLGLKLSNVVCVDAKGLPLKSDNLHLTTEAQVQLGLSLAQAYLSNFC

SEQ ID NO: 74381 - protein, 228 aa, Arabidopsis thaliana
  peptide (1)..(228): Ceres Seq. ID no. 5670802
MAGRGGVFKDHHNNRWVWDKILPPECAPNSSILRLSADLRWEEAHEPLHVDIDTGKVCGVGPGMAFANAVKNRLETDSAVIGLVPCASGGTAIKEWERGSHLYERMVKRTEESRKCGGEIKAVLWYQGESDVLDIHDAESYGNNMDRLIKNLRHDLNLPSLPIIQVAIASGGGYIDKVREAQLGLKLSNVVCVDAKGLPLKSDNLHLTTEAQVQLGLSLAQAYLSNFC

SEQ ID NO: 74382 - DNA, 469 bp, Arabidopsis thaliana
  misc_feature (1)..(469): Ceres Seq. ID no. 5671306
  misc_feature (1)..(469): Ortholog of  Ceres SEQ ID NO 13597380 as cited in SEQ ID NO 64054
aagactcaacacagatgctcaaaactttaacaagaagcttaacgctgctgcttcaaagcttcagaagcaatattccgatcttaagattgttgtcttcgacatctactctccactttatgatcttgttcagaacccttccaaatccggattcacggaagcaaccaaaggatgttgtggaacaggaacagtcgagacaacttcactcttgtgcaacccgaaatcgtttgggacatgctccaatgctactcagtatgtgttctgggacagtgtgcatccttctgaagctgccaatgagattcttgccactgccctaattggacagggcttttctctcctcggttgatctcacgtatttttcttatattctcttttcaaatcgctgtttctatcacacattgagtcatacatttgtttttctttgaattatgtatcaaagcatcactgttttactaaaaatgtattgaaactt

SEQ ID NO: 74383 - protein, 113 aa, Arabidopsis thaliana; identical to SEQ ID NO: 29244
  peptide (1)..(113): Ceres Seq. ID no. 5671307

SEQ ID NO: 74384 - protein, 103 aa, Arabidopsis thaliana; identical to SEQ ID NO: 29245
  peptide (1)..(103): Ceres Seq. ID no. 5671308

SEQ ID NO: 74385 - protein, 99 aa, Arabidopsis thaliana; identical to SEQ ID NO: 29246
  peptide (1)..(99): Ceres Seq. ID no. 5671309

SEQ ID NO: 74386 - DNA, 826 bp, Arabidopsis thaliana
  misc_feature (1)..(826): Ceres Seq. ID no. 5671537
  misc_feature (1)..(826): Ortholog of  Ceres SEQ ID NO 13660862 as cited in SEQ ID NO 60846
aatttttcatcttcttcgagtgattagtacagattagggttttattcgttattattgtctatattactccttgattgtggtcgatgacctcgctacttcttctcagaacgcttccgcttctccgcaacggatttctcaaccatcgtcatcaagttggtatcgtagctggtggaattctcagtcaccgtcggcgtttgttgtgttctcttgctgatagaccacagttttacgagaataatgattctgtttctccggtggagggatccggcgcggcggcgatgaacgtgacatcgcctgttgttgataatagctggcgttatgaagatcctgattatcggaaatggaagaatctagaggctgagattcttcgagatattgaacctatttctcttctcgctaaagaaattcttcattccgataggtatttggatggagaacgcttagattttgaggatgagaaaattgtcatggaaaagcttcttccttatcacccatattccaaagacaaaattggttgtggtcttgattttataatggttgatcggcatccacaattcaggcactcaagatgcctctttgttgtgagaacagatggtggatggatagatttctcgtaccaaaagtgtcttcgagcctatgttcgagataagtacccgtctcacgctgagaggtttattcgtgaacattttaagcgtgctagtagctaaaaatctgtataactgtcccactcatcatcacagcaaattctcataaatttttagctgaaataacacaatcagctatgaagctttgttgtacaaaatttataaattgctcaatctattgg

SEQ ID NO: 74387 - protein, 207 aa, Arabidopsis thaliana; identical to SEQ ID NO: 35018
  peptide (1)..(207): Ceres Seq. ID no. 5671538

SEQ ID NO: 74388 - protein, 142 aa, Arabidopsis thaliana; identical to SEQ ID NO: 35019
  peptide (1)..(142): Ceres Seq. ID no. 5671539

SEQ ID NO: 74389 - DNA, 1278 bp, Arabidopsis thaliana
  misc_feature (1)..(1278): Ceres Seq. ID no. 5671625
  misc_feature (1)..(1278): Ortholog of  Ceres SEQ ID NO 13586635 as cited in SEQ ID NO 14217
  misc_feature (1)..(1278): Ortholog of  Ceres SEQ ID NO 12616285 as cited in SEQ ID NO 63483
atttctcaactcttgtgataaagtcttcaccttggtcgctgattttcctcctctctctcacaactatcaccaacaagaatcatgacgagctctgttagagagaagaagatcaagaccaacgggatttggttaaacgttgctgagaaaggagacgaagaagggcctttggttctgttactccatggtttccctgagacatggtactcttggcgtcaccagatcgatttcttgtctagccatggttaccacgtggtcgctccagatctcagaggctacggtgactccgattctctaccgagccacgagtcttacactgtgagtcacctagtcgctgatgtcatcggtttactcgatcactacggcactactcaggcttttgtggctgggcatgactggggagcaatcataggttggtgtctatgcttgtttagaccagaccgagtcaaaggtttcataagtctctctgttccatatttcccaagagatccaaaactcaaaccttcagattttttcaaaatttttggagatggtttatacatcactcagtttcaggtaaaacccaaatttactttcaagatttatgatgttagtgttactattatggtactcattgttgtcgttgattcgatttctcggttctgttttttacaagaaacccggaagagctgaggctgcatttgccaagcatgattgtttatcggtaatgaagaagttcttgctaataacaagaacagactacttagtggctcctcctgacacagagatcatagatcatcttgagataccgtcgacgattccagattggataacagaagaagagattcaagtgtatgcggaaaagtttcaaagatctggattcactggccctttgaattactacagatccatggatatgaattgggagatattggcgccgtggcaagactccaaaatcgtcgttcctactaagtttatagcgggagacaaagatatcggatatgaaggacctaatggaacaatggagtatgtgaaaggagaggtgttcaagattgttgtgcctaatcttgagatagttgttattgaaggtggtcatcattttatccagcaggagaagtctgaacaagtctctcaagagattctctctttcttaaacaagttaagcaaaacagagtaaaatcataccgttctctgtggccttatagaagaaccatgatgctctagtcttaattaaactactaataatgtgtattcaagaacgaaacccgagtgtgatctcggcaataataatggttcttaaag

SEQ ID NO: 74390 - protein, 195 aa, Arabidopsis thaliana; identical to SEQ ID NO: 24354
  peptide (1)..(195): Ceres Seq. ID no. 5671626

SEQ ID NO: 74391 - protein, 190 aa, Arabidopsis thaliana
  peptide (1)..(190): Ceres Seq. ID no. 5671627
MMLVLLLWYSLLSLIRFLGSVFYKKPGRAEAAFAKHDCLSVMKKFLLITRTDYLVAPPDTEIIDHLEIPSTIPDWITEEEIQVYAEKFQRSGFTGPLNYYRSMDMNWEILAPWQDSKIVVPTKFIAGDKDIGYEGPNGTMEYVKGEVFKIVVPNLEIVVIEGGHHFIQQEKSEQVSQEILSFLNKLSKTE

SEQ ID NO: 74392 - protein, 189 aa, Arabidopsis thaliana
  peptide (1)..(189): Ceres Seq. ID no. 5671628
MLVLLLWYSLLSLIRFLGSVFYKKPGRAEAAFAKHDCLSVMKKFLLITRTDYLVAPPDTEIIDHLEIPSTIPDWITEEEIQVYAEKFQRSGFTGPLNYYRSMDMNWEILAPWQDSKIVVPTKFIAGDKDIGYEGPNGTMEYVKGEVFKIVVPNLEIVVIEGGHHFIQQEKSEQVSQEILSFLNKLSKTE

SEQ ID NO: 74393 - DNA, 603 bp, Arabidopsis thaliana
  misc_feature (1)..(603): Ceres Seq. ID no. 5671868
  misc_feature (1)..(603): Ortholog of  Ceres SEQ ID NO 12589775 as cited in SEQ ID NO 0
aaagattgtgaagatatatcatggagagagtgtgttgcatgtgcggtgatgtcggtttctccgacaagctcttcagctgcggtcactgccgctgccgcttccaacactcttattgtagcaactactacggccagtttgcggagcctaccgagatttgcgactggtgccgcagcgacgaccggaagctgagcaacgttgctagacatggcggttcttcttcaaagaagccttcttcttcggttaaatatgaaaatgacttctcaaacagatcggaatattcgcccggccaccggatcaagcataacaataaccgtcacgatcaagtagccaagggcgttgctggagatggaggcggagttacgtcgcctaagacggccacacgaaggtacaagcttctcaaagatgtcatgtgttagttccacctaaacgagaggtattagaagacttactataatcatactactctttcgagactgtgtgattaaattatgtataattagactacggagagagcaaattaaaaaagaaaacgtcgttgtttgttttcatccttttttcctttttactttgtgtttatatatatgaaatgaatgtgtgtttggc

SEQ ID NO: 74394 - protein, 131 aa, Arabidopsis thaliana; identical to SEQ ID NO: 26079
  peptide (1)..(131): Ceres Seq. ID no. 5671869

SEQ ID NO: 74395 - protein, 125 aa, Arabidopsis thaliana; identical to SEQ ID NO: 26080
  peptide (1)..(125): Ceres Seq. ID no. 5671870

SEQ ID NO: 74396 - DNA, 1026 bp, Arabidopsis thaliana
  misc_feature (1)..(1026): Ceres Seq. ID no. 5671951
  misc_feature (1)..(1026): Ortholog of  Ceres SEQ ID NO 13579918 as cited in SEQ ID NO 64644
  misc_feature (1)..(1026): Ortholog of  Ceres SEQ ID NO 13654122 as cited in SEQ ID NO 68192
atggcttcttgcgtcaccggaacagaggcagcaatcagagcagcggcatgtagagacggcgaagaagcctctcatctaaagatagtcgccgtcttcgccatctttctcacaagcgttttcggagtttggggaccagttttactcgctaaatactttcatggtaaacctctgtacgataaagcaattcttgtgataaagtgtttcgccgccggcgtgattctctcgacgtctttagtccacgttttaccggaagcgtttgagtcactcgctgattgccaagtgtcgtcacgtcatccatggaaagattttccgtttgctggtttagttacgatgatcggagctataacggctttgttggttgatttaacggcgagtgaacatatgggacacggtggtggtggtggtggtgacggagggatggagtatatgccggtgggtaaggcggttggagggttagaaatgaaagaaggaaagtgtggggctgatttggaaatacaagaaaatagtgaggaggaaattgtgaagatgaaacaaagattagtgtcacaagttcttgaaatagggattatatttcattcggtgataattggagtaacaatgggaatgtcacaaaataagtgtaccattagacctttgattgctgcgctttcttttcatcagatttttgaaggtttgggtcttggtggttgcattgctcaggctgggtttaaggcagggacagtggtgtatatgtgcttaatgttcgcggtaacaacgccactcgggattgtactagggatggtgatatttgcagcgaccgggtacgatgatcagaacccgaacgcattgataatggagggtttattgggatcattctcttcaggtattctaatatacatggccttggttgacctaattgcattggatttcttccataacaagatgctgacgacttgcggtgaatcgggttctcgcctcaagaagctttgttttgtggctttggttttaggttctgcctctatgtcactacttgctctttgggcttag

SEQ ID NO: 74397 - protein, 341 aa, Arabidopsis thaliana
  peptide (1)..(341): Ceres Seq. ID no. 5671952
MASCVTGTEAAIRAAACRDGEEASHLKIVAVFAIFLTSVFGVWGPVLLAKYFHGKPLYDKAILVIKCFAAGVILSTSLVHVLPEAFESLADCQVSSRHPWKDFPFAGLVTMIGAITALLVDLTASEHMGHGGGGGGDGGMEYMPVGKAVGGLEMKEGKCGADLEIQENSEEEIVKMKQRLVSQVLEIGIIFHSVIIGVTMGMSQNKCTIRPLIAALSFHQIFEGLGLGGCIAQAGFKAGTVVYMCLMFAVTTPLGIVLGMVIFAATGYDDQNPNALIMEGLLGSFSSGILIYMALVDLIALDFFHNKMLTTCGESGSRLKKLCFVALVLGSASMSLLALWA

SEQ ID NO: 74398 - protein, 231 aa, Arabidopsis thaliana; identical to SEQ ID NO: 26937
  peptide (1)..(231): Ceres Seq. ID no. 5671953

SEQ ID NO: 74399 - protein, 214 aa, Arabidopsis thaliana; identical to SEQ ID NO: 26938
  peptide (1)..(214): Ceres Seq. ID no. 5671954

SEQ ID NO: 74400 - DNA, 1469 bp, Arabidopsis thaliana
  misc_feature (1)..(1469): Ceres Seq. ID no. 5672262
  misc_feature (1)..(1469): Ortholog of  Ceres SEQ ID NO 13597334 as cited in SEQ ID NO 64244
  misc_feature (1)..(1469): Ortholog of  Ceres SEQ ID NO 14303165 as cited in SEQ ID NO 65181
  misc_feature (1)..(1469): Ortholog of  Ceres SEQ ID NO 15224550 as cited in SEQ ID NO 0
atactcttcagaaaagtcaataccgtgaaaaagaggagactcctgactcctcagtcattgcaatgtcttcttcttcttcttgcttgttcttcactttcattctcttactcagtctcttctcctcctatgcttctccatcgaattcgacatccgaaactgtgcctctccggcctcaaagagagattcagaagatgaaactcatcagaaaacaactccaaaagattaataaaccagccatcaagaccattcatagctcagatggagatacgatagattgtgttccatctcatcaccagcctgcttttgatcatcctttgttacagggacaacgaccaatggatccaccggagatgcctatagggtatagccaagaaaatgaatcccacgaaaatttccagctttggagtttatacggtgagtcttgcccggaaggtacgattccgatcagaagaacaacggagcaagacatgttaagagcaaattctgtccgtagatttggtcggaaaatcaggcgcgtgagaagggattcgagcagtaatggccacgagcatgcggttggatacgtatcgggaagtcaatactacggagcaaaagcaagtataaacgtgtggacgccacgtgtcataagccaatacgagtttagtctatctcagatttggatcatcgccggttctttcgccggcgatcttaataccatcgaagctggttggcagattagcccggagctatacggagacactaacccaagattcttcacctattggacgtcggatgcttaccaagcaacaggatgctataacctactatgttctggttttgttcaaacaaacaatcgaatcgcaattggagcggcgatttcgcccgtttcgtcgtataaaggtggacaattcgatataagcttattgatatggaaggacccaaagcatggacattggtggctccaattcgggtcgggtacactagtcggatattggcccgtatctctgttcacacacctgagggagcatggaaacatggtccagtttggtggcgagatcgtgaacacacgacctggtggttcacatacttcgactcaaatgggcagtggccattttgccggtgaaggttttggaaaagcgtcttactttaggaatcttcaaatggtagattgggacaatactcttattccgatatctaatcttaaagttcttgcagatcatcctaattgttatgatataagaggaggggtaaaccgtgtttggggtaactttttttattacggaggaccgggtaaaaactcgaaatgtccatagagaaaaaaaagaagtggatagtgttgttttgagcttaagtaaatgagattttttgggatttagagctcaggacaatgatgaaagatccatagtttttttttttgtttgtaagaaaagaaatgtatcgattgattgatatgttatcaaatgtgtaaatgtagaatatggtgttaagtg

SEQ ID NO: 74401 - protein, 429 aa, Arabidopsis thaliana
  peptide (1)..(429): Ceres Seq. ID no. 5672263
TLQKSQYREKEETPDSSVIAMSSSSSCLFFTFILLLSLFSSYASPSNSTSETVPLRPQREIQKMKLIRKQLQKINKPAIKTIHSSDGDTIDCVPSHHQPAFDHPLLQGQRPMDPPEMPIGYSQENESHENFQLWSLYGESCPEGTIPIRRTTEQDMLRANSVRRFGRKIRRVRRDSSSNGHEHAVGYVSGSQYYGAKASINVWTPRVISQYEFSLSQIWIIAGSFAGDLNTIEAGWQISPELYGDTNPRFFTYWTSDAYQATGCYNLLCSGFVQTNNRIAIGAAISPVSSYKGGQFDISLLIWKDPKHGHWWLQFGSGTLVGYWPVSLFTHLREHGNMVQFGGEIVNTRPGGSHTSTQMGSGHFAGEGFGKASYFRNLQMVDWDNTLIPISNLKVLADHPNCYDIRGGVNRVWGNFFYYGGPGKNSKCP

SEQ ID NO: 74402 - protein, 409 aa, Arabidopsis thaliana; identical to SEQ ID NO: 31099
  peptide (1)..(409): Ceres Seq. ID no. 5672264

SEQ ID NO: 74403 - protein, 366 aa, Arabidopsis thaliana; identical to SEQ ID NO: 31100
  peptide (1)..(366): Ceres Seq. ID no. 5672265

SEQ ID NO: 74404 - DNA, 1187 bp, Arabidopsis thaliana
  misc_feature (1)..(1187): Ceres Seq. ID no. 5672750
  misc_feature (1)..(1187): Ortholog of  Ceres SEQ ID NO 12466401 as cited in SEQ ID NO 20698
  misc_feature (1)..(1187): Ortholog of  Ceres SEQ ID NO 15224731 as cited in SEQ ID NO 63650
acttgttcatcttccattccaatctcaagatgcacgcgaagaccgactccgaggtgacaagcctctcagcttcatcgccgactagatctccccgtcgaccagcctacttcgtccaatctccatcacgtgactcccacgatggggagaaaacagcaacatcattccactcaacaccggtactcaccagcccgatgggatctccaccacattctcactcttcctcaagccgcttctccaagatcaacggctcaaaacgtaagggccacgctggagaaaaacagttcgctatgattgaagaagaaggtcttcttgatgatggagatagagaacaagaagctttgcctcgtcgatgttatgttttagctttcattgttggattctctctactctttgctttcttctctttgattctttatgcagctgctaaacctcagaaacctaagatctctgttaagagtataacgtttgagcaacttaaggttcaagctggacaagatgctggaggtataggaactgatatgatcactatgaacgcgacactgagaatgttgtaccgtaacactggtactttctttggtgttcatgtcacttcttctccgattgatcttagcttctcgcagatcactattggctctggctctattaagaagttttatcagtcaaggaaaagccaaagaacagtggtggtgaatgtacttggagacaagattccactctatggaagtggctcaacattagtcccaccaccacctcctgcaccaattccaaaacccaagaagaagaaaggacctatcgttatcgtcgaaccaccagcgcctcctgctccagtaccgatgaggctaaacttcaccgttagatctcgagcttacgtgttggggaagttagttcaacctaagttttacaagagaatcgtgtgcttgattaatttcgaacacaagaaactcagtaaacatattcccatcacgaataactgcactgtcacatctatttaaaagaagaaaaaaatacacatgagagtgcggacggtctcgtattgggtagtgcgcctatggccctatacatgttacaaggtattgcgtgtggcctaccccaaagcagaagaatcatcatcagtgggtttcataaatttaatttacgtaattggtttgagagattttgttaatgatacacagtaaacgagaagattc

SEQ ID NO: 74405 - protein, 329 aa, Arabidopsis thaliana; identical to SEQ ID NO: 25277
  peptide (1)..(329): Ceres Seq. ID no. 5672751

SEQ ID NO: 74406 - protein, 320 aa, Arabidopsis thaliana; identical to SEQ ID NO: 25278
  peptide (1)..(320): Ceres Seq. ID no. 5672752

SEQ ID NO: 74407 - protein, 266 aa, Arabidopsis thaliana; identical to SEQ ID NO: 25279
  peptide (1)..(266): Ceres Seq. ID no. 5672753

SEQ ID NO: 74408 - DNA, 1118 bp, Arabidopsis thaliana
  misc_feature (1)..(1118): Ceres Seq. ID no. 5673001
  misc_feature (1)..(1118): Ortholog of  Ceres SEQ ID NO 15170760 as cited in SEQ ID NO 52747
  misc_feature (1)..(1118): Ortholog of  Ceres SEQ ID NO 15177588 as cited in SEQ ID NO 60367
atacaaatctgaacaaacattaaaactcatctctctcatcatctttggccatggcaaaagacttggatgtgaacgagagtggaccaccggcggcgagagactacaaggatccgcctcccgcaccatttttcgacatggaggagcttaggaaatggccgctttatagagcggtcatagctgagtttgtagcaacacttctgttcctctacgtctcaatcctgactgtaatcggctacaaagctcaaaccgatgcaaccgccggaggagtggattgtggcggcgtaggaatattgggtattgcgtgggctttcggtggaatgatctttgttctcgtttactgtaccgccggtatctccggtggtcatataaatccggctgtgacggtgggactattcctggctcgtaaagtgtcattggtgcggacagtgttatacattgtggctcagtgccttggtgccatctgcggttgcggtttcgtcaaagcattccaaagttcttactacaccagatatggaggtggagccaacgagctagccgatggctacaacaaaggtaccggactcggtgccgagatcattggaacttttgtccttgtatacaccgtcttctcggcaaccgatcccaagcgaaatgctcgtgactctcacgtgccagttttggctccacttcccattggctttgccgtcttcatggttcatttagccaccattcccatcaccggaaccggtatcaacccggctcgtagctttggagctgccgttatttacaacaacgaaaaggcctgggacgaccaatggattttttgggttggaccgatgatcggagcagcagcagcagcgttttaccatcagtttattttaagagcggctgcgattaaagctcttggctcatttggctcctttggctcctttaggagctttgcttaatatacatttattttaaattaaaccacaagttataaatctttgatcaaaattaaaaggatgattacaaatgaattaagtggaagttacatgtgatcttctttatatgtttctgtttttttgttctctctttcatttcatggaatttcccattcgtgtaattgtaaatgtggttttaattaatgttgctttaag

SEQ ID NO: 74409 - protein, 291 aa, Arabidopsis thaliana; identical to SEQ ID NO: 22316
  peptide (1)..(291): Ceres Seq. ID no. 5673002

SEQ ID NO: 74410 - protein, 263 aa, Arabidopsis thaliana; identical to SEQ ID NO: 22317
  peptide (1)..(263): Ceres Seq. ID no. 5673003

SEQ ID NO: 74411 - protein, 202 aa, Arabidopsis thaliana; identical to SEQ ID NO: 22318
  peptide (1)..(202): Ceres Seq. ID no. 5673004

SEQ ID NO: 74412 - DNA, 1259 bp, Arabidopsis thaliana
  misc_feature (1)..(1259): Ceres Seq. ID no. 5673304
  misc_feature (1)..(1259): Ortholog of  Ceres SEQ ID NO 14305682 as cited in SEQ ID NO 59267
  misc_feature (1)..(1259): Ortholog of  Ceres SEQ ID NO 14315060 as cited in SEQ ID NO 60039
  misc_feature (1)..(1259): Ortholog of  Ceres SEQ ID NO 13594430 as cited in SEQ ID NO 60181
  misc_feature (1)..(1259): Ortholog of  Ceres SEQ ID NO 13597809 as cited in SEQ ID NO 64598
  misc_feature (1)..(1259): Ortholog of  Ceres SEQ ID NO 14313544 as cited in SEQ ID NO 68424
  misc_feature (1)..(1259): Ortholog of  Ceres SEQ ID NO 12617960 as cited in SEQ ID NO 69051
  misc_feature (1)..(1259): Ortholog of  Ceres SEQ ID NO 13589401 as cited in SEQ ID NO 0
  misc_feature (1)..(1259): Ortholog of  Ceres SEQ ID NO 15179361 as cited in SEQ ID NO 0
aagcatcgctctagttaaggaagcagcaggtttggatccgaaccaaccaacggatcagatcagaaacaaaatattcaacggctcagatttattctaattttcctccttttattgttggttttttcattcgacttcgagatctttcttctcagaggtgtaacgaaaacgctagaacaataactttgatcgttcttcttcttctcttgaatcggaaacaatggcggatgaacataagcatgaagaatcttcacctaatttggatccagcagtggaggttgtagagagggaatcgttgatggagaagttatcggagaagatccatcacaaaggtgattcgtcgtcttcatcatcatcagatgacgaaaacgagaagaagtcttcgtcatcgtctccaaagtctttgaaatcgaaggtttatcgtttgttcggaagagagagacctgttcataaggttctcggcggcggaaaaccggcagatatatttatgtggaaggacaagaaaatgtcaggaggtgtatttggcggtgctacagtggcatgggtgctatttgaattgatggagtatcatcttcttactctgttatgtcacgttatgatcgttgctcttgctgtgttgtttctatggtctaatgccactatgttcattcacaagtctccaccaaagattcctgaagttcatatccctgaagaacctcttcttcagcttgcttcgggtcttagaatcgaaatcaaccgtgggatctcttctcttcgtgagattgcgtcggggagggatatcaagaagttcctctctgctattgccggattgtgggttctatcgatcttgggcggctgctatagtttcttgacattggcatacatagctctggttctgctcttcactgttcctcttttctacgacaagtacgaagacaaagtagactcatacggtgagaaagcaatggctgagttgaagaagcaatacgctgtgttggacgcaaaggtattcagcaaaatcccaagaggaccgttgaaagacaagaagaaggattagttttttttggggtttttgttttgtgtgggttttctttggagtgcaatgtgcacaatgctctggtttttatacacgtgggttgtgttgtgttgtgaattggtaatctaaaaggttatgtgttagatctcaacccaaattttacttgacaactttgctttgtttttggagtggtttgtggcattagcacaatgattgtagtcgttctcttgatctatatttttaatgt

SEQ ID NO: 74413 - protein, 271 aa, Arabidopsis thaliana; identical to SEQ ID NO: 35496
  peptide (1)..(271): Ceres Seq. ID no. 5673305

SEQ ID NO: 74414 - protein, 245 aa, Arabidopsis thaliana; identical to SEQ ID NO: 35497
  peptide (1)..(245): Ceres Seq. ID no. 5673306

SEQ ID NO: 74415 - protein, 182 aa, Arabidopsis thaliana; identical to SEQ ID NO: 35498
  peptide (1)..(182): Ceres Seq. ID no. 5673307

SEQ ID NO: 74416 - DNA, 1589 bp, Arabidopsis thaliana
  misc_feature (1)..(1589): Ceres Seq. ID no. 5673363
  misc_feature (1)..(1589): Ortholog of  Ceres SEQ ID NO 14315110 as cited in SEQ ID NO 55462
  misc_feature (1)..(1589): Ortholog of  Ceres SEQ ID NO 13596853 as cited in SEQ ID NO 62978
acaagagccatttgcaattaggcataatatatgtcctaactcaccaaccccctcaaaattgccaccaacttcaaatttctctcctttaaacctttctcaatcatctttcttctgccttggaatcctgatcatggcgtcgtcttctctcacttcgaaatccattctcggatccaccaaactcggttcttcttctcttccctcggagctccgtcgtctctcttctcccgccgttcagatctctctccgtacccaaaccaggaagaacttccagatacaagctactggaagttcatatgggactcattttcgagtttcaacttttggagaatcacatggaggaggagttggttgtatcattgatggttgtcctcctcgtattccacttactgaatctgatttgcaattcgatctcgatagaaggaggcctggtcagagcaggatcacaactcctagaaaagagactgatacttgccggatatcgtctggagtctctgaaggaatgacgacaggaacacctatccatgtgtttgtaccaaacacagatcagagaggacttgattacagtgaaatgtcggttgcctatagaccatcgcatgctgatgcaacttatgacatgaagtatggtgtcagatcagtgcagggtggaggaagatcttcagctagagagaccattggaagagttgctcctggagctttggccaagaaaattttgaagcaatttgcaggaactgagattcttgcctatgtctcgcaagttcaccatgttgtacttccagaagaattggtagaccacgagaatttaacactcgaacagatagaaaataacattgtcagatgccctaatcccgagtatgcggaaaagatgatagctgcgattgatgctgtcaggacaaaagggaactctgttggtggtgttgtgacctgcattgttcggaatgctccacgtgggcttggtacaccggttttcgataaacttgaagcagaactggcaaaagcttgtatgtcgctacctgcaactaagggatttgagtttggaagcggctttgcaggtacctttttgactggtcttgaacacaatgatgagttctataccgatgaaaatggaagaatacgtaccagaaccaaccgatctggtggaattcagggagggatctcaaatggtgaaataataaacatgagagtagccttcaagccaacatcaacaattggaaggaagcaaaatacggtaaccagagacaaggtagaaaccgaaatgattgcgcgtggtcgtcatgatccttgtgttgttccacgagctgtgccaatggtggaagcaatggtggctctagttcttgtggatcaattgatggcgcaatacgcacaatgccatttgtttccaataaatccagagttgcaggaacctctccagatagagcagccgcaaaatgctactgctttgtaagcaaatctcgagaagataaagagtcatagagagtgagagttcgcttttgttgtgtgattattatgctgaataaaaaaatgttaattttgtgcccaccagaaaaacaaagaacatgattttttataagaggatttgcttctatatcatt

SEQ ID NO: 74417 - protein, 479 aa, Arabidopsis thaliana; identical to SEQ ID NO: 42485
  peptide (1)..(479): Ceres Seq. ID no. 5673364

SEQ ID NO: 74418 - protein, 436 aa, Arabidopsis thaliana; identical to SEQ ID NO: 42486
  peptide (1)..(436): Ceres Seq. ID no. 5673365

SEQ ID NO: 74419 - protein, 313 aa, Arabidopsis thaliana; identical to SEQ ID NO: 42487
  peptide (1)..(313): Ceres Seq. ID no. 5673366

SEQ ID NO: 74420 - DNA, 1351 bp, Arabidopsis thaliana
  misc_feature (1)..(1351): Ceres Seq. ID no. 5673476
  misc_feature (1)..(1351): Ortholog of  Ceres SEQ ID NO 13596585 as cited in SEQ ID NO 62424
  misc_feature (1)..(1351): Ortholog of  Ceres SEQ ID NO 15225240 as cited in SEQ ID NO 66495
ccgtttgttcttcatctcctcgccgccgcctcctactctctctttctctctaaattgctcaattctctcggccacagttctgctatagacctagacaaggatggtgactaaagcagaaaaacaattcgccaaaaatttcaacatagacgatctccctgacgtccctgccggacttcctccacatctcaaagcccagcaaactcgtgtcgtctctaaaaacaacgctcctgctcatactgcgagtgccatttactcgggtacctatgtttcttctacggaagaggacgacaatgtgaagctaggaaacttctatgataacttcaaagttgatgtggttagtctcacaaagacagatatggaatttgatatgattggtattgatgcagcgtttgccaatgcattccgaaggatccttatagctgaggttccttcaatggctattgaaaaagtgttgatagcgtacaacacatcggttattatagacgaagttcttgctcacaggatgggtcttattccaattgccgcagatccaagactttttgaatatttatccgaacatgatcaggcgaatgaaaagaacaccattgtattcaaactccatgtgaaatgtccgaaaaatagaccacgtcttaaagttttaacgagtgatttaaaatggttaccaaatggaagtgagcttctgagagaatcggaaaataaaacctcaaagccaaaaacttacacttcattcagttgcagccaagattcattacctgaatttgctaataatcctatcactccatgcgacctcgatatcttgatagcaaaactcgcccctggtcaggaaatcgagctcgaagctcatgcggttaagggcattggtaaaacacatgcaaagtggtctccagtagggactgcttggtatagaatgcatcctgaggtggttctacgtggggaagttgaggatgaacttgctgaacgacttgtaaacgtctgcccacagaatgttttcgacattgaagacatgggaaaaggtaagaaaagggcaacagtagcgcagccacgtaagtgcacattgtgtaaggaatgcgtaagagacgatgatttggtagaccatgtggatcttggcagtgttaagaaccattttatatttaacattgagtccaccggatcactgcctccagaggttctcttcactgaagctgtgaagatattggaagctaaatgtgaagctataaccgacttttgagttctggtttagttcaattttgaattgtctgtctatcaatgtttctcctcctattgataaattaccaacaaacaacattgacatatttatttatacggttgttgttcaatttggattttcatt

SEQ ID NO: 74421 - protein, 375 aa, Arabidopsis thaliana; identical to SEQ ID NO: 40103
  peptide (1)..(375): Ceres Seq. ID no. 5673477

SEQ ID NO: 74422 - protein, 290 aa, Arabidopsis thaliana; identical to SEQ ID NO: 40104
  peptide (1)..(290): Ceres Seq. ID no. 5673478

SEQ ID NO: 74423 - protein, 286 aa, Arabidopsis thaliana; identical to SEQ ID NO: 40105
  peptide (1)..(286): Ceres Seq. ID no. 5673479

SEQ ID NO: 74424 - DNA, 1037 bp, Arabidopsis thaliana
  misc_feature (1)..(1037): Ceres Seq. ID no. 5673819
  misc_feature (1)..(1037): Ortholog of  Ceres SEQ ID NO 12618205 as cited in SEQ ID NO 65153
atatcatctcctgctaaaagcctaaaaagctaaaactagtcgtgactcgtcgtcgtctgatattaccagattcctgagaatttgagcctaatccttcatcaccaagctaagtctcaagatctgattgtggttgtggttgacttcttcttcaaaggtttcacgagtacaataatgagtcaaaagggtttgatatatagctttgttgctaaaggaacagttgttctagcagagcatactccttattcaggaaactttagcaccattgctgttcaatgtctgcagaagctacccacaaatagcagcaagtatacttactcttgcgatggtcatactttcaatttccttgttgacaatggctttgtgtttctagtggttgctgatgagtccaccggaagaagtgttcctttcgtgtttctcgaacgggtcaaggaagactttaagaagcggtatgaagcgagtataaagaatgatgagcgacatcctcttgcggatgaggacgaagatgatgatttgtttggagatcggtttagcgttgcatacaatcttgacagggagttcgggcccatactaaaggagcatatgcagtattgtatgagccatccagaagagatgagcaaactttctaagttgaaggcccaaataactgaggtcaaggggatcatgatggacaacattgagaaggttctggacagaggagagaagatcgaacttctggttgacaaaaccgagaacctacagttccaggcagatagcttccagagacaaggaaggcagttaagaaggaagatgtggctacagagtctgcagatgaagctgatggtggctggtgctgttttctcttttattctcatcgtttgggttgttgcttgtggaggtttcaaatgctcatcatgatgtttcgcttcgtttgtatctgttttaacacttaaattgcatgctcatgtttgtacatggaagaacttataataacatatcatcatatcatcatcatctcccacatgctgtgatgctatatatataaaaaaaatgtttttgtt

SEQ ID NO: 74425 - protein, 240 aa, Arabidopsis thaliana; identical to SEQ ID NO: 21608
  peptide (1)..(240): Ceres Seq. ID no. 5673820

SEQ ID NO: 74426 - DNA, 1750 bp, Arabidopsis thaliana
  misc_feature (1)..(1750): Ceres Seq. ID no. 5673947
  misc_feature (1)..(1750): Ortholog of  Ceres SEQ ID NO 14309934 as cited in SEQ ID NO 20583
  misc_feature (1)..(1750): Ortholog of  Ceres SEQ ID NO 13654989 as cited in SEQ ID NO 63117
  misc_feature (1)..(1750): Ortholog of  Ceres SEQ ID NO 13584744 as cited in SEQ ID NO 69137
aacttggactctgtttatatcaacctgattttggagatttatttgtaaagtttaggaagaaatgggaggtgacttgaaaagccagctatctagagagagccatgtgtttggacttaaggtgtgggaagtaattggtatagctgttgcattgctcatcatagctatcctctctgttctttcgtgttgtcttacttcgaaaaagaaatcaagaagatcgaaaaccggtcttccggttatccaaactcctccggtggtctccaaagagatcagagaagtgagagttgagcatgtctcagctagtaactttgctcctggtgaaggcattcttctaacaattcaggacaaaaataacaaagactcagaaaaagtcatggttcatttggatatgaggaagaagagaagtagtagtggccggtcagggtcgtttcatcatttagagatcatagataaacattctgactctgctgaagaagtttctgcttcttcatcattgtataatattgcaactccatctccattgtctggtttgcctgaatctcaccttggttggggacactggtttactttgagagatcttgaaacagcaactaacagattctctaaagagaatgttataggtgaaggcggttacggtgttgtctacagaggagagttaatgaatggaactcctgttgcagttaaaaagattcttaaccagttgggacaagctgagaaagagtttcgagtcgaggttgatgctatcggtcatgtgcggcacaagaacttggttcggcttcttggttactgcattgaaggcacacacaggatattggtttacgaatatgtgaataatggaaacttagaacaatggcttcatggagcaatgagacaacatggatatctaacttgggaagcaaggatgaaggttctgatcggcacatcaaaagctcttgcatatctgcatgaagcaattgagccaaaagtagtgcatagagacatcaagtcaagcaacattctgatcaatgacgaattcaacgcaaaggtttcagattttggccttgctaagttgcttggtgctggaaaaagccatgtgacaactcgagtgatgggaacatttgggtacgttgctcctgaatatgcaaactcagggttgttaaatgaaaagagtgatgtctacagctttggtgttgttctcttagaagcaatcacaggacgagaccctgtggattacggacgtcctgctcatgaggtgaatctagtggactggttgaagatgatggttgggacaagacgatcagaggaagtagtggatccaaacatagaagtgaagccaccaacaaggtcactgaaacgagctcttttgacggctctaagatgtgttgatccagattcggataagcggccgaagatgagccaagttgtacgtatgcttgagtctgaagaataccccattccaagagaggaccgaaggcgttctagaacgcgagaagggagtatggagataaactcagacactgacatgagtactccagtttcaagatcacagagcaagagacaataatttatcaatctgcgtaagctttcaacgcgtttcatgattatgagctattctttgaacttgttcttatgcattttctgtttgtttgtttttttttggttttgaattgagatgagtagagaccatagaggattgtttgtacatatgaactggatttgtgtttagagctcctacatcaaaataatatattggtgtgtacagtactattgcatc

SEQ ID NO: 74427 - protein, 492 aa, Arabidopsis thaliana
  peptide (1)..(492): Ceres Seq. ID no. 5673948
MGGDLKSQLSRESHVFGLKVWEVIGIAVALLIIAILSVLSCCLTSKKKSRRSKTGLPVIQTPPVVSKEIREVRVEHVSASNFAPGEGILLTIQDKNNKDSEKVMVHLDMRKKRSSSGRSGSFHHLEIIDKHSDSAEEVSASSSLYNIATPSPLSGLPESHLGWGHWFTLRDLETATNRFSKENVIGEGGYGVVYRGELMNGTPVAVKKILNQLGQAEKEFRVEVDAIGHVRHKNLVRLLGYCIEGTHRILVYEYVNNGNLEQWLHGAMRQHGYLTWEARMKVLIGTSKALAYLHEAIEPKVVHRDIKSSNILINDEFNAKVSDFGLAKLLGAGKSHVTTRVMGTFGYVAPEYANSGLLNEKSDVYSFGVVLLEAITGRDPVDYGRPAHEVNLVDWLKMMVGTRRSEEVVDPNIEVKPPTRSLKRALLTALRCVDPDSDKRPKMSQVVRMLESEEYPIPREDRRRSRTREGSMEINSDTDMSTPVSRSQSKRQ

SEQ ID NO: 74428 - protein, 389 aa, Arabidopsis thaliana
  peptide (1)..(389): Ceres Seq. ID no. 5673949
MVHLDMRKKRSSSGRSGSFHHLEIIDKHSDSAEEVSASSSLYNIATPSPLSGLPESHLGWGHWFTLRDLETATNRFSKENVIGEGGYGVVYRGELMNGTPVAVKKILNQLGQAEKEFRVEVDAIGHVRHKNLVRLLGYCIEGTHRILVYEYVNNGNLEQWLHGAMRQHGYLTWEARMKVLIGTSKALAYLHEAIEPKVVHRDIKSSNILINDEFNAKVSDFGLAKLLGAGKSHVTTRVMGTFGYVAPEYANSGLLNEKSDVYSFGVVLLEAITGRDPVDYGRPAHEVNLVDWLKMMVGTRRSEEVVDPNIEVKPPTRSLKRALLTALRCVDPDSDKRPKMSQVVRMLESEEYPIPREDRRRSRTREGSMEINSDTDMSTPVSRSQSKRQ

SEQ ID NO: 74429 - protein, 384 aa, Arabidopsis thaliana
  peptide (1)..(384): Ceres Seq. ID no. 5673950
MRKKRSSSGRSGSFHHLEIIDKHSDSAEEVSASSSLYNIATPSPLSGLPESHLGWGHWFTLRDLETATNRFSKENVIGEGGYGVVYRGELMNGTPVAVKKILNQLGQAEKEFRVEVDAIGHVRHKNLVRLLGYCIEGTHRILVYEYVNNGNLEQWLHGAMRQHGYLTWEARMKVLIGTSKALAYLHEAIEPKVVHRDIKSSNILINDEFNAKVSDFGLAKLLGAGKSHVTTRVMGTFGYVAPEYANSGLLNEKSDVYSFGVVLLEAITGRDPVDYGRPAHEVNLVDWLKMMVGTRRSEEVVDPNIEVKPPTRSLKRALLTALRCVDPDSDKRPKMSQVVRMLESEEYPIPREDRRRSRTREGSMEINSDTDMSTPVSRSQSKRQ

SEQ ID NO: 74430 - DNA, 1303 bp, Arabidopsis thaliana
  misc_feature (1)..(1303): Ceres Seq. ID no. 5674119
  misc_feature (1)..(1303): Ortholog of  Ceres SEQ ID NO 14311934 as cited in SEQ ID NO 51605
agatccactcacacctcgtctcctaatctgtacggttcttatttcgaaagggtaaaaaccaaaagcgacgcaaagggcaaaatcggaaaaagtgttttatttatggccgccgttagtagttcgtcggagaccggagactgcggcgttacgggaaagagagatgagatcatgttgttcggagttagagtcgtggttgatccgatgagaaagtgtgtgagtttgaacaatctctctgattatgaaaagtcttctccggaggatgagatccctaagatagtcaccgccggagctggagatggtgaagataagaacgaaacggatgcgacggtgattgtcgctgacggttacgcctccgccaatgacgctgtccagatttcgtcttcttccggcgggaggaaacgaggggttccatggacagagaacgagcataagaggttcttgattgggttgcagaaagtaggaaaaggagattggaaaggaatatcaagaaactttgtgaagagtaggactcctactcaagtagctagtcatgctcagaaatacttcctccgacgaaccaacctcaaccgtcgccgaagaagatctagcctttttgatatcactactgagacggttacagaaatggccatggagcaagatcctactcaggagaactcaccactacctgaaaccaacatcagctctggacagcaagcgatgcaagtttttactgacgtgccgacaaaaactgagaatgcaccagagacatttcatctcaacgatccatatctggttccagtaaccttccaagcaaagccaacattcaatctaaacacagatgctgctccactttctctcaacctttgtctggcatcctcatttaatcttaacgagcaacccaactcaagacactcggctttcacgatgatgccaagcttcagcgatggagatagcaatagcagcatcatcagagttgcttagagcttaaacccaaggggaaaaaaaaaacagaacaaaaacagaggaaggctatagagattgatggacaaactgtgtctagggtgcttcatcatctttgtttgtttgtaaaactcttgtcacacacactgttatgagtcattttctgctgtgtgtgttttgttttgtggtgatgtaagttaaaaacaagcgtgattctcatgtggcccatctcaatcaatggttggtgatttgtggggtttttaggcttttctattatcttatcttttggggataagataaaagcctaaaactgtatgtaactatgtatggttcttcgaatattttatcatttatctctaatgtc

SEQ ID NO: 74431 - protein, 319 aa, Arabidopsis thaliana
  peptide (1)..(319): Ceres Seq. ID no. 5674120
RSTHTSSPNLYGSYFERVKTKSDAKGKIGKSVLFMAAVSSSSETGDCGVTGKRDEIMLFGVRVVVDPMRKCVSLNNLSDYEKSSPEDEIPKIVTAGAGDGEDKNETDATVIVADGYASANDAVQISSSSGGRKRGVPWTENEHKRFLIGLQKVGKGDWKGISRNFVKSRTPTQVASHAQKYFLRRTNLNRRRRRSSLFDITTETVTEMAMEQDPTQENSPLPETNISSGQQAMQVFTDVPTKTENAPETFHLNDPYLVPVTFQAKPTFNLNTDAAPLSLNLCLASSFNLNEQPNSRHSAFTMMPSFSDGDSNSSIIRVA

SEQ ID NO: 74432 - protein, 285 aa, Arabidopsis thaliana; identical to SEQ ID NO: 49179
  peptide (1)..(285): Ceres Seq. ID no. 5674121

SEQ ID NO: 74433 - protein, 263 aa, Arabidopsis thaliana; identical to SEQ ID NO: 49180
  peptide (1)..(263): Ceres Seq. ID no. 5674122

SEQ ID NO: 74434 - DNA, 941 bp, Arabidopsis thaliana
  misc_feature (1)..(941): Ceres Seq. ID no. 5674157
  misc_feature (1)..(941): Ortholog of  Ceres SEQ ID NO 13661969 as cited in SEQ ID NO 61215
  misc_feature (1)..(941): Ortholog of  Ceres SEQ ID NO 12614809 as cited in SEQ ID NO 68808
  misc_feature (1)..(941): Ortholog of  Ceres SEQ ID NO 12634366 as cited in SEQ ID NO 0
  misc_feature (1)..(941): Ortholog of  Ceres SEQ ID NO 14309113 as cited in SEQ ID NO 0
  misc_feature (1)..(941): Ortholog of  Ceres SEQ ID NO 15175257 as cited in SEQ ID NO 0
ataaaaaataagtaaccaagaaaataagtaacggcttcttcgatcatttatatgtttatcctaaactaataagaaagcttgtgataatttcagtgttctcactctcatctccaatctgtgatatatttctcatgtctcatcagacagtagcgctagcctctaaggctaagtctcctaaacccaaaagaggaaagttagataaggaaaaaatgactgcattggagaaacatgtttccttcttcgacaggaacaaagacggcaccgtttatccatgggaaacctaccaaggatttagagcgctcgggacagggcgtcttttggcggcttttgttgctatattcatcaacatgggactcagcaagaaaactcgtccgggaaagggattctcgccgttgtttccaatagacgtgaagaatagtcacctttgcatgcacggtagtgacaccgacgtctatgacgatgacggaagatttgtggaatcaaaattcgaggaaatattcaacaagcatgctcgcacacataaagatgctctcactgcagaggaaattcaaaaaatgcttaagactaacagggatcctttcgatatcacaggatggctttcagattatggagaatggaaaatattacatacgttagctcaagacaaaaatggtttgttatcggaaaagagcgtcagggccatctacgatggtagccttttccaccaactggagaaaaaaagatcttcttcttcttctcgtggcaagaaacaaaaactaccataaatgtttacatgaatcttcttatattattatgtggagatcacataacattcttggtttataattatataattttgtcaaataacttttgtaatgaataattacatagatcaaacactctttaaataattattgtgtatattgaaaaaaaaaaacttatcaaagtatacttcatttaag

SEQ ID NO: 74435 - protein, 210 aa, Arabidopsis thaliana
  peptide (1)..(210): Ceres Seq. ID no. 5674158
MSHQTVALASKAKSPKPKRGKLDKEKMTALEKHVSFFDRNKDGTVYPWETYQGFRALGTGRLLAAFVAIFINMGLSKKTRPGKGFSPLFPIDVKNSHLCMHGSDTDVYDDDGRFVESKFEEIFNKHARTHKDALTAEEIQKMLKTNRDPFDITGWLSDYGEWKILHTLAQDKNGLLSEKSVRAIYDGSLFHQLEKKRSSSSSRGKKQKLP

SEQ ID NO: 74436 - protein, 184 aa, Arabidopsis thaliana; identical to SEQ ID NO: 30098
  peptide (1)..(184): Ceres Seq. ID no. 5674159

SEQ ID NO: 74437 - protein, 138 aa, Arabidopsis thaliana; identical to SEQ ID NO: 30099
  peptide (1)..(138): Ceres Seq. ID no. 5674160

SEQ ID NO: 74438 - DNA, 1252 bp, Arabidopsis thaliana
  misc_feature (1)..(1252): Ceres Seq. ID no. 5674492
  misc_feature (1)..(1252): Ortholog of  Ceres SEQ ID NO 13495070 as cited in SEQ ID NO 53216
  misc_feature (1)..(1252): Ortholog of  Ceres SEQ ID NO 13661333 as cited in SEQ ID NO 61620
  misc_feature (1)..(1252): Ortholog of  Ceres SEQ ID NO 15173749 as cited in SEQ ID NO 61775
  misc_feature (1)..(1252): Ortholog of  Ceres SEQ ID NO 13596812 as cited in SEQ ID NO 62283
  misc_feature (1)..(1252): Ortholog of  Ceres SEQ ID NO 13623021 as cited in SEQ ID NO 0
gatttagccatggtgagctcaattttctcttgtttctgttttaagtttttcgattttgaagctttcttctcgaaaatttcgattgcttgctagtcgatttcgagttcaaatccgtttgcttctcttttggataacgattctcgctcgtttagatagatctggagatgatttcagatactcgatctttggtagttgtagtgtgtgatcggattagagatccgattaaagaactcgtaactttgttgttctgcttcttcgctagcttatctgaaatcaggaagaatctgctgtttttcacttcaagttcaaatcaagtgttaaattctacgaatttttgactttttcatcagtgtttgtcaattgttcgatctatgttgtgcttcttgcctcttgatgtgtcaaaattgaagtcaaaatcgttctacaaagttgtgaggagctacttagcttctcttccttgtgatgttaacaatgttagagatgatgataatattatccaatttctgtgttaagttgtgatctttgttttagaaaatgtgtttttgaagagatgtgcatcttctcagtgttttgttatgtgtattgatatgataacaggcaaacgcggcatcgggaatggctgtgcatgatgattgcaagctgaaatttatggaactgaaggcgaaaagaacattccgtaccatagtctacaagattgaggataagcaagtgattgtagagaaactcggtgaacctgaacaatcatatgatgactttgcagctagtcttccagctgatgattgccgatattgcatttacgatttcgactttgtcactgcggagaactgccagaagagcaagatcttcttcattgcatggtctccggacactgccaaagtgagagacaagatgatttacgcgagctctaaagataggttcaagagagaactagatggaattcaagtggaacttcaagctactgatccaacagaaatgggtcttgatgttttcaaaagccgcaccaactaagtaaaacaaaaccctgtaagggcatttgaataagtttggtttctggagtgaatatgtttcctctgactgttatgaaaactttttaacaccttcaacttcattctacttggtattattgtatgtctttgatgtgttatgtgtgccttgtgatggttttcaattagttttacatgtacaatacttgaaatcagattgttgctaggcttcaagccttgtctcagttatctatctgataatttattcg

SEQ ID NO: 74439 - protein, 130 aa, Arabidopsis thaliana; identical to SEQ ID NO: 25156
  peptide (1)..(130): Ceres Seq. ID no. 5674493

SEQ ID NO: 74440 - protein, 119 aa, Arabidopsis thaliana; identical to SEQ ID NO: 25157
  peptide (1)..(119): Ceres Seq. ID no. 5674494

SEQ ID NO: 74441 - DNA, 1656 bp, Arabidopsis thaliana
  misc_feature (1)..(1656): Ceres Seq. ID no. 5674654
  misc_feature (1)..(1656): Ortholog of  Ceres SEQ ID NO 14311857 as cited in SEQ ID NO 51473
  misc_feature (1)..(1656): Ortholog of  Ceres SEQ ID NO 14303094 as cited in SEQ ID NO 66388
ttttgtcgatttagccctaacctatacggctgctacatccagatttcctcatcctctattagggaagaagaaccaaaaccctaatcctatcttctcctcttataaatcgcttcaacaacagtttctttctcttctgatttgatccatgatttctcatctggaaccctagtttatacatccatcgggtgttactgttctttatctgggcaatcagtggtgtttttgttccttttgtatatctgtcgagacttctaggtgtgaaatcaaagcttgtttggtttatatcgatcttggttttagctgaatcgttgttaagatggctggaggtggaaacaggagagatgaaggatcgatcacgatccagagcactaatttgtttgcagcattggacactcgtaagaagaagaagaagtctgacaaggcagggaagagcaaagggtcttctaagtcacgagagccagagaaggagcctgagcctcaggtctattgggctcctacgcctttgaaagttaagtcttgggctgatattgatgatgaagacgacgatgatgactattatgcaaccactgctcctcctcagtctggttggagtacttctctgccttcccatactgattccaaagacgttcatgttgaggaaagtgaaagtgaggaagatattcttgatgaaggtgatgatgatgtggaggaagagcaggaacaggaaacagaggtacaggttcatccagagcctgaggtgaagaaagctcctgaagttcctgcacctcctaaagaggcagagaggcaactttccaagaaagagaggaaaaagaaggaacttgctgagcttgaagctttgttggctgattttggagttgcccccaaggagaacaatggcctagaggaatctcaagaggctggacaagaaaagaaagaagatgtcaatggagagggagagaagaaggagaatgcagcaggtggggagtcaaaggcatcaaaaaagaagaaaaagaaggataagcagaaggaggtaaaagaatctcaagagcaacaagcaaacaacaatgccgatgctgtagatgaagctgctgggtctgaaccaactgaggaagaatctccaattgacgtcaaggaaaggataaagaagcttgcatccatgaagaagaagaagtcaggcaaagaggtggatgctgcagctaaagctgctgcggaggaggcagctgcaagacgtaagaagctggccgcggcaaagaagaaggagaagaatcactataaccaacagcctgtgcggtaaaatcctgaatcaccaccattttgatcttgatggaaatgcaaatatgaacatgtatttcgccgtatattgttcatatgagtctctgtcctaataaatcttttgaagggtctggttcttagagttaaagacattgaatcctttttctagtcttattacaatgaacaggctaaagacaaaactactctctggagattttcatttctttttgaaacacctttgttttcttaatatcagaccttttttaggttcattatgtcttcaatcagcttcttatgtatggttcgatggtgttattttcttctttttttcgttcagttgcctgtgttttgattcatgccttgtcacaaaatcttttttggttatatgttccaaagtgattcccc

SEQ ID NO: 74442 - protein, 318 aa, Arabidopsis thaliana; identical to SEQ ID NO: 28893
  peptide (1)..(318): Ceres Seq. ID no. 5674655

SEQ ID NO: 74443 - DNA, 2385 bp, Arabidopsis thaliana
  misc_feature (1)..(2385): Ceres Seq. ID no. 5675054
  misc_feature (1)..(2385): Ortholog of  Ceres SEQ ID NO 13654989 as cited in SEQ ID NO 63117
  misc_feature (1)..(2385): Ortholog of  Ceres SEQ ID NO 13584744 as cited in SEQ ID NO 69137
ctcgaggtcttagggttttagctgttgacttgtcgcagcttcactggagaattgaatgaattttcttatggtttcaggaaggtgatgaatgttgagatcgatttttgatttcaatcaacgttcaacgaagatggtgatgatttctcataagttggatttgattttggttttcataatcgtaatcggaggatctattttccgacgagtttctgctaatttcaccgtaccttgtaacggaagatgcggtggattgactctgccttatcctttcgggttttcaaacggttgttcgatccgattcgattgctctgcggcggagaaaccgatgatcggagacttttccgttcaaaacgtgacggaaaacagtatatttgtcggtctctctcacaattgtactcggaagattgaagatatgaatccgcttttcggcgagaatttcgcaccaacgtcggagaacagtttcttgatggagaattgtaaccgtaccaccgatggttgctctatcaagcagaagtttctggagaatgtgctgaaactcaaaagttgtgatgctactggaaacataagttgtttttctttagatagtaattcgagttcgaagaactcagctaagtttttcagtatgaagacattaaggaacagctcgtgtagtttgttgttctcgtcgatagctttcgagtctgtaggtgtgaatgcgggtatagcgttagagtttgagcgagttcggttaggttggtggcttaagggaggttgcgagagcggaacttgcgcggctaacaccgattgtacagacgttgaaactcctcatggatatgcaggacaccggtgctcatgtcttgacggtttccacggtgacggatacaccaacccttgccagagagcactaccggagtgccgtggttccaagctcgtctggagacattgtagatctaatcttattactattgtaggaggaactgttggtggagcgtttttactagctgccttggcttttttcttcttttgtaagcggagacggtctactcctttgagaagtcatttaagcgcaaagcgtcttttgtctgaagctgcagggaactcgagtgtcgcctttttcccttacaaggaaatcgagaaagcgacagatggtttctctgaaaagcagaagttaggaataggtgcatatggtacggtctatagaggaaagctccaaaatgatgaatgggttgctatcaaaagacttagacatagagattcagaaagtcttgaccaagtcatgaatgagatcaagcttctttcctctgtgagtcacccgaatcttgtccgtctcttaggatgttgtatagaacaaggcgatccagttctcgtttatgagtacatgccgaatggaactctatctgaacatctacaaagagatagagggagtggtcttccatggaccttgcgtctcactgttgctactcaaacagctaaagcaatcgcgtatctccactcttcaatgaacccaccgatctatcaccgtgacatcaaatctaccaatatccttcttgattatgatttcaactccaaagttgcggatttcggactctctagactgggaatgacggaatcttctcacatatcaacggctcctcaagggactcctggttatcttgacccgcagtaccatcaatgctttcatctctctgataagagcgacgtctacagctttggagtcgtccttgccgagattataacgggattgaaagtcgttgatttcacacgtccacataccgaaatcaacctagcggctcttgctgttgacaaaatcgggtcaggttgtatcgatgagataatagacccgattcttgacttggatctcgacgcatggactctctcatccatacacacggtggctgagcttgcatttcgatgcttagccttccacagtgacatgagaccgacaatgaccgaagtagcggacgagcttgaacagataagactcagtggttggattccaagcatgagcttggattcaccagccggttctctccgttcatctgatcgaggaagcgaaagatcagttaaacaatcatcaataggaagcagaagagtcgttatccctcagaaacaacctgattgcctcgcatccgtcgaagagattagcgatagctcacccatctcagttcaagatccttggttaagtgcacaaagctcaccgtctacaaatacattgctcggtaacattccaagatgatagtatgatctcaaaacacgattaccactttcttgtttatataagtccctcttttgtgtagctttcacaatcattcagtgtttataatgctaagtagagagattaacaatggtgaaaacaggtttatacatgagttataatgtaaacgatcttgaaacaagatctttcaa

SEQ ID NO: 74444 - protein, 708 aa, Arabidopsis thaliana
  peptide (1)..(708): Ceres Seq. ID no. 5675055
MLRSIFDFNQRSTKMVMISHKLDLILVFIIVIGGSIFRRVSANFTVPCNGRCGGLTLPYPFGFSNGCSIRFDCSAAEKPMIGDFSVQNVTENSIFVGLSHNCTRKIEDMNPLFGENFAPTSENSFLMENCNRTTDGCSIKQKFLENVLKLKSCDATGNISCFSLDSNSSSKNSAKFFSMKTLRNSSCSLLFSSIAFESVGVNAGIALEFERVRLGWWLKGGCESGTCAANTDCTDVETPHGYAGHRCSCLDGFHGDGYTNPCQRALPECRGSKLVWRHCRSNLITIVGGTVGGAFLLAALAFFFFCKRRRSTPLRSHLSAKRLLSEAAGNSSVAFFPYKEIEKATDGFSEKQKLGIGAYGTVYRGKLQNDEWVAIKRLRHRDSESLDQVMNEIKLLSSVSHPNLVRLLGCCIEQGDPVLVYEYMPNGTLSEHLQRDRGSGLPWTLRLTVATQTAKAIAYLHSSMNPPIYHRDIKSTNILLDYDFNSKVADFGLSRLGMTESSHISTAPQGTPGYLDPQYHQCFHLSDKSDVYSFGVVLAEIITGLKVVDFTRPHTEINLAALAVDKIGSGCIDEIIDPILDLDLDAWTLSSIHTVAELAFRCLAFHSDMRPTMTEVADELEQIRLSGWIPSMSLDSPAGSLRSSDRGSERSVKQSSIGSRRVVIPQKQPDCLASVEEISDSSPISVQDPWLSAQSSPSTNTLLGNIPR

SEQ ID NO: 74445 - protein, 694 aa, Arabidopsis thaliana
  peptide (1)..(694): Ceres Seq. ID no. 5675056
MVMISHKLDLILVFIIVIGGSIFRRVSANFTVPCNGRCGGLTLPYPFGFSNGCSIRFDCSAAEKPMIGDFSVQNVTENSIFVGLSHNCTRKIEDMNPLFGENFAPTSENSFLMENCNRTTDGCSIKQKFLENVLKLKSCDATGNISCFSLDSNSSSKNSAKFFSMKTLRNSSCSLLFSSIAFESVGVNAGIALEFERVRLGWWLKGGCESGTCAANTDCTDVETPHGYAGHRCSCLDGFHGDGYTNPCQRALPECRGSKLVWRHCRSNLITIVGGTVGGAFLLAALAFFFFCKRRRSTPLRSHLSAKRLLSEAAGNSSVAFFPYKEIEKATDGFSEKQKLGIGAYGTVYRGKLQNDEWVAIKRLRHRDSESLDQVMNEIKLLSSVSHPNLVRLLGCCIEQGDPVLVYEYMPNGTLSEHLQRDRGSGLPWTLRLTVATQTAKAIAYLHSSMNPPIYHRDIKSTNILLDYDFNSKVADFGLSRLGMTESSHISTAPQGTPGYLDPQYHQCFHLSDKSDVYSFGVVLAEIITGLKVVDFTRPHTEINLAALAVDKIGSGCIDEIIDPILDLDLDAWTLSSIHTVAELAFRCLAFHSDMRPTMTEVADELEQIRLSGWIPSMSLDSPAGSLRSSDRGSERSVKQSSIGSRRVVIPQKQPDCLASVEEISDSSPISVQDPWLSAQSSPSTNTLLGNIPR

SEQ ID NO: 74446 - protein, 692 aa, Arabidopsis thaliana
  peptide (1)..(692): Ceres Seq. ID no. 5675057
MISHKLDLILVFIIVIGGSIFRRVSANFTVPCNGRCGGLTLPYPFGFSNGCSIRFDCSAAEKPMIGDFSVQNVTENSIFVGLSHNCTRKIEDMNPLFGENFAPTSENSFLMENCNRTTDGCSIKQKFLENVLKLKSCDATGNISCFSLDSNSSSKNSAKFFSMKTLRNSSCSLLFSSIAFESVGVNAGIALEFERVRLGWWLKGGCESGTCAANTDCTDVETPHGYAGHRCSCLDGFHGDGYTNPCQRALPECRGSKLVWRHCRSNLITIVGGTVGGAFLLAALAFFFFCKRRRSTPLRSHLSAKRLLSEAAGNSSVAFFPYKEIEKATDGFSEKQKLGIGAYGTVYRGKLQNDEWVAIKRLRHRDSESLDQVMNEIKLLSSVSHPNLVRLLGCCIEQGDPVLVYEYMPNGTLSEHLQRDRGSGLPWTLRLTVATQTAKAIAYLHSSMNPPIYHRDIKSTNILLDYDFNSKVADFGLSRLGMTESSHISTAPQGTPGYLDPQYHQCFHLSDKSDVYSFGVVLAEIITGLKVVDFTRPHTEINLAALAVDKIGSGCIDEIIDPILDLDLDAWTLSSIHTVAELAFRCLAFHSDMRPTMTEVADELEQIRLSGWIPSMSLDSPAGSLRSSDRGSERSVKQSSIGSRRVVIPQKQPDCLASVEEISDSSPISVQDPWLSAQSSPSTNTLLGNIPR

SEQ ID NO: 74447 - DNA, 1237 bp, Arabidopsis thaliana
  misc_feature (1)..(1237): Ceres Seq. ID no. 5675381
  misc_feature (1)..(1237): Ortholog of  Ceres SEQ ID NO 12364737 as cited in SEQ ID NO 51089
  misc_feature (1)..(1237): Ortholog of  Ceres SEQ ID NO 14306553 as cited in SEQ ID NO 53121
  misc_feature (1)..(1237): Ortholog of  Ceres SEQ ID NO 12581561 as cited in SEQ ID NO 53617
  misc_feature (1)..(1237): Ortholog of  Ceres SEQ ID NO 14316263 as cited in SEQ ID NO 55294
  misc_feature (1)..(1237): Ortholog of  Ceres SEQ ID NO 15176751 as cited in SEQ ID NO 59719
  misc_feature (1)..(1237): Ortholog of  Ceres SEQ ID NO 13597380 as cited in SEQ ID NO 64054
  misc_feature (1)..(1237): Ortholog of  Ceres SEQ ID NO 12625474 as cited in SEQ ID NO 64169
  misc_feature (1)..(1237): Ortholog of  Ceres SEQ ID NO 13597502 as cited in SEQ ID NO 64681
aattgtaatttttgtcacagtcattaaacaaaacgcttttatgacgatatcaacggttatagcattcatgtccatgttcctagtatttgttatgtctggtccgatagtggtggagggacgtgcttttttcgtgttcggtgactcgctcgtcgacagtggcaacaacaactatctggtgacaactgcacgtgccgactctccaccgtatggaatcgattttccaactcggagaccaaccggccggttttccaacggtcttaacattccagatcttatcagtgaggcaatcggtaacgaagagccaccgttaccttaccttagtccagagctaaggggccggagtcttcttaacggtgctaatttcgcctccgctggtatcggaattctcaatgataccggatttcaattcatcaacattataagaatgtaccaacaactcgattacttccaacaataccaacaacgtgtgagtcgcttgattgggaaaccgcaaactcagcggctcgtgagtcaagcgcttgtattaatcacggtcggtggaaacgattttgtgaacaactatttcttgtttccatattccgctagatcacgccaattcactctaccggattacgtccgactcctaatttctgaatacaaaaaaatactattgaggttaaattcacttggagtgggtcgagttctagtgacaggagctggaccactaggatgtgcaccggccgaactggcgagatcaggtacgtcgaatggaagatgctcggccgagctacaacgagctgcatctctatatgatcctcagctacttcaaatgataaatgaacttaacaaaaaaattgggagaaatgtgtttattgctgctaacactaaccaaatgcaagaggattttctaagcactccacgaagatatggatttgtaacatcgaaggttgcttgttgcggacaagggccgtacaatgggatgggtttgtgtacggttctatcaaacttgtgtccgaaccgtgagttatacgtcttttgggatgcgtttcatccgactgagaaagcaaaccgcatgatagtccgacatatcttgaccggtaccaccaagtatatgaaccccatgaaccttagctctgctcttgccctatgagccacacacgttgaagtgggaaactcggttttgtttatttcactcgcaagatatatgtatcgactaccgagtacaagagtatgaaataagataactcagtctcaattt

SEQ ID NO: 74448 - protein, 375 aa, Arabidopsis thaliana
  peptide (1)..(375): Ceres Seq. ID no. 5675382
IVIFVTVIKQNAFMTISTVIAFMSMFLVFVMSGPIVVEGRAFFVFGDSLVDSGNNNYLVTTARADSPPYGIDFPTRRPTGRFSNGLNIPDLISEAIGNEEPPLPYLSPELRGRSLLNGANFASAGIGILNDTGFQFINIIRMYQQLDYFQQYQQRVSRLIGKPQTQRLVSQALVLITVGGNDFVNNYFLFPYSARSRQFTLPDYVRLLISEYKKILLRLNSLGVGRVLVTGAGPLGCAPAELARSGTSNGRCSAELQRAASLYDPQLLQMINELNKKIGRNVFIAANTNQMQEDFLSTPRRYGFVTSKVACCGQGPYNGMGLCTVLSNLCPNRELYVFWDAFHPTEKANRMIVRHILTGTTKYMNPMNLSSALAL

SEQ ID NO: 74449 - protein, 362 aa, Arabidopsis thaliana
  peptide (1)..(362): Ceres Seq. ID no. 5675383
MTISTVIAFMSMFLVFVMSGPIVVEGRAFFVFGDSLVDSGNNNYLVTTARADSPPYGIDFPTRRPTGRFSNGLNIPDLISEAIGNEEPPLPYLSPELRGRSLLNGANFASAGIGILNDTGFQFINIIRMYQQLDYFQQYQQRVSRLIGKPQTQRLVSQALVLITVGGNDFVNNYFLFPYSARSRQFTLPDYVRLLISEYKKILLRLNSLGVGRVLVTGAGPLGCAPAELARSGTSNGRCSAELQRAASLYDPQLLQMINELNKKIGRNVFIAANTNQMQEDFLSTPRRYGFVTSKVACCGQGPYNGMGLCTVLSNLCPNRELYVFWDAFHPTEKANRMIVRHILTGTTKYMNPMNLSSALAL

SEQ ID NO: 74450 - protein, 353 aa, Arabidopsis thaliana
  peptide (1)..(353): Ceres Seq. ID no. 5675384
MSMFLVFVMSGPIVVEGRAFFVFGDSLVDSGNNNYLVTTARADSPPYGIDFPTRRPTGRFSNGLNIPDLISEAIGNEEPPLPYLSPELRGRSLLNGANFASAGIGILNDTGFQFINIIRMYQQLDYFQQYQQRVSRLIGKPQTQRLVSQALVLITVGGNDFVNNYFLFPYSARSRQFTLPDYVRLLISEYKKILLRLNSLGVGRVLVTGAGPLGCAPAELARSGTSNGRCSAELQRAASLYDPQLLQMINELNKKIGRNVFIAANTNQMQEDFLSTPRRYGFVTSKVACCGQGPYNGMGLCTVLSNLCPNRELYVFWDAFHPTEKANRMIVRHILTGTTKYMNPMNLSSALAL

SEQ ID NO: 74451 - DNA, 669 bp, Arabidopsis thaliana
  misc_feature (1)..(669): Ceres Seq. ID no. 5675408
  misc_feature (1)..(669): Ortholog of  Ceres SEQ ID NO 13596601 as cited in SEQ ID NO 62486
atgtcttcaacaacaacagattctacagaattgcaaaatctgatcaaactgtttcaaaattgccaaactcatcctcgtcaacattttcctgcaaaatcttcagctgtattagtttgtctataccaagaacaaagagaagacaaaaacgagctacgcgtaatcttaaccaaacgatctactactctctcttctcatcctggggaagtagcattgcctggaggaaaaagagaccaagaagataaagatgatatagctactgcgttgagagaagctcgtgaagaaatcggtttagatccttctcttgttacaatcatttctgttcttgaaccatttgttaacaagaagggaatgtcggtagcaccagttatcggttttctacacgataagaaagcgtttaaacagttaccaaatccagctgaagtggaagagatctttgatgtgccattagagatgttcctcaaggacagaaacaggcgagcagaggaacgagagcatgaaggagagagatatcttcttcaatactttgattactattccgaagataaagagagaagctttatcatatgggcactcactgctggtattctgatcagagttgcctccattgtttatcagagattaccggagtttcaagaacgtaaaccgagtttctggaatcagcctaactga

SEQ ID NO: 74452 - protein, 222 aa, Arabidopsis thaliana
  peptide (1)..(222): Ceres Seq. ID no. 5675409
MSSTTTDSTELQNLIKLFQNCQTHPRQHFPAKSSAVLVCLYQEQREDKNELRVILTKRSTTLSSHPGEVALPGGKRDQEDKDDIATALREAREEIGLDPSLVTIISVLEPFVNKKGMSVAPVIGFLHDKKAFKQLPNPAEVEEIFDVPLEMFLKDRNRRAEEREHEGERYLLQYFDYYSEDKERSFIIWALTAGILIRVASIVYQRLPEFQERKPSFWNQPN

SEQ ID NO: 74453 - DNA, 1419 bp, Arabidopsis thaliana
  misc_feature (1)..(1419): Ceres Seq. ID no. 5675439
  misc_feature (1)..(1419): Ortholog of  Ceres SEQ ID NO 15171386 as cited in SEQ ID NO 51479
gctaaactccatcatcttctctttcttttttttcacttgtcccatttttttatattttcatctttctcttttggagtttcttcttctactgactctactggtaggtgtatggatttgtgagagaagaaaaaaaagcacaatctttgaatggactggaatttcaaacttagctctggttatttatctggattcgatcaagaaccagatttatcaccaatggatggttcgatctcgtttggtgggtcgtcacagtcaaaagcggatttttcatttgatctaaaacttggaagaaacattggaaactcttcctctgtttttggtgatacagagcaagtgattagtcttagtaagtggaaagatagtgctttagctaaaccagaaggttcaagaagctcgagttcaaagagaacaagagggaatggtgttggaaccaaccagatgccgatttgtcttgttgatggatgtgattctgattttagtaattgtagagagtatcataagagacataaagtttgtgatgttcattcaaaaactcctgtggttactattaatggtcataaacagaggttttgtcaacaatgcagcaggtttcatgctttggaggagtttgatgaagggaagagaagttgtaggaaacgtcttgatggacataatcgaagacgacggaagccgcagcctgaacatatcggtcgtcctgccaacttctttacgggttttcaaggtagcaaattgctagagttttctggtggttcacatgtgtttccaactacatctgtgttgaacccgagctggggaaatagtcttgtaagcgttgctgtagccgccaatggttcgagttatgggcagagccagagctatgttgttggttcttctcctgcaaagacagggataatgtttccaatctcttcttctccaaacagtaccagaagcatagcaaaacaattccctttcttgcaagaagaagaaagctcgagaaccgcatcgttgtgtgagagaatgacgagttgcatccatgactctgattgtgctctctctcttctgtcatcctcctcgtcgtcagtccctcatttgcttcaaccaccactttctttgtcccaagaagcagttgagacagttttttacgggtcgggattgtttgagaatgcgagtgcagtctctgatggatcggttatatccggtaacgaggctgtccgtcttccgcagacattcccgtttcattgggagtagtagaagaagaagtaggtagatagatagaatcagaaagatctatttgtgtctcttctcttctccctcatttttcaatgttctttatcatcatcattgttcttgttaacactacaagaaatatggacattcttaacacaccgaaaacgctataataacgtttacatagcggattcataaacgctgtgtttgccg

SEQ ID NO: 74454 - protein, 359 aa, Arabidopsis thaliana
  peptide (1)..(359): Ceres Seq. ID no. 5675440
MDWNFKLSSGYLSGFDQEPDLSPMDGSISFGGSSQSKADFSFDLKLGRNIGNSSSVFGDTEQVISLSKWKDSALAKPEGSRSSSSKRTRGNGVGTNQMPICLVDGCDSDFSNCREYHKRHKVCDVHSKTPVVTINGHKQRFCQQCSRFHALEEFDEGKRSCRKRLDGHNRRRRKPQPEHIGRPANFFTGFQGSKLLEFSGGSHVFPTTSVLNPSWGNSLVSVAVAANGSSYGQSQSYVVGSSPAKTGIMFPISSSPNSTRSIAKQFPFLQEEESSRTASLCERMTSCIHDSDCALSLLSSSSSSVPHLLQPPLSLSQEAVETVFYGSGLFENASAVSDGSVISGNEAVRLPQTFPFHWE

SEQ ID NO: 74455 - protein, 336 aa, Arabidopsis thaliana
  peptide (1)..(336): Ceres Seq. ID no. 5675441
MDGSISFGGSSQSKADFSFDLKLGRNIGNSSSVFGDTEQVISLSKWKDSALAKPEGSRSSSSKRTRGNGVGTNQMPICLVDGCDSDFSNCREYHKRHKVCDVHSKTPVVTINGHKQRFCQQCSRFHALEEFDEGKRSCRKRLDGHNRRRRKPQPEHIGRPANFFTGFQGSKLLEFSGGSHVFPTTSVLNPSWGNSLVSVAVAANGSSYGQSQSYVVGSSPAKTGIMFPISSSPNSTRSIAKQFPFLQEEESSRTASLCERMTSCIHDSDCALSLLSSSSSSVPHLLQPPLSLSQEAVETVFYGSGLFENASAVSDGSVISGNEAVRLPQTFPFHWE

SEQ ID NO: 74456 - protein, 262 aa, Arabidopsis thaliana
  peptide (1)..(262): Ceres Seq. ID no. 5675442
MPICLVDGCDSDFSNCREYHKRHKVCDVHSKTPVVTINGHKQRFCQQCSRFHALEEFDEGKRSCRKRLDGHNRRRRKPQPEHIGRPANFFTGFQGSKLLEFSGGSHVFPTTSVLNPSWGNSLVSVAVAANGSSYGQSQSYVVGSSPAKTGIMFPISSSPNSTRSIAKQFPFLQEEESSRTASLCERMTSCIHDSDCALSLLSSSSSSVPHLLQPPLSLSQEAVETVFYGSGLFENASAVSDGSVISGNEAVRLPQTFPFHWE

SEQ ID NO: 74457 - DNA, 1461 bp, Arabidopsis thaliana
  misc_feature (1)..(1461): Ceres Seq. ID no. 5675813
  misc_feature (1)..(1461): Ortholog of  Ceres SEQ ID NO 14304823 as cited in SEQ ID NO 54902
gtgttagcttcctttacgtgtttctttcctttctctctcctctgtcacgcaagaacaataaatactatgatcacttgattttctccgacgaaattttccccagaaacaacaacagttcgagcaacaaaaccctgaactctatgtttctgttaaactcattcacaattttatgagaaattggacaaaaccctgatgtcggattccgtcaaaacgacggtggatccgcttttgaaagatttggatgggaaaaaagagagtttcaggcggaacgttgtgtctatggcagctgagttaaagcaagtgagaggtcgtttggtttctcaagaacaattctttgttaaagaaagcttttgtagaaaagaagcagagaagaaagctaagaacatggaaatggagatctgtaaattgcagaagaagttggaagatagaaattgtgagcttgtagcttcaacttctgctgctgaaaagtttctagaagaagtggacgatctgagatcacagctagctttaacaaaggacattgcagaaacaagtgctgcttctgctcaatccgcacagcttcaatgctcagtgctaacagaacaacttgacgacaaaacacgttctctaagagaacacgaagaccgtgtaactcatctcggtcaccagcttgataatcttcagagagatttgaagacaagagaatgttctcaaaaacagctgagagaggaagttatgagaatcgagcgtgagataactgaagctgttgcaaagtctgggaaaggcacagaatgtgagctcaggaaacttcttgaagaggtttctccaaagaactttgagagaatgaacatgttattggcggtaaaagacgaagagattgcaaagttaaaagatgatgtgaagttaatgtcagctcattggaaactcaaaactaaggaacttgaatctcagttggagagacaaagaagagcagatcaagagttgaagaagaaggtactgaaactagagttttgcctgcaagaagctcgtagtcagacaagaaagctacagagggcgggggagagacgagacaaggcaatcaaagagctaagtgatcagattactggaaaacagttgaatgaatcggtttcaggggagaaacaaaacttctgggatacttcagggttcaagatcgttgtgtcaatgtcgatgttgatattagttattatctccaaaagatgagttcttttgtcttgaactctctttctttttgttggtgtgtaaatgcagtagttgcagatagtagtcagataatggtgcatattattactccttgaggtttagcgaagagaaatcttgcttccctttgttaagttataagtttgttcatgtgtatttgaatcatttctcaaaaagaaaatgggaaaaatgtcattcaaataatcagtttaccattttcgttggttttaaacataaattttggacctggtgatttaaatcctc

SEQ ID NO: 74458 - protein, 335 aa, Arabidopsis thaliana; identical to SEQ ID NO: 38831
  peptide (1)..(335): Ceres Seq. ID no. 5675814

SEQ ID NO: 74459 - protein, 306 aa, Arabidopsis thaliana; identical to SEQ ID NO: 38832
  peptide (1)..(306): Ceres Seq. ID no. 5675815

SEQ ID NO: 74460 - protein, 271 aa, Arabidopsis thaliana; identical to SEQ ID NO: 38833
  peptide (1)..(271): Ceres Seq. ID no. 5675816

SEQ ID NO: 74461 - DNA, 757 bp, Arabidopsis thaliana
  misc_feature (1)..(757): Ceres Seq. ID no. 5676142
  misc_feature (1)..(757): Ortholog of  Ceres SEQ ID NO 15173516 as cited in SEQ ID NO 61801
atacgattgcgataatttcatctatacttatcgggtttataacaccgataatccgatttggtcaaaatccggcggagaaaaaccctaaaaatggagaaagagacgaaggagaagatcgagaaaactgtgatagagatactcagtgaatcggatatgaaagagataacagagttcaaggttcgtaaactcgcttcggagaaactcgcaatcgatctctcggagaaatctcacaaagcatttgtacgaagcgtcgtggagaaattcctcgacgaagagagagcgagagaatatgaaaactcacaagtgaataaggaagaagaagatggagataaggattgtggtaaaggaaacaaagagtttgatgatgacggcgatcttatcatttgcaggttatcggataagagaagagtgacgattcaggaatttaaagggaagagtttggtttctatcagagagtattacaagaaagatggcaaagaacttcctacttctaaaggaataagcttaacagatgaacaatggtcaaccttcaagaaaaacatgccagccatcgaaaatgctgtcaagaaaatggaatcgcgtgtctgaatgaagaacatgtgatactttatctctaaacatgtgtaagtgtcttcttaagtagttagttgttcgaatgttcaggtctctcatgtaactgtcttttttattttcttctctcgaattggtcgttatgtgtctcgtactgagttgtatccatttcgctttaaccgattcc

SEQ ID NO: 74462 - protein, 165 aa, Arabidopsis thaliana; identical to SEQ ID NO: 30872
  peptide (1)..(165): Ceres Seq. ID no. 5676143

SEQ ID NO: 74463 - protein, 144 aa, Arabidopsis thaliana; identical to SEQ ID NO: 30873
  peptide (1)..(144): Ceres Seq. ID no. 5676144

SEQ ID NO: 74464 - DNA, 1176 bp, Arabidopsis thaliana
  misc_feature (1)..(1176): Ceres Seq. ID no. 5676319
  misc_feature (1)..(1176): Ortholog of  Ceres SEQ ID NO 15179499 as cited in SEQ ID NO 0
atactgtcgtctccctggattctatcttctcgattttggtgattcgaacacgattttacctatccttgagcgatctcgatcccaactttttgagttgattttatttcaggagttttcaaaaaatctgttgttaagtggtgaatcggaaaatgtcgcagtcttccgtcgatataccgccaaaaggtgggtttagcttcgatctgtgcaaaaggaatgatatgctgacacagaagggtcttaaagcgccgtcgtttctcaagactggaacgactatcgttggattgatatttaaggatggtgtaatacttggggctgatacacgggcaactgaagggcctattgtggctgataagaactgtgagaagattcactacatggcaccaaacatttactgttgtggtgcaggaaccgctgctgacactgaagcagtaactgatatggtcagctcacagctgcggttgcatagataccagactggccgagattctcgagtcgttactgcattgacccttctcaaaaaacatcttttcagctaccaaggccatgtctcagctgctcttgtgcttggtggagttgatattaccgggcctcatcttcacacgatatacccacacggttctactgacactctaccatttgctacaatgggttctggttcccttgctgccatgtcagtgtttgaagcaaagtataaagaaggtctaactagagatgaaggaatcaagttggttgctgaagccatatgctctggtatattcaacgaccttggtagtggtagcaatgtggatatctgtgtgatcactaaggggcacaaggaatacttgaggaattacatggaaccaaacccaagaacctatgttagcagcaaaggctattcattcaccaagaaaaccgaggttctactcaccaaaattacaccattattggagcgagtcgaaattgtagaagtggctggtgaagctatggaggaatgaatctcgtgtgagagacagatactaagagtgaaaccattgttctacctcacatgacagtcatgtttacattttctactttgttcaatatgaacgactaaaatcgaatcgtagttgcctccatttcgtctttaaatttggcttgaacttgtgattaatgattatggatgattcggttttgaaatttagctctcacataattttc

SEQ ID NO: 74465 - protein, 274 aa, Arabidopsis thaliana; identical to SEQ ID NO: 24362
  peptide (1)..(274): Ceres Seq. ID no. 5676320

SEQ ID NO: 74466 - protein, 251 aa, Arabidopsis thaliana; identical to SEQ ID NO: 24363
  peptide (1)..(251): Ceres Seq. ID no. 5676321

SEQ ID NO: 74467 - protein, 199 aa, Arabidopsis thaliana; identical to SEQ ID NO: 24364
  peptide (1)..(199): Ceres Seq. ID no. 5676322

SEQ ID NO: 74468 - DNA, 716 bp, Arabidopsis thaliana
  misc_feature (1)..(716): Ceres Seq. ID no. 5677129
  misc_feature (1)..(716): Ortholog of  Ceres SEQ ID NO 13581889 as cited in SEQ ID NO 50900
aatattatctttttcgaattcggagctcaagtttgaaattcggagaagctagagagttttctgagatggctcgtactaagcaaacagctcgtaagtctactggaggaaaggctcctaggaagcagcttgctacaaaggctgcacgtaagtctgcaccaaccactggaggagtcaagaagccccatcgttaccgtccaggaactgttgcactacgtgaaattcgtaagtaccagaagagtaccgagttgctgatcaggaagctccctttccagaggctagttcgtgagattgcccaggatttcaagactgacttgcgtttccagagccatgctgtgcttgcactccaggaggctgctgaagcataccttgtgggtctctttgaggacactaacctctgcgccatccatgccaagcgtgtgaccataatgcccaaagacattcagctcgctcgcaggatcagaggagaacgtgcttaattgtgattgggaagtagttggattatgtgaatgtgggtggttttctaaatagatagttggaattagataatggcttaaaaagcttttgggtgtaggagacttggaaacaatggtgttttttttttcttttctttctgtttcttgtctagtcggtttatgatttgcttgtgttcttcttagctacgttttgtggtgtgtattgctttcttctttggcaatgttgaacaccttttgttgttg

SEQ ID NO: 74469 - protein, 157 aa, Arabidopsis thaliana
  peptide (1)..(157): Ceres Seq. ID no. 5677130
YYLFRIRSSSLKFGEAREFSEMARTKQTARKSTGGKAPRKQLATKAARKSAPTTGGVKKPHRYRPGTVALREIRKYQKSTELLIRKLPFQRLVREIAQDFKTDLRFQSHAVLALQEAAEAYLVGLFEDTNLCAIHAKRVTIMPKDIQLARRIRGERA

SEQ ID NO: 74470 - protein, 136 aa, Arabidopsis thaliana; identical to SEQ ID NO: 26403
  peptide (1)..(136): Ceres Seq. ID no. 5677131

SEQ ID NO: 74471 - DNA, 1314 bp, Arabidopsis thaliana
  misc_feature (1)..(1314): Ceres Seq. ID no. 5677569
  misc_feature (1)..(1314): Ortholog of  Ceres SEQ ID NO 13655992 as cited in SEQ ID NO 65504
  misc_feature (1)..(1314): Ortholog of  Ceres SEQ ID NO 13587581 as cited in SEQ ID NO 0
ctacttcttcccaagtttgatcactcagcgaaacaaagcaaactaagtaacaaagttaaaaaaacaaagaatttgattgtttttttttcttatagatggcggtaggaatctttggattgatcccaagctcatcaccagacgagctaaggaagattcttcaagcgctttcgacgaaatggggagacgtagttgaggattttgagagtcttgaagtgaagccaatgaaaggagcgatgactaacgaagtgttcatggttagttggcctagaaaagaaacgaatcttcgatgtaggaagcttcttgttcgtgtttatggtgaaggtgttgagcttttcttcaatagagacgatgagattcgtacttttgagtatgttgctcgtcatggtcacggtcctacacttcttggtcgcttcgccggcggtagagtcgaagagtttatccatgcccggacactatcggcaaccgatcttcgtgatccgaacatatcagctcttgttgcatctaagctaagaagatttcacagcatacacattcctggagatagaattatgctcatctgggacaggatgaggacttgggtaggacaagccaagaatctatgttcaaatgaacattcaacagagtttggtctagacgacattgaagatgaaatcaacctgctggaacaagaagtgaacaatgaacaagagattggcttctgtcacaatgacttgcagtatggtaacatcatgattgatgaagaaaccaatgcaattactatcattgattatgagtatgcaagttataatccgatcgcttacgacatagcaaatcatttctgtgaaatggcggcagattatcattcaaacactcctcatatcttggactacactctatatccaggggaagaagaaaggaggagattcatatgtaactacttaacctcttcaggtgaagaagcaagagaagaagacatagaacaacttttggatgatattgagaagtatacattggcaagccatctcttctggggtttatggggaatcatatctggttatgtgaacaagattgagtttgattatatcgagtattcgaggcagagattcaaacagtattggcttcgcaagccaaagcttttatctttcttcccatcctaataagtaaattctctgtttacttatgtttactctttgcgaataacgcggtaaaaacccgatgatggatccatgatatagctatgccaaagctaaaactatgtgtaattcttctgttctgaacttctgatactatgtaataagtaaaagatataaatattccatactataatatttccac

SEQ ID NO: 74472 - protein, 346 aa, Arabidopsis thaliana
  peptide (1)..(346): Ceres Seq. ID no. 5677570
MAVGIFGLIPSSSPDELRKILQALSTKWGDVVEDFESLEVKPMKGAMTNEVFMVSWPRKETNLRCRKLLVRVYGEGVELFFNRDDEIRTFEYVARHGHGPTLLGRFAGGRVEEFIHARTLSATDLRDPNISALVASKLRRFHSIHIPGDRIMLIWDRMRTWVGQAKNLCSNEHSTEFGLDDIEDEINLLEQEVNNEQEIGFCHNDLQYGNIMIDEETNAITIIDYEYASYNPIAYDIANHFCEMAADYHSNTPHILDYTLYPGEEERRRFICNYLTSSGEEAREEDIEQLLDDIEKYTLASHLFWGLWGIISGYVNKIEFDYIEYSRQRFKQYWLRKPKLLSFFPS

SEQ ID NO: 74473 - protein, 304 aa, Arabidopsis thaliana; identical to SEQ ID NO: 42058
  peptide (1)..(304): Ceres Seq. ID no. 5677571

SEQ ID NO: 74474 - protein, 300 aa, Arabidopsis thaliana; identical to SEQ ID NO: 42059
  peptide (1)..(300): Ceres Seq. ID no. 5677572

SEQ ID NO: 74475 - DNA, 1133 bp, Arabidopsis thaliana
  misc_feature (1)..(1133): Ceres Seq. ID no. 5677590
  misc_feature (1)..(1133): Ortholog of  Ceres SEQ ID NO 12615296 as cited in SEQ ID NO 62724
  misc_feature (1)..(1133): Ortholog of  Ceres SEQ ID NO 15225093 as cited in SEQ ID NO 65177
  misc_feature (1)..(1133): Ortholog of  Ceres SEQ ID NO 15179532 as cited in SEQ ID NO 0
agtgttccggaggagaaggacgatcgatctaaggagacgatgaagatcttccacgttccttgtctgcaagacaactactcttatctgataatcgatgagagcaccggagacgcggcggttgtggatccagttgatccggagaaggtgatcgcatcggctgagaagcaccaagctaagatcaagttcgtactcactacgcatcatcactgggatcatgccggtggaaacgagaagattaagcagttggttcctgatatcaaagtatatggaggttctctggataaggtgaagggttgcactgatgcggttgataatggtgacaagctgactttgggtcaggatattaacatattggctctccacactccttggtttgtttttttttttttttttttttccaatgaatttagatgcatctaatctacttgatgtttaactcagtcattttctcttgtcatcgctgattcctctgatatatctacttgttacagtcacaccaagggtcacattagttattatgtgaacggaaaagaaggagaaaacccagccgtgttcaccggagatacactttttgttgctggatgtgggaagttttttgaagggacagctgagcagatgtatcagtcgttgtgtgtgactctggctgcattacctaaaccgacacaggtttactgcggccatgagtacaccgttaagaacttggaatttgctctaactgtggaaccaaacaacgggaagatacaacagaagttagcatgggcccgtcaacagcgccaagcagatcttcccacaatcccttcaacactggaggaagagctcgaaacaaatccatttatgcgtgttgataagccagagatacaggagaaactcggttgcaagtcgccaattgatacaatgagggaagttcggaacaagaaggatcagtggaggggatgatgataaatggagagcttcttgcctatgttttgtgtacttgtgttgaatgatcctgtaaaaggtgtatgaaccagtaatgttgatattctgtgtgaaactgtgaaccggtttggtaaaccgaaatcagaccgacctgtaagccgtactccctttttgaattttcagtttactatggataataatttcagtgtctacac

SEQ ID NO: 74476 - protein, 139 aa, Arabidopsis thaliana
  peptide (1)..(139): Ceres Seq. ID no. 5677591
SVPEEKDDRSKETMKIFHVPCLQDNYSYLIIDESTGDAAVVDPVDPEKVIASAEKHQAKIKFVLTTHHHWDHAGGNEKIKQLVPDIKVYGGSLDKVKGCTDAVDNGDKLTLGQDINILALHTPWFVFFFFFFSNEFRCI

SEQ ID NO: 74477 - protein, 126 aa, Arabidopsis thaliana
  peptide (1)..(126): Ceres Seq. ID no. 5677592
MKIFHVPCLQDNYSYLIIDESTGDAAVVDPVDPEKVIASAEKHQAKIKFVLTTHHHWDHAGGNEKIKQLVPDIKVYGGSLDKVKGCTDAVDNGDKLTLGQDINILALHTPWFVFFFFFFSNEFRCI

SEQ ID NO: 74478 - protein, 106 aa, Arabidopsis thaliana; identical to SEQ ID NO: 35938
  peptide (1)..(106): Ceres Seq. ID no. 5677593

SEQ ID NO: 74479 - DNA, 1160 bp, Arabidopsis thaliana
  misc_feature (1)..(1160): Ceres Seq. ID no. 5677598
  misc_feature (1)..(1160): Ortholog of  Ceres SEQ ID NO 13638441 as cited in SEQ ID NO 58066
actgggtcttcttcagcttctgagtcttctcctctctctctatctctcaagtgggctttgctttgctgtttttgtcttccttcgacgactcacttttgcagattctcataaattcttcaaagctttgagtcttttttcagattcgagggtcggttttatatatgcttcaaatctcttacccaaatcaggtatggagactctgcatccattctctcacctacctatctctgaccaccggttcgttgttcaagagatggtgagcttacacagctcgagtagcggtagctggactaaagaagagaacaagatgttcgaacgagctcttgcgatatacgctgaagactcgcctgatcgctggtttaaagttgcttccatgatccctggaaagactgtttttgatgttatgaagcaatatagtaagcttgaagaagacgttttcgatattgaagcaggacgtgttcccattcctggttatcctgcagcttcttctcccttggggtttgacacggacatgtgtcgtaaacggcctagtggagctagaggatctgatcaagatcgaaagaaaggagtcccttggacagaggaagaacacaggagattcttgttaggccttctcaagtacggtaaaggagattggagaaacatatcgagaaacttcgtggtgtcaaagacgccaacgcaagtggcgagccacgcccaaaagtattaccagagacagctctccggagccaaggacaaacgcaggccaagtatccatgacatcacaaccggcaatcttctcaatgccaatctcaaccgttccttttccgatcatagagatattctccctgatttagggtttatcgataaggatgatacggaggagggagtaatatttatgggtcagaatctctcttcagaaaatctgttttctccatcaccaacttcattcgaagctgccattaacttcgccggagaaaatgtcttcagtgccggagcttaaggcaacatagaatccccaaactcagcgttcttaagaatctgagttttgaaactgtaattagagaaatataagcaaaaccaagtttattatatatgtattgtgtggtttaaaagtaagaacttgtttttactctgtatttttgtgtttctgtctactaaatacctgttatgttaaaaaa

SEQ ID NO: 74480 - protein, 326 aa, Arabidopsis thaliana
  peptide (1)..(326): Ceres Seq. ID no. 5677599
LGLLQLLSLLLSLYLSSGLCFAVFVFLRRLTFADSHKFFKALSLFSDSRVGFIYASNLLPKSGMETLHPFSHLPISDHRFVVQEMVSLHSSSSGSWTKEENKMFERALAIYAEDSPDRWFKVASMIPGKTVFDVMKQYSKLEEDVFDIEAGRVPIPGYPAASSPLGFDTDMCRKRPSGARGSDQDRKKGVPWTEEEHRRFLLGLLKYGKGDWRNISRNFVVSKTPTQVASHAQKYYQRQLSGAKDKRRPSIHDITTGNLLNANLNRSFSDHRDILPDLGFIDKDDTEEGVIFMGQNLSSENLFSPSPTSFEAAINFAGENVFSAGA

SEQ ID NO: 74481 - protein, 263 aa, Arabidopsis thaliana
  peptide (1)..(263): Ceres Seq. ID no. 5677600
METLHPFSHLPISDHRFVVQEMVSLHSSSSGSWTKEENKMFERALAIYAEDSPDRWFKVASMIPGKTVFDVMKQYSKLEEDVFDIEAGRVPIPGYPAASSPLGFDTDMCRKRPSGARGSDQDRKKGVPWTEEEHRRFLLGLLKYGKGDWRNISRNFVVSKTPTQVASHAQKYYQRQLSGAKDKRRPSIHDITTGNLLNANLNRSFSDHRDILPDLGFIDKDDTEEGVIFMGQNLSSENLFSPSPTSFEAAINFAGENVFSAGA

SEQ ID NO: 74482 - protein, 242 aa, Arabidopsis thaliana
  peptide (1)..(242): Ceres Seq. ID no. 5677601
MVSLHSSSSGSWTKEENKMFERALAIYAEDSPDRWFKVASMIPGKTVFDVMKQYSKLEEDVFDIEAGRVPIPGYPAASSPLGFDTDMCRKRPSGARGSDQDRKKGVPWTEEEHRRFLLGLLKYGKGDWRNISRNFVVSKTPTQVASHAQKYYQRQLSGAKDKRRPSIHDITTGNLLNANLNRSFSDHRDILPDLGFIDKDDTEEGVIFMGQNLSSENLFSPSPTSFEAAINFAGENVFSAGA

SEQ ID NO: 74483 - DNA, 860 bp, Arabidopsis thaliana
  misc_feature (1)..(860): Ceres Seq. ID no. 5677606
  misc_feature (1)..(860): Ortholog of  Ceres SEQ ID NO 13504237 as cited in SEQ ID NO 100
  misc_feature (1)..(860): Ortholog of  Ceres SEQ ID NO 15176643 as cited in SEQ ID NO 57825
  misc_feature (1)..(860): Ortholog of  Ceres SEQ ID NO 12598265 as cited in SEQ ID NO 65873
  misc_feature (1)..(860): Ortholog of  Ceres SEQ ID NO 15180736 as cited in SEQ ID NO 0
attcgcgcgacgcaaacgatcttcaggtgatcttctttctccaaatcctctctcataactctgatttcgtacttgtgtatttgagctcacgctctgtttctctcaccacagccatggccaccgccgcagatgttgacgctgagattcagcaggcgctcactaacgaagtcaagctcttcaaccgctggacctatgacgacgttacggtcacagacatcagtcttgttgactacattggagttcaggcagctaaacatgctacctttgttccccacaccgctggaagatactctgtgaagagattcaggaaggctcagtgccccattgttgagaggctcaccaactctctcatgatgcacgggaggaacaacggtaagaaattgatggctgtcaggatcgtcaagcacgccatggagattatccacctcttgtctgacttgaacccaattcaggtcatcattgacgccattgtcaacagtggtccacgtgaagatgctaccagaattggatctgctggtgttgttaggagacaagctgttgatatctctcctctaagacgtgttaaccaggctatcttcttgattaccactggtgctcgtgaagctgctttcagaaacatcaagactatagctgagtgccttgctgatgaattgatcaacgcagccaagggctcttccaacagctatgccatcaagaagaaggatgagattgaaagagttgccaaggctaatcgttaaggattttccctttgccctgtgcgttacaatctcgtatcaatgagtttaatgttttatcttcatttagattgaaatatgtatctcagatgtttgctcttttgttttatgaagtttatttcgtct

SEQ ID NO: 74484 - protein, 244 aa, Arabidopsis thaliana; identical to SEQ ID NO: 21372
  peptide (1)..(244): Ceres Seq. ID no. 5677607

SEQ ID NO: 74485 - protein, 207 aa, Arabidopsis thaliana [sequence omitted]

SEQ ID NO: 74486 - protein, 128 aa, Arabidopsis thaliana; identical to SEQ ID NO: 21374
  peptide (1)..(128): Ceres Seq. ID no. 5677609

SEQ ID NO: 74487 - DNA, 1236 bp, Arabidopsis thaliana
  misc_feature (1)..(1236): Ceres Seq. ID no. 5677698
  misc_feature (1)..(1236): Ortholog of  Ceres SEQ ID NO 14303572 as cited in SEQ ID NO 65530
acaacttttatattttactctgctgcttcgagatcaacgcattaaaagtaatggagtacattaagaatatttcgattttaaggggttgaagttgtaattttgaagaagtggaagatcaatcaaaaataatagaagaacagagacgacgaaacctgccggagaactgaggggagaaaaaaacccggcgaaaaagggaaattcgaattcgtcttctgttgatcattgcttcacttctgcttccagagcttttactcagaagaagctcgctgatctcaaatctctctttttttccctcgcttccaagtctcagagcaatgaccaatacgtctcgtaccctgttttccaggagtattttggtctgagtggttctttaggagaaaggatctttgatatggttactcaacacaggaaagatgataaaatgacttttgaagatcttgttattgctaaggcaacatacgagaaaggaactgatgatgagattgctgagtttatttaccagactttggatgttaatggcaatggggtcttgagaaggtctgatttagagtcgttcctggtggtgattttgaagagtgtgttctccactgagagttctgatgcggaatcaagtgattacaaggagatggtagatgcgctactcgatgccgctactttctcaaaatctgatgatggttctgaaaaaggaatgtcttttgaagacttcagaagctggtgcccactcgttccaactatcagaaagttcctcggcagcttgcttattcccccgggtccagtgagacctggatatcaagtcccggatctgctatatgaagatagtgtgagttcagataggctactattaaagaaggaatacgcttggcatattggaggagctcttcctcaccacgagcttgtagagtggaagctgttgtatcgcagttccttacacggtcaaagcttcaacacattcctcggacacacatcggggatggagggatcgaacatggcctgatggatggactgcagttaccgcagatggaaaacgcagcgctcagtttgagcataccctattggtaactgagactggtgttgaggttttaacagcgaggcttccttcatcgcctgacgtatacccttggcttaccaagtgattaagtgtttggttcctttttggttgtgattcattgggtttgattcttaaacttgggaataatagtgtcatctttttgccattatagaccatttgatgttgtt

SEQ ID NO: 74488 - protein, 200 aa, Arabidopsis thaliana; identical to SEQ ID NO: 23935
  peptide (1)..(200): Ceres Seq. ID no. 5677699

SEQ ID NO: 74489 - protein, 190 aa, Arabidopsis thaliana; identical to SEQ ID NO: 23936
  peptide (1)..(190): Ceres Seq. ID no. 5677700

SEQ ID NO: 74490 - protein, 122 aa, Arabidopsis thaliana; identical to SEQ ID NO: 23937
  peptide (1)..(122): Ceres Seq. ID no. 5677701

SEQ ID NO: 74491 - DNA, 1100 bp, Arabidopsis thaliana
  misc_feature (1)..(1100): Ceres Seq. ID no. 5677706
  misc_feature (1)..(1100): Ortholog of  Ceres SEQ ID NO 14315892 as cited in SEQ ID NO 57776
  misc_feature (1)..(1100): Ortholog of  Ceres SEQ ID NO 13662173 as cited in SEQ ID NO 62002
gactcttgtaatagtataaaattttattgaataattcatctgtagacaagggggaaaagaaagactgattttacgctttattgctctcactaaaaccctaattctctccgtctcgatcgcgacctctgtttcttcggcaatggcggattctcctcaaagaagaagggattcacgatctccttcaccccgaaaagaacgagctagatccagatccaggtctaggtccaggtctagatccaggcccaggcttaggtccaggtcaagatctttgccaaggcctgtttctccatcacgaagccgtggaaggtcaaggtcaagaagccgtggaagaagtgaagttgaaaaccctggtaccactctctatgtgactggcctatctacaagagtcactgacaaggatcttgaagcacatttcgccaaggaaggaaaggttgcgtcttgttttcttgtgatggagccgcgcacccgtgtgtctcgtggttttgcctttgttacaatgagcagccttaaagatgctgagcggtgcattaaatatctcaaccagtctgtactagaaggccgataataactgtggaaaggtccaggagaaagcgcccgagaactcccaccccaggccactatcttggcttgaaaagctccagagacagcgatcgagaaggccgtagcagtcgagggaggcactatgatcgtgatgattacagagaccgtaggtcaccaagacgcgactattcacctcgtgatgaaagaaggtctagaagagatcggtcttactctcctcatggaagaagcccagagagaagatcagagagaaggtctgagaggtcagagagaaggtatgaaccccgtggctcgagatgacctgttttcatccttttgacaaaggattcaaaaacttctctgttgatttaggttgtgtaattgatcatccttaaaatagcacaaagattctgtcaggcaacgctttgggtttcatttattttctgttgttaacgtgttattctgtcggaactctctgaagtgaaaactaaaaactgtaatagcttctctgttatgtctctactctacttgtttttgaatgaatcagaatatcttatgtgatt

SEQ ID NO: 74492 - protein, 141 aa, Arabidopsis thaliana
  peptide (1)..(141): Ceres Seq. ID no. 5677707
MADSPQRRRDSRSPSPRKERARSRSRSRSRSRSRPRLRSRSRSLPRPVSPSRSRGRSRSRSRGRSEVENPGTTLYVTGLSTRVTDKDLEAHFAKEGKVASCFLVMEPRTRVSRGFAFVTMSSLKDAERCIKYLNQSVLEGR

SEQ ID NO: 74493 - DNA, 1244 bp, Arabidopsis thaliana
  misc_feature (1)..(1244): Ceres Seq. ID no. 5677741
  misc_feature (1)..(1244): Ortholog of  Ceres SEQ ID NO 13596108 as cited in SEQ ID NO 68591
gtgtatgatgttttgtatattgttgcttctcttgctttacttgtttggtttgggatttcttctctgttttttcttggtgaattttgcgtttcgcttaaaaatgagtgaaattgatttggtgaaattaggtcagaggcgtttctcatggctcctcttactctctccgttgatgtgaagagctcttcagcgacctctcatgatgtttcgaagagggtaatgcagagttcacagctcaaaataaacaaaggcttttttgcatctgttaatacacaagaagataaaccctttgatttcttccgcactctctttgaggggtttatagcaggaggtacagctggagttgtagttgaaacagctttatacccaattgatactattaagactagacttcagctcgtggaggtggaaaaattgttttgaagggtctttattcaggattagctggaaatatcgctggtgtcttaccggcttcggctttatttgttggagtttacgaacccacaaagcagaaactgctgaagacctttcctgatcatttaagcgcagttgctcacctgactgcaggggccatcggtggacttgctgcatctctgattcgagtgcctacagaggttgtgaagcaaagaatgcagaccggacagtttacatcagctcccagtgctgttcgaatgattgcatcaaaagagggatttaggggtctctatgcaggataccggtccttccttttgcgagatttgccatttgatgctatacagttctgcatatatgagcagctttgcttggggtataaaaaagccgcgcgtagagagcttagtgatcctgagaacgctctaatcggtgcatttgctggtgctctgaccggagcagtcaccactccgcttgatgttattaagacaagattaatggttcagggatcagccaaacaatatcaaggaatcgttgactgtgttcaaacaattgtaagagaggaaggagctcctgctctcttaaagggtattgggccaagagtgttgtggataggtattggaggatcaatcttctttggtgtcctcgagagcactaagagaacacttgcacagagacgtcccaatacggttaaagaaaccaaagaagaataagtttctggccgcacaagaaaatgagtgtaaggtgacaatgtaacccctttgtgagttctatgtggtgtgagtttgtttaagtaccaattcaactttcattaaaaaaaaataaaaaaattagtgttc

SEQ ID NO: 74494 - protein, 163 aa, Arabidopsis thaliana; identical to SEQ ID NO: 38572
  peptide (1)..(163): Ceres Seq. ID no. 5677742

SEQ ID NO: 74495 - protein, 149 aa, Arabidopsis thaliana; identical to SEQ ID NO: 38573
  peptide (1)..(149): Ceres Seq. ID no. 5677743

SEQ ID NO: 74496 - protein, 91 aa, Arabidopsis thaliana
  peptide (1)..(91): Ceres Seq. ID no. 5677744
MAPLTLSVDVKSSSATSHDVSKRVMQSSQLKINKGFFASVNTQEDKPFDFFRTLFEGFIAGGTAGVVVETALYPIDTIKTRLQLVEVEKLF

SEQ ID NO: 74497 - DNA, 1111 bp, Arabidopsis thaliana
  misc_feature (1)..(1111): Ceres Seq. ID no. 5677751
  misc_feature (1)..(1111): Ortholog of  Ceres SEQ ID NO 14313413 as cited in SEQ ID NO 58766
  misc_feature (1)..(1111): Ortholog of  Ceres SEQ ID NO 15171109 as cited in SEQ ID NO 59576
ccaatcaaagcgtgacttcttcctcggtctttttcttgaggttccaatctttttgacttcatacaccatttcttttgcttacaacactttcagataaaagctatagattcagtattttgatccaacgtgtcatatattaacccttaagcaagattagtgaagtgacgagcctttaagatttgttattcttacaagcagcttgcagaagagagagagttaccagcaggaccagaggaaggaggatttgggatgtcatatgaccttctctatggaagagcgggtttcctttgggctgctctgttcctaaaccgatatctcggccaaggaactgttcctgaccatctcttatcacccattgttgcagccatcttagccggtgggcgagttggagctgcagatcatgaagcttgtcctctgttatacaggtttcacggaacgcgattttggggtgctgcgaatggattagctggaatcttgtatgtattgctgcattttccactatcggaagaggatgttaaagatgttcaagggacattgaggtatatgatgagtaataggtttccgaacagcggaaactacccgtgcagcgaagggaatccgagggataagctagtccaatgggctcatggagcaaccggcatggccattactttggctaaagcatctcaggtgtttcccaaggaaagggatttccgcgaagcagccattgaagcaggagaagtagtgtggaagagtggcttggtgaagaaggtaggtttagctgatggagttgctggtaatgcctacgctttcttatccctttatcgcttaaccggagatgttgtatatgaagagagagcaaaagcgtttgcgagttacttgtgccgtgatgcgatagagctcgtgaatatgacaagccaagaaacagaacatgattattcgctattccggggactagctggaccagtatgcctctggttcgatcttgtgtcgccggtagattctaagtttcctggttatgagatataatttaaaaccaggtaaccgtaggttcttttatgactatctctttgtgaaaggatcttaggttctccggtttattccactttctataatctattgaagtaacttg

SEQ ID NO: 74498 - protein, 252 aa, Arabidopsis thaliana; identical to SEQ ID NO: 45429
  peptide (1)..(252): Ceres Seq. ID no. 5677752

SEQ ID NO: 74499 - protein, 154 aa, Arabidopsis thaliana
  peptide (1)..(154): Ceres Seq. ID no. 5677753
MMSNRFPNSGNYPCSEGNPRDKLVQWAHGATGMAITLAKASQVFPKERDFREAAIEAGEVVWKSGLVKKVGLADGVAGNAYAFLSLYRLTGDVVYEERAKAFASYLCRDAIELVNMTSQETEHDYSLFRGLAGPVCLWFDLVSPVDSKFPGYEI

SEQ ID NO: 74500 - protein, 153 aa, Arabidopsis thaliana
  peptide (1)..(153): Ceres Seq. ID no. 5677754
MSNRFPNSGNYPCSEGNPRDKLVQWAHGATGMAITLAKASQVFPKERDFREAAIEAGEVVWKSGLVKKVGLADGVAGNAYAFLSLYRLTGDVVYEERAKAFASYLCRDAIELVNMTSQETEHDYSLFRGLAGPVCLWFDLVSPVDSKFPGYEI

SEQ ID NO: 74501 - DNA, 1162 bp, Arabidopsis thaliana
  misc_feature (1)..(1162): Ceres Seq. ID no. 5677763
  misc_feature (1)..(1162): Ortholog of  Ceres SEQ ID NO 13656147 as cited in SEQ ID NO 64422
  misc_feature (1)..(1162): Ortholog of  Ceres SEQ ID NO 13596496 as cited in SEQ ID NO 68639
ctataaagccgatccatagataaacgaggaccggccagaaatcgcttcaccattcccaaatctctcttccattttctccacacaaatttctcttcaatctccgataatggaaggaaccggcgttgtggcggtgtacggtaacggtgcgataacggaggcgaagaaatctcccttctccgtgaaggtcggtttggctcagatgctccgtggtggtgttatcatggatgtcgtcaacgccgagcaagctcgtatcgccgaggaggctggtgcttgcgccgtcatggctttggagcgtgttcctgctgatatccttgaagcaattggaatcgattacatcgatgagagcgaggttttgactcttgctgatgaagatcatcacatcaacaagcataatttccggatcccgttcgtttgcggttgccggaatctcggcgaggctctgaggaggatccgtgaaggtgcggcgatgattaggaccaaaggtgaagctggaaccggtaacattattgaagctgtgaggcatgtgaggtctgttaatggtgacattagggttttgcgaaacatggatgatgatgaggttttcactttcgctaagaaattagccgctccgtacgatctcgtgatgcagactaagcagcttggtcgtcttcctgtagtccaattcgccgccggtggagtggctactccggctgatgcagctctcatgatgcagcttggatgtgatggtgtctttgttggttctggtatcttcaagagcggtgacccagctcgtcgtgcacgtgccattgttcaggctgtgactcattacagtgaccctgagatgcttgtggaggtgagctgtgggcttggagaagccatggttgggatcaatctcaacgatgagaaggttgagaggttcgctaatcgctccgagtgatcaaagaaataaaaggtaaaatatctcagacgaaatggtttcagaattttctcagaccattttgcagtaatctctttgaaaagaagaagatgatgatattgttggtagtttgtatcctttgtgttttccttataatctttgatagtcttttgttattgtaactcgtaatccctttgcaagaacaagtttgtcagttataataatgtactactctcttgatcgatcagttggttttgaatctgatat

SEQ ID NO: 74502 - protein, 269 aa, Arabidopsis thaliana; identical to SEQ ID NO: 34893
  peptide (1)..(269): Ceres Seq. ID no. 5677764

SEQ ID NO: 74503 - protein, 238 aa, Arabidopsis thaliana; identical to SEQ ID NO: 34894
  peptide (1)..(238): Ceres Seq. ID no. 5677765

SEQ ID NO: 74504 - protein, 231 aa, Arabidopsis thaliana; identical to SEQ ID NO: 34895
  peptide (1)..(231): Ceres Seq. ID no. 5677766

SEQ ID NO: 74505 - DNA, 1145 bp, Arabidopsis thaliana
  misc_feature (1)..(1145): Ceres Seq. ID no. 5677814
  misc_feature (1)..(1145): Ortholog of  Ceres SEQ ID NO 14314434 as cited in SEQ ID NO 52401
  misc_feature (1)..(1145): Ortholog of  Ceres SEQ ID NO 14303939 as cited in SEQ ID NO 54286
  misc_feature (1)..(1145): Ortholog of  Ceres SEQ ID NO 14307760 as cited in SEQ ID NO 54741
  misc_feature (1)..(1145): Ortholog of  Ceres SEQ ID NO 14313391 as cited in SEQ ID NO 58556
  misc_feature (1)..(1145): Ortholog of  Ceres SEQ ID NO 14307540 as cited in SEQ ID NO 59670
  misc_feature (1)..(1145): Ortholog of  Ceres SEQ ID NO 15179003 as cited in SEQ ID NO 0
  misc_feature (1)..(1145): Ortholog of  Ceres SEQ ID NO 15179235 as cited in SEQ ID NO 0
ctttttctctttcacatctttctttctctcgcaaacccaaattctctcagcgccggtcaaatacttgtctctctctctctctctctttcactcttgtcttgtctccttcgaagctgtttgttctgtaagaaagatggaagcaggtggcgcgtacaatccacgcactgttgaagaggtgtttagggattttaagggtcgtagagctggcatgattaaggctttaaccactgatgttcaggagtttttccgactttgtgatcccgaaaaggagaacctttgcctttacggacatccaaatgagcactgggaagtgaatttgccagctgaagaggttcctcctgagctcccagagcctgtcttgggtatcaattttgccagagacgggatggcggaaaaggattggttgtcccttgttgctgtccacagtgatgcttggcttcttgctgttgctttcttttttggagccaggtttggatttgacaaagctgataggaagaggcttttcaatatggtgaatgacctcccaacaatctttgaggttgtagctggcactgctaagaaacaaggaaaagataagtcctctgtttccaacaacagcagcaacagatccaaatcaagctccaagcgaggatctgaatcccgtgccaagttctcaaagccggagccgaaagatgatgaggaggaggaagaggaaggtgtggaagaggaggatgaggatgagcaaggtgaaacacagtgtggagcatgtggtgagagctatgcagctgatgagttctggatttgctgtgacctctgtgagatgtggtttcatggaaagtgtgttaagataacaccagcaagagctgagcacatcaagcaatacaagtgcccttcttgcagcaacaaaagggctcgttcctaaatttgttgaccgctcgcttctgtgtatctacctttgcatatgatgatgaacagcttaactgtttggtttagatcagatttgtcatatggatttggtaatttaggaagacattttagttttttcattgttacattttggcgattgaagggataactctttgtttaggggtaatgatcttttgctctgttttatgtttgtttattaacattcttcaaactcaatcaaaagtattttggttagtctt

SEQ ID NO: 74506 - protein, 299 aa, Arabidopsis thaliana; identical to SEQ ID NO: 22035
  peptide (1)..(299): Ceres Seq. ID no. 5677815

SEQ ID NO: 74507 - protein, 255 aa, Arabidopsis thaliana; identical to SEQ ID NO: 22036
  peptide (1)..(255): Ceres Seq. ID no. 5677816

SEQ ID NO: 74508 - protein, 230 aa, Arabidopsis thaliana; identical to SEQ ID NO: 22037
  peptide (1)..(230): Ceres Seq. ID no. 5677817

SEQ ID NO: 74509 - DNA, 1442 bp, Arabidopsis thaliana
  misc_feature (1)..(1442): Ceres Seq. ID no. 5677827
  misc_feature (1)..(1442): Ortholog of  Ceres SEQ ID NO 14310524 as cited in SEQ ID NO 58840
  misc_feature (1)..(1442): Ortholog of  Ceres SEQ ID NO 15169541 as cited in SEQ ID NO 67500
aaaatatcaaaacacgagacagatttgattccatttttattactgttactatcatccaaacccttggtatttgtagccatgagtcttgtttcagatctcatcaaccttaacctctcagactccactgacaaaatcattgctgaatacatatgggttggtggttctggaatggacatgagaagcaaagccaggactctacctggaccagtgactgacccttcgcagctaccaaagtggaactatgatggttcaagcacaggccaagctcctggtgaagacagtgaagtcatcttatagttaataatctttctttcttgatcttaaatcagattcttctcattggtttttttttcgattcttgtttactaatcttttgtgttttgtacatctttgtttagccctcaagccatattcaaggatcctttccgtagaggaaacaacattcttgtcatgtgcgatgcgtacactcccgcgggtgaaccaatcccgactaacaaaagacacgctgcggctaaggtctttagcaaccctgatgttgcagctgaagtgccatggtatggtattgagcaagaatacactttactccagaaagatgtgaagtggcctgttggttggcctattggtggttatcccggccctcagggaccgtactattgcggtattggagcagacaaatcttttggcagagatgttgttgattctcactacaaggcctgcttatacgctgggatcaacattagtggcatcaatggagaagtcatgccgggtcagtgggagttccaggtcggtccagctgttggtatctcggctgctgatgaaatttgggtcgctcgttacattttggagaggatcacagagattgctggtgtagtggtatcttttgacccgaaaccgattcccggtgactggaacggtgctggtgctcactgcaactacagtaccaagtcaatgagggaagaaggcggttacgagatcatcaagaaagcaatcgataaattgggactgagacacaaagaacacattgctgcttacggtgaaggcaatgagcgtcgtctcacaggacaccacgagactgctgacatcaacactttcctttggggtgttgcgaaccgtggagcatcgatccgagtaggacgtgatacggagaaagaagggaaaggatactttgaggacaggaggccagcttcgaacatggatccttacattgtcacttccatgattgcagagactacaatcctctggaatccttgatgatcatcagatcaagaaaaaatcttgaatgtcactcaaatttgtgtttcttgcaagattcaaagtttgtgttctctatcaagcaatgtcttaggataagtcaaagatttgctctgcttattctgctttttatttacttcacatcctattgaaaacatttctgtgtattatttatgaataaacattatctt

SEQ ID NO: 74510 - protein, 266 aa, Arabidopsis thaliana
  peptide (1)..(266): Ceres Seq. ID no. 5677828
MCDAYTPAGEPIPTNKRHAAAKVFSNPDVAAEVPWYGIEQEYTLLQKDVKWPVGWPIGGYPGPQGPYYCGIGADKSFGRDVVDSHYKACLYAGINISGINGEVMPGQWEFQVGPAVGISAADEIWVARYILERITEIAGVVVSFDPKPIPGDWNGAGAHCNYSTKSMREEGGYEIIKKAIDKLGLRHKEHIAAYGEGNERRLTGHHETADINTFLWGVANRGASIRVGRDTEKEGKGYFEDRRPASNMDPYIVTSMIAETTILWNP

SEQ ID NO: 74511 - protein, 163 aa, Arabidopsis thaliana; identical to SEQ ID NO: 41888
  peptide (1)..(163): Ceres Seq. ID no. 5677829

SEQ ID NO: 74512 - DNA, 613 bp, Arabidopsis thaliana
  misc_feature (1)..(613): Ceres Seq. ID no. 5677846
  misc_feature (1)..(613): Ortholog of  Ceres SEQ ID NO 13595613 as cited in SEQ ID NO 59866
aataataatattcgagtagaagaagaaagatccagacaaaagcttaagcaagacctctctgtcttcgtctctctctctctctctctttgtctccgccatgacaagctcttcatctccttcacgcaaggcgttaagcaagatcgcgtgtaataggttacaaaaggagttatcagagtggcaagtaaatccaccgactgggtttaagcacagagttactgataatcttcaaaaatgggtaattgaggtaacaggagcacctggtacgctttacgctaatgaaacttataatcttcaggttgagtttcctcaacattatcctatggaagctcctcaggtgatttttgttccaccagcaccgttacatcctcatatttacagcaatggacatatttgtttagatattctgtatgactcatggtctccagcaatgacagtgagttcagtctgcatcagcatcctctcaatgctatcaagttcccccgaaaagcaacgccccacttttttttctgtaacggatcattatgtataaatgacatctgaaatgtttcagtgtctgaattaacaccttgtgcttttgtcctttctgaagtgaaaaaccatggagagtttaggc

SEQ ID NO: 74513 - protein, 143 aa, Arabidopsis thaliana
  peptide (1)..(143): Ceres Seq. ID no. 5677847
MTSSSSPSRKALSKIACNRLQKELSEWQVNPPTGFKHRVTDNLQKWVIEVTGAPGTLYANETYNLQVEFPQHYPMEAPQVIFVPPAPLHPHIYSNGHICLDILYDSWSPAMTVSSVCISILSMLSSSPEKQRPTFFSVTDHYV

SEQ ID NO: 74514 - DNA, 703 bp, Arabidopsis thaliana
  misc_feature (1)..(703): Ceres Seq. ID no. 5677940
  misc_feature (1)..(703): Ortholog of  Ceres SEQ ID NO 12598353 as cited in SEQ ID NO 62205
aattaacagtgctttaaatctaagaaccctaattcaatactccacaaagggggtttcttcttcccaaggtttcagattctctccgtatccaaagttttgttttgttttttgtttgaaagcgaggatgaaagaatcgaaatcagccaagctgaatcagctacaacaacaagagaatcaccagaatgctcacttgtctccatcgaaattagcgaaattgttcgatcccgatgcttcttgggacaaggatcaattaggagatgtgttacattggattcgacaagtggtgggattgatctctggattgttatggggctctattccacttgttggaggcatttggatcattctgtttttggcgatatcctctgggatagtttatggttactacgcaatgattctcaaggttgatgaagaagatttcggaggccacgcagctttactccaagagggtctctttgcgtcacttactctctttttgctcgcatggattcttgtctatagcttggcacacttctgaaaaaaaagctgagcaacattcttttcactcagcagcaaaggcattggaactttggaacgaatctttttgttcttttgtttgtttttgtaaactgtctgaagataaggctacaagagacaaaacgttatagtaacaatttttatgaatcttttgaatgttacaaaagctttctatagtatcattttt

SEQ ID NO: 74515 - protein, 171 aa, Arabidopsis thaliana; identical to SEQ ID NO: 36540
  peptide (1)..(171): Ceres Seq. ID no. 5677941

SEQ ID NO: 74516 - protein, 130 aa, Arabidopsis thaliana; identical to SEQ ID NO: 36541
  peptide (1)..(130): Ceres Seq. ID no. 5677942

SEQ ID NO: 74517 - DNA, 1276 bp, Arabidopsis thaliana
  misc_feature (1)..(1276): Ceres Seq. ID no. 5677982
  misc_feature (1)..(1276): Ortholog of  Ceres SEQ ID NO 12781936 as cited in SEQ ID NO 56320
  misc_feature (1)..(1276): Ortholog of  Ceres SEQ ID NO 13659489 as cited in SEQ ID NO 66986
acgacgacggaggaggagaagcaaacccagaaaccttaaaaattcagaaaaagggacgaccttttttccgatcttatcgatttttgaatgagattagaagaacctatcttctaagtttttctttgatatctttttctctttgatcgatggatgagtcgttcgctaatctacaatcaagccatttgcttggttcagttccggctgtgatcagcgacgacaagagaagcacaaatgtaccaatagcaagcgtcaatgaaggcccttctgcaagcatgcaaatatttccaccgaatctaggaaacaatacaaagggttatcaaactcttgagagcccaacagaaggaccagcacaacagccatcaaacaactggaagggcttttttaatgtctactcatatacccaatacttcgacgtggacacggacgttgttttgaacagattaatgagctctttatatcctactagtggagattttttcaacaagattgatgcaaaccctgatttggtatggacttgtctggatctgcactacgcttgtgtttgtgcttgcttctctcggaaattgtgctacatatctcgtgaagaaacgaaccgacagtaatgctccttggatctttgatgtgaactatatgaatttggcagcatctataatatatggatatgcaataattgtgcctctgggattttattttgcactccgttatatggggtccaaagctgatcttctaagattctggtgcctttggggatactctctcttcattttcgttccaacctctcttccattgcttattccagtagagtttctgagatgggtgattatactcttagctggtagtgcatcatcgtgttttgttgccctgaatctacggtcttacctcgagacgaacaatgatatcacggttgtaatggctgcagcatttggtctgcaaatggttctttcaatcttcatcaaggtctggttctttccttaatctccatgagacggtcaacaccagacaaaacatatatatgtaaaaacctttagattttgatgtgctgcggtagaactaagaatgtcgttaccagaaaatgaaacccacaaagtagaagaaggaacatatccgctaaatcattcggtttcgtttttactggcggattttcatcgttgcttgtaacgattgtgttttttcattttttggttttgtttgctaccacttattttgcttatggagtaaaaatatataaaagaaaaaaaggaagttttcaagatttattgcaatttactctcttttg

SEQ ID NO: 74518 - protein, 161 aa, Arabidopsis thaliana
  peptide (1)..(161): Ceres Seq. ID no. 5677983
MQTLIWYGLVWICTTLVFVLASLGNCATYLVKKRTDSNAPWIFDVNYMNLAASIIYGYAIIVPLGFYFALRYMGSKADLLRFWCLWGYSLFIFVPTSLPLLIPVEFLRWVIILLAGSASSCFVALNLRSYLETNNDITVVMAAAFGLQMVLSIFIKVWFFP

SEQ ID NO: 74519 - protein, 151 aa, Arabidopsis thaliana
  peptide (1)..(151): Ceres Seq. ID no. 5677984
MDESFANLQSSHLLGSVPAVISDDKRSTNVPIASVNEGPSASMQIFPPNLGNNTKGYQTLESPTEGPAQQPSNNWKGFFNVYSYTQYFDVDTDVVLNRLMSSLYPTSGDFFNKIDANPDLVWTCLDLHYACVCACFSRKLCYISREETNRQ

SEQ ID NO: 74520 - protein, 114 aa, Arabidopsis thaliana
  peptide (1)..(114): Ceres Seq. ID no. 5677985
MNLAASIIYGYAIIVPLGFYFALRYMGSKADLLRFWCLWGYSLFIFVPTSLPLLIPVEFLRWVIILLAGSASSCFVALNLRSYLETNNDITVVMAAAFGLQMVLSIFIKVWFFP

SEQ ID NO: 74521 - DNA, 787 bp, Arabidopsis thaliana
  misc_feature (1)..(787): Ceres Seq. ID no. 5678016
  misc_feature (1)..(787): Ortholog of  Ceres SEQ ID NO 13662054 as cited in SEQ ID NO 61539
  misc_feature (1)..(787): Ortholog of  Ceres SEQ ID NO 13663665 as cited in SEQ ID NO 67230
  misc_feature (1)..(787): Ortholog of  Ceres SEQ ID NO 15174315 as cited in SEQ ID NO 0
acacatccgacggggaaaaagagttccgacaagaatcgagaactgaaagatttgtcatttgtctctcaaatatctgtggagagaagagaaattggaataaagaagacagtgttgtgagagagagagagagagagagagatgagttcgtctctacctctgaggctacttcttcctcttacaacttctctgatttctcctcctcctcctcctccagattctttccatgctccttcgtcgttcagatcgaaaaaccctaatttcaaacgccgattgtcttcttcttcctgtttaaccaaaaatcatatatacacatcaggtgcatctggaactaatgctgcagtcatcagaggtgcattgagagcagagagaccagagctgcttacagtaattctaccccaaagtttgaaaaaacaacctcctgagagccaagaactattgtctaaagtacaaaacgtggtagaaaagccacataatgaccatttgccattgttagaagccagcaggttgtgtaatatggacatcatatcacaagttcaacaagtgatctgcttcgcgtttcatgacagtaagcttcttatggagacatgtcaagaagccaaaaatctgcgcaagattgtcactctcttctacctcgattgattcacattcactctttattttcttctcgttacaaaacagagaagataatcctccttgtaaattatgaatcttgattaaacaaacacacacaaccacaattatattcttttgtctaaattttgatacacatcagtgctatttttatagg

SEQ ID NO: 74522 - protein, 166 aa, Arabidopsis thaliana
  peptide (1)..(166): Ceres Seq. ID no. 5678017
MSSSLPLRLLLPLTTSLISPPPPPPDSFHAPSSFRSKNPNFKRRLSSSSCLTKNHIYTSGASGTNAAVIRGALRAERPELLTVILPQSLKKQPPESQELLSKVQNVVEKPHNDHLPLLEASRLCNMDIISQVQQVICFAFHDSKLLMETCQEAKNLRKIVTLFYLD

SEQ ID NO: 74523 - protein, 84 aa, Arabidopsis thaliana
  peptide (1)..(84): Ceres Seq. ID no. 5678018
TSDGEKEFRQESRTERFVICLSNICGEKRNWNKEDSVVRERERERDEFVSTSEATSSSYNFSDFSSSSSSRFFPCSFVVQIEKP

SEQ ID NO: 74524 - DNA, 1315 bp, Arabidopsis thaliana
  misc_feature (1)..(1315): Ceres Seq. ID no. 5678092
  misc_feature (1)..(1315): Ortholog of  Ceres SEQ ID NO 14313413 as cited in SEQ ID NO 58766
  misc_feature (1)..(1315): Ortholog of  Ceres SEQ ID NO 15171109 as cited in SEQ ID NO 59576
agatatgggagaacggtttttccgaaatgagatgccggagtttgtaccggaagatttatccggagaagaagaaactgttaccgaatgtaaagattcgttgacgaaactgctatcacttccgtacaaatcattctcagagaagcttcacagatatgctctaagcatcaaagataaagtagtctgggagacatgggaacgatctggaaaacgtgttcgagattataacttgtatactggagttcttgggacagcttatctcttgttcaaatcttatcaggttactagaaatgaagatgatcttaagctatgcttagagaatgttgaagcttgtgatgtagcttcaagagattctgagcgagtgacatttatatgtggctatgctggtgtatgtgctcttggtgctgttgcagcgaagtgtttaggtgatgaccagttatatgatcgttacttagcccgtttccgaggggcttcctagtgacttgccatatgagttgctatatggtagagcaggatacttgtgggcgtgtttgttcttgaataagcatattggtcaggagagtatatcatctgaacgaatgagatcagtggttgaggaaatcttcagggcaggaagacaactcgggaataaaggaacttgtccattgatgtatgagtggcacgggaagaggtactggggggctgcacacggtttagctgggatcatgaatgttttgatgcatacggaacttgaaccagatgaaatcaaagatgtcaaaggtacactaagctatatgatacaaaaccgttttcctagcgggaattacctatctagtgaaggaagcaaatcagatcgccttgttcactggtgtcacggtgctcctggtgttgctctcacacttgtaaaggcagctcaggtttataacactaaggaatttgtagaggcagcaatggaggcaggagaagttgtgtggagccgtggattgcttaaacgagtaggaatctgtcacggtatcagcggaaacacatacgtgtttctttctctataccggttaacaagaaacccaaagtatttgtaccgcgctaaagctttcgcgtctttcctactcgataaatcagagaagttaatctcagaaggtcaaatgcatggaggagatagacccttctctctctttgaaggtatcggaggaatggcctacatgttactcgacatgaatgatccaacacaagctctgtttccaggttatgaactctaaaatgtataaaacttacactgtaacaataagcttagatactgaaatgtagaatagctgtctatattaataagattttatacatc

SEQ ID NO: 74525 - protein, 218 aa, Arabidopsis thaliana; identical to SEQ ID NO: 41440
  peptide (1)..(218): Ceres Seq. ID no. 5678093

SEQ ID NO: 74526 - protein, 195 aa, Arabidopsis thaliana; identical to SEQ ID NO: 41441
  peptide (1)..(195): Ceres Seq. ID no. 5678094

SEQ ID NO: 74527 - protein, 176 aa, Arabidopsis thaliana; identical to SEQ ID NO: 41442
  peptide (1)..(176): Ceres Seq. ID no. 5678095

SEQ ID NO: 74528 - DNA, 1654 bp, Arabidopsis thaliana
  misc_feature (1)..(1654): Ceres Seq. ID no. 5678100
  misc_feature (1)..(1654): Ortholog of  Ceres SEQ ID NO 13658707 as cited in SEQ ID NO 66286
  misc_feature (1)..(1654): Ortholog of  Ceres SEQ ID NO 13654528 as cited in SEQ ID NO 68080
ctttttgcttctctcttaactaccattacattacatacctcttctttctaggtggtaacaatcttgatactggcattaaccagtgttattcccatttacgcaaacgttcacggcgccgggaaaatatgcgacgaacttggccggcgatcattgagtacaagaccacacagtgtctccattacagattttggagctgttggagatggcaaaacgctcaacactcttgcgtttcaaaacgccgttttctatcttatgtctttcgccgacaaaggtggggcccagctctatgttccgccgggacattggctcaccgggagttttagcctcaccagccacctcactctctttctcgaaaacggcgccgttatagtcgcttctcaggatccatcgcattgggaagtggttgatcctttaccttcatacggaaggggaattgatttgcctgggaagcgatacaagagtttgatcaacggtaacaagctacatgatgttgttgtaacaggtgataatggaactatagatggtcaaggcttggtttggtgggatcggtttacttctcattccttaaagtataaccgtcctcacctcatcgagtttctttcttctgaaaatgtaattgtctccaatcttacgttcttgaatgctcctgcttattcaatctattcaatctactctagccatgtatatattcataagatattggcccattcttctcctaaatctccttatacaatcggtattgtaccagattcttctgattacgtctgcatccaaaactctaccattaacgtggggtatgacgcgatttccctcaaaagcggttgggatgaatatggaattgcctattctcgtcccactgaaaatgttcatataagaaatgtgtaccttcgaggagcttctggttcctctatctcctttggcagtgaaatgtctggtggaatatctgatgtcgtggttgataacgctcatatacactactcgttaaccggcattgcctttagaaccacaaaaggcagaggtggttatatcaaagagatcgatatttcaaacatcgatatgttgagaataggtactgccattgttgctaatggtagctttggatctcaccctgatgataaatatgatgtgaatgctctcccacttgtgagtcacatcagattaagcaacatttctggagagaacattggcattgcggggaaattgtttgggatcaaagaatctccatttagctcagtgactttgtcgaatgtttctttgtcgatgagctcaggttcttctgtttcttggcaatgctcctacgtttacgggtcctcggagtcagtcattcctgaaccgtgtcccgagctgaagagagatgctgatgcttacggtagagctgcagtctagtgaaacagactgcaaaagaaaaaagaaaaaaaaagcaagaaacatttcttgggattctttgataggattcaattcatcaatcatttcatattttgtggagttagagaaggtcagattctttcctcaagtaaaccacattgtctttagatcatacatgttcctttcggttattctggtttcctatttttatgttgtttgcatattctgagataagaaatctgtacaggttcatttcttcattcatgtgtaaacaaagaaattttgtttc

SEQ ID NO: 74529 - protein, 377 aa, Arabidopsis thaliana; identical to SEQ ID NO: 48553
  peptide (1)..(377): Ceres Seq. ID no. 5678101

SEQ ID NO: 74530 - DNA, 1131 bp, Arabidopsis thaliana
  misc_feature (1)..(1131): Ceres Seq. ID no. 5678106
  misc_feature (1)..(1131): Ortholog of  Ceres SEQ ID NO 14311671 as cited in SEQ ID NO 51251
  misc_feature (1)..(1131): Ortholog of  Ceres SEQ ID NO 14307355 as cited in SEQ ID NO 54610
  misc_feature (1)..(1131): Ortholog of  Ceres SEQ ID NO 13594298 as cited in SEQ ID NO 57803
  misc_feature (1)..(1131): Ortholog of  Ceres SEQ ID NO 13503476 as cited in SEQ ID NO 61978
  misc_feature (1)..(1131): Ortholog of  Ceres SEQ ID NO 12578438 as cited in SEQ ID NO 62201
  misc_feature (1)..(1131): Ortholog of  Ceres SEQ ID NO 12617675 as cited in SEQ ID NO 64656
acattcctcaccaaaccctctccaaaacacacccacacgtacgcacacacacaaagacaatgtctcctttcaaaatattcttcttcacgactcttctcgtggcggcgttttcagtgtcggctgctgatttcaacactgacgtcaacgtagcttggggaaatggccgtgggaagatactcaacaacggccagcttcttactctctccttagacaaatcctctggttccggttttcaatccaaaacagagtatttgtttggaaagattgatatgcagattaagcttgttcctggtaactctgcaggaacagtcacaactttttacgtgagtttatatattttctttaggagttttaagtgattttggatttggtttttatattgagacttcatcttgacatttttgtgtatttgcagctaaaatccgaaggatccacttgggatgagattgattttgagttcttgggtaatatgagtggagatccttatactttacacactaatgtttacactcaaggtaaaggtgacaaagagcaacaattccatctctggttcgacccaaccgccaatttccacacttactcaatcctctggaaccctcaaagaatcatattgaccgtcgatgacacacccattagagagtttaaaaactatgagtctctcggtgtcttgtttccaaagaacaagccgatgaggatgtacgcgagtttatggaacgcagacgattgggcaacaagaggcggtcttgttaaaactgattggtctaaagctccattcatggcttcttacagaaacattaagattgactcgaaaccaaactccaattggtacactcaagaaatggattcaacaagccaagctagactcaaatgggttcagaagaattacatgatctacaattattgtactgaccataggaggtttccacagggagctcctaaggaatgcacaacaagctcatagaatctcaaattatattctatttatttatctacacttcctctctttcttttatgtgaaaattgtgaatgctctgtttatagcttgtctattatgtccgagaatttctttttctgtttttgattcttttcgttgtatatctttgtccaataaaggaaatgatgtgtctttac

SEQ ID NO: 74531 - protein, 163 aa, Arabidopsis thaliana; identical to SEQ ID NO: 23244
  peptide (1)..(163): Ceres Seq. ID no. 5678107

SEQ ID NO: 74532 - protein, 118 aa, Arabidopsis thaliana; identical to SEQ ID NO: 23245
  peptide (1)..(118): Ceres Seq. ID no. 5678108

SEQ ID NO: 74533 - protein, 99 aa, Arabidopsis thaliana; identical to SEQ ID NO: 23246
  peptide (1)..(99): Ceres Seq. ID no. 5678109

SEQ ID NO: 74534 - DNA, 1261 bp, Arabidopsis thaliana
  misc_feature (1)..(1261): Ceres Seq. ID no. 5678122
  misc_feature (1)..(1261): Ortholog of  Ceres SEQ ID NO 13596338 as cited in SEQ ID NO 68005
gattttgtttgatgatcgttgggttttgaaagaagagcaatgagcaattatgcagccggactcggtaagcctggctcaggtaaaaggagaatcagagatcttttaaatcaacctgataaccgagtctgcgctgattgtggcgcttctgatcctaaatgggcatcagcaaatatcggagtattcatttgcttaaaatgttgcggtgtgcacaggagcctcggcactcatatttcaaaggttttgtctgtgacactagatgaatggtcagatgaggaagtcgattccatgattgaaattggaggaaatgcgtctgctaattcaatttatgaagcttttttacctgacacgtgctctaagcctggacctgatgttaatcatgaccagcgtatgagattcattagggcaaaatatgaactgcaagagtttctgaaaccaagcttgcggattacatccgggaaaggctcaacaaagagttcagcttttcttacatcaagtctttctagaaagatcatggatagttttcgcacaaattcatcatcgcagacgatgtttcaggaaggaatggtagagtttattggattgttgaaggtgactattaagaagggaactaacttagcaatcagagacatgatgtcaagtgatccatatgttgtgttgaatctagggaagcaaaaacttcagacaactgttatgaatagtaatttgaacccggtatggaatcaagaactcatgctgtctgttcctgagagctatggccctgtgaaattgcaagtgtatgattatgatacattttctgctgatgacataatgggagaagcagatattgatatacaacctttgataacatctgcaatggcttttggggatccagaaatgtttggggatatgcagattgggaaatggctaaaatcgcatgataacccattaatagatgacagtatcattaacattgttgatgggaaagtgaaacaggaggttcagatcaagcttcagaatgtagagtctggagaattagagctagaaatggaatggctgccacttgaccaataagtgtcatataggtctcataacctttataaatgtactgattgatttaattctttgttttttttttttctctccatttgttggaaattttcaaaaatctctttgcatttttttcctcatttcagaggtaaatgtattttgatgtttgtataaaccaatggattactatatgatgttttgattgatggaaaaagggtgaaatatccacttatgt

SEQ ID NO: 74535 - protein, 336 aa, Arabidopsis thaliana; identical to SEQ ID NO: 40769
  peptide (1)..(336): Ceres Seq. ID no. 5678123

SEQ ID NO: 74536 - protein, 254 aa, Arabidopsis thaliana; identical to SEQ ID NO: 40770
  peptide (1)..(254): Ceres Seq. ID no. 5678124

SEQ ID NO: 74537 - protein, 220 aa, Arabidopsis thaliana; identical to SEQ ID NO: 40771
  peptide (1)..(220): Ceres Seq. ID no. 5678125

SEQ ID NO: 74538 - DNA, 1274 bp, Arabidopsis thaliana
  misc_feature (1)..(1274): Ceres Seq. ID no. 5678146
  misc_feature (1)..(1274): Ortholog of  Ceres SEQ ID NO 12609528 as cited in SEQ ID NO 51902
  misc_feature (1)..(1274): Ortholog of  Ceres SEQ ID NO 12625248 as cited in SEQ ID NO 68797
ctcgaaatctgaatccagagattaaacaaaaattggtattgcgaatgatcgattcttcttcctctaaactctgattcctgaacggacttgctttgacacagcagaccgtaaatcgggatgggtgctcctaagcagaaatggactcaagaagaagagtcagctttaaagtctggagttataaagcatggacctggtaaatggcgcacaattctcaaagatcctgaatttagcggagtcttgtacctgcgttccaatgttgatcttaaggacaaatggagaaacatgagtgtcatggcaaatggctggggatcgcgcgaaaagtctaggttagctgttaaaaggacgttctcccttcctaaacaggaagagaactcactagccctaaccaattctttgcaaagtgatgaagaaaatgtggatgcgacctctggactccaagtttcttctaatcctcctccaaggagacctaatgtaaggttggatagccttataatggaagcaatagctaccctgaaagaacctggtggctgtaacaaaacaacaattggtgcctacattgaggatcaatatcatgctccaccagacttcaaacgcttgttgtctaccaagctaaagtacttgacatcttgcgggaaacttgtgaaggttaaacgtaagtacagaattccaaactccactcccttgtcttcccacaggagaaaaggtctgggggtgtttggaggaaaacagaggacttcttctttgccttcacctaaaacagacatagatgaagtgaattttcagacaaggtcacagattgatacagagatagccagaatgaagagtatgaacgtacatgaggcggcagcagttgcagcacaggcagtagcagaggcagaagctgccatggcagaggctgaggaagctgcaaaggaagcggaggcagcagaagccgaagcagaagcagctcaagctttcgctgaggaagcttcaaagacattgaaaggaagaaacatctgcaaaatgatgatccgtgcctgaggtaatggaaagcgagagaagaaggagactaaatgtgaagagagagtagagagaagcctagtgtttgtgttgatcattctctttacttgggaagttgttttttagtagtaagcaatcaaatatgtttgtcagtatgtcgtcgctctgactcttttgattcctgcacaacttttgggaaaaaatgttttatttggctcttctcactctccaatatacatacaactatcgttagtaatgtgtataatttatagacc

SEQ ID NO: 74539 - protein, 300 aa, Arabidopsis thaliana
  peptide (1)..(300): Ceres Seq. ID no. 5678147
MGAPKQKWTQEEESALKSGVIKHGPGKWRTILKDPEFSGVLYLRSNVDLKDKWRNMSVMANGWGSREKSRLAVKRTFSLPKQEENSLALTNSLQSDEENVDATSGLQVSSNPPPRRPNVRLDSLIMEAIATLKEPGGCNKTTIGAYIEDQYHAPPDFKRLLSTKLKYLTSCGKLVKVKRKYRIPNSTPLSSHRRKGLGVFGGKQRTSSLPSPKTDIDEVNFQTRSQIDTEIARMKSMNVHEAAAVAAQAVAEAEAAMAEAEEAAKEAEAAEAEAEAAQAFAEEASKTLKGRNICKMMIRA

SEQ ID NO: 74540 - protein, 245 aa, Arabidopsis thaliana
  peptide (1)..(245): Ceres Seq. ID no. 5678148
MSVMANGWGSREKSRLAVKRTFSLPKQEENSLALTNSLQSDEENVDATSGLQVSSNPPPRRPNVRLDSLIMEAIATLKEPGGCNKTTIGAYIEDQYHAPPDFKRLLSTKLKYLTSCGKLVKVKRKYRIPNSTPLSSHRRKGLGVFGGKQRTSSLPSPKTDIDEVNFQTRSQIDTEIARMKSMNVHEAAAVAAQAVAEAEAAMAEAEEAAKEAEAAEAEAEAAQAFAEEASKTLKGRNICKMMIRA

SEQ ID NO: 74541 - protein, 242 aa, Arabidopsis thaliana
  peptide (1)..(242): Ceres Seq. ID no. 5678149
MANGWGSREKSRLAVKRTFSLPKQEENSLALTNSLQSDEENVDATSGLQVSSNPPPRRPNVRLDSLIMEAIATLKEPGGCNKTTIGAYIEDQYHAPPDFKRLLSTKLKYLTSCGKLVKVKRKYRIPNSTPLSSHRRKGLGVFGGKQRTSSLPSPKTDIDEVNFQTRSQIDTEIARMKSMNVHEAAAVAAQAVAEAEAAMAEAEEAAKEAEAAEAEAEAAQAFAEEASKTLKGRNICKMMIRA

SEQ ID NO: 74542 - DNA, 1444 bp, Arabidopsis thaliana
  misc_feature (1)..(1444): Ceres Seq. ID no. 5678166
  misc_feature (1)..(1444): Ortholog of  Ceres SEQ ID NO 15179482 as cited in SEQ ID NO 0
atcttcaatttggacttccaacgccgacaccgtttaactccgatggttcccccgccgtctaatccgcagcaggttcagcagttcctctcctctgccctctcccagcgcggcccatcttcagtcccctacgaagagtccaacaagtggttgatccggcaacatctacttaacctaatctcttcttacccttccttagagcccgctccgtcaacctccttcaagcagatggtacgattccgatgccttttcatggagtcacctataacatacctgtgattatctggctcctcgagtcatatcctcgtcatcctccttgcgtctatgtgaatcccaccgctgatatgatcatcaagcgacctcacgcacatgtcactccttctggtctcgtttctcttccgtaccttcagaattgggtctaccctagctccaatctcgtagatctcgtctccgatctcagcgctgcttttgctcgtgatccgcctctttattctcgacgccgtcctcagccaccgccaccgtctcctcctacggtatacgattcgtctctgtcacgacctccttcggctgatcagtcattgcctagaccgttcccgccatcaccttacggcggaggagtaagtagggtgcaagtgcagcatgttcaccaccagcagcaatctgatgatgcggcggaggttttcaagagaaatgcgattaataagatggtggagatggttcatagcgatttggtttcgatgaggagagccagagaagctgaagcagaggagctgctgagcttgcaagctgggctgaagagaagagaggatgagcttaatatagggttgaaagagatggttgaggagaaagaaacacttgaacaacaattacagattatctccatgaacactgatattctagactcgtgggttagagagaaccaaggcaaaaccaagaatttagttgatttggatgtggataatgcttttgaatgtggtgacacactctctaagcagatgttagagtgtactgctttggatttagccattgaagatgctatttattccttggataagtcgtttcaagatggtgttgttccctttgatcagtatttgaggaatgtgaggttgttgtcgagagaacagttcttccaccgagccacgggttctaaagtcagggcggcacaaatggaggttcaggttgcagccatcgcaggtaggttacattcatgaatgaaattcagtgtttttgtttgcgggatactgtgtcacacaatgctggtttatatagtctgagattagcatctttgaggagtatttctgtggctatgcgtgtgatgatggttcctctttaagattgaattaaatgtctatagactatatatacacgtacactgttgtgcacatacatatttgaatggatcagggcctgagaatcgtctccttttgtgatctatgactactttttt

SEQ ID NO: 74543 - protein, 322 aa, Arabidopsis thaliana; identical to SEQ ID NO: 40789
  peptide (1)..(322): Ceres Seq. ID no. 5678167

SEQ ID NO: 74544 - protein, 288 aa, Arabidopsis thaliana; identical to SEQ ID NO: 40790
  peptide (1)..(288): Ceres Seq. ID no. 5678168

SEQ ID NO: 74545 - protein, 168 aa, Arabidopsis thaliana; identical to SEQ ID NO: 40791
  peptide (1)..(168): Ceres Seq. ID no. 5678169

SEQ ID NO: 74546 - DNA, 700 bp, Arabidopsis thaliana
  misc_feature (1)..(700): Ceres Seq. ID no. 5678197
  misc_feature (1)..(700): Ortholog of  Ceres SEQ ID NO 12626708 as cited in SEQ ID NO 67104
gtgccgctttgttcctaaacgattttctgtctgttctctctttgctctctcgccctctcttgctcttctgggttcgtcttcctcggctagggtttatcagtggtttgtcaatggaggcttcatcatctcaaccatccgattcttctgatcaaactgcttccaagttcctttctgacctcccgtctcgaggtttcttgtcttctaccgtcgtctcttccaatccgggaagcttgcgggtctacatttgtgagcatgacacatctcccccagaaggacagcttatcaaaacaaaccagcaaaatatactaatcagatctctcttgttaaagaagcaaaaaggcgaatctagttctaaagactcaaaaggaactgctgaagatggtcctaaaaagagggctgcaaatagagctctggacgacagaagctcagctaaaagagctgctaatgcatctagacaagaaggatcaagcagtcgcacaggcgaaagagactttcagtctttgaccgttgagaagctccgcgccatgctcaaggagaagggccttccaacaaaaggaagaaaggatgagctcattgcgcgtctgaagagtgccaactgaaatgaagttgagaagggtgctctggtgaatatatgtatctttagaggtttcccaaataggagagaattgttgttgttcttgatcaaatacaaatccttttg

SEQ ID NO: 74547 - protein, 198 aa, Arabidopsis thaliana; identical to SEQ ID NO: 37026
  peptide (1)..(198): Ceres Seq. ID no. 5678198

SEQ ID NO: 74548 - protein, 162 aa, Arabidopsis thaliana; identical to SEQ ID NO: 37027
  peptide (1)..(162): Ceres Seq. ID no. 5678199

SEQ ID NO: 74549 - DNA, 1418 bp, Arabidopsis thaliana
  misc_feature (1)..(1418): Ceres Seq. ID no. 5678239
  misc_feature (1)..(1418): Ortholog of  Ceres SEQ ID NO 13595351 as cited in SEQ ID NO 55934
  misc_feature (1)..(1418): Ortholog of  Ceres SEQ ID NO 13639645 as cited in SEQ ID NO 57488
ataggactcgacaaatagaagaagcagattcgttgctaacgaagtaaaggatcttacttttttagtctttgctttagaaataacttataactacaagtcagagaggggccgagtaaatcggaaagatgacggcgccgatgatcctgaccggaagtggatcggcggcggagagagacgctcggatggcgcacactgctatggcgtttgttcagctctttaatggtggataccatgtgattactaaagtagctcttaatgttggagtcaaccagcttgtcttctgtgtatgccgtgatcttcttgctctctctattctcgctcctcttgcttacttccgcgaaagaaagatcagaactccaatgaataaaagccttctcttgtcattcttctttctgggcttagcaggggtatttgggaaccagttgttatttcttatcggtcttacatacacaaatcccacttatgctgctgccattcaaccatccatcccggtcttcacctttctcttggctgtcatgatgggtacagaaagagtgaatttgttgagaatcgaaggtcaaactaaggttggaggcacacttgtgtgtgttatgggtgctgtcttcatggttgtatttcgaggtccggccttgttaggagataaagatgcagactttgcgatgaacaatgaaatcagtgctaaaggtcaacctgagcctactggttggttagtctctggttttctcgatcttggatttgagcaatggcacattggagttttatgcttgattggaaactgcatgtgtatggctacttttcttgccattcaggcgccacttttgaagaagtatccggcaaatctttctgttgctgcattatcatacttctttggcacagtactaatgtgcacaacagctttctttatggtaaaggagccattggattggaagctaacacaatctgaggttcttgcagttatatatgcaggagttatcgcatcagcactaaactatggactcttgacttggtccaataagattattggtcctgccttggttgctctctacaatcctcttcaacccgctgcatcagctttcctatcgagaatctttctcggtagccccatttatctcggaagcgttgtgggtggattcttcatcattctaggactctatatggtcacttgggcatcgtttagagagcgaaaaacagcggtttccgggattgggattgcgccccatggtctaaaaacctcagagcctctgatatttaatgggacagttaacagactaggacagttgttttctggattacccagttcctctgtgaaatctgcagactaaaaagataccaaaaagttaagattcagacgagatcccattttacaacagctataactttttgttaactttcatctcttattaatatcttcttcgatt

SEQ ID NO: 74550 - protein, 398 aa, Arabidopsis thaliana; identical to SEQ ID NO: 23538
  peptide (1)..(398): Ceres Seq. ID no. 5678240

SEQ ID NO: 74551 - protein, 394 aa, Arabidopsis thaliana; identical to SEQ ID NO: 23539
  peptide (1)..(394): Ceres Seq. ID no. 5678241

SEQ ID NO: 74552 - protein, 379 aa, Arabidopsis thaliana; identical to SEQ ID NO: 23540
  peptide (1)..(379): Ceres Seq. ID no. 5678242

SEQ ID NO: 74553 - DNA, 732 bp, Arabidopsis thaliana
  misc_feature (1)..(732): Ceres Seq. ID no. 5678263
  misc_feature (1)..(732): Ortholog of  Ceres SEQ ID NO 13647648 as cited in SEQ ID NO 20346
actttttcaacttactttatcgtgcgtctgtacggaccacaaaaggctctctctttatttctctgtgagatttttttaggatctgagagagccaaagatcatggaggaaagccaagaacttgccttgacccagttgagaaaatcggtcgagaaactctcttcttctactgagagtttgttgtttatgcgctagacaaaacaatcgcaagtggcaacaatggcaaagaagttggaggtgagaaattagtagccgttattgatctggcaaacattacatacaagaaccttgatgctcgtggattgatcactggctttcaattcttacaatcttactacccggaacgccttgcaaaatgctacattttgcatatgcccggattcttcgtgaccgtttggaaattcgtctgccgttttctagagaaagcaactcaggaaaagattgtgatagttacggatggagaagaacagagaaaattcgaggaggagatcggagcagatgctttaccggaagagtacggtggccgagctaagctcacagcaatccaagatgttcttcttcctcaggctgctccagtaactctaacaaacaataatgtttagctctttatttttggaagcattaacctgaatatttgtaatggtcagaacataactagtggtacatctctaaatttccaaaagaagcaatgaaaacatgagaaagtaatgcgaatatattcaatctggtgactg

SEQ ID NO: 74554 - protein, 76 aa, Arabidopsis thaliana; identical to SEQ ID NO: 28535
  peptide (1)..(76): Ceres Seq. ID no. 5678264

SEQ ID NO: 74555 - protein, 58 aa, Arabidopsis thaliana; identical to SEQ ID NO: 28537
  peptide (1)..(58): Ceres Seq. ID no. 5678265

SEQ ID NO: 74556 - protein, 56 aa, Arabidopsis thaliana
  peptide (1)..(56): Ceres Seq. ID no. 5678266
TFSTYFIVRLYGPQKALSLFLCEIFLGSERAKDHGGKPRTCLDPVEKIGRETLFFY

SEQ ID NO: 74557 - DNA, 1226 bp, Arabidopsis thaliana
  misc_feature (1)..(1226): Ceres Seq. ID no. 5678314
  misc_feature (1)..(1226): Ortholog of  Ceres SEQ ID NO 13638331 as cited in SEQ ID NO 58047
aagggttatattctcaaggaacccattggcgtagttggcatgattactccatggaactatccgttattgatggctgtctggaaagtcgctccttcacttgctgctgggtgcacggctatactgaaaccttcagagttggcctccctgacatgtttggagctcgctgatatttgccgcgaggtgggtctaccacctggtgttcttaatattctgactggtttaggaactgaagcaggtgctccactggcatcgcatccacatgttgacaagattgtattcactggaagcacaacaactggaagcagcattatgacttccgctgccaaattggtgaaacagtttccttggagcttgggggtaaaagccctatcattgtctttgatgatgtcgatattgataaagctgtggaatggactatgtttggttgtttctggacgaatgggcagatttgtagtgccacatctcgacttcttgtgcatgaaaggattgctgacgagtttttggacaagctggtaaagtggaccaagaacattaagatttcagatccttttgaagaaggctgtaggcttggtcctgttgtcagtaaaggacagtacgagagagttctaaagtttgtctcaaacgctaggaatgaaggtgcaactgttctttgtggaggagttcgtcctgagcatttaaagaagggatactttgttgaacctgcgattgtttcaaatgtgactacttcaatggaaatctggagagaggaagtctttggtcctgctctgtgtgtgaaaacattctccaccgaggatgaggcaattcagcttgcaaatgactctcaatatggattagcaggcgcagtattatcaaatgatctggagcggtgtgatcgtgttagtaaggctttccaggcgggaatagtgtgggtcaactgctctcagccatgcttctgccaagctccatggggtggaaccaaacgcagtggatttggccgtgaattgggagaatggggacttgagaactacttgagtgtgaagcaggtgactcagtatatctctgatgaaccatggggatggtacaaacctccttccaagctctgagacaaacactagttcctgatatttccttaaaacatgtactcatgagaatataccaataaagcaagagacccttctgtaagagaaatggtattgctactttaaattcttgaaaaaaatgaaaaataagatgagatgatatttctt

SEQ ID NO: 74558 - protein, 221 aa, Arabidopsis thaliana
  peptide (1)..(221): Ceres Seq. ID no. 5678315
MFGCFWTNGQICSATSRLLVHERIADEFLDKLVKWTKNIKISDPFEEGCRLGPVVSKGQYERVLKFVSNARNEGATVLCGGVRPEHLKKGYFVEPAIVSNVTTSMEIWREEVFGPALCVKTFSTEDEAIQLANDSQYGLAGAVLSNDLERCDRVSKAFQAGIVWVNCSQPCFCQAPWGGTKRSGFGRELGEWGLENYLSVKQVTQYISDEPWGWYKPPSKL

SEQ ID NO: 74559 - protein, 171 aa, Arabidopsis thaliana
  peptide (1)..(171): Ceres Seq. ID no. 5678316
KGYILKEPIGVVGMITPWNYPLLMAVWKVAPSLAAGCTAILKPSELASLTCLELADICREVGLPPGVLNILTGLGTEAGAPLASHPHVDKIVFTGSTTTGSSIMTSAAKLVKQFPWSLGVKALSLSLMMSILIKLWNGLCLVVSGRMGRFVVPHLDFLCMKGLLTSFWTSW

SEQ ID NO: 74560 - protein, 158 aa, Arabidopsis thaliana
  peptide (1)..(158): Ceres Seq. ID no. 5678317
MITPWNYPLLMAVWKVAPSLAAGCTAILKPSELASLTCLELADICREVGLPPGVLNILTGLGTEAGAPLASHPHVDKIVFTGSTTTGSSIMTSAAKLVKQFPWSLGVKALSLSLMMSILIKLWNGLCLVVSGRMGRFVVPHLDFLCMKGLLTSFWTSW

SEQ ID NO: 74561 - DNA, 1354 bp, Arabidopsis thaliana
  misc_feature (1)..(1354): Ceres Seq. ID no. 5678329
  misc_feature (1)..(1354): Ortholog of  Ceres SEQ ID NO 12784228 as cited in SEQ ID NO 66111
actagtgatcagtgataatctattaatcatctaggtggcagaagcagcatcgttgagaacgaagaagcttgaaaaagttgcgagctcagagaatctggaagtagcaaaatttggcggctttaactcagcaatttgttctgtacatgaagagagcattcagctcacagttacgctctgcctatccagcttctaaatctactcactttggtcgagtcatggcttcttctggatctgaggcaaaagctaattacgcacccatatctaccaatgaacctgttgtgtctgttgattggctccactctaatcttggagatgctgatataaaggttttggatgcctcatggtacatggcacatgagcaaagaaatccaatccaagagtatcaagttgctcatattccaggtgctctcttctttgatttgaatggaatagcagatcgaaaaacaaatttacgacacatgctaccatctgaggaagcttttgctgctggttgttctgctcttggaatcgagaacaacgatggagtggttgtgtatgatggaatggggctctttagtgcagctcgtgtatggtggatgtttagagtctttggacatgacaaagtatgggtacttgatggaggcttgccgaaatggcgtgcttcaggctatgacgttgaatccagtgtttcaaatgatgccattttgaaagccagtgcagcaactgaggctatagagaagatctatcaaggacaaacaattagcccaataacttttcagacgaagttccggccacatcttgtattggcacttgatcaggtgaaggaaaacatcgaggataagacttatcagcacatcgatgcgcgttcaaaggctagatttgacggtattgctccagaaccttggaagggtttaccgagtggtcatatacccggtagcaagtgtgtcccttttcccctaatgtttgattcctctcaaacactgttaccagcagaggagctgaagaagcagtttgaacaggaagacatatctctggacagtccgattgcggcctcatgtggaaccggtgtaacagcttgtattttggcattgggactttatcgtctgggaaaaactaatgtggcaatctatgatgggtcttggactgaatgggcaactgcaccaaacttgcccatagtgggttcttcttcataagaaagtccaagaaaaagctacaagatcacaagccagtggatatatatttataagcttagcttggttcaatccatttctgtgttaaactttaacaaattgctgggagggttgtattagtattatacatcagtattcaggattcttgagtttggtctcatctttgtggagattgattaaaagtc

SEQ ID NO: 74562 - protein, 342 aa, Arabidopsis thaliana; identical to SEQ ID NO: 39980
  peptide (1)..(342): Ceres Seq. ID no. 5678330

SEQ ID NO: 74563 - protein, 318 aa, Arabidopsis thaliana; identical to SEQ ID NO: 24974
  peptide (1)..(318): Ceres Seq. ID no. 5678331

SEQ ID NO: 74564 - protein, 274 aa, Arabidopsis thaliana; identical to SEQ ID NO: 24975
  peptide (1)..(274): Ceres Seq. ID no. 5678332

SEQ ID NO: 74565 - DNA, 560 bp, Arabidopsis thaliana
  misc_feature (1)..(560): Ceres Seq. ID no. 5678357
  misc_feature (1)..(560): Ortholog of  Ceres SEQ ID NO 12582657 as cited in SEQ ID NO 51070
atttgatccgtttatacttgttattggcatttcatcatcgtctgggataaaaaaatgtcgacagttggagagcttgcttgcagctacgctgttatgatcctcgaggacgagggtatcgctatcacggctgacaaaatcgcgaccttggtgaaagctgctggtgttagtattgagtcatactggccaatgctattcgccaagatggctgagaaacgtaacgtgactgatctcatcatgaacgttggtgctggtggtggaggtggtgctccggttgcagctgctgctccagctgctggcggtggtgcggcagctgctcctgctgctgaggagaagaagaaggatgagccagcagaagagagtgacggagatttgggtttcggtttgtttgactaaacgcagtcacttgtctttcttctttgtagttggatattggagactatattttgtcgtatgagttattattacttgtttgatctggctaaaggactattagttggtttatgatgcgtatgttgtataactcaagtttcctagcaaaccaatcggctcgggcttttgtt

SEQ ID NO: 74566 - protein, 112 aa, Arabidopsis thaliana; identical to SEQ ID NO: 29961
  peptide (1)..(112): Ceres Seq. ID no. 5678358

SEQ ID NO: 74567 - protein, 99 aa, Arabidopsis thaliana; identical to SEQ ID NO: 29962
  peptide (1)..(99): Ceres Seq. ID no. 5678359

SEQ ID NO: 74568 - protein, 68 aa, Arabidopsis thaliana; identical to SEQ ID NO: 29963
  peptide (1)..(68): Ceres Seq. ID no. 5678360

SEQ ID NO: 74569 - DNA, 1389 bp, Arabidopsis thaliana
  misc_feature (1)..(1389): Ceres Seq. ID no. 5678361
  misc_feature (1)..(1389): Ortholog of  Ceres SEQ ID NO 13584271 as cited in SEQ ID NO 63893
aacgtagaagaagctgatttaaatcccaaattcatttcaacgtagaagcttctacagattcgatttgggtgtttttggttttggatttggtaaagcttctcggtcacttgctcggtgattgaaactgaatcgattgtgattgtgattgtgattgtgattgtgattgtgagggaattatggctcaagccgtagaagagtggtacaagcagatgccgattataacccggtcgtatctcacggcggctgtagtcaccaccgtcgggtgttcgctcgaggtttgaagttctctgactcatgaaagcctttagctttgctctgattgatctgattagtttttccttgaaaaattgaatctttgtgtttctgttatgtatgtggatggttttgtttttttgatgtaaaaggtaactctttattggaattggggtggctaacgaatggttaagtttagagctaagtgttgtggtgttatggcttatgatgtaacattttgtggaacatttttttgttttgcagattatatctccttataatctctacctaaatcctacccttgtggtgaagcaataccagttctggcgtcttgtcacaaatttcctttatttccgaaagatggatttggactttttgttccatatgttttttctagctcgatactgcaaactgctcgaagaaaactccttcaggggaaagaccacggatttcctttacatgctcttattcggggcaactgttctaactggtattgttctcattggcggaatgataccttatttgtctgtttcattctccaaaatcatcttcctcagcaattcattgactttcatgatggtctatgtatggagtaaacaaaatccttacatccacatgagtttccttggcctcttcactttcacagcagcttatttaccatgggtacttcttggattctctatccttgttggtgcaagtgcatggggggattttctgggaatgatagcgggccacgcatactacttcttggcatttgtgtatccccgaatgacggatcgacgtcccttgaaaactccatctttcctcaaggccctatttgctgatgagccagtcgtgattgcaaggccagaagatgtgagatttgctcatgcgccttttgatgaaatccaccaagactgaatcttgatcctccacaaaacaccagccacaacgcacagttcaagtgtactcagataatgttattgactcttgacctttatagttgtggataatgtggaagtgagatagtgttggctctgatttttttccctagttttctgtctgcttttcttgtccgatacaaatgtgtttcctccttgtgcatatgaactcaaattgtgtacaaagtcttcaaaagtgctagtttatagtttcgtc

SEQ ID NO: 74570 - protein, 179 aa, Arabidopsis thaliana
  peptide (1)..(179): Ceres Seq. ID no. 5678362
MDLDFLFHMFFLARYCKLLEENSFRGKTTDFLYMLLFGATVLTGIVLIGGMIPYLSVSFSKIIFLSNSLTFMMVYVWSKQNPYIHMSFLGLFTFTAAYLPWVLLGFSILVGASAWGDFLGMIAGHAYYFLAFVYPRMTDRRPLKTPSFLKALFADEPVVIARPEDVRFAHAPFDEIHQD

SEQ ID NO: 74571 - protein, 171 aa, Arabidopsis thaliana
  peptide (1)..(171): Ceres Seq. ID no. 5678363
MFFLARYCKLLEENSFRGKTTDFLYMLLFGATVLTGIVLIGGMIPYLSVSFSKIIFLSNSLTFMMVYVWSKQNPYIHMSFLGLFTFTAAYLPWVLLGFSILVGASAWGDFLGMIAGHAYYFLAFVYPRMTDRRPLKTPSFLKALFADEPVVIARPEDVRFAHAPFDEIHQD

SEQ ID NO: 74572 - protein, 146 aa, Arabidopsis thaliana; identical to SEQ ID NO: 38825
  peptide (1)..(146): Ceres Seq. ID no. 5678364

SEQ ID NO: 74573 - DNA, 1458 bp, Arabidopsis thaliana
  misc_feature (1)..(1458): Ceres Seq. ID no. 5678372
  misc_feature (1)..(1458): Ortholog of  Ceres SEQ ID NO 15177221 as cited in SEQ ID NO 53046
  misc_feature (1)..(1458): Ortholog of  Ceres SEQ ID NO 14315134 as cited in SEQ ID NO 59476
  misc_feature (1)..(1458): Ortholog of  Ceres SEQ ID NO 12616332 as cited in SEQ ID NO 63449
  misc_feature (1)..(1458): Ortholog of  Ceres SEQ ID NO 13597498 as cited in SEQ ID NO 64648
  misc_feature (1)..(1458): Ortholog of  Ceres SEQ ID NO 14308053 as cited in SEQ ID NO 67790
ctctttcttctttgaacctctccaccacgatgaagcacaaagtctccaaacgagtaatatctctgaaatgggttccatttctctgcatctctttcttcgctctcggagcaatcttcacctccaggtcatgggagccgtcgtcagattccggaagtcagctaatttcacagcatcatcgtgatcatgaacttcagattgtatctgacgattgtgctcataataaaaaagctacacaagaaaaagatgtaactggcgaagttttgagaactcatgaagctatacagtcgttggataagtcagtttctacactttcttctacaaggagctctcaagagatggttgatggctcggaaacaaacccgaggaagaaagtgtttatggtaatgggaatcaataccgcatttagcagtagaaaacggcgtgattcagttagagaaacatggatgcctcaaggtgagaagcttgaaagactggaacaggagaaggggattgtgatcaagttcatgattggacacagtgcgacgtcaaatagtatattggatagagctattgattcagaagatgctcaacacaaagacttccttaggctggagcatgttgaaggatatcacgaactctcagcaaaaaccaagatattcttttccactgcagtagccaaatgggatgcagagttctatatcaaggtagatgatgatgttcacgtcaatctcggtatgcttgcttccacacttgcccgtcaccgctcaaagccgagggtttatattggttgtatgaagtcagggcctgttcttgctcagaagacagtaaagtaccatgaacctgagtattggaaatttggagaggatggtaacaaatactttcgacatgctacaggacagatctatgccatctccaaggatcttgctaattacatatccatcaaccagccaattttgcataagtatgccaatgaagatgtgtctttagggtcatggtttatcggtcttgaggttgaacatattgatgaccgcaacttctgttgtgggactcctccagattgtagatggaaggcagaggcgggcgatgtttgtgtggcctcattcgaatggagctgtagtgggatttgcaagtccgtagagagaatgaagatagtgcatgaagtttgtagtgaaggagaaggagctgtttggaatacgcttctgtaaaagatcatttcagttcccaatcagccaagtggttccaatactaaacataactttgatagactgctacaagaaagggaaagagagagcaagagaggagaaggcaaattttgtaaagaagaaccaaaggtatacaaatcatatacttgagaatatatttgcttagttgttgttgtgtgattggctttgttgtttcttctacttgagttagatcatgttagtataatcttggacaaaagggcaaatgagctaaaaaatgcataactaaagaattttc

SEQ ID NO: 74574 - protein, 384 aa, Arabidopsis thaliana
  peptide (1)..(384): Ceres Seq. ID no. 5678373
MKHKVSKRVISLKWVPFLCISFFALGAIFTSRSWEPSSDSGSQLISQHHRDHELQIVSDDCAHNKKATQEKDVTGEVLRTHEAIQSLDKSVSTLSSTRSSQEMVDGSETNPRKKVFMVMGINTAFSSRKRRDSVRETWMPQGEKLERLEQEKGIVIKFMIGHSATSNSILDRAIDSEDAQHKDFLRLEHVEGYHELSAKTKIFFSTAVAKWDAEFYIKVDDDVHVNLGMLASTLARHRSKPRVYIGCMKSGPVLAQKTVKYHEPEYWKFGEDGNKYFRHATGQIYAISKDLANYISINQPILHKYANEDVSLGSWFIGLEVEHIDDRNFCCGTPPDCRWKAEAGDVCVASFEWSCSGICKSVERMKIVHEVCSEGEGAVWNTLL

SEQ ID NO: 74575 - protein, 282 aa, Arabidopsis thaliana
  peptide (1)..(282): Ceres Seq. ID no. 5678374
MVDGSETNPRKKVFMVMGINTAFSSRKRRDSVRETWMPQGEKLERLEQEKGIVIKFMIGHSATSNSILDRAIDSEDAQHKDFLRLEHVEGYHELSAKTKIFFSTAVAKWDAEFYIKVDDDVHVNLGMLASTLARHRSKPRVYIGCMKSGPVLAQKTVKYHEPEYWKFGEDGNKYFRHATGQIYAISKDLANYISINQPILHKYANEDVSLGSWFIGLEVEHIDDRNFCCGTPPDCRWKAEAGDVCVASFEWSCSGICKSVERMKIVHEVCSEGEGAVWNTLL

SEQ ID NO: 74576 - protein, 393 aa, Arabidopsis thaliana
  peptide (1)..(393): Ceres Seq. ID no. 5678375
LSSLNLSTTMKHKVSKRVISLKWVPFLCISFFALGAIFTSRSWEPSSDSGSQLISQHHRDHELQIVSDDCAHNKKATQEKDVTGEVLRTHEAIQSLDKSVSTLSSTRSSQEMVDGSETNPRKKVFMVMGINTAFSSRKRRDSVRETWMPQGEKLERLEQEKGIVIKFMIGHSATSNSILDRAIDSEDAQHKDFLRLEHVEGYHELSAKTKIFFSTAVAKWDAEFYIKVDDDVHVNLGMLASTLARHRSKPRVYIGCMKSGPVLAQKTVKYHEPEYWKFGEDGNKYFRHATGQIYAISKDLANYISINQPILHKYANEDVSLGSWFIGLEVEHIDDRNFCCGTPPDCRWKAEAGDVCVASFEWSCSGICKSVERMKIVHEVCSEGEGAVWNTLL

SEQ ID NO: 74577 - DNA, 1128 bp, Arabidopsis thaliana
  misc_feature (1)..(1128): Ceres Seq. ID no. 5678387
  misc_feature (1)..(1128): Ortholog of  Ceres SEQ ID NO 15177965 as cited in SEQ ID NO 58545
atcagaaacacaattccttcttcttcttcttcttcttcttgtctccgatgtcagccatggatgttatgattcactcttcaagctttctcctcccttgcgacgaaactagtacagggacgagatacgctctcgttgttctgaaccagagtttgccacgattcactcctcttctctgggaacatgagcagcaaaacttcgtctctgtgctgatggaggcgctaatcgcatctacgacgaattgcctctcttcttccctaatgaagacgctttggccattcgaaacaggtataagccggatgttatcaaaggagatatggattctatacgtcgtgacgtcctcgacttttatataaacttgggaactaaggttatagatgaatctcatgatcaagacaccacagatcttgataaatgcattttgtatatccgtcactctactttgaatcaagagacttccggactccagattcttgccactggagcacttggaggaagatttgatcatgaagccggtaatctcaacgtcttatatcgatatccagatacaaggatagtccttttatctgacgattgcctcatccaactccttccaaagactcatcgacatgaaatacatattcagtcttctctagaagggcctcactgtggactcatacccattggaactccatctgctaaaaccacaacctcagggcttcaatgggatctcagcaacactgagatgagatttggtgggttgataagtacatccaacttggttaaagaagagaaaatcacagtcgaatcggattcggatcttctctggactatatccatcaagaaaacaggactttccatacaagaccatacaccttaggcccggtaacaaaacacactttagtatattatacgctactatgatgttcctgatgcaacgaactagttcaacattattgtgttgatttgttgttcactgtactagctaataatacttgtaccattactgtcgttatacattaagatgcttttttctttggttctgtcattgtttatgtggggctttgttgatttgtcgtactcaaaattgtgactggatgttggttagatattggaatctacttgtgcggtatatgagaaaagacaaaattc

SEQ ID NO: 74578 - protein, 180 aa, Arabidopsis thaliana; identical to SEQ ID NO: 43324
  peptide (1)..(180): Ceres Seq. ID no. 5678388

SEQ ID NO: 74579 - protein, 116 aa, Arabidopsis thaliana; identical to SEQ ID NO: 22881
  peptide (1)..(116): Ceres Seq. ID no. 5678389

SEQ ID NO: 74580 - protein, 101 aa, Arabidopsis thaliana; identical to SEQ ID NO: 22882
  peptide (1)..(101): Ceres Seq. ID no. 5678390

SEQ ID NO: 74581 - DNA, 823 bp, Arabidopsis thaliana
  misc_feature (1)..(823): Ceres Seq. ID no. 5678391
  misc_feature (1)..(823): Ortholog of  Ceres SEQ ID NO 12616324 as cited in SEQ ID NO 63414
attaaaaagctaatatggctactagggaagagagagataagtatagatcagtccttgaagatgcaggacaggttcaatggaggtatgataaccctccagacttcaatagtgtgaaccagctctttgaagaaggccagactaaggtgtggccagaaggttcgttagaagagacagtgcaaaacgcgatcaagtcatgggagatggagttctcacataagatccgtttacaggacttcaagactataaaccctgagaagtttaagctctttgtcaatggtttatcagctgaagagacgcttaggcttgggagttacaatgctttgctcaagaactctttgcctgaagagtttcagtactataagcccgaggaagagagctttgagtcatcacatgacgcctttagatctgctttaccacgcgggtttgcgtgggaaatactctctgtgtactcggggcctcctgttatagccttcaaatttagacactggggatactttgaaggaactttcaaaggtcatgctcctactggggaaatggttcaattcctgggtctaggagttctaaaggttgacgaatcacttagagcagaggagattgagatttactatgatccaggagagctgttcgggggactactcaagggacctcctatatcagagaccaaaaccacagacagtggagacaacactgcagagaaacaaagctgcccattcacacactaagataataagaaaagtagaagtgtatttgaccctttaaagaatatattgtaacagtctcttggttattgatgcatggaataaattataagttatgttaggcg

SEQ ID NO: 74582 - protein, 235 aa, Arabidopsis thaliana
  peptide (1)..(235): Ceres Seq. ID no. 5678392
MATREERDKYRSVLEDAGQVQWRYDNPPDFNSVNQLFEEGQTKVWPEGSLEETVQNAIKSWEMEFSHKIRLQDFKTINPEKFKLFVNGLSAEETLRLGSYNALLKNSLPEEFQYYKPEEESFESSHDAFRSALPRGFAWEILSVYSGPPVIAFKFRHWGYFEGTFKGHAPTGEMVQFLGLGVLKVDESLRAEEIEIYYDPGELFGGLLKGPPISETKTTDSGDNTAEKQSCPFTH

SEQ ID NO: 74583 - protein, 173 aa, Arabidopsis thaliana; identical to SEQ ID NO: 37006
  peptide (1)..(173): Ceres Seq. ID no. 5678393

SEQ ID NO: 74584 - DNA, 1043 bp, Arabidopsis thaliana
  misc_feature (1)..(1043): Ceres Seq. ID no. 5678394
  misc_feature (1)..(1043): Ortholog of  Ceres SEQ ID NO 13594080 as cited in SEQ ID NO 55001
  misc_feature (1)..(1043): Ortholog of  Ceres SEQ ID NO 13587495 as cited in SEQ ID NO 0
cactgatatgtgtgatatctctttgtcccccatctattaatctcctcctccgcatcgtcgccgtgcacttccccacctcttccggcggatatgatgagcattgtatcaagtcatcatcactgtcaacaatctgttatacacgaacgtagcggtataggaacaatatctaaggtttcttgttcgagatattgcggtccgtgtttctctggacgactggctttctctcatagcctctgcttgaagactacttatgggaaaactgataggagaaagttttcaagaatttgcagtattgtggatgatgaggggaatctagataattcggatgacgaggaaaaggaatcactcgatgataaaactaaaaggcaagcgaatgatatgaatcgggctaatcttgaaagaatggttgggtcagatgattctgcatttaacggcttagatcttgcaaccctcatcagacagaagtatggaaaatcttatgatgttcaactcatcaagaaggagttcatggggaagaatcttcttgcaatgaatgtcatgtggaagtacagagaacagaggtcttttcctctaaccgaagaagaatatatacttagacttgacgatgtagccaacatgttgaaatgctggggagcagtctcacatatccgtagcagcctagcaaagtcgaaggagcgacctcggatagggaaggctgtcagcattttcatagacatggattcgacagggggaagagcaaatgaatggatttacaagtaaaaatcgaccggtttgcagctgctaaaccaagaaatcaaaaggttttgtctctacgtttatcgtcatcaattcattttgaaggctcttcagtgatggttgcctgcagaaaccgaggtttttgctatatttgatgtccaaatcaggtagtatatatgtacatgtgtgtattaagtagacacaaatctttacttgaactctctgtgtaaaatatctccatgtgttgaaattcaatcatctttgtgaatcttcctctctttgtgatctgtaaaagtattagttttggc

SEQ ID NO: 74585 - protein, 222 aa, Arabidopsis thaliana; identical to SEQ ID NO: 31110
  peptide (1)..(222): Ceres Seq. ID no. 5678395

SEQ ID NO: 74586 - protein, 221 aa, Arabidopsis thaliana; identical to SEQ ID NO: 31111
  peptide (1)..(221): Ceres Seq. ID no. 5678396

SEQ ID NO: 74587 - protein, 126 aa, Arabidopsis thaliana; identical to SEQ ID NO: 31112
  peptide (1)..(126): Ceres Seq. ID no. 5678397

SEQ ID NO: 74588 - DNA, 1157 bp, Arabidopsis thaliana
  misc_feature (1)..(1157): Ceres Seq. ID no. 5678402
  misc_feature (1)..(1157): Ortholog of  Ceres SEQ ID NO 12612330 as cited in SEQ ID NO 56418
  misc_feature (1)..(1157): Ortholog of  Ceres SEQ ID NO 13664295 as cited in SEQ ID NO 61486
  misc_feature (1)..(1157): Ortholog of  Ceres SEQ ID NO 15179147 as cited in SEQ ID NO 0
gatgaaagcaaaacatttacgtaacaatgtctataaaatcagtacaggtctattcttgttcactagcttcgaaattttagtcgaagaaacaaaaaaaaatggcgacggtacaattgtccacccaatttagctgccaaaccagagtttcaatctcaccgaactctaaatctatctccaagcctccgtttctggtaccggtgacctcaattattcaccgcccgatgatctccaccggaggaatcgctgtttccccccgtagagttttcaaagtccgagccacagatacgggagagataggatcagctctattggcggcggaggaagcaattgaagacgtggaagagacggagcggctaaagagatcgctcgtggattcgttgtacggaacagatcgaggtttaagcgcatcgagcgaaaccagagctgaaatcggagatctaatcacacagctcgagtctaagaaccctactccagctccgacggaagctcttttccttctcaacggcaaatggatcctcgcctacacatcgttcgtgaatttgttcccgttgctatcacgaggaatcgtaccgttaataaaagtcgatgagatctctcaaaccattgattcagataacttcaccgtccagaactctgttcgtttcgctggtcctttaggtacaaactcgattagcaccaacgctaaattcgaaatccgaagccctaaacgcgtccagattaagtttgagcaaggcgtaattgggacgcctcagctaacggattctattgagataccggaatatgtagaggttcttggtcaaaagattgatcttaacccgatcagagggttacttacctcggtgcaagacacagcctcgtctgtggctagaaccatatcaagccaaccaccgttgaaattctctttgccggcggacaatgcgcagtcttggctactcacgacttatctagacaaagacattcggatctctagaggagacggtggaagtgtctttgtgcttatcaaagaaggaagccctctcttgaatccttgaacttggtcaaaatatatgtctctctcttgtcgttgtgttaagtgagacaaatatatagtgtggttgtaggtttacttcttaatcgttgttattaactcgatgataaggaatataatgtttttaact

SEQ ID NO: 74589 - protein, 310 aa, Arabidopsis thaliana; identical to SEQ ID NO: 37403
  peptide (1)..(310): Ceres Seq. ID no. 5678403

SEQ ID NO: 74590 - protein, 269 aa, Arabidopsis thaliana; identical to SEQ ID NO: 37404
  peptide (1)..(269): Ceres Seq. ID no. 5678404

SEQ ID NO: 74591 - DNA, 626 bp, Arabidopsis thaliana
  misc_feature (1)..(626): Ceres Seq. ID no. 5678514
  misc_feature (1)..(626): Ortholog of  Ceres SEQ ID NO 15180055 as cited in SEQ ID NO 1186
tttacgcattctccgtcattcggttaagttgcatcgatcgttagggttttatcgagagagcaaggagagcgatttctcaaatcgactttaatggctgacgacgattacaatgaagtcgatgacttgggatatgaagatgagccagcagagcctgagatcgaagaaggagtagaggaagatgctgatatcaaggagaacgatgatgttaatgttgaccctttggaaacagaagataaggttgaaacagaacctgtgcaacgcccacgtaaaacctctaagtttatgactaagtatgaacgtgcacgtatcctcggcactcgtgctttgcagattagcatgaatgctcctgttatggttgagttggagggtgagactgatccacttgagattgcgatgaaagagcttaggcaaaggaagattccatttaccattagacgttatctacctgatatgagttacgaggaatggggagttgatgaactgatcgtcgaagactcgtggaaacgtcaagtcggtggtgattgataaaatctggcctatgtgttttgcaaagctttctgctcttgtatggattatgaacttacgatatagtcgcatgtagaacttcttcatttgtcctattctcc

SEQ ID NO: 74592 - protein, 144 aa, Arabidopsis thaliana; identical to SEQ ID NO: 26666
  peptide (1)..(144): Ceres Seq. ID no. 5678515

SEQ ID NO: 74593 - protein, 80 aa, Arabidopsis thaliana; identical to SEQ ID NO: 26667
  peptide (1)..(80): Ceres Seq. ID no. 5678516

SEQ ID NO: 74594 - DNA, 785 bp, Arabidopsis thaliana
  misc_feature (1)..(785): Ceres Seq. ID no. 5678517
  misc_feature (1)..(785): Ortholog of  Ceres SEQ ID NO 13597908 as cited in SEQ ID NO 64404
gagaagaagaatggtgacaagaatggcgacgaaggtgagtttggaagggaagagagtggttttggtaccgtacatggcggaacatgtaccaaagtaccatcaatggatgcaagattcggctcttcttgaagctacgggatctgagccgttgagtcttgagcaagagtatgagatgcagctttcttggactcaagatcccaataagcggactttcattgtcttggacaaggatttcgttaagggagacctggctcatggccaacctcatgtagaagcaatgacaggtgatgtgaacatttacatgaatgatgtggatgatccaaaggttgcagaagttgaaataatgatagctgagcccagaagccgtggtaaaggactaggaaaggaatctgtgttgataatgatggcttatggtgtcaagaacttggagattcacaagtttacagccaaaattggggaatcaaacacagcttccctcagcttattccgcaaactaggtttcgaggagtcttcttacagcggtatcttcaaagaggttacactcgagtatccggtgactaatctccgtcgagaagagctcttgaagttattggatgaagtcattaggcacactcattcatcgaacaacccatcagactcactgctatcaggagaagctactgcataaagcattttcttcagtgtttattgttatttttctcttcaacttgggaaagaatttgaaatcattgtagcatgtatgagtttataaattatgattactaatatacatggtccattgtttc

SEQ ID NO: 74595 - protein, 221 aa, Arabidopsis thaliana; identical to SEQ ID NO: 35217
  peptide (1)..(221): Ceres Seq. ID no. 5678518

SEQ ID NO: 74596 - protein, 218 aa, Arabidopsis thaliana; identical to SEQ ID NO: 35218
  peptide (1)..(218): Ceres Seq. ID no. 5678519

SEQ ID NO: 74597 - protein, 214 aa, Arabidopsis thaliana; identical to SEQ ID NO: 35219
  peptide (1)..(214): Ceres Seq. ID no. 5678520

SEQ ID NO: 74598 - DNA, 1509 bp, Arabidopsis thaliana
  misc_feature (1)..(1509): Ceres Seq. ID no. 5678521
  misc_feature (1)..(1509): Ortholog of  Ceres SEQ ID NO 15177718 as cited in SEQ ID NO 0
acctgtagtttcttcttctgaaaatcagcaacaaactacaaatcatccaatgatagaatttcagctttaattatcaaacaaattaaagataaccccattgataatatcgccacgtctcatcggatgaaatagtactatctgacacgacacgaatctcttatgagagaaacagaagagcacggaatctccataaatcaaaatacatgatcggagctttctcactatcaaaagctttccggcgacaaaaccaaccatctcctccttatctccaccatgatctcactccactcatcagccattaaagcctctctctacggctctttcccttcttcgttacgatcaacactctctgtttccttctctgctggatctcttattcggcttccttccgtcggcaagcgcaatctctccgtcgtcgtttcctctggaagagactcctcgatgtcatcaaacaatgtttctcgcggatcgtcttcaaaggttgctgctgaatctttcttcaggagtgtcttagggcagatggaaactgtttacctaaatcgaaacccgacgcctaaatccgtcttggagcttgttcgatctgttgatgaccagcaactttgctatgatcatctcgctttcagaacgtttgggattggtggttatgggattgactcgcttgcaagctttttccttgactatggatatacaccgatggatgagctaaaatttccggccaaaaagcttagagctttgtggtttgcacctcctaatgcttctgctgttcctggtggcagcggcgttaacggtcctttaccgagagtttttatctcagagctcctggtggaccagatgagttcacagactcaggatgtaatcagaaaatacacggaagcatcacctaatgggaaaaagtatgctggactttctagtgctttgggtactttaacttgggaaaagcctctatcttctgagtttgagcaattggctagggaaagtgaatacgcagcatggacccttgtcaatggatatgcacttaaccacgtcacgatttctgttcatcggcttaaatctcatctaaacaaaatcaagaagctcaatcagttcctcgaagaaaaaggtatcaaattgaactcagaaggaggagtccttaaagttagccctgatggtggtttgcagcaaagctcaactgtagcagattcgatatctttcaagttcgctgatggtgttaccaaatctatcccttgttcatacattgagtttgctgaacgccttgtacttccgcagtaccaaaatatacccgaaagcgagatacaagagtctcatcgacgtgatggatttgaggtcggaaatgctgacaagatcttcgagagcacatttcaggagcagctttcccgacgaaccgggtgatagcaaatagtagccacggctttggatatatgtcaatcatgcctcgtacatgtgtaacgagtaaaaagctcaaaactgcttgtaatcttgatcagtaaagatgctaatccaagaactctt

SEQ ID NO: 74599 - protein, 371 aa, Arabidopsis thaliana; identical to SEQ ID NO: 23452
  peptide (1)..(371): Ceres Seq. ID no. 5678522

SEQ ID NO: 74600 - protein, 315 aa, Arabidopsis thaliana; identical to SEQ ID NO: 23453
  peptide (1)..(315): Ceres Seq. ID no. 5678523

SEQ ID NO: 74601 - protein, 289 aa, Arabidopsis thaliana; identical to SEQ ID NO: 23454
  peptide (1)..(289): Ceres Seq. ID no. 5678524

SEQ ID NO: 74602 - DNA, 1664 bp, Arabidopsis thaliana
  misc_feature (1)..(1664): Ceres Seq. ID no. 5678525
  misc_feature (1)..(1664): Ortholog of  Ceres SEQ ID NO 12608463 as cited in SEQ ID NO 60238
aaacagagaaaacaaaaaaatgaaaggaaagtagaaaaaagagaaaaagttttgcagaaggaagaaaaagaaaaagaagagaaaaaatgggtcttcgtctccgtcttcgtctccctcacaaaagctctcctcgttcaccttcctatctccttctctgtgttcttgctctatccttcttctccttcaccgctcttcttttctacaaggttgacgactttatagctcagacaaaaactctggccggacataacttggaaccaacaccgtggcatatcttcccacgcaaatctttcagcgcagctacgaaacattctcaggcttaccgaatcctccagtgctcctacttctcatgtccgtacaaagccgtcgtccaaccaaagagtctccactcggaatctgggtcgggtcgtcaaacccatcaaccacaatgcccagacttcttcagccaggtggattcaccgggatttagagccgtgggcaaagactggggtgactaaagagcacgtgaagagggcaaaagcgaatgctgcgtttcgagtggtgatactatcagggaagttatacgtggatctctattacgcatgtgtgcagagcagaatgatgttcaccatttgggggattctgcaactgctcaccaagtatccagggatggttcctgatgtcgacatgatgtttgattgtatggacaaacccatcatcaaccagaccgagtaccagtcctttcctgttccgctttttcgatattgcaccaacgaagctcatttggacattccttttccggattggtcgttttggggatggtcggagacaaatctaaggccctgggaagaagagtttggggatataaagcaagggtctaggagaagaagttggtacaacaagcaacctagagcttactggaaaggcaatcccgatgttgtatcgcctatacgactggagctcatgaaatgcaaccattcaaggttatggggagcacagattatgcgccaggactgggcagaagaagcaaaaggtgggtttgagcaatccaagctttccaaccaatgcaatcaccggtacaaaatctatgcagaaggttatgcgtggtcagtttctctaaagtatatcttatcatgtggttccatgacactcataatatcacctgagtatgaagatttcttcagtagaggcctccttcccaaggaaaattactggcctatctctcccactgatctatgtcggtccatcaaatacgctgttgattggggaaattccaacccctctgaagctgaaacaattggaaaaagaggacagggttatatggaaagccttagcatgaaccgggtttatgactatatgtttcatctcatcactgagtactcgaaacttcagaagttcaagccagagaagccggcttccgctaatgaagtctgtgcaggatcattgctctgcattgcagaacaaaaagagcgggaactactcgaaagatccagagtcgtaccttctctggatcaaccatgtaaatttccagtagaagataggaataggcttgagtggttgatccaacagaagaataaaacaatcgaaaatgttagatacatggagatgacaagaacacagaggggttctaaatgaattgtctttttagggacatgaatttttggtgtatcctctctctttttttg

SEQ ID NO: 74603 - protein, 338 aa, Arabidopsis thaliana; identical to SEQ ID NO: 43646
  peptide (1)..(338): Ceres Seq. ID no. 5678526

SEQ ID NO: 74604 - protein, 337 aa, Arabidopsis thaliana; identical to SEQ ID NO: 43647
  peptide (1)..(337): Ceres Seq. ID no. 5678527

SEQ ID NO: 74605 - protein, 321 aa, Arabidopsis thaliana; identical to SEQ ID NO: 43648
  peptide (1)..(321): Ceres Seq. ID no. 5678528

SEQ ID NO: 74606 - DNA, 609 bp, Arabidopsis thaliana
  misc_feature (1)..(609): Ceres Seq. ID no. 5678537
  misc_feature (1)..(609): Ortholog of  Ceres SEQ ID NO 12329459 as cited in SEQ ID NO 20533
atatccgtcaaattcaattgatcctctctccaaatcatcttaaaatcacagatctttgggtatcaagtaaaactgtgaagtgatgtcgggaagaggaaagggaggaaaaggattgggaaagggaggagcgaagaggcacaggaaggttctgagggataacattcaaggaatcaccaagcctgccattcgtcgtcttgctcgtagaggtggtgtcaagcgtatcagtggtctcatctacgaagagaccagaggtgtcctcaagatcttcctcgagaatgtcatccgtgacgccgttacttacactgagcacgctagaaggaagacggtgaccgccatggatgttgtctacgctttgaagaggcaaggtcgtactctctacggtttcggaggttaatccgatttgggggattagggtttatgcaagtttggggatttcttcttgtttctgagatctgtgttaaatggtttgaattagtctaaagtaaatctaggagtgttagctactgcttttgttttctattgtgatgtcgttgttagccaatgcggtgtagttgaaaatctttgcaaacttaaagctaagaaaatctaatgaggatgaacaatttactc

SEQ ID NO: 74607 - protein, 103 aa, Arabidopsis thaliana; identical to SEQ ID NO: 7737
  peptide (1)..(103): Ceres Seq. ID no. 5678538

SEQ ID NO: 74608 - DNA, 386 bp, Arabidopsis thaliana
  misc_feature (1)..(386): Ceres Seq. ID no. 5678539
  misc_feature (1)..(386): Ortholog of  Ceres SEQ ID NO 13662937 as cited in SEQ ID NO 64415
actttgtagtttgtgttttgtccttatcggcggagacatgacggcggcacaagggaactctaacgagactctgttttcttcttacaagatgggaagattcgatctctctcatcgagtggttctggcgccgatgacgcggtgcagggcgttgaacggagtaccaaacgcggcgttggcagagtattatgctcaacggaccactcccggcggttttctcatctccgaaggcaccatggtctctcccggatccgcagggttcccacatgtgcctggaatctattcagatgaacaagtagaagcatggaagcaagttgtggaagcagttcacgctaagggaggtttcatcttttgtcaattatggcatgttggacgtgcttctcatgcag

SEQ ID NO: 74609 - protein, 128 aa, Arabidopsis thaliana
  peptide (1)..(128): Ceres Seq. ID no. 5678540
LCSLCFVLIGGDMTAAQGNSNETLFSSYKMGRFDLSHRVVLAPMTRCRALNGVPNAALAEYYAQRTTPGGFLISEGTMVSPGSAGFPHVPGIYSDEQVEAWKQVVEAVHAKGGFIFCQLWHVGRASHA

SEQ ID NO: 74610 - protein, 116 aa, Arabidopsis thaliana
  peptide (1)..(116): Ceres Seq. ID no. 5678541
MTAAQGNSNETLFSSYKMGRFDLSHRVVLAPMTRCRALNGVPNAALAEYYAQRTTPGGFLISEGTMVSPGSAGFPHVPGIYSDEQVEAWKQVVEAVHAKGGFIFCQLWHVGRASHA

SEQ ID NO: 74611 - protein, 99 aa, Arabidopsis thaliana; identical to SEQ ID NO: 24884
  peptide (1)..(99): Ceres Seq. ID no. 5678542

SEQ ID NO: 74612 - DNA, 1521 bp, Arabidopsis thaliana
  misc_feature (1)..(1521): Ceres Seq. ID no. 5678557
  misc_feature (1)..(1521): Ortholog of  Ceres SEQ ID NO 13598553 as cited in SEQ ID NO 65093
ctcttcttcctctaattgcttttctccgtcactgagtaccttgcctctcgagctcccaatcttaagtagaggattgagcttaaggcaagatggtaagaaacttaaatatttattttgaatatttgatcaattatctatctttatgaattattgatcaagaaacaaaatttaaagaacatccgggacttgaaaaagtagtggaaatttcacaaaaccgaaaagcaaacggttaattcggttttacaaagaccaaacagaaaattcaataattcggtttggttcggtttaattacaccgaacaaaaaagttggtacattcgtttttatttttccgccattcttgtcgatcttcttcagtcgtaaaaccgccgcgtctctgctgaccctcctcttctcatttcatcgacgggagaaaatcccataccatctgagatttccaacagtgaaattaagatgtcaacaggaatatccactgatctccatgtccattttggagctctaaatttctcaaaaacctacaaatctggtttaagcaatcgaacggtgtctttttcgagagtcgggtatgctcagaacaggaaattgagctgcagtgtttccaacacagagaatgtagctcctaaggatgatgaaagaggaaaggatagacctttggttaagatgtgtggcatcacatcagccagagatgcagctatggcagttgaggctggtgccgattttattgggatgattatttggccacattcaaaacgatctatttctctttctgtcgcaaaggatatctccaaagtggccagggaaggtggggccaaacctgttggtgtttttgttgaagatgatgagaacacgatactgagagcagctgattcctctgaccttgagcttgtgcagcttcatggtaatggttcgcgtgctgctttctcgaggttagtacgcaagaggagagtcatatatgtccttaatgcaaatcaggatggaaagctcttgaatgaagttcctgaagaggattgtcatcttgctgattggattcttgtggatagtgcaacgggtgggagtggacacggatttaactgggctcaattcaagttgccttccgtcagaagcagaaatgggtggctcttagctgggggaatcaatccaacaaatgtttcagaagctctttctatccttcaacctgatggaattgatgttagtagcggtatttgcggtacagacggtatccagaaggataagtctaagataagctcctttataactgcagttcgctctgtacactactaatggcaagcaatataaaccacggtaatttatcttgtaactatagttttgagcatcaacctgttgtttccaatccatgtcattaagttttgaattgtaactggctgataataataataatgcccttttttttcatcagtagtagatttaaattaaaagcgttgggttgtcaccgtaataatgtcgttgggctctcaagaacaagatccttgtatgaaatgtattctactgatcatatattatt

SEQ ID NO: 74613 - protein, 275 aa, Arabidopsis thaliana
  peptide (1)..(275): Ceres Seq. ID no. 5678558
MSTGISTDLHVHFGALNFSKTYKSGLSNRTVSFSRVGYAQNRKLSCSVSNTENVAPKDDERGKDRPLVKMCGITSARDAAMAVEAGADFIGMIIWPHSKRSISLSVAKDISKVAREGGAKPVGVFVEDDENTILRAADSSDLELVQLHGNGSRAAFSRLVRKRRVIYVLNANQDGKLLNEVPEEDCHLADWILVDSATGGSGHGFNWAQFKLPSVRSRNGWLLAGGINPTNVSEALSILQPDGIDVSSGICGTDGIQKDKSKISSFITAVRSVHY

SEQ ID NO: 74614 - protein, 206 aa, Arabidopsis thaliana
  peptide (1)..(206): Ceres Seq. ID no. 5678559
MCGITSARDAAMAVEAGADFIGMIIWPHSKRSISLSVAKDISKVAREGGAKPVGVFVEDDENTILRAADSSDLELVQLHGNGSRAAFSRLVRKRRVIYVLNANQDGKLLNEVPEEDCHLADWILVDSATGGSGHGFNWAQFKLPSVRSRNGWLLAGGINPTNVSEALSILQPDGIDVSSGICGTDGIQKDKSKISSFITAVRSVHY

SEQ ID NO: 74615 - protein, 195 aa, Arabidopsis thaliana
  peptide (1)..(195): Ceres Seq. ID no. 5678560
MAVEAGADFIGMIIWPHSKRSISLSVAKDISKVAREGGAKPVGVFVEDDENTILRAADSSDLELVQLHGNGSRAAFSRLVRKRRVIYVLNANQDGKLLNEVPEEDCHLADWILVDSATGGSGHGFNWAQFKLPSVRSRNGWLLAGGINPTNVSEALSILQPDGIDVSSGICGTDGIQKDKSKISSFITAVRSVHY

SEQ ID NO: 74616 - DNA, 1409 bp, Arabidopsis thaliana
  misc_feature (1)..(1409): Ceres Seq. ID no. 5678612
  misc_feature (1)..(1409): Ortholog of  Ceres SEQ ID NO 12781552 as cited in SEQ ID NO 51997
  misc_feature (1)..(1409): Ortholog of  Ceres SEQ ID NO 13597237 as cited in SEQ ID NO 64136
  misc_feature (1)..(1409): Ortholog of  Ceres SEQ ID NO 13598601 as cited in SEQ ID NO 69129
atcgaaaatgagatgagagagagaggaggagtctctcatcgtgagtagggcttttgactccctccctactttgcctacttcttcttcttcctctgtggccactctacacagtccacacctacttcaagacacctttctcatccttgagatcggcgtcagatcctccgccgcttctcctcttcactatctccggtcacaacttgtttttctctgtttttctttatctctactttatgcacaatctgactttctaagtggatttacagtgttaaagatgatggaatctggcgctggtttcgtggccatggaagagaggatctctcctggaagtttcttccagtatcctctttctggattccgtgcttctcctaatcgatccccttgtcctccctctgatcgtgaaaggtacttgactgaattattgcaagagagacaaaagttgggtccctttttgcaagttatgccaaattgctgcagactgcttaatcatgaaatcaggagggtctctagttttcctgatcttgatagatatgagcatggcagtccatttagatcgcttggtcagccgacaaatggaaagcttgatttagagggatggtcgatgatgcaagccgaggaaaactgtcacctccagagagcttctccatttcgcggtccttccccagtgggctggattgggatgccgggactccctaacccacccattgtgaaaaaagtgattagacttgatgtcccagtggataaatatccaagctataattttgttgggaggattcttgggccacgtggaaactccctaaaaagagttgagctagcaacccactgcagggtgtttatcagaggacgaggatctgtgaaggatactgtcaaggaggaaaaattaaaaggtaagccagggtacgagcatctctgcgagccactacatgtactgatcgaggccgagcttccagaagacataataaactctcgattggagcatgcagtgcatttcctggaatcactcctgaagccgatggacgagtcaatggatcactacaagagggaacagctgaaggagttagcggctttgaatggtacactaagggaggagagtccgagtccgagcttgagcccttgtttgagccccagcatgtcccctttcaacagcaagcgtgctaagacagagatatgatcaagagaaaccactagtgcatgggtcttgtgggcaggatcatgagtttgctaagttctaacgtttggactcttgaattaatttattttgtcattaactttattctttatttttgttggttagctgagatgaccattaaccagtgggtaataaactaataatggtgtttatgaaattgtaatctccttctcaatcattgtaacctttatttaagttttaaaccccaaacgtttatttc

SEQ ID NO: 74617 - protein, 298 aa, Arabidopsis thaliana; identical to SEQ ID NO: 30428
  peptide (1)..(298): Ceres Seq. ID no. 5678613

SEQ ID NO: 74618 - protein, 297 aa, Arabidopsis thaliana; identical to SEQ ID NO: 30429
  peptide (1)..(297): Ceres Seq. ID no. 5678614

SEQ ID NO: 74619 - protein, 288 aa, Arabidopsis thaliana; identical to SEQ ID NO: 30430
  peptide (1)..(288): Ceres Seq. ID no. 5678615

SEQ ID NO: 74620 - DNA, 1459 bp, Arabidopsis thaliana
  misc_feature (1)..(1459): Ceres Seq. ID no. 5678673
  misc_feature (1)..(1459): Ortholog of  Ceres SEQ ID NO 13638402 as cited in SEQ ID NO 60300
  misc_feature (1)..(1459): Ortholog of  Ceres SEQ ID NO 12618349 as cited in SEQ ID NO 64838
  misc_feature (1)..(1459): Ortholog of  Ceres SEQ ID NO 15176161 as cited in SEQ ID NO 0
accgaaaaagataaaaactcacactttctctctctctctctagaaaaagaaagaaagaagaaaaacttattgttattcccatttcgcccctatccgaaaaatggttgaagctcaatcatggacaacgcggcggatgagcaatcctagattcgacgccgccgcaaccgccgcaccaaccatcgtagacatccccggaacaccaccacactcctccgcttcttcaccactcaaacccttcttcctctcttcccccaccgtatcaccaacaatcctcacggcggctataatcgccgcctggtttggctcaaatataggagtcctcctcttaaacaaataccttctcttctactacggtttccgttacccaatcttcctcaccatgacacacatgttatcatgcgccgcctatagctccgccgtaatcaatatcgccggaatcgtgccacgtcagcacatcttatctcgccgtcagtttctaaagatcctctctttgtcagcgatcttttgtctctccgtcgtctgtggcaacacttcgctacgttatatccctgtttcttttaatcaagctattggagctacgacgccgtttttcaccgccgtgttctcttttctcattacttgtaaaacagagtccactgaagtttatttagctcttcttccggttgtctccggcatcgttcttgcttctaactctgaaccttcttttcatctttttggtttccttatctgtgttgcttccaccgccggtagagctctcaaatccgtcgtccaggggattattctgacgtcggaatcggagaagctacattctatgaatcttttgctatacatggctccaatggcggcttgtatcttactaccatttacgctatacattgaaggaaacgttttaagagttctaatcgagaaagcgaggacggatccattgatcatcttcttgttagccgggaatgcgacagtggcatatttagtgaatttgacgaatttcttggtgacaaagcatacaagtgctctcacattgcaggttttggggaacggaaaagctgcggtggctgccggagtctcggttttgatatttaggaatccggtgacggtgatgggaatagccggatttggtgtgacgattatgggtgtggttctctatagcgaagctaggaagagatccaaattgctaaaccagaagtgaaaagtgtgaagagaaagattattggatttaaaccggtgaagtaatttttactttttaatttttacttcttttttttcggtttagtttcttgattctttggaattctgctattgtttggaaccggtttggttcgttttgagagggggaaaatcaatttaattgtaaatggttgagattggggaaaaactatgaaaagaaaagtggagatatatttatgtaacaaaagtgaaaaagtagggagcataattaaaggaaataagattgtatctttat

SEQ ID NO: 74621 - protein, 361 aa, Arabidopsis thaliana; identical to SEQ ID NO: 30110
  peptide (1)..(361): Ceres Seq. ID no. 5678674

SEQ ID NO: 74622 - protein, 350 aa, Arabidopsis thaliana; identical to SEQ ID NO: 30111
  peptide (1)..(350): Ceres Seq. ID no. 5678675

SEQ ID NO: 74623 - protein, 268 aa, Arabidopsis thaliana; identical to SEQ ID NO: 30112
  peptide (1)..(268): Ceres Seq. ID no. 5678676

SEQ ID NO: 74624 - DNA, 609 bp, Arabidopsis thaliana
  misc_feature (1)..(609): Ceres Seq. ID no. 5678724
  misc_feature (1)..(609): Ortholog of  Ceres SEQ ID NO 12610253 as cited in SEQ ID NO 56230
atcttcaccaaattctctcaatcactcatcaatggcgatttctcaagctcagcctctgcttcttctcctcttatcagtcttcttcttacctgctttgcacgccacttctttcacctactgcgataagaggctcgatcccgttaaggtcacgggtgtgaagatctcccctgaccctgttgtgagtggtgcagccgcaacatttaagatttttggttctactggcgaagacatctctggaggaaaagtagtgatcagggttttatacgttgggattcctgtccataccgaaactcatgacctctgcgatgagacggcatgtccggttgcacctggcagctttgtgctttctcattctcaaacactcccttcaattacaccacctggtacttacacgctaaagatgacaatcaacgacaagaatggcggaagactaacgtgtatcagcttcaaattcaagatcacagtaggttctgcggtctttgctagttaagttttatggtgtaaattgtgtctttgtgaatctctctctcgtttacttttgtggtgtccaaataaagaatgctctttagagacttgagttgatctacatgaaacaaagagtcacaaacc

SEQ ID NO: 74625 - protein, 162 aa, Arabidopsis thaliana
  peptide (1)..(162): Ceres Seq. ID no. 5678725
SSPNSLNHSSMAISQAQPLLLLLLSVFFLPALHATSFTYCDKRLDPVKVTGVKISPDPVVSGAAATFKIFGSTGEDISGGKVVIRVLYVGIPVHTETHDLCDETACPVAPGSFVLSHSQTLPSITPPGTYTLKMTINDKNGGRLTCISFKFKITVGSAVFAS

SEQ ID NO: 74626 - protein, 152 aa, Arabidopsis thaliana; identical to SEQ ID NO: 27165
  peptide (1)..(152): Ceres Seq. ID no. 5678726

SEQ ID NO: 74627 - DNA, 1186 bp, Arabidopsis thaliana
  misc_feature (1)..(1186): Ceres Seq. ID no. 5678751
  misc_feature (1)..(1186): Ortholog of  Ceres SEQ ID NO 13579918 as cited in SEQ ID NO 64644
  misc_feature (1)..(1186): Ortholog of  Ceres SEQ ID NO 13654122 as cited in SEQ ID NO 68192
actaatctctctctccctctctttcttcttcttccacaaatggcttcttgcgtcaccggaacagaggcagcaatcagagcagcggcatgtagagacggcgaagaagcctctcatctaaagatagtcgccgtcttcgccatctttctcacaagcgttttcggagtttggggaccagttttactcgctaaatactttcatggtaaacctctgtacgataaagcaattcttgtgataaagtgtttcgccgccggcgtgattctctcgacgtctttagtccacgttttaccggaagcgtttgagtcactcgctgattgccaagtgtcgtcacgtcatccatggaaagattttccgtttgctggtttagttacgatgatcggagctataacggctttgttggttgatttaacggcgagtgaacatatgggacacggtggtggtggtggtggtgacggagggatggagtatatgccggtgggtaaggcggttggagggttagaaatgaaagaaggaaagtgtggggctgatttggaaatacaagaaaatagtgaggaggaaattgtgaagatgaaacaaagattagtgtcacaagttcttgaaatagggattatatttcattcggtgataattggagtaacaatgggaatgtcacaaaataagtgtaccattagacctttgattgctgcgctttcttttcatcagatttttgaaggtttgggtcttggtggttgcattgctcaggctgggtttaaggcagggacagtggtgtatatgtgcttaatgttcgcggtaacaacgccactcgggattgtactagggatggtgatatttgcagcgaccgggtacgatgatcagaacccgaacgcattgataatggagggtttattgggatcattctcttcaggtattctaatatacatggccttggttgacctaattgcattggatttcttccataacaagatgctgacgacttgcggtgaatcgggttctcgcctcaagaagctttgttttgtggctttggttttaggttctgcctctatgtcactacttgctctttgggcttagacaaaaagaatttaaggttatatactaatttggccacaggaaatagtatgaatacctaaacctgttttaacatatttgaactttggtttactttataaatatatctaattatcatttcttc

SEQ ID NO: 74628 - protein, 354 aa, Arabidopsis thaliana
  peptide (1)..(354): Ceres Seq. ID no. 5678752
TNLSLPLFLLLPQMASCVTGTEAAIRAAACRDGEEASHLKIVAVFAIFLTSVFGVWGPVLLAKYFHGKPLYDKAILVIKCFAAGVILSTSLVHVLPEAFESLADCQVSSRHPWKDFPFAGLVTMIGAITALLVDLTASEHMGHGGGGGGDGGMEYMPVGKAVGGLEMKEGKCGADLEIQENSEEEIVKMKQRLVSQVLEIGIIFHSVIIGVTMGMSQNKCTIRPLIAALSFHQIFEGLGLGGCIAQAGFKAGTVVYMCLMFAVTTPLGIVLGMVIFAATGYDDQNPNALIMEGLLGSFSSGILIYMALVDLIALDFFHNKMLTTCGESGSRLKKLCFVALVLGSASMSLLALWA

SEQ ID NO: 74629 - protein, 341 aa, Arabidopsis thaliana; identical to SEQ ID NO: 74397
  peptide (1)..(341): Ceres Seq. ID no. 5678753

SEQ ID NO: 74630 - protein, 231 aa, Arabidopsis thaliana; identical to SEQ ID NO: 26937
  peptide (1)..(231): Ceres Seq. ID no. 5678754

SEQ ID NO: 74631 - DNA, 1139 bp, Arabidopsis thaliana
  misc_feature (1)..(1139): Ceres Seq. ID no. 5678793
  misc_feature (1)..(1139): Ortholog of  Ceres SEQ ID NO 14307351 as cited in SEQ ID NO 54892
caatcatctgatctttccctctctcagcaatgcatgatcttcgattttctatcagtgttcaaagctgaaaaaaatcgaactgggtctgttgatttcttcaggtctaaaatcagattagattagagaagaagaagaagaatgctggaagctgtagatagctcaggagtggtgaatggaggattcccgcagattcagagcttttacggcgattgcagtagtgaagaagagttatcggtattgccacgtcatacaaaagtggtggtcaccggaaacaaccggacgaaatcggtgcttgttggtcttcaaggtgttgtcaaaaaagctgtcggtctcggtggttggcattggctggttttgacaaatggaatagaagtaaagttgcagaggaatgcgcttagtgtccttgaacctcctactggaaacgaagaagacgatgatcttgatttcgaaaacacacagaggaatggctctgatatgattgtttcttttccagcatctgaggacacactgaagcctcataagtcgaagctaagagggcagagatcatctcggtcatctcacaagacgatgagcaggtctctatcatctgactcgcaatcaaaaagttcgggttttactcctcctgaaaacatgaaggttgatcttagcaaattggaaatgcctgctttactgaattattggcgacattttaaccttgtggatgcaattccaaatccatcaaaggagcaactaattgacattgttcaaaggcacttcatgtctcagcaaatggatgagcttcaggttattgtggggtttgtccaagctgcaaagagaatgaagaaggcttgcaagtttcaatccaaagaatccagaaacactgatcttaactgcatcagctaaagaaaagccctgactcttaacaaatcctgtatgtacggtacatcaacttgtttaaccatttgtggcttgctaagtttagttcttctagtgatgtttggctaaagggtagatgttgtttcttctttgcttctgttgtttagccaatgtaagtaccatcaaaaaaaccaaataactctctaaagctccctattggaaactatcttgtctgatacgatctggagtgaccggtatgttgttagaatgtaaatatgtttggt

SEQ ID NO: 74632 - protein, 247 aa, Arabidopsis thaliana; identical to SEQ ID NO: 26839
  peptide (1)..(247): Ceres Seq. ID no. 5678794

SEQ ID NO: 74633 - protein, 135 aa, Arabidopsis thaliana; identical to SEQ ID NO: 26840
  peptide (1)..(135): Ceres Seq. ID no. 5678795

SEQ ID NO: 74634 - DNA, 1353 bp, Arabidopsis thaliana
  misc_feature (1)..(1353): Ceres Seq. ID no. 5678808
  misc_feature (1)..(1353): Ortholog of  Ceres SEQ ID NO 14304654 as cited in SEQ ID NO 53301
  misc_feature (1)..(1353): Ortholog of  Ceres SEQ ID NO 15172291 as cited in SEQ ID NO 55046
  misc_feature (1)..(1353): Ortholog of  Ceres SEQ ID NO 13658153 as cited in SEQ ID NO 66326
  misc_feature (1)..(1353): Ortholog of  Ceres SEQ ID NO 14303011 as cited in SEQ ID NO 67226
ttaaccttctgcttcatcaaaaagaaagagacacaaagagcgagagagggagagagatggaggtaatgcgagttcttcacatgaacaaaggaaacggtgaaacgagttatgccaagaactccaccgctcagagtaacataatatctctaggcagaagagtaatggacgaggccttgaagaagttaatgatgagcaattcagagatttcgagcattggaatcgccgacttaggctgctcctccggtccgaacagtctcttgtccatctccaacatagttgacacgatccacaacttgtgtcctgacctcgaccgtcctgtccctgagctcagagtctctctgaacgacctccctagcaatgacttcaactacatatgtgcttctttgccagagttttacgaccgggttaataataacaaggagggtttagggttcggtcgtggaggaggagaatcgtgttttgtgtcggccgtcccaggttcgttctacggacgtttgtttcctcgccggagccttcactttgtgcattcttcttctagtttacattggttatctcaggttccatgtcgtgaggcggagaaggaagacaggacaataacagctgatttagaaaacatggggaaaatatacatatcaaagacaagtcctaagagtgcacataaagcttatgctcttcaattccaaactgatttctgggtttttttgagatcgcgatctgaggagttggtcccgggaggccgaatggttttatcgttccttggtagaagatcactggatcccacaaccgaagagagttgctatcaatgggaactcctagctcaagctcttatgtccatggccaaagagggtatcatcgaggaagagaagatcgatgctttcaacgctccttactatgctgcgagctccgaagagttgaaaatggtgatagagaaagaagggtcattttcgatcgataggcttgagataagtccgattgattgggaaggtgggagtatcagtgaggagagttatgaccttgtaataaggtccaaacccgaagccctagctagtggccgaagagtgtctaataccataagagctgtggtcgagccgatgctagaacctactttcggtgaaaatgtgatggacgagctttttgaaaggtatgcaaagatcgtgggagagtacttctatgtaagctcgccacgatacgctattgttattctttcgctcgttagagccggttgatcgtgttataacatatgccaatatacatgtctttgggcctacaatgacatgatttggtagttttctaatcaagcatatgtaatataatttgcttcgagaataaaataataaaataaagtctgatgtt

SEQ ID NO: 74635 - protein, 407 aa, Arabidopsis thaliana
  peptide (1)..(407): Ceres Seq. ID no. 5678809
NLLLHQKERDTKSERGREMEVMRVLHMNKGNGETSYAKNSTAQSNIISLGRRVMDEALKKLMMSNSEISSIGIADLGCSSGPNSLLSISNIVDTIHNLCPDLDRPVPELRVSLNDLPSNDFNYICASLPEFYDRVNNNKEGLGFGRGGGESCFVSAVPGSFYGRLFPRRSLHFVHSSSSLHWLSQVPCREAEKEDRTITADLENMGKIYISKTSPKSAHKAYALQFQTDFWVFLRSRSEELVPGGRMVLSFLGRRSLDPTTEESCYQWELLAQALMSMAKEGIIEEEKIDAFNAPYYAASSEELKMVIEKEGSFSIDRLEISPIDWEGGSISEESYDLVIRSKPEALASGRRVSNTIRAVVEPMLEPTFGENVMDELFERYAKIVGEYFYVSSPRYAIVILSLVRAG

SEQ ID NO: 74636 - protein, 389 aa, Arabidopsis thaliana
  peptide (1)..(389): Ceres Seq. ID no. 5678810
MEVMRVLHMNKGNGETSYAKNSTAQSNIISLGRRVMDEALKKLMMSNSEISSIGIADLGCSSGPNSLLSISNIVDTIHNLCPDLDRPVPELRVSLNDLPSNDFNYICASLPEFYDRVNNNKEGLGFGRGGGESCFVSAVPGSFYGRLFPRRSLHFVHSSSSLHWLSQVPCREAEKEDRTITADLENMGKIYISKTSPKSAHKAYALQFQTDFWVFLRSRSEELVPGGRMVLSFLGRRSLDPTTEESCYQWELLAQALMSMAKEGIIEEEKIDAFNAPYYAASSEELKMVIEKEGSFSIDRLEISPIDWEGGSISEESYDLVIRSKPEALASGRRVSNTIRAVVEPMLEPTFGENVMDELFERYAKIVGEYFYVSSPRYAIVILSLVRAG

SEQ ID NO: 74637 - protein, 386 aa, Arabidopsis thaliana
  peptide (1)..(386): Ceres Seq. ID no. 5678811
MRVLHMNKGNGETSYAKNSTAQSNIISLGRRVMDEALKKLMMSNSEISSIGIADLGCSSGPNSLLSISNIVDTIHNLCPDLDRPVPELRVSLNDLPSNDFNYICASLPEFYDRVNNNKEGLGFGRGGGESCFVSAVPGSFYGRLFPRRSLHFVHSSSSLHWLSQVPCREAEKEDRTITADLENMGKIYISKTSPKSAHKAYALQFQTDFWVFLRSRSEELVPGGRMVLSFLGRRSLDPTTEESCYQWELLAQALMSMAKEGIIEEEKIDAFNAPYYAASSEELKMVIEKEGSFSIDRLEISPIDWEGGSISEESYDLVIRSKPEALASGRRVSNTIRAVVEPMLEPTFGENVMDELFERYAKIVGEYFYVSSPRYAIVILSLVRAG

SEQ ID NO: 74638 - DNA, 721 bp, Arabidopsis thaliana
  misc_feature (1)..(721): Ceres Seq. ID no. 5678816
  misc_feature (1)..(721): Ortholog of  Ceres SEQ ID NO 13505291 as cited in SEQ ID NO 56614
  misc_feature (1)..(721): Ortholog of  Ceres SEQ ID NO 13596535 as cited in SEQ ID NO 62321
  misc_feature (1)..(721): Ortholog of  Ceres SEQ ID NO 13597394 as cited in SEQ ID NO 63457
gttcatcttttgattttttgaaattgttagtaaagaaaggaaaaaagctttgatttcgatttctcaagctgtgtttttttatttttcttcttcgcatcaggaaggaattgaaaaagatttttggtgttaaaagatggatccagatgcagtcaaatcgactctctcgaatctagcatttggaaatgtaatggcggctgctgcaagaaattatcaaaaggaagttcttgcaaatgagaaggcgcaaggatcaaatcctgttaatgaagaggttgatcttgatgaacttatggatgatccagagctagaaagattgcacgcagataggattgcagcactaaagagagaggttgagaagagagaatcgtttaaaagacaagggcatggtgaatatcgagaggtgagtgaaggagatttcttgggtgaagtcaccaggagtgagaaagtgatatgtcatttctaccataaggaattttaccggtgcaagattatggacaagcatctgaaaactcttgcacctagacatgtggacacaaagttcattaaagtggacgcagagaatgctcctttctttgtcacgaagcttgcaataaagactttgccttgcgttgtgcttttcagcaagggagttgcgatggataggctagttgggttccaggatctgggaaccaaggacgatttcacaacgaataaactagagaacgttcttcttaaaaagggtatg

SEQ ID NO: 74639 - protein, 196 aa, Arabidopsis thaliana
  peptide (1)..(196): Ceres Seq. ID no. 5678817
MDPDAVKSTLSNLAFGNVMAAAARNYQKEVLANEKAQGSNPVNEEVDLDELMDDPELERLHADRIAALKREVEKRESFKRQGHGEYREVSEGDFLGEVTRSEKVICHFYHKEFYRCKIMDKHLKTLAPRHVDTKFIKVDAENAPFFVTKLAIKTLPCVVLFSKGVAMDRLVGFQDLGTKDDFTTNKLENVLLKKGM

SEQ ID NO: 74640 - protein, 178 aa, Arabidopsis thaliana
  peptide (1)..(178): Ceres Seq. ID no. 5678818
MAAAARNYQKEVLANEKAQGSNPVNEEVDLDELMDDPELERLHADRIAALKREVEKRESFKRQGHGEYREVSEGDFLGEVTRSEKVICHFYHKEFYRCKIMDKHLKTLAPRHVDTKFIKVDAENAPFFVTKLAIKTLPCVVLFSKGVAMDRLVGFQDLGTKDDFTTNKLENVLLKKGM

SEQ ID NO: 74641 - protein, 145 aa, Arabidopsis thaliana
  peptide (1)..(145): Ceres Seq. ID no. 5678819
MDDPELERLHADRIAALKREVEKRESFKRQGHGEYREVSEGDFLGEVTRSEKVICHFYHKEFYRCKIMDKHLKTLAPRHVDTKFIKVDAENAPFFVTKLAIKTLPCVVLFSKGVAMDRLVGFQDLGTKDDFTTNKLENVLLKKGM

SEQ ID NO: 74642 - DNA, 1265 bp, Arabidopsis thaliana
  misc_feature (1)..(1265): Ceres Seq. ID no. 5678835
  misc_feature (1)..(1265): Ortholog of  Ceres SEQ ID NO 14306617 as cited in SEQ ID NO 53026
gaaactctctttcagatttcaagaaacccttaaaatcctctctctgtctctttctgtttgtttgttttcttgtttccttctctctctctctttctttctttgtcttcctttcccaggttgtttttttttgctctctctgccttcttgactttcaaaagactctttctttcttttggattgattttggattctagggctctctttcttttagtgggtttttgttgttgttgttgtggtctctctgatgattactgaacttgagatggggaaaggtgagagtgagcttgagcttggtctagggctgagtcttggcggtggaacggcggccaagattggtaaatcaggtggtggtggcgcgtggggagagcgtggaaggcttttgacggctaaggattttccttctgttggttctaaacgtgctgctgattctgcttctcatgctggttcatctcctcctcgttcaagtcaagttgttggatggcctcctatagggtcacacaggatgaacagtttggttaataaccaagctacaaagtcagcaagagaagaagaagaagctggtaagaagaaagtgaaagatgatgaacctaaagatgtgacaaagaaagtgaatgggaaagtacaagttggatttattaaggtgaacatggatggagttgctataggaagaaaagtggatttgaatgctcattcttcttacgagaatttggcgcaaacattggaagatatgttctttcgcactaatccgggtactgtcgggttaaccagtcagttcactaaaccgttgaggcttttagatggatcgtctgagtttgtacttacttatgaagataaggaaggagattggatgcttgttggtgatgttccatggagaatgttcatcaactcggtgaaaaggctacgtgtgatgaaaacctctgaagctaatggactcgctgcacgaaatcaagaaccaaacgagagacagcgaaagcagccggtttagatctcttttcgacgttacggtgttacaggttttatattttggggttttgcaagtctgagatacttctgaagcaagcataagctagattgatcttatatccagtttgtgtattttcttggttcttataatggtttttactggttttctttagtttttttttttgctgtcttttaattttcggttgcgatttcactatatactatggatggaagagaatgctctttatatcttttactacactgtaaatatttgaagcttatctaatatcgtttttaagggt

SEQ ID NO: 74643 - protein, 246 aa, Arabidopsis thaliana; identical to SEQ ID NO: 29294
  peptide (1)..(246): Ceres Seq. ID no. 5678836

SEQ ID NO: 74644 - protein, 240 aa, Arabidopsis thaliana; identical to SEQ ID NO: 29295
  peptide (1)..(240): Ceres Seq. ID no. 5678837

SEQ ID NO: 74645 - protein, 160 aa, Arabidopsis thaliana; identical to SEQ ID NO: 29296
  peptide (1)..(160): Ceres Seq. ID no. 5678838

SEQ ID NO: 74646 - DNA, 757 bp, Arabidopsis thaliana
  misc_feature (1)..(757): Ceres Seq. ID no. 5678851
  misc_feature (1)..(757): Ortholog of  Ceres SEQ ID NO 12635789 as cited in SEQ ID NO 0
atccgcagaaaaccctattgctcccctttgctcaagctcagtgcctctttgcagcgaaagctcaaccaacaagacgatgattatctcagagaacaatcgcagagagatctgcaaataccttttcaaagagggagtatgctttgctaagaaggatttcaatctcccaaagcatccgttgattgatgtaccaaacctgcaagtgattaagctcatgcagagtttcaagtccaaggagtacgttagggagacatttgcgtggatgcattattattggtttctgactaatgaaggaattgagttcttgagaacttatcttaaccttccttccgatgttgtccctgctactttgaagaagtctgctaagcccggtggtcgtccctttggtggcccacctggtgatcgccaaagaggaccacctcgctctgatggagaccgtcccagatttggtgaccgtgatggataccgtggaggcccacgtggtggtgatgagaagggtggagctccagctgatttccagccgtctttccaaggaggtggtggtaggcctggttttggccgtggtgcaggcggttacagtgcagcagcaccatctggttcagggttcccttgaaaaatttgttgtcatattgcgacgatggaaggacagttttgttttttgttctagttctgtttgtgtaatgcaaatctggaatctataatctatctattaccttcaccttggtttaaacgaacaaatcctgtagtttcaggattagtg

SEQ ID NO: 74647 - protein, 202 aa, Arabidopsis thaliana; identical to SEQ ID NO: 28486
  peptide (1)..(202): Ceres Seq. ID no. 5678852

SEQ ID NO: 74648 - protein, 177 aa, Arabidopsis thaliana; identical to SEQ ID NO: 28487
  peptide (1)..(177): Ceres Seq. ID no. 5678853

SEQ ID NO: 74649 - protein, 132 aa, Arabidopsis thaliana; identical to SEQ ID NO: 28488
  peptide (1)..(132): Ceres Seq. ID no. 5678854

SEQ ID NO: 74650 - DNA, 1675 bp, Arabidopsis thaliana
  misc_feature (1)..(1675): Ceres Seq. ID no. 5678877
  misc_feature (1)..(1675): Ortholog of  Ceres SEQ ID NO 14304944 as cited in SEQ ID NO 53041
  misc_feature (1)..(1675): Ortholog of  Ceres SEQ ID NO 15171508 as cited in SEQ ID NO 58526
  misc_feature (1)..(1675): Ortholog of  Ceres SEQ ID NO 13654989 as cited in SEQ ID NO 63117
  misc_feature (1)..(1675): Ortholog of  Ceres SEQ ID NO 13584744 as cited in SEQ ID NO 69137
agatgtaatttgtataattttagtaactcttcagtttttttttgttttaaaaatatattttctctctctctgtcttcctgcaatctatcgccggccgattcaataatttcgctttactctgccaaaaaagtttgttcttttgttttctgggattatccaaagagaagaaacagaggaaatcaatctcttttttagtttcagaccctaaatcctaggttttgaagttttgtttctttagtaattttgtcaggttttgtgtctggtgttgggatttttcggagcttggtttcttgaaccagctccattttctaaaaattccttctttaaatccccattgttgtaagtcttaaagaaaaaagaagatgacttgttgtttctcttgtttgaatcctcgaaccaaggacataagagtcgacattgataacgctcgatgcaactctcgttaccaaaccgattcatcagttcatggaagtgatacaacaggaacagagtcgatttcgggtatcttagtaaatggtaaagtgaatagtccgatacctggtggtggagctcggagcttcacgttcaaggagttagctgcagctacaagaaacttccgggaagttaatttgctcggagaaggaggttttggcagagtttataagggacgtttagattcaggacaagtagtggctattaagcaattgaatccagatgggcttcaagggaaccgagagtttatagtagaagttcttatgcttagcttattgcatcatcccaatctcgttacattgatcggttactgtacttctggtgatcaaagacttcttgtctatgaatacatgccaatgggaagcttagaagatcacctttttgatcttgagtctaatcaagaaccattaagctggaatactcgaatgaaaatcgcggttggtgcagctcgaggaatagagtatcttcactgcacagctaacccgccagtgatttaccgtgatttgaaatccgcaaacatattgttagataaagagttcagtccaaaactctcggatttcggattggcgaaactcggtccagttggtgatcgaactcatgtatcgactcgtgtcatgggaacttacggttactgtgctcctgaatacgcaatgagcgggaaattaactgttaaatcggatatctactgcttcggtgtagtgttgcttgagctgattactgggagaaaagctattgatttaggtcaaaagcaaggcgagcagaatcttgttacttggtcacgtccatacctcaaggatcagaagaagtttggacatttagtggatccgtctctacgaggaaaatacccaagacggtgtttaaactatgcgattgcgattattgcaatgtgtcttaatgaagaagctcattatcgaccgttcataggtgacatagttgtggcactagagtacttagccgcacagagcagatctcatgaagctcgaaacgtctcatcaccgtcaccagagatttcaagaacgccgcgacgagacttgtaaaaactcaaaaacagcttttaagaatttcagtttggtgttgtgtaaaaatggttttttttgtttctttctcagaaaacaatatatgtttggtaaatgtttcgttattagtctcttttacttgatgtatatggcaattatggaaacaattaaagttcttttatatgtgt

SEQ ID NO: 74651 - protein, 381 aa, Arabidopsis thaliana; identical to SEQ ID NO: 36777
  peptide (1)..(381): Ceres Seq. ID no. 5678878

SEQ ID NO: 74652 - protein, 257 aa, Arabidopsis thaliana; identical to SEQ ID NO: 36778
  peptide (1)..(257): Ceres Seq. ID no. 5678879

SEQ ID NO: 74653 - protein, 228 aa, Arabidopsis thaliana; identical to SEQ ID NO: 36779
  peptide (1)..(228): Ceres Seq. ID no. 5678880

SEQ ID NO: 74654 - DNA, 990 bp, Arabidopsis thaliana
  misc_feature (1)..(990): Ceres Seq. ID no. 5678897
  misc_feature (1)..(990): Ortholog of  Ceres SEQ ID NO 15169248 as cited in SEQ ID NO 55022
  misc_feature (1)..(990): Ortholog of  Ceres SEQ ID NO 14315042 as cited in SEQ ID NO 56959
  misc_feature (1)..(990): Ortholog of  Ceres SEQ ID NO 12608620 as cited in SEQ ID NO 60192
  misc_feature (1)..(990): Ortholog of  Ceres SEQ ID NO 15173077 as cited in SEQ ID NO 64566
  misc_feature (1)..(990): Ortholog of  Ceres SEQ ID NO 13662898 as cited in SEQ ID NO 66199
  misc_feature (1)..(990): Ortholog of  Ceres SEQ ID NO 13654314 as cited in SEQ ID NO 67914
tcatattctctcactttctctctcagcttacgaacaagaaaaaaagaagaatctttagccacctttgagatcaaaagatgaacatcgctcacactatcttcggcgttttcggaaatgcaactgctctgtttcttttcttggctccttcgataacattcaagagaatcatcaagaacaaatccactgaacaattctctggtatcccttatccaatgactctcctcaactgtctcctctctgcttggtatggacttccctttgtgtcaaaagacaacacacttgtgagcacaatcaatggcacaggagcagtgatcgaaacagtctacgtgttaatctttcttttctacgcaccaaagaaggagaaaattaagatctttggtatcttctcttgcgttttggctgtattcgcaacagtagctctcgtctctctctttgctcttcaaggaaacggtagaaaactcttttgtggtctcgcagctactgttttctccatcatcatgtacgcttctccactctccatcatgagattggtggtaaagacgaagagtgtagagtttatgccattctttttgtcactctttgtcttcctctgtggtacttcgtggttcgtctatggtctaatcggtcgtgacccttttgttgcaatcccaaatgggtttggatgtgcattagggacactgcaattgatactatacttcatctactgtggaaacaaaggagagaaatctgcagatgctcagaaagatgagaagtcagtggagatgaaagatgatgagaagaagcagaatgtggttaatggaaagcaagaccttcaagtttaaaagagcttttgaggatgatttggttatgtgatttcgtattaactctgcttaactagagttttccttttcgtttcgttggaatgtaaaaaaaatgatgctgaaaaatgtaacgtttcctagtttcgtactgatacactagtgattgatgaagaatgacgatgccttttgt

SEQ ID NO: 74655 - protein, 247 aa, Arabidopsis thaliana; identical to SEQ ID NO: 27403
  peptide (1)..(247): Ceres Seq. ID no. 5678898

SEQ ID NO: 74656 - protein, 202 aa, Arabidopsis thaliana; identical to SEQ ID NO: 27404
  peptide (1)..(202): Ceres Seq. ID no. 5678899

SEQ ID NO: 74657 - DNA, 1169 bp, Arabidopsis thaliana
  misc_feature (1)..(1169): Ceres Seq. ID no. 5678921
  misc_feature (1)..(1169): Ortholog of  Ceres SEQ ID NO 13647847 as cited in SEQ ID NO 20430
  misc_feature (1)..(1169): Ortholog of  Ceres SEQ ID NO 15171696 as cited in SEQ ID NO 59997
atctttttgtaatcgatttgcaatttcaatttcgcaaagttggatcatgggcaatgtcataagcggtggaagccgcccggaaaatcatcgggaccgtacttcgccgccgtatccaaaccctaatgctcagtaccaaggcaattatccgtcgccgtaccaagattgtgctaggtatccgtatggagagatggcgtctccagtgcaatacgtagagcatcaggaagcagtgactataaggaacgacatcaatctgaagaaagaaactttgagacttgagcctgatgaacagaaccctggcaagtttttgctctccttcacttttgacgcctctgttcctggaagcatcactgtaatgttctttgctaaagaaggcaaagactgtaaccttattgcgacaaaggaggatctttttccatccactcaagttagttttgcaaaaggtctggaacagagattcaagcaggcttgtgggacagggattgatttctcagatatgtcagaggcagatttggttgaggcaaacgagacagatgtgtatcatgtggcagtgaaagcagaggtagtatcagaagatgatcatcctgagtctgggacaccaaacagacagataactcatgtggttttagagaaagatcataagggtgagtacaaggcgagagtggtgaagcagatcctgtgggtgaatgggaataggtatgttcttcaagagatttatgggattggtaatacagttgatgataatggagaagatgcgaatgaaagaggaaaagaatgcgtcatctgcttatctgagccacgggataccactgttctcccttgcaggcacatgtgtatgtgtagcggttgtgcaaagcttttgaggtttcagacaaacctctgccccatctgtagacaaccggtggataggcttttggagataacagtgaacaacaacgacaggaactagtgagccttgctacgttactcttctcctgtttttatataaagactgcttcccaatgttcttgtttgtggtatcggtatatatgcaggcattagaactcaagttactaacttacatatgccaaatgacacttaaattccgggttttacttccaagtgttttgtaaatcatcatgctactttgtctagcggtcttcgttgttaatgaagtgaacaacttttgcagt

SEQ ID NO: 74658 - protein, 314 aa, Arabidopsis thaliana; identical to SEQ ID NO: 39826
  peptide (1)..(314): Ceres Seq. ID no. 5678922

SEQ ID NO: 74659 - protein, 299 aa, Arabidopsis thaliana; identical to SEQ ID NO: 39827
  peptide (1)..(299): Ceres Seq. ID no. 5678923

SEQ ID NO: 74660 - protein, 252 aa, Arabidopsis thaliana; identical to SEQ ID NO: 39828
  peptide (1)..(252): Ceres Seq. ID no. 5678924

SEQ ID NO: 74661 - DNA, 655 bp, Arabidopsis thaliana
  misc_feature (1)..(655): Ceres Seq. ID no. 5678925
  misc_feature (1)..(655): Ortholog of  Ceres SEQ ID NO 15179080 as cited in SEQ ID NO 0
agatcgaaaaaaaatcgagaagcgaatagcggaagaacagaaaaagggaaattctgagaatcaaatcggaaaggtagaagaatcgagtcggaaaaatggaaacgacgaagagtaacagcagcgagtccgatgtcaacgccaaatgggacgcttgtctcgatctcactgctcgtcgctttgtctactcttccctcggcggcgctttcgccggtcttctcttcttcaggagtccggttacgagatgggcgtcgattgcttttggtgctggaattggtattggttctgcatacacagattgttctcgtgtttttgatgcgtcttcttcaacttcagctactttattagcagctcccaagagtacggagacttctgtatctcaggcagcagaagagtgaagacaacgaggaagcttggaggtaaaaaaccaaacattgatagagttacattacgaaatggtaattgatcttgcaggacaaggcttttgagataacgccattgttaaaaaaaaacttttgcttctcagtgtggttttgtacactgatgtcaaaattgttaatgacccactcattttttttgttttgaaaaatcttatgttcttttacttgagaaataattcctccggtttgatttgtttgcctctactgttccttcattc

SEQ ID NO: 74662 - protein, 99 aa, Arabidopsis thaliana; identical to SEQ ID NO: 24405
  peptide (1)..(99): Ceres Seq. ID no. 5678926

SEQ ID NO: 74663 - protein, 71 aa, Arabidopsis thaliana; identical to SEQ ID NO: 24406
  peptide (1)..(71): Ceres Seq. ID no. 5678927

SEQ ID NO: 74664 - protein, 56 aa, Arabidopsis thaliana; identical to SEQ ID NO: 24407
  peptide (1)..(56): Ceres Seq. ID no. 5678928

SEQ ID NO: 74665 - DNA, 850 bp, Arabidopsis thaliana
  misc_feature (1)..(850): Ceres Seq. ID no. 5678948
  misc_feature (1)..(850): Ortholog of  Ceres SEQ ID NO 13595067 as cited in SEQ ID NO 55857
  misc_feature (1)..(850): Ortholog of  Ceres SEQ ID NO 12635516 as cited in SEQ ID NO 0
  misc_feature (1)..(850): Ortholog of  Ceres SEQ ID NO 15179376 as cited in SEQ ID NO 0
acaagtcaccaccatttctctctagaaaatatcagaaaaacaaaaccatctcaaagtttcttgagaagaaaaaaagggtcaagaaagatgcctaaagacaggaatatcggaatcgccatggatttctcagagagcagcaagaacgctctgaaatgggcgatcgagaacttagcagacaaaggagacacgatttacatcatccacactctaccactctctggcgatgaatctcgtaactccctctggttcaaatccggttctcctctcataccgttggcagagtttagggaaccggagattatggagaaatacggtgtcaaaaccgacatcgcatgtcttgatatgctcgacactggttcgaggcagaaagaggtttttatccgaatcaacaatacatttttgttcaaagactctttggcaaagacaataactaatggtggttttgttgaaataaaaaggtgcatgtagtgaccaagttatactggggagatgcaagagagaagcttgttgatgctgttaaagatcttaaactcgattctattgtcatgggaagcagaggactcagtgctcttcaaaggataataatgggaagcgtgagcagctttgtgatccaacacgcgccttgccctgtcaccgttgtcaaggataacgaataaacgattctcactacaaaaaaaaaaaaaaaaaaaaactgtctttatcttataagtcctaccaaataatcatcgcaatttatgctttttagtttttattaataaaagaatctttatgttggttttatttgtaatttgactacaacaaaaaaagaacccagagtgttttcatcttctagttttgagagtttcttgct

SEQ ID NO: 74666 - protein, 155 aa, Arabidopsis thaliana
  peptide (1)..(155): Ceres Seq. ID no. 5678949
TSHHHFSLENIRKTKPSQSFLRRKKGSRKMPKDRNIGIAMDFSESSKNALKWAIENLADKGDTIYIIHTLPLSGDESRNSLWFKSGSPLIPLAEFREPEIMEKYGVKTDIACLDMLDTGSRQKEVFIRINNTFLFKDSLAKTITNGGFVEIKRCM

SEQ ID NO: 74667 - protein, 126 aa, Arabidopsis thaliana; identical to SEQ ID NO: 37313
  peptide (1)..(126): Ceres Seq. ID no. 5678950

SEQ ID NO: 74668 - protein, 116 aa, Arabidopsis thaliana; identical to SEQ ID NO: 37314
  peptide (1)..(116): Ceres Seq. ID no. 5678951

SEQ ID NO: 74669 - DNA, 1245 bp, Arabidopsis thaliana
  misc_feature (1)..(1245): Ceres Seq. ID no. 5678956
  misc_feature (1)..(1245): Ortholog of  Ceres SEQ ID NO 15179026 as cited in SEQ ID NO 0
gccgttgacttcttttcctctgtaagtcaactctctgtttgtctctacatacatccatccatctatctttggatcgtcattttctctttgtggactaaagtttaagagagaacatgggtgtatttcctggatttggtagctggatcaatcaaaacactcaacagcttcctcacaaggcagagtccgagagatctgagaatgcgaaatttaagtcaaagtcagagacaaacactcatgaggcgagagatgaaatgaaacagcaattaaaactttggagagatacagagaagaaggaacaatggaatgatgctcctcctaatgtgaaggtggaaagaagaaatgatctagaatggggtatgtcaactatagaaatgcaatttacattaggattgcctcctcaagcagcttacaacgttttaactaatccagacaaccaaccatacttcagaatcatcaaaggacgccaacttttggtttcttcttttaacttatcatttcattgattcaaataaaataatgataacaagatttgagagtgtgtcatagttttcttcttatgaaaggaaaacatatcaagaaaagttgtgtcgccggataccgggaaagggcagcttgtggacaccaagaaagctgtggcctggaacttcctttggttatctggaactatcccgataattgcaaattttatcgaacaccgacaagtccttaccgtacaatatacggtaaagaataagatgttcataaacatgtttgtcagtataaagtggagccgctatacgtagattcagaacgcttgtgcaaacaaaagaagccgaagagtacagaagaatacgaaagatgtagccgcggacaaggaaggattgggtcgaaagtgacattggaccagatgtttaagccttcttttatttttaatctgccaccgatttcttggtacgttcgtcggataaccatcaagaccatgaaaactctgatcgaagatcttcaaattacaagtgccatgatccgaggtatttgaaacgtcccaaatccgctacaaattgatagaacatcaaataaagttataaaatcactttttataaatttaaatagcagaatattacatatgactttagaagtgtatgttcttatggtcactttataacatcaaattaaatgtatagaaaatgtttctaaccaatagttcttaattagacgattatacatagtcaatttgtgtcttttcatattttttaatatcatatattt

SEQ ID NO: 74670 - protein, 129 aa, Arabidopsis thaliana; identical to SEQ ID NO: 39116
  peptide (1)..(129): Ceres Seq. ID no. 5678957

SEQ ID NO: 74671 - protein, 83 aa, Arabidopsis thaliana; identical to SEQ ID NO: 39117
  peptide (1)..(83): Ceres Seq. ID no. 5678958

SEQ ID NO: 74672 - DNA, 1541 bp, Arabidopsis thaliana
  misc_feature (1)..(1541): Ceres Seq. ID no. 5678976
  misc_feature (1)..(1541): Ortholog of  Ceres SEQ ID NO 13542155 as cited in SEQ ID NO 64236
ctctttcgaactctccgtcacttccatttcatttctatttgaatcttctcaaagctacacagatctctgaaatcgaaaaagcttgagctgtgttaatggcggaggagaaatgggtggtgatggtgacggcgcagactccaacgaatatcgccgtgattaagtattggggaaagagagatgaggttcggattcttcccattaatgatagcattagcgtcacgcttgatcctgatcacctctgtactctcaccaccgtcgctgttagtccttcctttgatcgagatcgaatgtggctcaatggcaaggaaatctcgctttctggaagtaggtaccagaattgcttgagggaaattcgaagtcgtgctgatgatgtagaagataaagaaaagggtatcaagattgcgaagaaagattgggagaagctgcatctgcacattgcttctcataacaacttccctactgctgctggcttagcatcttctgctgctggttttgcttgcttagtttttgctcttgccaagttgatgaatgtaaatgaagatccaagccaactttctgctatagcaaggcaaggttcaggaagtgcttgccgtagtttatttgggggatttgtcaagtggaatatgggaaacaaagaagatggaagtgacagtgttgcagttcaactggtagatgataagcactgggatgatcttgttatcattattgctgtggttagttcacgacagaaggaaacaagcagcacctcgggaatgcgtgagagtgttgagacaagtttgcttttacagcatagagcaaaggaagttgtcccagtacggattttgcaaatggaagaagctataaagaatcgagatttcacatcttttacaaaattgacgtgttcagacagtaatcagtttcatgctgtttgtatggatacatctccacccatattctacatgaatgacacctcccacaggataatcagcttagttgaaaagtggaaccgttctgccggtacaccagagattgcttatacatttgatgctggcccaaatgcagtcatgattgcaagaaacaggaaagtagcagttgaattgctgcaggggctgctctactgcttccctcctaagcctgacacagacatgaagagttacgtactgggggatacatcgatagtaaaagaggcaggcttggaaggagagcttccacaaggaattaaagacaaaattggaagtcaggatcaaaaaggtgaagtgagttattttatatgcagcagacctggaagaggtcctgtggtgcttcaagaccaaactcaagctcttctccatcctcaaactggcctccccaaataaccatttctatgtcttgttgttacttcaactctgagatttgcaacagcttcatcttttgctttgccagctccaactcttgtcctaagagagcactcttctgaatcttttcccaattatttgtgtttacgtacaattcttctgcatcgggtgcaaaaaacaaaacaatcaatattgcaaacgaataagatcttgatgctaaatctgagt

SEQ ID NO: 74673 - protein, 412 aa, Arabidopsis thaliana; identical to SEQ ID NO: 23100
  peptide (1)..(412): Ceres Seq. ID no. 5678977

SEQ ID NO: 74674 - protein, 404 aa, Arabidopsis thaliana; identical to SEQ ID NO: 23101
  peptide (1)..(404): Ceres Seq. ID no. 5678978

SEQ ID NO: 74675 - protein, 348 aa, Arabidopsis thaliana; identical to SEQ ID NO: 23102
  peptide (1)..(348): Ceres Seq. ID no. 5678979

SEQ ID NO: 74676 - DNA, 1005 bp, Arabidopsis thaliana
  misc_feature (1)..(1005): Ceres Seq. ID no. 5679035
  misc_feature (1)..(1005): Ortholog of  Ceres SEQ ID NO 13647754 as cited in SEQ ID NO 20415
atataatctcgattctcttcaacggtcctcaattatcctaaattcagatcataaaaacgctaacttttaatttctttctttctgagaaattggttctcatcgttggaatcgaaaaatgggacgaatcggtttagtagtgactgatctggtattgtcgttcatgtggatatgggcaggagttctggtcaacattttagtccatggagttcttggatttagccggaccgatccttccggtgagatcgttcgttatctcttctctatcatctccatgttcatcttcgcctaccttcaacaagccaccaaaggcgggctttataatcctttgaccgctttggctgctggagtctccggtggcttcagcagtttcatcttctccgtcttcgttcgaatccccgtcgaggtaataggatcaattcttgcggttaagcatatcattcacgtattccctgagattgggaaaggacctaaactaaatgtagcaattcaccacggtgctttaacagaagggatactaacattcttcattgtactgctctcaatgggactaacaagaaaaatcccgggaagtttcttcatgaagacttggatcggtagtcttgctaagttaactcttcatattcttggctctgatcttaccggtggatgcatgaaccctgcagctgttatgggatgggcttatgcacgcggtgaacatataacgaaagagcatttacttgtgtattggcttggacctgtgaaggctacgttgcttgcagtttggttcttcaaagttgtgtttaagcctctcaccgaagaacaagagaaacctaaggccaaatctgagtgaggaatgaggaatgagctcagctttcatatttaatcctctctggataaatctcctttacacaagacacagagggtaggattgtttccagggatattttcgtagattttgtaatgtgttttttttttatgttgcaaactcaactgtatcaaccagttcaataaaatctgaaatttaag

SEQ ID NO: 74677 - protein, 237 aa, Arabidopsis thaliana; identical to SEQ ID NO: 21971
  peptide (1)..(237): Ceres Seq. ID no. 5679036

SEQ ID NO: 74678 - protein, 222 aa, Arabidopsis thaliana; identical to SEQ ID NO: 21972
  peptide (1)..(222): Ceres Seq. ID no. 5679037

SEQ ID NO: 74679 - protein, 185 aa, Arabidopsis thaliana; identical to SEQ ID NO: 21973
  peptide (1)..(185): Ceres Seq. ID no. 5679038

SEQ ID NO: 74680 - DNA, 920 bp, Arabidopsis thaliana
  misc_feature (1)..(920): Ceres Seq. ID no. 5679058
  misc_feature (1)..(920): Ortholog of  Ceres SEQ ID NO 12619999 as cited in SEQ ID NO 66123
  misc_feature (1)..(920): Ortholog of  Ceres SEQ ID NO 13656436 as cited in SEQ ID NO 69154
aaaggcgttacagagaagaagaagaaggagaaatgtcagacgacgacgagagaggcgaagagtacctcttcaagattgttatcatcggtgattccgccgtcggcaaatccaatctcctcactcgctacgcccgtaacgagttcaatcccaattccaaagccactatcggcgtcgagtttcagactcagagcatgctcatcgacggcaaagaggtcaaagctcagatttgggataccgccggtcaggaacgcttccgcgccgttacatctgcttattaccgtggcgccgttggagccctcgtcgtctacgatatcactcgtagctccactttcgaaaacgtcggtcgctggctcgatgagctcaacactcattctgatacaacagtagcaaaaatgcttattgggaacaaatgtgatctcgagagcataagagcggtgagtgttgaggaaggcaagagtcttgctgagtctgaaggtttgtttttcatggagacctctgcgttggactcgaccaatgtaaagacggctttcgagatggttattcgggagatctatagcaacattagtcgaaagcaattgaactctgattcttacaaagaggagctgactgtgaatcgtgttagcttggttaagaacgagaacgaagggacaaagacattctcttgctgttcgaggtaacatctttgtaacggtttctctttgtcctgaggattggtttcgggttgaattgtgttcctggtaaacttatagaaaggcagagatatattcttatagttctcagttaaagtaaaagaagaagagagaaagatgttttgagtttctttgttacgcatacagaaaaagtttggttagtgtataagttatgttctcatttgtaacttttgtaaacttatgattgttaaatcaattttgatattttcc

SEQ ID NO: 74681 - protein, 224 aa, Arabidopsis thaliana
  peptide (1)..(224): Ceres Seq. ID no. 5679059
RRYREEEEGEMSDDDERGEEYLFKIVIIGDSAVGKSNLLTRYARNEFNPNSKATIGVEFQTQSMLIDGKEVKAQIWDTAGQERFRAVTSAYYRGAVGALVVYDITRSSTFENVGRWLDELNTHSDTTVAKMLIGNKCDLESIRAVSVEEGKSLAESEGLFFMETSALDSTNVKTAFEMVIREIYSNISRKQLNSDSYKEELTVNRVSLVKNENEGTKTFSCCSR

SEQ ID NO: 74682 - protein, 214 aa, Arabidopsis thaliana; identical to SEQ ID NO: 24892
  peptide (1)..(214): Ceres Seq. ID no. 5679060

SEQ ID NO: 74683 - protein, 161 aa, Arabidopsis thaliana; identical to SEQ ID NO: 24893
  peptide (1)..(161): Ceres Seq. ID no. 5679061

SEQ ID NO: 74684 - DNA, 1220 bp, Arabidopsis thaliana
  misc_feature (1)..(1220): Ceres Seq. ID no. 5679066
  misc_feature (1)..(1220): Ortholog of  Ceres SEQ ID NO 13583408 as cited in SEQ ID NO 62616
  misc_feature (1)..(1220): Ortholog of  Ceres SEQ ID NO 15179752 as cited in SEQ ID NO 63074
aagttttcttttgattcattataatttgtttgttctgatgtttgtgagatcgataaacccagttgttctagttctattgtagagaaattcactttgattttagatttagaatcgttgcattgagttttccgatcttctataattgctccttttcattttgctgtttggttttaaacattgtcgttgatgttcctgccttgcttctctgtgattaacaatctgttcaatttctcaaaggtgtcttttttatttgattagtatagcttatttttggtttgtttatggcatgctatgtatgtaggagaaatggctgaatccaaggtagtggttccagagtctgtgctaaagaagatcaagaggcaagaggaatgggcattggccaagaaagatgaagctgtagctgctaagaagaagagtgttgaggcccgcaagcttatcttcaagagagctgagcagtatgccaaagaatacgctgagaaggataacgagttgatccgattgaagcgggaggctaagttgaaaggaggtttctacgttgaccctgaggctaagttgctctttatcattcgtatccgtggtatcaatgccattgacccaaaaaccaagaagattctgcagctcctgcgtttgagacagatcttcaatggtgtgtttcttaaggtgaacaaggcaacagtaaacatgctgcgccgagttgaaccatacgtgacttacggatacccaaacttgaagagcgttaaggaactgatctacaaaagaggttatggaaagctgaaccaccagaggatagcacttactgacaactccattgtggatcaggctctcggaaagcatgggatcatctgcgttgaggatctcatccacgagatcatgactgttggacctcacttcaaggaagccaacaacttcctgtggccattccaattgaaggcaccactcggtggccttaagaagaagagaaaccactacgtcgaaggtggtgatgctggaaacagggagaatttcatcaacgagcttgtcaggagaatgaattgatgaaagcttccttctttatctttgcaaatttcaaagattttgggaccgagtttttttttttttgttcaagttatcagagacttgtgatcttttatccgagataggctttttatgactaatcatgttattttccaatggcgggcttttaaattgatcttgaatttttattggctgttagattgttc

SEQ ID NO: 74685 - protein, 247 aa, Arabidopsis thaliana; identical to SEQ ID NO: 23648
  peptide (1)..(247): Ceres Seq. ID no. 5679067

SEQ ID NO: 74686 - protein, 242 aa, Arabidopsis thaliana; identical to SEQ ID NO: 23649
  peptide (1)..(242): Ceres Seq. ID no. 5679068

SEQ ID NO: 74687 - DNA, 1085 bp, Arabidopsis thaliana
  misc_feature (1)..(1085): Ceres Seq. ID no. 5679072
  misc_feature (1)..(1085): Ortholog of  Ceres SEQ ID NO 13583408 as cited in SEQ ID NO 62616
gttttgtcctccttctacgccgcacactatctcttcctctctctcagacgagatttcctcttcatctcaagagaaatggctgaatccaaggtagtggttccagagtctgtgctaaagaagatcaagaggcaagaggaatgggcattggccaagaaagatgaagctgtagctgctaagaagaagagtgttgaggcccgcaagcttatcttcaagagagctgagcagtatgccaaagaatacgctgagaaggataacgagttgatccgattgaagcgggaggctaagttgaaaggaggtttctacgttgaccctgaggctaagttgctctttatcattcgtatccgtggtatcaatgccattgacccaaaaaccaagaagattctgcagctcctgcgtttgagacaggtaggtttcacagtttgttattttcatccagctatattagcctaacatatgattattgattaatatttgttatatgttcaaactaatatgtgatagttgcctgttcatcatttttaaaagagagtagaagactattgcgttgtcaagaagtttactttcgtatacatttgtgcagatcttcaatggtgtgtttcttaaggtgaacaaggcaacagtaaacatgctgcgccgagttgaaccatacgtgacttacggatacccaaacttgaagagcgttaaggaactgatctacaaaagaggttatggaaagctgaaccaccagaggatagcacttactgacaactccattgtggatcaggctctcggaaagcatgggatcatctgcgttgaggatctcatccacgagatcatgactgttggacctcacttcaaggaagccaacaacttcctgtggccattccaattgaaggcaccactcggtggccttaagaagaagagaaaccactacgtcgaaggtggtgatgctggaaacagggagaatttcatcaacgagcttgtcaggagaatgaattgatgaaagcttccttctttatctttgcaaatttcaaagattttgggaccgagtttttttttttttgttcaagttatcagagacttgtgatcttttatccgagataggc

SEQ ID NO: 74688 - protein, 149 aa, Arabidopsis thaliana
  peptide (1)..(149): Ceres Seq. ID no. 5679073
VLSSFYAAHYLFLSLRRDFLFISREMAESKVVVPESVLKKIKRQEEWALAKKDEAVAAKKKSVEARKLIFKRAEQYAKEYAEKDNELIRLKREAKLKGGFYVDPEAKLLFIIRIRGINAIDPKTKKILQLLRLRQVGFTVCYFHPAILA

SEQ ID NO: 74689 - protein, 124 aa, Arabidopsis thaliana; identical to SEQ ID NO: 21660
  peptide (1)..(124): Ceres Seq. ID no. 5679074

SEQ ID NO: 74690 - protein, 117 aa, Arabidopsis thaliana; identical to SEQ ID NO: 21661
  peptide (1)..(117): Ceres Seq. ID no. 5679075

SEQ ID NO: 74691 - DNA, 1355 bp, Arabidopsis thaliana
  misc_feature (1)..(1355): Ceres Seq. ID no. 5679154
  misc_feature (1)..(1355): Ortholog of  Ceres SEQ ID NO 13596030 as cited in SEQ ID NO 62043
gtcgctttagcttctccggtttttaagcaagtaatcttctttcgtctctatcttctttacttgattgcttattcatctgttgattctgtggttaggtttgattcttctggctctgttttgttctgtttttggtgtttaattcttcttagcaagcaagtaatattcgatcgtcactgtttttgctttgattttgtgatttctctatcaaagattagaactttacgtgaccctttaagcgatcaacaattatctcactgttttttcagataagggtatatgagtttgttggacatgggtggagatatgatggaagatgattgggaatttgcgtcatcatcaaaccctaaaagaaccctagttcttgtgggccgtactggaaacggaaagagtgcgacaggtaacagtatccttgggaggaaagcttttaggtcaagagctagaactgtaggagtgacaagcacgtgcgagtcacagagagttgttcaagaagatggtgatatcattaatgttgttgatactcctggtttgtttgatttgtctactgcagctgattttattggtaaagagattgtgaggtgtataagtttggcagaagatgggattcatgcgatcttgttggtattctctgtgaggcggcttgctgaagaggagcaaactgtgcttagtttcttgcaagcgctattcggcagtaagatcgctgactatatgatcgttgtttttaccggtggcgatgagttggaagagaatgaggagacattggaggagtatttggctgactattgccctgagtttcttaaagaaattcttgggatatgtgacaatcggttggtgttgtttaataacaagactactgataaggtgaagaaagctgagcaagttcagaagcttctctcacttgttgaatctgttgttaaacagaacaatggaaaaccgtattcagatgagttgttccatgagctacaggaagaggctatcaagctaagggaccagaaaaaggaggttgagttacttcagggttactctaataatgagatagatgagttcaagaagcaaatcgatatgtcctatgataggcagcttagccgcatcaccgagatggtggagactaagctgagagacactgctaagagactagagcagcaactaggtgaagagcaagctgcaagacttgaagcggagaagagggcaaacgaagttcagaagcggtcgagcgatgagattaagaagctcagagagaatctggagagggcggaaaaagagacgaaggaacttcagaaaaaactgggaaagtgcatcaatctatgatatgttgagatgttgtagctccagtgaaatctgataagatcattcatgtc

SEQ ID NO: 74692 - protein, 342 aa, Arabidopsis thaliana; identical to SEQ ID NO: 23839
  peptide (1)..(342): Ceres Seq. ID no. 5679155

SEQ ID NO: 74693 - protein, 337 aa, Arabidopsis thaliana; identical to SEQ ID NO: 23840
  peptide (1)..(337): Ceres Seq. ID no. 5679156

SEQ ID NO: 74694 - protein, 333 aa, Arabidopsis thaliana; identical to SEQ ID NO: 23841
  peptide (1)..(333): Ceres Seq. ID no. 5679157

SEQ ID NO: 74695 - DNA, 1014 bp, Arabidopsis thaliana
  misc_feature (1)..(1014): Ceres Seq. ID no. 5679158
  misc_feature (1)..(1014): Ortholog of  Ceres SEQ ID NO 14305357 as cited in SEQ ID NO 60046
  misc_feature (1)..(1014): Ortholog of  Ceres SEQ ID NO 14313511 as cited in SEQ ID NO 64459
  misc_feature (1)..(1014): Ortholog of  Ceres SEQ ID NO 14303006 as cited in SEQ ID NO 67498
  misc_feature (1)..(1014): Ortholog of  Ceres SEQ ID NO 13599627 as cited in SEQ ID NO 0
  misc_feature (1)..(1014): Ortholog of  Ceres SEQ ID NO 14305069 as cited in SEQ ID NO 0
aaacacgcctttatcatagtttctatctccgatgacacaaaacgaggaagattatttgacattttaagctgaattgctctgaaatctcaattgtataatcatctcctgggtcgtcgttatcgtgatcatctagaagaaagcatgactacactagatttgaccagagccgagcttgctcttattgttctctatttgaacaaagctgaggctagagataagatatgcagagctatccaatatggttccaaatttttgagcggtggccaacctggtactgctcaaactgtcgacaaaaacaccagcttggcgagaaaagttttccgtcttttcaagtttgtcaatgattttcacggtcttatcagccccgtgcctaaagggactccacttcctcttgtcttactcgggaagtcgaagaatgcgctcttgtctacctttttgtttcttgatcaaatcgtctggcttggtagatccggcatatacaagaacaaagaacgaactgaattgcttggacgtatatcacttttctgctggctgggatcatccgtttgtacaagtgcagtcgagattggtgagcttggaaggctctcttcatctatgaagaagatggaaaaggaactcaaagctgatgatgagctgtatcgtgctaagcttcagaaatcaaacgacagaactctagctttgattaaatcaagcatggacattattgtagccattggtctccttcagttagctccaaagacgattagtcctcgtgtcactggtgctttcgggtttaccacctcacttatctcttgttatcagttgcttccatcgcgccccaagttgaagacaccttgaagaaggaataagcttgttctctagactttcagaataattgtttcatattcatcagtaaacctattgtgttcaggtattctaaggagtctatgttcctcctttgaatgaatttgctgctcttataacgcgtttgcaagaataatgataagttttagaataagattattatgatacatc

SEQ ID NO: 74696 - protein, 231 aa, Arabidopsis thaliana; identical to SEQ ID NO: 23905
  peptide (1)..(231): Ceres Seq. ID no. 5679159

SEQ ID NO: 74697 - DNA, 656 bp, Arabidopsis thaliana
  misc_feature (1)..(656): Ceres Seq. ID no. 5679166
  misc_feature (1)..(656): Ortholog of  Ceres SEQ ID NO 12780822 as cited in SEQ ID NO 67471
atccttgtaagacgaatcttctcaagctactcgttcgacttcagcacccgtatagtctcaacgcttcacgcaacaatcgctgtcactttagcaactctctcgattcaagattggtcttgtcctgtttgtcccattgcttctacatcgtctctccggcagatggaaacgttggcgttttcattgtcgtacatgatctacgatctcatttgtagccactttgatcaagtccttagcattgataatgcggttcatcattctgtttgcattcttggttttgtagctggacttttctaccaaaagtgtggatccgagatggtggcagcactttggataacagagatctcaagtccgtttcttcacctcagggagattcttaaagagattggttatagagacaccgacctaaatcttgcagccgatgtgtgttttgcaacaattttctcgttggccagaatggtgggtggaccttacctagtttacgtaacaatatcagccgataatcccattctcatcaaggtatatcttaatatatgaatatcagaaattcagaatatgacatacatttcgttttggcttttacttattatcgtttcatcaattgttcatagtttttataaagatgtgaaactttcaaaattgaaaagaatattttgttt

SEQ ID NO: 74698 - protein, 177 aa, Arabidopsis thaliana
  peptide (1)..(177): Ceres Seq. ID no. 5679167
ILVRRIFSSYSFDFSTRIVSTLHATIAVTLATLSIQDWSCPVCPIASTSSLRQMETLAFSLSYMIYDLICSHFDQVLSIDNAVHHSVCILGFVAGLFYQKCGSEMVAALWITEISSPFLHLREILKEIGYRDTDLNLAADVCFATIFSLARMVGGPYLVYVTISADNPILIKVYLNI

SEQ ID NO: 74699 - protein, 124 aa, Arabidopsis thaliana
  peptide (1)..(124): Ceres Seq. ID no. 5679168
METLAFSLSYMIYDLICSHFDQVLSIDNAVHHSVCILGFVAGLFYQKCGSEMVAALWITEISSPFLHLREILKEIGYRDTDLNLAADVCFATIFSLARMVGGPYLVYVTISADNPILIKVYLNI

SEQ ID NO: 74700 - protein, 114 aa, Arabidopsis thaliana
  peptide (1)..(114): Ceres Seq. ID no. 5679169
MIYDLICSHFDQVLSIDNAVHHSVCILGFVAGLFYQKCGSEMVAALWITEISSPFLHLREILKEIGYRDTDLNLAADVCFATIFSLARMVGGPYLVYVTISADNPILIKVYLNI

SEQ ID NO: 74701 - DNA, 1465 bp, Arabidopsis thaliana
  misc_feature (1)..(1465): Ceres Seq. ID no. 5679191
  misc_feature (1)..(1465): Ortholog of  Ceres SEQ ID NO 13587235 as cited in SEQ ID NO 0
tgtagttaggtcaatggaacagacaaaggatgattctgattttgaggatgattgtgaaacgaagaagatggagactgatacatcagctcaagaggcaaggaatggtaaagacatacaagggattcagtgggaagggtttaagtataatagagacgagtttcgtgagactaggttgaaacaatatgataactttgttaatatcttaaggcctagctctcgagaaaagcttgataaggaacatgggcaagtagttgagaaaggaaagaacttttatgacttccaattcaatacaaggcttgtcacttccactattgtgcattttcagttgggagtactgtctgagcagccagcagcataacgatatggcttcggaatttggtatgggcgacatctaagcatgatgtatatctaatgcaaaattattcactcatgcactggtcatctctactccagagagggaaagaagtacttaatgtcgccagatcagttacccccactcagaaactacctggattgttttctgagccactctctagggtgcaagttagcagcatggcagtcaaagaaaatctgatccttttaggagggttcgacggggagcttctctgcaagtgtgtaaatcagcctggggttgctttttgcacaagattatcaacggaagataatgccatcacaaacacagttgatatataccgagacccaagtggctcccttaggcttataaccgcaaataacgactgtaaaattcgtgtattcgatgctcagagctttacacgtgtcagtgaatttgctttagattggtctgtcaataatacctcagttagcccggatgggaagctactcgctgtagtcggggacagtacagaatgcttgatctctgattcccattctggaaaagttatttcaagcctcagaggccacaaagactactcatttgcatctgcttggcacccgaatggtctaatcttagcaacgggaaaccaagacacggcatgccgtctctgggacattcgtaacccgtcagaatcattcgctgtcctgaaaggaaacatgggagccatcagaggactgaagttcacaccagaagggcggtttcttgcaatggctgagcctgcagactttgttcacatcttcgacacgcagtccgggtttctacagtcccaagagattgatctgtttggagaaatagccgggatctcgttcagccccgatacagaggcactatatgtaggggtcgcagaccgcacttatggaagtttgctggagtataagaggagaaaggataatcactatatggactccttttactgagaaaaggtaaatgaaaagtaaaaagcatctaatatgttgtcacaagatgggtttaaccctattagtgtgtatatgtagacagaattggtagtttctttggtaatatctgttatgtacccataatatatcttaccaaactttaagtatgttttgt

SEQ ID NO: 74702 - protein, 299 aa, Arabidopsis thaliana
  peptide (1)..(299): Ceres Seq. ID no. 5679192
MQNYSLMHWSSLLQRGKEVLNVARSVTPTQKLPGLFSEPLSRVQVSSMAVKENLILLGGFDGELLCKCVNQPGVAFCTRLSTEDNAITNTVDIYRDPSGSLRLITANNDCKIRVFDAQSFTRVSEFALDWSVNNTSVSPDGKLLAVVGDSTECLISDSHSGKVISSLRGHKDYSFASAWHPNGLILATGNQDTACRLWDIRNPSESFAVLKGNMGAIRGLKFTPEGRFLAMAEPADFVHIFDTQSGFLQSQEIDLFGEIAGISFSPDTEALYVGVADRTYGSLLEYKRRKDNHYMDSFY

SEQ ID NO: 74703 - protein, 293 aa, Arabidopsis thaliana
  peptide (1)..(293): Ceres Seq. ID no. 5679193
MHWSSLLQRGKEVLNVARSVTPTQKLPGLFSEPLSRVQVSSMAVKENLILLGGFDGELLCKCVNQPGVAFCTRLSTEDNAITNTVDIYRDPSGSLRLITANNDCKIRVFDAQSFTRVSEFALDWSVNNTSVSPDGKLLAVVGDSTECLISDSHSGKVISSLRGHKDYSFASAWHPNGLILATGNQDTACRLWDIRNPSESFAVLKGNMGAIRGLKFTPEGRFLAMAEPADFVHIFDTQSGFLQSQEIDLFGEIAGISFSPDTEALYVGVADRTYGSLLEYKRRKDNHYMDSFY

SEQ ID NO: 74704 - protein, 252 aa, Arabidopsis thaliana
  peptide (1)..(252): Ceres Seq. ID no. 5679194
MAVKENLILLGGFDGELLCKCVNQPGVAFCTRLSTEDNAITNTVDIYRDPSGSLRLITANNDCKIRVFDAQSFTRVSEFALDWSVNNTSVSPDGKLLAVVGDSTECLISDSHSGKVISSLRGHKDYSFASAWHPNGLILATGNQDTACRLWDIRNPSESFAVLKGNMGAIRGLKFTPEGRFLAMAEPADFVHIFDTQSGFLQSQEIDLFGEIAGISFSPDTEALYVGVADRTYGSLLEYKRRKDNHYMDSFY

SEQ ID NO: 74705 - DNA, 1518 bp, Arabidopsis thaliana
  misc_feature (1)..(1518): Ceres Seq. ID no. 5679198
  misc_feature (1)..(1518): Ortholog of  Ceres SEQ ID NO 12609146 as cited in SEQ ID NO 52118
  misc_feature (1)..(1518): Ortholog of  Ceres SEQ ID NO 13638136 as cited in SEQ ID NO 58644
  misc_feature (1)..(1518): Ortholog of  Ceres SEQ ID NO 15225826 as cited in SEQ ID NO 64774
  misc_feature (1)..(1518): Ortholog of  Ceres SEQ ID NO 13599119 as cited in SEQ ID NO 0
aattttcgttgaacacaagtgacgaatttgagagagaaaaaaaaagaaaatcagagataaagaatttgagtttcttggaattaaaggatcgattttgttgaagtgaaattgaaattgattgtgaaaagagaaagagactgatggtagcagaagcagaggttgtgtttcaacagagtttaccggcggttctggagattgagttgtttgacggagtttcctccgccgttaaatctcccgtttcttctccgaaattgggttttactcagtcaacggcgtcggtttccggaagtttaacgacttctcctgtggctgatatctttccagagggtgattgcgatcctagtgtcttggattatattccgaccatccggtctggaagctttgctgatattgggccaaagagaaacatggaagatgaacacattcgcatagacgatttatcttctcaagttggttccctttttgagttgccgaagcctagtgctttctatgcggtttttgacgggcatggaggaccagaagcagcagcatacgtacgggaaaatgccattaggtttttctttgaagatgagcagtttccacagacatcggaagtgagtagtgtttatgtggaagaagttgagacttcattgagaaatgcgtttcttcaagctgatctagctttggcagaggattgcagtatcagcgattcttgtggtaccaccgctctgactgctcttatttgtggaagactcttaatggttgcaaatgccggagactgcagagcggttctatgcaggaaaggcagagcgatagacatgtctgaagaccataaaccgattaatctacttgagagaagaagagtggaggaatccggcggtttcatcactaatgacggttacctaaatgaagtcctagctgtaacccgagctctgggcgactgggatttaaaactgccacacggctctcaatctccactgatctcggaaccagaaatcaagcagataactctaactgaagacgatgagtttcttgtgattgggtgcgatgggatttgggatgtcttgacgagccaagaagcggttagcattgttaggcgtggcttaaaccggcacaacgatccaacaagatgtgcgcgagagctagtgatggaggctctggggcggaactcatttgataatttaactgcggtggtggtatgtttcatgacaatggacagaggggacaagccggtggtgccattggagaagagaaggtgttttagtctttcgcctgaagctttctgtagcttgaggaatctgttggatggctgaaactagtgtgttttctggtgaaaaccgatgattatataattgatgatgacgaataatctctcccacggctgcttttgtatttagagattttacgcagctgagagaactcttttgagatatacttgtgtattaagtgtgtttgttgtgtgcacagtatgcgattacagttttgtgtacatacatactgttagttgtctatgaataacgaaaaagaaaagattaagtg

SEQ ID NO: 74706 - protein, 383 aa, Arabidopsis thaliana; identical to SEQ ID NO: 31043
  peptide (1)..(383): Ceres Seq. ID no. 5679199

SEQ ID NO: 74707 - protein, 294 aa, Arabidopsis thaliana; identical to SEQ ID NO: 31044
  peptide (1)..(294): Ceres Seq. ID no. 5679200

SEQ ID NO: 74708 - DNA, 1570 bp, Arabidopsis thaliana
  misc_feature (1)..(1570): Ceres Seq. ID no. 5679201
  misc_feature (1)..(1570): Ortholog of  Ceres SEQ ID NO 13659033 as cited in SEQ ID NO 66372
  misc_feature (1)..(1570): Ortholog of  Ceres SEQ ID NO 13655724 as cited in SEQ ID NO 68973
  misc_feature (1)..(1570): Ortholog of  Ceres SEQ ID NO 12625899 as cited in SEQ ID NO 69079
ataacagttacagagaaaaaataaataaagagatagaagatggagagacaaagaagtttctctgtgaagtccacaagagtcttagcattcatcatcacaataatctcttccgccattgttttcttcactttcttctcctcttccttactcaaatctaactcttctctttacccaacaccagaagctaacttccagatcgatttaagccctattgccgccatttccgattcttcagtttctcctcaagcaagtccgattctgatctctacccatttcaattcacccgaaaacacttccgggtcttcaaaaatttctgtttttgagcagaagattagcggcgagagtttggttaaggaagttagggaaattgctaatttaacttcgattaaagtgattgaacttccgagcaacaatggtgaagataagaagacagagaagagaatcgaagaatgtgatgttacgaaagggaagtgggtttacgatagtgattatccattgtacacaaatgcgtcttgtccttttatcgatgaaggatttggttgtcaaagcaatggaagattggatcttaattacatgaattggagatgggagcctcaggattgtcatgctcccaggttcaatgctacaaagatgctggaaatgattagaggcaagaggctagtgttcgttggagattcaattaataggaaccaatgggaatctatgctttgtttgttgtttcaagctgttaaagatcccaagagagtatacgaaacgcacaaccgaagaatcaccaaagagaaagggaattatagcttccgtttcgtggattataaatgcactgtggaattctatgttactcatttcttggttcgtgagggtagagcaagaataggaaagaagcgaagagaaacacttagaatcgatgctatggatcgaacctcttccagatggaaaggtgctaatatcttagtgttcaatacagctcattggtggtctcattacaaaaccaaatcaggggtcaactactaccaagaaggagacctgattcatcccaaactcgatgtatcaaccgcttttaagaaagctttgcagacttggtcatcatgggttgacaaaaatgtcgatccgaagaaaactcgcgttttctttagaagcgctgcaccttctcatttcagtggaggagaatggaactcaggaggtcattgcagagaagccaacatgccgttgaaccaaaccttcaaaccaagttactcgagcaaaaagtccattgttgaggacgtactgaagcaaatgagaacaccggtaaccctcttgaacgttagcggtttatctcagtacagaattgacgcccatccttctatttacggaacaaaacccgaaaaccggcgttcaagagctgtccaagattgcagccattggtgtctccctggtgttcctgatacttggaaccacttcctttacctccatttgctccataaacgataaatacagttacaaactaatcaaagctccagttacgtgttcaaaagtttgtttaatgtaggcattgctcgatccgatttaaccaaccaaaccaaaaccattttgg

SEQ ID NO: 74709 - protein, 475 aa, Arabidopsis thaliana; identical to SEQ ID NO: 42076
  peptide (1)..(475): Ceres Seq. ID no. 5679202

SEQ ID NO: 74710 - protein, 297 aa, Arabidopsis thaliana; identical to SEQ ID NO: 42077
  peptide (1)..(297): Ceres Seq. ID no. 5679203

SEQ ID NO: 74711 - protein, 278 aa, Arabidopsis thaliana; identical to SEQ ID NO: 42078
  peptide (1)..(278): Ceres Seq. ID no. 5679204

SEQ ID NO: 74712 - DNA, 1116 bp, Arabidopsis thaliana
  misc_feature (1)..(1116): Ceres Seq. ID no. 5679205
  misc_feature (1)..(1116): Ortholog of  Ceres SEQ ID NO 14313060 as cited in SEQ ID NO 59447
  misc_feature (1)..(1116): Ortholog of  Ceres SEQ ID NO 12624676 as cited in SEQ ID NO 61197
cccaaagtcggcggaagaagatggtgtcgccgaaaatagcaccgtcgatgctgtcatcggacttcgcaaatctagcggcggaggccaatcggatgatcgatttgggcgccaactggcttcacatggatattatggacgggtaaaatttgctgccttacctgtggattcttattagcatccaaacccagcttgtaacatttttgtttcaagatagtttggtataataactctgtgttgctcccgcaggcattttgtccctaatcttacgattggtgctcctgtcatcgagagtttgcgaaagcacactaatgcatatcttgattgccaccttatggtgacgaaccccatggattacgttgcacagatggctaaagctggggcttctggtttcacattccacgtcgaggtggcccaagataattggcaacaacttgtcgagaagattaagtctactgggatgagaccaggcgtggctctaaagcctggaacacctgttgaacaagtctatcctctggttgaagggacaactccggttgaaatggttcttgtgatgactgtagaacctggatttggaggccagaagtttatgcctgacatgatggacaaggtccgggcattgaggcaaaaatacccaacacttgatattcaggtggatggcggcttaggcccttcaacgatcgacacagcggctgcagcaggcgccaactgtattgttgctggaagttcagtgtttggagctccggagccaggagatgtcatctcccttctgaggaccagtgttgagaaagcccaacccaccacttgaaagctgcacgtggtggcggtggtgctgagacggcgttgtattctcatcggaagatggtacctcttcgtttctctcaaggttaaaaagctggtcctttatgttttaaaatcatctcgtgaatcgtgatacttagtcttggttccaagaactgtataacgtcattttgagttattaattccctcaccacacagattatttcataggagttgggtaccaagagtagtgtgcaatgtataattagtaatttaataaacgtattaggttcagtcattttggaatggttataattatgaatacaagtatacaacatg

SEQ ID NO: 74713 - protein, 157 aa, Arabidopsis thaliana; identical to SEQ ID NO: 38475
  peptide (1)..(157): Ceres Seq. ID no. 5679206

SEQ ID NO: 74714 - protein, 152 aa, Arabidopsis thaliana; identical to SEQ ID NO: 38476
  peptide (1)..(152): Ceres Seq. ID no. 5679207

SEQ ID NO: 74715 - protein, 146 aa, Arabidopsis thaliana; identical to SEQ ID NO: 38477
  peptide (1)..(146): Ceres Seq. ID no. 5679208

SEQ ID NO: 74716 - DNA, 1411 bp, Arabidopsis thaliana
  misc_feature (1)..(1411): Ceres Seq. ID no. 5679217
  misc_feature (1)..(1411): Ortholog of  Ceres SEQ ID NO 14308209 as cited in SEQ ID NO 58800
actcaatcgtcatttcctcggtatctcctcctcgaaagaagaatgcctggaattagaggtccttcggaatactcgcaggaaccacctcgtcacccttctctcaaggtcaacgccaaggaacctttcaacgccgagcctccccgctcggccttagtctcatcttatgtcactcccgtcgaccttttctacaagcgaaatcatggtcccatccccattgttgatcaccttcaaagctactccgtcacccttactggattgatccagaacccgagaaagctctttatcaaagacatcaggtccctcccaaagtacaatgttactgctactcttcatgtgccggtaacagaaggactgccatgagcaaagttaggaatgttagaggtgttggatgggatgtttctgctattggcaacgctgtctggggtggggcgaaactggccgatgttcttgagcttgtggggataccaaagctgactgcttctaccaatttaggagccagacatgttgagttcgttagtgttgatcgctgtaaggaggaaaatgggggcccttataaggcgtcaatcactctaagtcaagccacaaatcctgaagcggatgttctactcgcttatgagatgaatggagagaccctgaacagggatcacggatttccgttaagggtggttgtccctggtgtgattggtgctcgttcggtcaaatggcttgattccatcaatgtcatcgctgaagaaagccagggattcttcatgcaaaaagattacaaaatgtttccaccctctgtcaattgggataatatcaactggtcctctaggagaccgcaaatggatttccctgttcagagtgcaatctgctctgtggaggatgtgcaaatggtgaagcctggaaaggtaagtatcaaaggatatgcggtttcaggaggtggacgcgggatagaaagagtggacatatccctggatggaggcaaaaactgggtggaagcttctagaacgcaggaaccaggaaagcagtacatctcagaacacagctccagtgacaaatgggcatgggtgttgtttgaagccaccattgatgtttcacagactacagaggtcatcgccaaagcggttgattcggcggcgaatgttcaaccggaaaatgtggagtcggtgtggaacctaagaggggttctcaacacttcgtggcaccgtgtccttctccggcttggccactctaacttgtagaccaagttaccactatgcgtctggtctctctttatcttttctttaagaactaaaacatccttgaatatgcttgtccttgtggatctgtgagagcaaaatactgtttatagttaaataaaatgggaaaacccatctgttgtcatgtggtggattataaattatttatttatatgatagaactgttattc

SEQ ID NO: 74717 - protein, 288 aa, Arabidopsis thaliana; identical to SEQ ID NO: 26545
  peptide (1)..(288): Ceres Seq. ID no. 5679218

SEQ ID NO: 74718 - protein, 201 aa, Arabidopsis thaliana; identical to SEQ ID NO: 26546
  peptide (1)..(201): Ceres Seq. ID no. 5679219

SEQ ID NO: 74719 - protein, 157 aa, Arabidopsis thaliana; identical to SEQ ID NO: 37425
  peptide (1)..(157): Ceres Seq. ID no. 5679220

SEQ ID NO: 74720 - DNA, 1386 bp, Arabidopsis thaliana
  misc_feature (1)..(1386): Ceres Seq. ID no. 5679221
  misc_feature (1)..(1386): Ortholog of  Ceres SEQ ID NO 15179593 as cited in SEQ ID NO 1057
  misc_feature (1)..(1386): Ortholog of  Ceres SEQ ID NO 14306904 as cited in SEQ ID NO 53566
  misc_feature (1)..(1386): Ortholog of  Ceres SEQ ID NO 13658640 as cited in SEQ ID NO 66419
atctctcttacgattccttcaaatcattcttccatggccaccgtatcttcttcctcctggccaaaccccaaccctaatcccgattccacgtctgcctcagattccgattctacttttccctctcaccgcgatcgcgtagacgaacccgactctctcgattccttctcctccatgagtcttaactccgacgaacctaatcagacttctaatcaatcgcctctttctccccctacgcccaatttaccggtgatgcctcctccgtccgtgcttcatctttcctttaaccaagatcatgcttgcttcgctgtcggcactgaccgtggcttccggatccttaattgcgatccctttcgcgagattttccggcgtgatttcgatcgtggcggtggtgttgcagtcgtggagatgcttttcagatgcaatatattagccctagttggtggcggacctgatcctcaatatcctcctaataaggttatgatttgggatgatcaccagggccgatgtatcggagaactctctttcaggtccgatgttagatccgtccggcttaggagggatcggattattgtcgttcttgagcagaagatttttgtctacaatttctctgacctcaagctgatgcatcagattgaaaccattgccaaccctaagggtttgtgtgctgtttctcagggtgttggttctatggttttggtatgtccaggtttgcagaaaggtcaagttcggatcgagcactacgcttctaaacggaccaaattcgtcatggctcatgattccagaatagcttgcttcgctctcacgcaggatggccatttgttggccactgctagctctaagggtactctggttcggatcttcaaatgctcagtggttagctgtctcaagtgacaaaggaacggtccatgtctttggtctcaaagtcaactccggatctcaagtgaaagactcatcccgaattgcacctgatgctactccctcatccccatcgtcgtctctgtctttattcaaaggagtgttaccgaggtatttcagctcggagtggtcggtggctcagttcaggttggttgaaggaactcagtacatagccgcctttggccatcaaaagaacaccgttgttattcttggcatggatgggagcttctacagatgccagtttgatccggtgaacggcggtgaaatgtctcagcttgagtaccacaactgtctgaaaccgccttcagttttctaaaagctttactacttatactcttttgttccttctctctctttatatctctctgcaacttaagcggtgagatatggtgtatagttttgtgtatataataatgatgggtcgtcctataatttgtaaaaccttttatcgctaaccaaaactgattcacg

SEQ ID NO: 74721 - protein, 239 aa, Arabidopsis thaliana; identical to SEQ ID NO: 29242
  peptide (1)..(239): Ceres Seq. ID no. 5679222

SEQ ID NO: 74722 - protein, 285 aa, Arabidopsis thaliana; identical to SEQ ID NO: 29241
  peptide (1)..(285): Ceres Seq. ID no. 5679223

SEQ ID NO: 74723 - protein, 296 aa, Arabidopsis thaliana; identical to SEQ ID NO: 29240
  peptide (1)..(296): Ceres Seq. ID no. 5679224

SEQ ID NO: 74724 - DNA, 903 bp, Arabidopsis thaliana
  misc_feature (1)..(903): Ceres Seq. ID no. 5679232
  misc_feature (1)..(903): Ortholog of  Ceres SEQ ID NO 15178843 as cited in SEQ ID NO 0
acatagccgctctgtttcttcttctctttccctcacccttatcgccgctgtttcgtcttgaacaatcagattaggtgttcttctgtggataaaagatgaatcattgtagccttcagcagaatgcattcttgtctcgtgaagaatcgagaggatttgttcctatctattctcatccagtggactctgttgtttgccctaagccccgtcgtgcaaacaacgttattcgtccctttagattacattttagtctttcaggagctgatgatgtatgtgattctaaagccggggaagatcttttggacatatttcgtagaaaggaatcagtatcatctagatcacccccatttttccttgggtctccccctagccgagcagcaaacccgttagctcaagatgcacgctttggagatgagaaactcaacactgtctcaccctcactctcccctcttctcccatctgcatctcgtgttaaaagtggttgtggtagaatgaagtttggggtgaaaccagcaactgttagagtagaagggtttgattgcttgaacagggaccgcccaaactcaagtatccctgccatggcctagaaagaagaagaaggaacaaagaggattcacaaagtgtacataaaatccagactcaaagactccattttttgaagaagtatatatagttttgcagaagaagaggaaaaggaagattaacgatcgctcaagcttttaccgcagttttctgtgattatgatgaggttcaatgttgtgtatatatatgtatctaccgtaattaagaggtaaggtcgagactttatgtgttaacttcttatttctgaagtctcgttgtaacatattaaaccaatttgggagtgttgttctcttttctgtgtataataaccattcttcttttttg

SEQ ID NO: 74725 - protein, 162 aa, Arabidopsis thaliana; identical to SEQ ID NO: 25947
  peptide (1)..(162): Ceres Seq. ID no. 5679233

SEQ ID NO: 74726 - protein, 88 aa, Arabidopsis thaliana; identical to SEQ ID NO: 25948
  peptide (1)..(88): Ceres Seq. ID no. 5679234

SEQ ID NO: 74727 - DNA, 1515 bp, Arabidopsis thaliana
  misc_feature (1)..(1515): Ceres Seq. ID no. 5679235
  misc_feature (1)..(1515): Ortholog of  Ceres SEQ ID NO 14302935 as cited in SEQ ID NO 20442
gggattcccacgtttttcatcacttgtgttccttaactatgtgaccatgtttttatccaatgacaacacagatcttttgaacactgacctttcctcatttaatgttttaccaacagagagtactagtatctctactgagaaactctatcaagttggctcttaagcagctaaagaactggatggctccggagaaggcaaagacttctctaacaacgtttcctgcatccgcggagattgtgtctgagcctcttggtgttgtgctagtgatctcggcttggaactatccttttctgttgtctattgatcctgttattggtgcaatttctgctgggaatgctgttgttttaaagccatcagaattggctccagcttcgtcagctctgctcactaagttactggaacagtatcttgatccttctgcggtgcgagttgtcgaaggagctgttaccgaaacaagtgctctgctagagcagaagtgggacaagatattctacacaggtagttcaaaaatcggacgtgtcataatggcggcagctgcgaagcatctcacaccggttgttctagagcttggaggaaaatctcctgtcgttgtagactcggataccgatttgaaagttaccgtcaggcggataatcgtaggcaaatggggttgtaacaacggacaggcgtgcgtttcgccggactatatcttgacgacaaaagaatatgctcctaaattgattgatgccatgaagcttgaattggagaaattttatgggaagaaccctatagagtcgaaagatatgtcacgtatcgtaaactcgaatcactttgatcgcttgtctaagttgttagacgagaaggaagtttctgacaaaattgtctatggtggtgaaaaggacagagaaaacttgaaaattgctccgacaatcttgctcgatgtaccattagattctctgatcatgagtgaagaaatatttggccctctccttccaatcctcacgcttaacaacttggaagagagctttgacgtgattcgttctcgacctaagccacttgcggcatacttgtttacacataacaagaagttgaaagagagattcgcagcgacagtctccgctggaggcatagtagtcaatgacatagctgttcatcttgcacttcacacattgccattcggaggagttggtgaaagtggaatgggtgcttaccatggtaaattctcatttgatgcttttagtcacaagaaggcggttctctacagaagccttttcggtgattcagccgtcaggtatccgccatactcgagaggaaagcttagattgttaaaagcccttgtcgacagcaatatattcgatttattcaaagtccttctcggtttagcttaaacggtaaaaagaccgaggacacttccctttgtaccttatttacttgttttatttttcaaacatggacttagttggttgatatgttttggtttggtgttgattctatgaatattgaagttgataaataaaagattttcggttgattatg

SEQ ID NO: 74728 - protein, 421 aa, Arabidopsis thaliana
  peptide (1)..(421): Ceres Seq. ID no. 5679236
MFYQQRVLVSLLRNSIKLALKQLKNWMAPEKAKTSLTTFPASAEIVSEPLGVVLVISAWNYPFLLSIDPVIGAISAGNAVVLKPSELAPASSALLTKLLEQYLDPSAVRVVEGAVTETSALLEQKWDKIFYTGSSKIGRVIMAAAAKHLTPVVLELGGKSPVVVDSDTDLKVTVRRIIVGKWGCNNGQACVSPDYILTTKEYAPKLIDAMKLELEKFYGKNPIESKDMSRIVNSNHFDRLSKLLDEKEVSDKIVYGGEKDRENLKIAPTILLDVPLDSLIMSEEIFGPLLPILTLNNLEESFDVIRSRPKPLAAYLFTHNKKLKERFAATVSAGGIVVNDIAVHLALHTLPFGGVGESGMGAYHGKFSFDAFSHKKAVLYRSLFGDSAVRYPPYSRGKLRLLKALVDSNIFDLFKVLLGLA

SEQ ID NO: 74729 - protein, 395 aa, Arabidopsis thaliana
  peptide (1)..(395): Ceres Seq. ID no. 5679237
MAPEKAKTSLTTFPASAEIVSEPLGVVLVISAWNYPFLLSIDPVIGAISAGNAVVLKPSELAPASSALLTKLLEQYLDPSAVRVVEGAVTETSALLEQKWDKIFYTGSSKIGRVIMAAAAKHLTPVVLELGGKSPVVVDSDTDLKVTVRRIIVGKWGCNNGQACVSPDYILTTKEYAPKLIDAMKLELEKFYGKNPIESKDMSRIVNSNHFDRLSKLLDEKEVSDKIVYGGEKDRENLKIAPTILLDVPLDSLIMSEEIFGPLLPILTLNNLEESFDVIRSRPKPLAAYLFTHNKKLKERFAATVSAGGIVVNDIAVHLALHTLPFGGVGESGMGAYHGKFSFDAFSHKKAVLYRSLFGDSAVRYPPYSRGKLRLLKALVDSNIFDLFKVLLGLA

SEQ ID NO: 74730 - protein, 280 aa, Arabidopsis thaliana
  peptide (1)..(280): Ceres Seq. ID no. 5679238
MAAAAKHLTPVVLELGGKSPVVVDSDTDLKVTVRRIIVGKWGCNNGQACVSPDYILTTKEYAPKLIDAMKLELEKFYGKNPIESKDMSRIVNSNHFDRLSKLLDEKEVSDKIVYGGEKDRENLKIAPTILLDVPLDSLIMSEEIFGPLLPILTLNNLEESFDVIRSRPKPLAAYLFTHNKKLKERFAATVSAGGIVVNDIAVHLALHTLPFGGVGESGMGAYHGKFSFDAFSHKKAVLYRSLFGDSAVRYPPYSRGKLRLLKALVDSNIFDLFKVLLGLA

SEQ ID NO: 74731 - DNA, 666 bp, Arabidopsis thaliana
  misc_feature (1)..(666): Ceres Seq. ID no. 5679270
  misc_feature (1)..(666): Ortholog of  Ceres SEQ ID NO 13581866 as cited in SEQ ID NO 52179
  misc_feature (1)..(666): Ortholog of  Ceres SEQ ID NO 14315451 as cited in SEQ ID NO 59289
acgcacacagagttctcttcttcgtcctagtttcttctattccaggtgagaagaaaaaatggcgtttgtgaccactgcggaagtgtgtgacgcgaatcaagagatgattcgaagtggccagctccgagctctgcaacccgtttttcagatttatggtcgtcgtcaaatattttcaggtccagtagttactgttaaagtctttgaagacaatggcttaatccgtcacttcctcgaagagaaaggcaatggtagagttcttgtggtggatggtggagggagtttacgctgtgcgatactaggaggaaacccggtcgtacaagcgcagaacaacggatgggcagggatcatagtgaatggatgcatcagagacgttgatgagatcaatggttgcgacattggagtgagagctttagcttctcatccaataaaggctagtaagaaaggacttggtgaacaaagagtctctttgaacattgcaggcactcggatatgcgatggcgaatggctttatgcagatactgatggtatccttgtttctcagattgaattatccgtttaaaaggacacaagtgatgttgttgatttgttaaaatctgtaagctactacttttgtgctttgtgtttctgtaatggctatcagagtaaaagttggcttctttgaatatg

SEQ ID NO: 74732 - protein, 166 aa, Arabidopsis thaliana; identical to SEQ ID NO: 21181
  peptide (1)..(166): Ceres Seq. ID no. 5679271

SEQ ID NO: 74733 - protein, 151 aa, Arabidopsis thaliana; identical to SEQ ID NO: 21182
  peptide (1)..(151): Ceres Seq. ID no. 5679272

SEQ ID NO: 74734 - DNA, 1166 bp, Arabidopsis thaliana
  misc_feature (1)..(1166): Ceres Seq. ID no. 5679288
  misc_feature (1)..(1166): Ortholog of  Ceres SEQ ID NO 13594671 as cited in SEQ ID NO 51800
  misc_feature (1)..(1166): Ortholog of  Ceres SEQ ID NO 12784099 as cited in SEQ ID NO 66784
aacttgagatttgagaataagaaaagttgaaatttgtaaaagatatgagaaattagtaaattccagaaacttattagaagcggcggatcgaattcgcgacgagcgttccattagggtttcgaatcaacatcaacaaacgacgagagaaaactttttaaaacatgtacggaggcgattttgacggcaacgctgctttcgccggcggcggcttcatgccttctcaggcgactacgcaagcccatgaatcctcatcttccctcaagaaccgcgatgtacgtaccttgcttcccctgacactgaagcagttgagcagcgcatcaaccactggcgaatcaaatttctctattgatggcgttgatattaaaactgttgtaatcgttggacggatttctagaatggagaacagaatcactcaggtcgattttgttgttgatgacggtacaggctgggttgattgtgtcagatggtgtcacgctcggcaagaaactgaagaaatggaagcagtcaagctgggaatgtatgttcgcttacatggacacctgaaaatttttcaagggaaacgatctgtgaatgttttttcagtcaggcctgtcactgacttcaatgagattgtacaccactttaccgagtgtatgtatgtccacatgtacaacaccaagttacggggtggttctattactcaagatactgctactcctaggccccaaatgccatattcaacaatgccaacccctgcaaagccctaccaaaccggtccatctaatcagttcccgaaccaattcaatgattcaatgcatggtgtaaagcagacggtcttgaattacctgaatcaacctatgcacattgtatctgaagctggagttcactgtgatataattgcccgtgaactcaggattccgctgcttcaagtcaaggaagcgttagaacagctctcaaacgatggttgcatatactcgactttggacgagacatgcttcaaatcgactgctaacgcttgatgaaaattgatttatatgtcaacacatatcaatcctcctctcatgttcaaaagtcttttgtataggccctaaggtaggacaatatgtagttttaagactaaaaatctttcttatggcttttggatttttttaaagggaactaaactcaaaagttcaaaatcattttcg

SEQ ID NO: 74735 - protein, 278 aa, Arabidopsis thaliana; identical to SEQ ID NO: 41072
  peptide (1)..(278): Ceres Seq. ID no. 5679289

SEQ ID NO: 74736 - protein, 261 aa, Arabidopsis thaliana; identical to SEQ ID NO: 41073
  peptide (1)..(261): Ceres Seq. ID no. 5679290

SEQ ID NO: 74737 - protein, 200 aa, Arabidopsis thaliana; identical to SEQ ID NO: 41074
  peptide (1)..(200): Ceres Seq. ID no. 5679291

SEQ ID NO: 74738 - DNA, 1744 bp, Arabidopsis thaliana
  misc_feature (1)..(1744): Ceres Seq. ID no. 5679365
  misc_feature (1)..(1744): Ortholog of  Ceres SEQ ID NO 15224473 as cited in SEQ ID NO 66479
aaataaatttttagaaaccaaaaaaaaaattgtagagagagaaaaaaaaaactcagaggagagaaagagaagacgacgaagacgaccattttttttttttttgtcaagagagaagacggagacaacaatggcggaagcgaaggaggagaatagggagaaaaacgaagaagaagagagcgtaaagcttttcgtcggacaaattccgaaacatatgtcggaatctcaactcttaacattgtttcaagagttcgctgtcgttgacgaggtcaatatcatcaaggacaagattacacgcgcctctcgaggatgttgttttctgctatgtccatcgagagaagaagcagataagttggtcaatgcttgccataacaagaagacattgcctggggctaacagtctattgcaagtaaagtatgcagatggcgaattagaaaggctagagcataagctatttgttggtatgcttccaaagaatgtctctgaagctgaagttcaatctttattctccaagtacgggaccataaaggatctacagattctaagaggtgctcaacaaacgagcaaaggctgtgcatttctgaagtatgagacaaaagaacaagctgtttccgccatggaatctatcaacggaaaacataaaatggagggttcaactgttcctttagttgtcaaatgggcagacacagaacgagaaagacacacaagaagacttcaaaaggctcaatctcacatcgcccgactagggaacggtgatccaacaaatccctcattgtttggagcattacctatgggttatgtaccaccatataatggatatggttatcatcagcctcctggaacttatggttacatgctaccaccaattcagaaccaagctgcattttccaatatgattgcacaaccaaaccaaggtaataacaatgcattgcaaggaacatcgcctgactctgtgccgcctcgtttggcccgtagaaactttcctatgcctcctggaaactacatgggatctggttatcctgctatgcgaggtcatccttttccatttgcttatcccagaggaattgttagtcctcgccctctaagtagctctcctggatctatatcacctggcatgtcaacacctttaggcattggtttgagttctgtggttcaaaccgaaggtccagaaggtgcaaatctgtttatctataacatacctcgggagttcggggatcaagaactcgcggctgcatttcaatctttcggtattgttctgagtgccaaggtttttgtagacaaagccactggtgtaagcaaatgtttcggttttgttagctatgactcacaagccgcggcgcagaacgctattgacatgatgaatggtcgccatttaggcggtaagaaattgaaagtccagcttaagagagacagcaacaatggccaaccgagtagtaatccttccttaatctcctgaaagtgctaaaactcctcctctcttcaacttgaaagttcataacagaaaaaaacaaaaaacatattcgggcttatgggtcgacccggttcaaagatttggaccgatcttgaatggatgcatctgtatagatccaaatctcattgtgggtcaaaatgtcccatcaactcaaaagctccaaactggatcatctcttttctttttttttttaatctgcaaataacaatttgtaatttatgtttattattgaaactcatgtagaaattttatgatttattaacattaaattcattg

SEQ ID NO: 74739 - protein, 483 aa, Arabidopsis thaliana; identical to SEQ ID NO: 40501
  peptide (1)..(483): Ceres Seq. ID no. 5679366

SEQ ID NO: 74740 - protein, 441 aa, Arabidopsis thaliana; identical to SEQ ID NO: 40502
  peptide (1)..(441): Ceres Seq. ID no. 5679367

SEQ ID NO: 74741 - protein, 413 aa, Arabidopsis thaliana; identical to SEQ ID NO: 40503
  peptide (1)..(413): Ceres Seq. ID no. 5679368

SEQ ID NO: 74742 - DNA, 1091 bp, Arabidopsis thaliana
  misc_feature (1)..(1091): Ceres Seq. ID no. 5679369
  misc_feature (1)..(1091): Ortholog of  Ceres SEQ ID NO 15176514 as cited in SEQ ID NO 1114
  misc_feature (1)..(1091): Ortholog of  Ceres SEQ ID NO 13662513 as cited in SEQ ID NO 63303
  misc_feature (1)..(1091): Ortholog of  Ceres SEQ ID NO 15174088 as cited in SEQ ID NO 0
ctaaacaaaaccctctcttcctctacttcatattcttcttcatttcctacgctctcttctcgttctcgattcgccatgcctctaattgaaaaggtttcctcttcccgaaccagcctgggcccgtgttacatctcgacccgacccaagacatccgggtccggatactcgccgctgaatgatccttcgccgaattggagcaaccgtccgccgaaggagacgattcttcttgatgggtgcgattatgagcactggctcatcgtcatggagttcactgatcctaaacctactgaagaagagatgatcaattcttatgtcaaaaccttaacttccgtccttggctgtgaggaagaggccaagaagaagatttactctgtttgtacttcgacctacactggctttggtgctttgatctctgaagagctctcttgcaaagtcaaaggtatcaacttctccatatttgcaattaggtttttaagccttttttgctctgacatagcttttctagttgtttacttatgatgttgagatttatcgtaaaaggctttctctgtttggtactgctctgttcaacagctaggaggaaacttctcttgatctttgttttatcgcagttattgtctgtctctagtactataaaatgagaacatattttactgtttgagaaatctgatctagagttgtgtgattcattagcattgcctggtgttctctgggtgctgccggattcctatctcgatgtaccaaacaaagactacggaggtgacttgtacgttgaaggaaaggtcatacccagaccacagtacaggttcacggaacagcgtcatactagaccccgtcctaggccaaggtatgataggcgccgtgagacaatgcaggttgagaggagagagccatccatgggtcttcattctccagtaaatccgggagagttcaacaagcccagtgcttaatattaaacatgaacaatgcattatgtaatggatggagtttattaggattatggtatttacatgcttgtcttaaacactcatgtgagagacttttcagtttttatccacttaatcaaacaaatcaatcatcattcatgtctc

SEQ ID NO: 74743 - protein, 172 aa, Arabidopsis thaliana; identical to SEQ ID NO: 41687
  peptide (1)..(172): Ceres Seq. ID no. 5679370

SEQ ID NO: 74744 - protein, 147 aa, Arabidopsis thaliana; identical to SEQ ID NO: 41688
  peptide (1)..(147): Ceres Seq. ID no. 5679371

SEQ ID NO: 74745 - DNA, 764 bp, Arabidopsis thaliana
  misc_feature (1)..(764): Ceres Seq. ID no. 5679376
  misc_feature (1)..(764): Ortholog of  Ceres SEQ ID NO 14309599 as cited in SEQ ID NO 52625
  misc_feature (1)..(764): Ortholog of  Ceres SEQ ID NO 13661426 as cited in SEQ ID NO 61254
agagagagtatcgaagagaagaatccaaaaaaatgggatcttcaccaccgaagaagacgactctgcaacggtacttgtcacagcttcaacaacatcctttaagaacaaaggcaataactgctggagttttgtctggtgttagcgatgttgtatcacagaagctctctggcatacagaagattcagctgagaagggttcttctcaaagtgatatttgctggtgggtttcttggaccagcagggcatttctttcatacatatttagataagttttttaaagggaagaaggatacacagactgttgcaaagaaggtaattctggagcaattgacattgtcaccattgaaccatttgcttttcatgatctattatggagtagtcatagaaagaactccctggacccttgttagagaaaggatcaagaagacttatccaacggtccagcttactgcatggacgtttttcccggtggtgggatggattaactacaagtatgtgccactgcacttccgggtcatcttgcacagcctggtcgcattcttttggggaattttcctaaccctgcgagcgaggtcaatgacactagctttggcaaaggctaagtgattaggaaacacatggatcgtgacagagaactcaagccttgggactcattatgatcacttagtactctgtaagttaaagcaaatcaaacagctctgaaaccaaataaaaatctgtattaagatgataccattctaggatagcaatatgttttaagttatt

SEQ ID NO: 74746 - protein, 200 aa, Arabidopsis thaliana; identical to SEQ ID NO: 27721
  peptide (1)..(200): Ceres Seq. ID no. 5679377

SEQ ID NO: 74747 - protein, 190 aa, Arabidopsis thaliana; identical to SEQ ID NO: 27722
  peptide (1)..(190): Ceres Seq. ID no. 5679378

SEQ ID NO: 74748 - DNA, 2478 bp, Arabidopsis thaliana
  misc_feature (1)..(2478): Ceres Seq. ID no. 5679398
  misc_feature (1)..(2478): Ortholog of  Ceres SEQ ID NO 15177561 as cited in SEQ ID NO 53065
  misc_feature (1)..(2478): Ortholog of  Ceres SEQ ID NO 13595521 as cited in SEQ ID NO 59840
aacacgcgtctccatcaatcttctagctggcaatgagatccattctttagcttctttcttctctgttttttcttttttgaagaaaaaaaaaatggcaccaaagtttgaatggtgggctaaaggaaacaacaacaacactcgtaaaggaacaccagtcgttgtcaaaatggaaaaccctaataactggtcaatggtggaacttgaatcaccttctcatgacgatttcctcgtaagaactcatgagaaatctcgtaacaagaacgcaagacagctcacttgggttctacttctcaaagctcatcgtgccgcaggttgtctcacttctctcggttctgcattattcgctctcggcaccgccgtgcgccgccgtatcgccgccggccgtacagacattgaaatctcctcctcgggagtgggttcattacagaagcaaaaccatacgaagaaatcgaaacttttctactcttgcttaaaggtgtttctatggctttctttaatccttttgggttttgagattgctgcttatttcaaaggttggagctttggaacttctaagcttcagcttcagtttatcttcaataaagggttctttgattgggtttacacgagatgggttttgcttcgtgttgagtatcttgctcctcctcttcagtttcttgctaatggctgcattgttctgtttcttgttcagagtcttgatagactcattctttgtcttggttgtttttggatccggtttaagaagattaaaccggttcctaaaccggattctatctctgatcttgaatctggtgataatggtgctttcctccctatggttcttgttcaaatccctatgtgtaatgagaaagaggtttatcagcaatctattgcagctgtgtgtaacttagactggcctaaagggaagattttgattcaaattctcgatgattcggatgatccgataacgcagagtttgattaaagaagaggttcataaatggcagaagctaggtgcacgcattgtgtatcgtcaccgtgttaatagagaaggttacaaagctggtaatcttaagtctgctatgaactgtagttatgttaaagactacgaattcgttgcgattttcgacgcagattttcaacctctacctgatttcctcaagaagaccattcctcattttaaggacaatgaggaaataggattggttcaagctaggtggtcttttgtgaataaggaagagaacttgttgacaagattacagaatattaacttggcttttcactttgaggttgagcaacaagtgaatagtgtcttcttgaatttcttcgggtttaacgggacagccggtgtgtggaggatcaaagctttggaagattccggtggttggctcgagagaactaccgtcgaggatatggacattgcggttcgtgctcaccttcacggatggaaattcgttttcctaaatgacgttgagtgccaatgtgaattaccggaatcgtatgaagcttatagaaaacagcaacatagatggcattcaggtcctatgcaactatttcgtctttgtttgcccgcggtcattaaatcaaagataagcataggaaagaaattcaatttgatattcctcttctttctcctgaggaagctaatcttgccattctactcattcactctcttttgtattatcctgccaatgactatgtttgtacccgaagctgagcttcccgcttgggttgtttgctacatacctgccacaatgtctttcctcaacatccttcccgccccgaagtcgtttccgtttatcgtcccgtaccttctctttgagaacacaatgtctgtgactaagttcaacgcaatggtctcgggtttgtttcagctaggaagtgcttatgaatgggttgttacaaaaaaatcaggacggtcatcagaaggagatcttgctgcgttagtcgaaaaagacgaaaagacaactaaacatcagagaggtgtgtctgcacccgaaaccgaagccgagaaaaaggcggaaaagactaagaggaagaagaagaagcacaataggatttatatgaaggagctatctctagcgtttctgttactgaccgcggcaactcgaagtcttttatcggcgcaaggaatccatttctacttccttttgtttcaaggaatatctttcttacttgtgggtctagatcttattggagaacaagttgaatgacactcaaagagattgaagtagtgcttgtagaagagacgttgtagaagacaggaaacatgaagagaaaaaggaagagggtctggacccaaaaaaatacaatacaacattgaacatagatcggtttcattgaggaaggacatggattaactctgttggtagtgaatgtgtaaggttttaacttttctctcttttgggtttgcccacagttgtttattctttcgattaaatggggacaactcttttgtaagaaagttttgttcaattatgaaagcaaattgttttagctc

SEQ ID NO: 74749 - protein, 729 aa, Arabidopsis thaliana
  peptide (1)..(729): Ceres Seq. ID no. 5679399
TRVSINLLAGNEIHSLASFFSVFSFLKKKKMAPKFEWWAKGNNNNTRKGTPVVVKMENPNNWSMVELESPSHDDFLVRTHEKSRNKNARQLTWVLLLKAHRAAGCLTSLGSALFALGTAVRRRIAAGRTDIEISSSGVGSLQKQNHTKKSKLFYSCLKVFLWLSLILLGFEIAAYFKGWSFGTSKLQLQFIFNKGFFDWVYTRWVLLRVEYLAPPLQFLANGCIVLFLVQSLDRLILCLGCFWIRFKKIKPVPKPDSISDLESGDNGAFLPMVLVQIPMCNEKEVYQQSIAAVCNLDWPKGKILIQILDDSDDPITQSLIKEEVHKWQKLGARIVYRHRVNREGYKAGNLKSAMNCSYVKDYEFVAIFDADFQPLPDFLKKTIPHFKDNEEIGLVQARWSFVNKEENLLTRLQNINLAFHFEVEQQVNSVFLNFFGFNGTAGVWRIKALEDSGGWLERTTVEDMDIAVRAHLHGWKFVFLNDVECQCELPESYEAYRKQQHRWHSGPMQLFRLCLPAVIKSKISIGKKFNLIFLFFLLRKLILPFYSFTLFCIILPMTMFVPEAELPAWVVCYIPATMSFLNILPAPKSFPFIVPYLLFENTMSVTKFNAMVSGLFQLGSAYEWVVTKKSGRSSEGDLAALVEKDEKTTKHQRGVSAPETEAEKKAEKTKRKKKKHNRIYMKELSLAFLLLTAATRSLLSAQGIHFYFLLFQGISFLLVGLDLIGEQVE

SEQ ID NO: 74750 - protein, 699 aa, Arabidopsis thaliana; identical to SEQ ID NO: 26599
  peptide (1)..(699): Ceres Seq. ID no. 5679400

SEQ ID NO: 74751 - protein, 674 aa, Arabidopsis thaliana; identical to SEQ ID NO: 26600
  peptide (1)..(674): Ceres Seq. ID no. 5679401

SEQ ID NO: 74752 - DNA, 2077 bp, Arabidopsis thaliana
  misc_feature (1)..(2077): Ceres Seq. ID no. 5679428
  misc_feature (1)..(2077): Ortholog of  Ceres SEQ ID NO 13600419 as cited in SEQ ID NO 0
gaattgatcgactggaaaacagagaaccaccgtttctacagttggatatggctggtgggcaaatagagaagctagtcaaatacaagagcactgtcaaggatccaggaactcctggatttctcagaattagagaagggatgttgctcttcgtccctaatgatcccaaatcagattctaagctcaaagtacttactcagaacatcaaaagtcaaaaatataccaaagaaggatcaaataaacctccttggctcaatctcaccaacaagcaggcaaagagtcatatctttgagtttgaaaattatcccgacatgcatgcttgccgtgatttcatcactaaggcccttgctaaatgtgaattggagcctaataaatccgttgtctcgacatcttccgagcaactcagtattaaggaattggagctgcgcttcaagcttctgagagaaaatagtgagctgcagagattgcataagcaatttgtggaaagtaaagtactgactgaagatgaattctgggctacaagaaagaaattacttggtaaagattccatcagaaagtcaaaacagcagctcgggcttaagagcatgatggtttctggcatcaaaccatctactgatgggcggactaatagagtgacgtttaacttgacacctgagataatttttcagatttttgctgagaagccagctgttcggcaggcattcatcaattatgttccgagtaagatgacagaaaaagacttctggacaaaatattttagagcagaatatctttacagcaccaaaaatacagcagtagctgcagcagaagctgctgaggacgaggaactcgctgtctttctgaagcctgatgagatattggctcgggaaactcgtcacaagattagacgggttgatccaactcttgacatggaggctgaccagggagacgactacactcatcttatggaccacgggatccagcgtgatggcaccatggatgttgttgaaccacaaaatgatcagtttaaacgatcacttttgcaagatcttaatcgtcatgctgctgttgtattggaaggcagaagcattgatgttgagtcagaagatacaaggattgttgcagaggctctcacacgggttaaacaagtaagcaaagctgatggtgaaaccaccaaggacgctaatcaggagagattggaaagaatgtcccgggtagcaggaatggaggatcttcaagcaccacaaaatttcccattggcgccgctttctatcaaggatcctcgtgattactttgaatctcaacaaggaaacgtcctcaatgtacccagaggagcaaagggcttgaagagaaatgtccatgaagcttatggattactaaaggaatccattttagagattagagctacaggattaagtgatccgttgattaagcctgaagtttctttcgaggttttcagttcgttaacccgaaccattgcaactgctaaaaatattaatgggaagaacccacgagagagctttctggacagattaccaaagtccactaaggatgaagttctacaccattggacatcaatacaagaattactgaaacatttttggtcatcttatccgataacaaccacatatcttcataccaaggttggtaaactgaaggatgcaatgtccaatacatattcaaaacttgaggcaatgaaagagtcggtgcaatctgatctccggcatcaggtttctctactggttcgtccaatgcaacaggctcttgacgctgcgttccatcactacgaagtggatctgcagagaagaacagctaagagcggcgaaagaccaaacggctacgtatagaggacaaaaaaactaaaactaaaaagctttgcaagatctttgaattgtttcatcagccttggttggtgtttttgaaaatcttcatttgtccctttttgtccgaccattgagatacaaaaatgcgtttatattgtagtaatattttcttttcttttttttgttaattaggcgttatattgttaactgcgagagacaacaaagagattttctcgatctgaacatttttaagtttgcaatgtattagtaaattctct

SEQ ID NO: 74753 - protein, 606 aa, Arabidopsis thaliana
  peptide (1)..(606): Ceres Seq. ID no. 5679429
IDRLENREPPFLQLDMAGGQIEKLVKYKSTVKDPGTPGFLRIREGMLLFVPNDPKSDSKLKVLTQNIKSQKYTKEGSNKPPWLNLTNKQAKSHIFEFENYPDMHACRDFITKALAKCELEPNKSVVSTSSEQLSIKELELRFKLLRENSELQRLHKQFVESKVLTEDEFWATRKKLLGKDSIRKSKQQLGLKSMMVSGIKPSTDGRTNRVTFNLTPEIIFQIFAEKPAVRQAFINYVPSKMTEKDFWTKYFRAEYLYSTKNTAVAAAEAAEDEELAVFLKPDEILARETRHKIRRVDPTLDMEADQGDDYTHLMDHGIQRDGTMDVVEPQNDQFKRSLLQDLNRHAAVVLEGRSIDVESEDTRIVAEALTRVKQVSKADGETTKDANQERLERMSRVAGMEDLQAPQNFPLAPLSIKDPRDYFESQQGNVLNVPRGAKGLKRNVHEAYGLLKESILEIRATGLSDPLIKPEVSFEVFSSLTRTIATAKNINGKNPRESFLDRLPKSTKDEVLHHWTSIQELLKHFWSSYPITTTYLHTKVGKLKDAMSNTYSKLEAMKESVQSDLRHQVSLLVRPMQQALDAAFHHYEVDLQRRTAKSGERPNGYV

SEQ ID NO: 74754 - protein, 591 aa, Arabidopsis thaliana
  peptide (1)..(591): Ceres Seq. ID no. 5679430
MAGGQIEKLVKYKSTVKDPGTPGFLRIREGMLLFVPNDPKSDSKLKVLTQNIKSQKYTKEGSNKPPWLNLTNKQAKSHIFEFENYPDMHACRDFITKALAKCELEPNKSVVSTSSEQLSIKELELRFKLLRENSELQRLHKQFVESKVLTEDEFWATRKKLLGKDSIRKSKQQLGLKSMMVSGIKPSTDGRTNRVTFNLTPEIIFQIFAEKPAVRQAFINYVPSKMTEKDFWTKYFRAEYLYSTKNTAVAAAEAAEDEELAVFLKPDEILARETRHKIRRVDPTLDMEADQGDDYTHLMDHGIQRDGTMDVVEPQNDQFKRSLLQDLNRHAAVVLEGRSIDVESEDTRIVAEALTRVKQVSKADGETTKDANQERLERMSRVAGMEDLQAPQNFPLAPLSIKDPRDYFESQQGNVLNVPRGAKGLKRNVHEAYGLLKESILEIRATGLSDPLIKPEVSFEVFSSLTRTIATAKNINGKNPRESFLDRLPKSTKDEVLHHWTSIQELLKHFWSSYPITTTYLHTKVGKLKDAMSNTYSKLEAMKESVQSDLRHQVSLLVRPMQQALDAAFHHYEVDLQRRTAKSGERPNGYV

SEQ ID NO: 74755 - protein, 561 aa, Arabidopsis thaliana
  peptide (1)..(561): Ceres Seq. ID no. 5679431
MLLFVPNDPKSDSKLKVLTQNIKSQKYTKEGSNKPPWLNLTNKQAKSHIFEFENYPDMHACRDFITKALAKCELEPNKSVVSTSSEQLSIKELELRFKLLRENSELQRLHKQFVESKVLTEDEFWATRKKLLGKDSIRKSKQQLGLKSMMVSGIKPSTDGRTNRVTFNLTPEIIFQIFAEKPAVRQAFINYVPSKMTEKDFWTKYFRAEYLYSTKNTAVAAAEAAEDEELAVFLKPDEILARETRHKIRRVDPTLDMEADQGDDYTHLMDHGIQRDGTMDVVEPQNDQFKRSLLQDLNRHAAVVLEGRSIDVESEDTRIVAEALTRVKQVSKADGETTKDANQERLERMSRVAGMEDLQAPQNFPLAPLSIKDPRDYFESQQGNVLNVPRGAKGLKRNVHEAYGLLKESILEIRATGLSDPLIKPEVSFEVFSSLTRTIATAKNINGKNPRESFLDRLPKSTKDEVLHHWTSIQELLKHFWSSYPITTTYLHTKVGKLKDAMSNTYSKLEAMKESVQSDLRHQVSLLVRPMQQALDAAFHHYEVDLQRRTAKSGERPNGYV

SEQ ID NO: 74756 - DNA, 1482 bp, Arabidopsis thaliana
  misc_feature (1)..(1482): Ceres Seq. ID no. 5679470
  misc_feature (1)..(1482): Ortholog of  Ceres SEQ ID NO 14303340 as cited in SEQ ID NO 54642
aaatggatagtgaaggagcttcaagcgagtcttcttcttctggagatcagctcgagaagtggacagagtagtttcacatttgatttcagtttcattccgcacaatcaaatcggttgatgatttgtttgacttctttcagagagcaggatgagctgaagaagaaactgatcgcgtacgatgacttcacatggaagttatcttcatcaacggaactgtctcagggatcggagatacttaagtatgttggaggtgtagacatgagcttttgcaaagaagattcttccgtcgcatgcgcttgtctcgtcgttcttgagcttccttctctccgtgtagtccaccatgacttctctcttctccgcctccatgttccttatgtccctggatttcttgcctttcgtgaggctccggttcttttgcagattctgcagaagatgagagatgagaagcatccattctatcctcaggtactgatggtggatggaaatggaatacttcatccacgaggtataaacacacaactttacctttgttttgtagttgcatttcaagctctgtaattatggtgttagatgtaattgtcttctataggatttggcttggcgtgtcatttaggtgttcttgctcacctaccaaccattggggtcggaaagaatctgcatcatgtggatggtctgaatcaatctgaggttaaacagtcgcttcagctccaaataaacgagcatgagcaaactatcactttggtaggaaactctggaattacatggggagtagtaagtgactttgactgaacatctactgtagttgttgtgtctctttggtaataccgcgttatattagtagtgacttatcagttttagcaacgaaacttctccatagttgtggttttgataatcttgtgtaagatagtgaatttaatgatcaagttttacatattacgttcaacagggatttaggccaactctgagttctctaaagcccatatatgtatcggttggccatcgcatatcactggactctgccgttgaagttgtcaagataacctgcaagtaccgtgttccagaacctattagacaggcagatattagatcaagagcatatctccagaagcatcaaactgagtcttttaaagaactggcagtgcgaccaccggatcagactgaaccttaatccctcaagcaaccaagaacactattccacattacatagaaactctccaaagtctttaccaaagattgttaaatggacagattcaggcactgaagatccgccccaattatctccttcatttatctcactgacttgaagattgcaagctaaccaaggtaatcatgttatatccgatacattggaatttcctttccatacataccttaaacaagtgtaaatagaaaggctaggcaactggtaatttggttgtttgggcactgtatattgggagattttggggttctcgacaaacaattctatagctttgggtttggt

SEQ ID NO: 74757 - protein, 99 aa, Arabidopsis thaliana; identical to SEQ ID NO: 36617
  peptide (1)..(99): Ceres Seq. ID no. 5679471

SEQ ID NO: 74758 - protein, 146 aa, Arabidopsis thaliana; identical to SEQ ID NO: 36616
  peptide (1)..(146): Ceres Seq. ID no. 5679472

SEQ ID NO: 74759 - DNA, 968 bp, Arabidopsis thaliana
  misc_feature (1)..(968): Ceres Seq. ID no. 5679481
  misc_feature (1)..(968): Ortholog of  Ceres SEQ ID NO 15178873 as cited in SEQ ID NO 1103
  misc_feature (1)..(968): Ortholog of  Ceres SEQ ID NO 15173557 as cited in SEQ ID NO 60031
  misc_feature (1)..(968): Ortholog of  Ceres SEQ ID NO 13661430 as cited in SEQ ID NO 61258
  misc_feature (1)..(968): Ortholog of  Ceres SEQ ID NO 13590940 as cited in SEQ ID NO 68653
  misc_feature (1)..(968): Ortholog of  Ceres SEQ ID NO 15179001 as cited in SEQ ID NO 0
actcttttggccttatccgaaatctttttgtgggcagaaacgtttgtgtcttaggccaatctctgtgtctctctgtccagagagaaatggcagcatcatcagtactactctcgtgcttcaaatcccatcatcaaccaaaccttctccatggctgcaactactcatctaaccaaacactcctcagattcaacttttcaaccccaaaacctctcctgatctcctcacggagctgctcacgacgattcagagtcttgtcagagaccatcaccgtcaaattggaagaggaggagaaggatgatggtgcaagtgctgttcttgatcctcctgccgccgttaacactaagctctacttcggtaacttgccttacaatgttgacagtgcaactctggctcaaatcattcaagatttcgctaaccctgagctcgttgaggttctttacaacagagataccggacagagtcgtggattcgccttcgttaccatgagcaatgtcgaagattgcaacatcatcatcgataacctcgatggaactgagtatcttggtcgtgctttgaaagtgaactttgcagacaaaccaaagcctaacaaagaacctctgtatccagaaacagagcacaagctctttgttggtaacttatcatggactgttacttccgagtcattagctggagcgtttcgagaatgtggagatgtggttggggctagagttgtgtttgatggagatacaggaagatcacggggttatggctttgtatgttactcttccaaagcagaaatggaaaccgctcttgaatcgcttgacggatttgagctggagggtcgggcgattcgagtaaaccttgctcaagggaagaaattttgatatcatacaacaacattgtgtaatcatttagagttttatacattagagttatgtttatattgattgaactaattaactcaaaagatcaataaaactttttatgct

SEQ ID NO: 74760 - protein, 286 aa, Arabidopsis thaliana; identical to SEQ ID NO: 37614
  peptide (1)..(286): Ceres Seq. ID no. 5679482

SEQ ID NO: 74761 - protein, 258 aa, Arabidopsis thaliana; identical to SEQ ID NO: 37615
  peptide (1)..(258): Ceres Seq. ID no. 5679483

SEQ ID NO: 74762 - DNA, 1194 bp, Arabidopsis thaliana
  misc_feature (1)..(1194): Ceres Seq. ID no. 5679484
  misc_feature (1)..(1194): Ortholog of  Ceres SEQ ID NO 14303340 as cited in SEQ ID NO 54642
gttccgattaggaacttcctctccggcgactgaactttttctggaaatggatagtgaaggagcttcaagcgagtcttcttcttctggagatcagctcgagaagtggacagaagagcaggatgagctgaagaagaaactgatcgcgtacgatgacttcacatggaagttatcttcatcaacggaactgtctcagggatcggagatacttaagtatgttggaggtgtagacatgagcttttgcaaagaagattcttccgtcgcatgcgcttgtctcgtcgttcttgagcttccttctctccgtgtagtccaccatgacttctctcttctccgcctccatgttccttatgtccctggatttcttgcctttcgtgaggctccggttcttttgcagattctgcagaagatgagagatgagaagcatccattctatcctcaggtactgatggtggatggaaatggaatacttcatccacgaggatttggcttggcgtgtcatttaggtgttcttgctcacctaccaaccattggggtcggaaagaatctgcatcatgtggatggtctgaatcaatctgaggttaaacagtcgcttcagctccaaataaacgagcatgagcaaactatcactttggtaggaaactctggaattacatggggagtaggatttaggccaactctgagttctctaaagcccatatatgtatcggttggccatcgcatatcactggactctgccgttgaagttgtcaagataacctgcaagtaccgtgttccagaacctattagacaggcagatattagatcaagagcatatctccagaagcatcaaactgagtcttttaaagaactggcagtgcgaccaccggatcagactgaaccttaatccctcaagcaaccaagaacactattccacattacatagaaactctccaaagtctttaccaaagattgttaaatggacagattcaggcactgaagatccgccccaattatctccttcatttatctcactgacttgaagattgcaagctaaccaaggtaatcatgttatatccgatacattggaatttcctttccatacataccttaaacaagtgtaaatagaaaggctaggcaactggtaatttggttgtttgggcactgtatattgggagattttggggttctcgacaaacaattctatagctttgggtttgg

SEQ ID NO: 74763 - protein, 292 aa, Arabidopsis thaliana; identical to SEQ ID NO: 27038
  peptide (1)..(292): Ceres Seq. ID no. 5679485

SEQ ID NO: 74764 - protein, 277 aa, Arabidopsis thaliana; identical to SEQ ID NO: 27039
  peptide (1)..(277): Ceres Seq. ID no. 5679486

SEQ ID NO: 74765 - protein, 216 aa, Arabidopsis thaliana; identical to SEQ ID NO: 27040
  peptide (1)..(216): Ceres Seq. ID no. 5679487

SEQ ID NO: 74766 - DNA, 1290 bp, Arabidopsis thaliana
  misc_feature (1)..(1290): Ceres Seq. ID no. 5679508
  misc_feature (1)..(1290): Ortholog of  Ceres SEQ ID NO 14314300 as cited in SEQ ID NO 57386
  misc_feature (1)..(1290): Ortholog of  Ceres SEQ ID NO 14311993 as cited in SEQ ID NO 60371
  misc_feature (1)..(1290): Ortholog of  Ceres SEQ ID NO 13596509 as cited in SEQ ID NO 62004
  misc_feature (1)..(1290): Ortholog of  Ceres SEQ ID NO 13500385 as cited in SEQ ID NO 67583
agaaaaaaggatatcgacaatttcgcttttgctttcaaaatctcattctatcactttgtgccttttttagccatcgcgaaaaacctctgaatcgcatcccttgattttctgggtttgtgactttgtgtagtggaaattaggcttgttgtttgatttcgctacgagaaaatggacaagtacgagcttgttaaagacatcggtgctgggaattttggagtggcgaggctcatgagagtcaaaaactccaaggaactcgttgctatgaagtacatcgagcgtggacctaagattgatgagaacgtggcgagagagattattaaccacagatcacttcgtcatcccaatattatccggtttaaggaggtggttttgacaccaacgcacatcgccattgctatggaatatgctgctggcggtgagctatttgagcgtatatgtagcgctggaagattcagtgaggatgaggcaagatactttttccagcagcttatctcaggagtcagctattgtcatgctatgcaaatatgccacagagatctgaagcttgaaaataccctcttagatggaagtcctgctccacgcctgaagatctgtgattttggttattccaagtcctcactgttgcactctatgcccaaatcaactgttggaactccagcatatattgcacctgaggttctttctcgcggagagtatgatggcaagatggctgatgtatggtcttgtggtgtgactctttatgtcatgctggtgggagcatacccatttgaagaccaagaggatcccaaaaacttcaaaaaaacaatacaaagaataatggctgtcaagtacaagatcccggactatgtccatatctcacaagattgcaaacatctcctctcccgtatatttgtcaccaactcgaataagaggattacgataggtgacatcaagaaacatccatggttcctaaagaacctgccaagggaacttacagaaatagctcaagctgcatacttcaggaaagagaacccgacattctcactccaaagcgtcgaagagataatgaagattgtggaagaggcaaaaactccagctcgtgtttctcggtcgattggagcatttgggtggggaggaggagaagatgccgagggcaaggaggaagatgcagaggaagaagttgaggaagtagaagaagaagaagacgaagaagatgagtatgataagacggtgaagcaagtgcatgctagcatgggagaagtccgagtcagttaaaaaaaaagattgattttcttttcacgaaagtattct

SEQ ID NO: 74767 - protein, 361 aa, Arabidopsis thaliana; identical to SEQ ID NO: 36961
  peptide (1)..(361): Ceres Seq. ID no. 5679509

SEQ ID NO: 74768 - protein, 341 aa, Arabidopsis thaliana; identical to SEQ ID NO: 36962
  peptide (1)..(341): Ceres Seq. ID no. 5679510

SEQ ID NO: 74769 - protein, 330 aa, Arabidopsis thaliana; identical to SEQ ID NO: 36963
  peptide (1)..(330): Ceres Seq. ID no. 5679511

SEQ ID NO: 74770 - DNA, 1043 bp, Arabidopsis thaliana
  misc_feature (1)..(1043): Ceres Seq. ID no. 5679520
  misc_feature (1)..(1043): Ortholog of  Ceres SEQ ID NO 15178596 as cited in SEQ ID NO 53922
  misc_feature (1)..(1043): Ortholog of  Ceres SEQ ID NO 12780542 as cited in SEQ ID NO 65674
gaaatttcctctcttcttcttttgcttgagctttaggttttgagagcaaagaaaaacgaagacgcgtcaaagagcttttgtggagaggttctgcttgcttgctacaatgggttacgcccagctagttattggtccagcaggcagtggaaagtcaacttattgctcgtctttgtatgaacattgtgaaactatcggtcgaacaatgcatgttgttaaccttgatcctgctgcggagatcttcaactatcctgtggctatggatatcagagaacttatttctttggaagatgtgatggaggatctaaagcttggtcctaatggtgcccttatgtattgcatggagtatcttgaggatagcttacatgattgggtggatgaagaattggagaactacagggatgacgattaccttatctttgattgtccaggccagatagagctgtttacacatgttcctgtgctcaagaactttgtggagcatttgaagcagaagaacttcaacgtctgtgttgtttatctgcttgattcacagttcatcacagatgtaaccaagtttatcagtggttgcatgtcatctctcgctgcaatgatccagcttgaattaccacatgtcaacatcctctcaaaaatggacctcttgcaggacaaaagcaacattgatgattacttgaatccggagcctcgcacattgctagcagagttaaacaaaaggatgggtcctcaatatgcaaaactaaacaaagccttgattgagatggtgggagagtatgggatggtgaatttcatacccattaacttgaggaaagaaaagagcattcaatatgttctgtcgcaaatcgacgtctgtattcagtttggagaagatgctgatgtgaacatcaaagatgatgacgattttagtgacgatggtcctgacctataattgttatattcggtttctacaacttttgttaaaagtctaaacaagcttggtctcattgttcttgtcagttaccaatggcgtttgtgagaacttttgttgaatatcaaaagccttcaatgtg

SEQ ID NO: 74771 - protein, 271 aa, Arabidopsis thaliana; identical to SEQ ID NO: 28955
  peptide (1)..(271): Ceres Seq. ID no. 5679521

SEQ ID NO: 74772 - protein, 239 aa, Arabidopsis thaliana; identical to SEQ ID NO: 28956
  peptide (1)..(239): Ceres Seq. ID no. 5679522

SEQ ID NO: 74773 - protein, 221 aa, Arabidopsis thaliana; identical to SEQ ID NO: 28957
  peptide (1)..(221): Ceres Seq. ID no. 5679523

SEQ ID NO: 74774 - DNA, 1205 bp, Arabidopsis thaliana
  misc_feature (1)..(1205): Ceres Seq. ID no. 5679589
  misc_feature (1)..(1205): Ortholog of  Ceres SEQ ID NO 15171293 as cited in SEQ ID NO 51744
tatgaaattgtagataaatggatcaaatcgttaacgtggatgagtttcaagagctggccaaacaggccctccctaagatgtactatgatttctacaatggaggagcagaggatcaacacactctcaatgaaaatgtccaagctttccgtagaatcatgtttaggcctagggttcttgttgatgtgagcaacatagatatgtctacaagtatgttgggttacccaatctcagctcccatcatgattgctccaacagcaatgcataagttggctcatcctaaaggagaaatcgccacagcgaaagctgcagctgcgtgtaacactatcatgatagtatcattcatgtctacttgcactattgaggaggttgcttccagttgtaacgctgttcggtttcttcaaatatatgtgtacaagagacgtgatgtaacagctcagattgtgaaaagagctgaaaaagctggattcaaggctatagttctaactgttgatgttcccagacttggtagaagggaagcagatataaagaacaaaatgatatccccacagctgaagaattttgaaggcttagtttcaaccgaagtccgacctaatgaaggttcaggggttgaagcctttgcctctagtgcatttgatgcttcgttaagctggaaggatatcgaatggttaagatctattacaaagttgccaattctggtcaaagggttactcacacgtgaagacgctcttaaggctgttgaagccggtgtagatggaatagtggtatccaaccacggggctcgccagctcgactattccccggctacgataactgttttagaagaggttgttcatgctgtgaaaggtaggattccggttttgcttgatggaggagtaagacgaggaacagatgttttcaaagcgctggcgctcggagcacaagctgttcttatagggaggcctatagtctatgggcttgcagctaagggtgaagatggagtgaaaaaagtgattgatatgctgaaaaatgagtttgagattactatggccctttctggctgtccaaccattgatgacgtaaccagaaaccatgttaggacagagaatgagagaattaaatctatgctctgatcctaaaaccaacagatctagtctcagagacttaatcagacagttggacaacagtatgaaatactgtcaatgcacataaataaaaagctctatttc

SEQ ID NO: 74775 - protein, 363 aa, Arabidopsis thaliana; identical to SEQ ID NO: 41959
  peptide (1)..(363): Ceres Seq. ID no. 5679590

SEQ ID NO: 74776 - protein, 343 aa, Arabidopsis thaliana; identical to SEQ ID NO: 41960
  peptide (1)..(343): Ceres Seq. ID no. 5679591

SEQ ID NO: 74777 - protein, 317 aa, Arabidopsis thaliana; identical to SEQ ID NO: 41961
  peptide (1)..(317): Ceres Seq. ID no. 5679592

SEQ ID NO: 74778 - DNA, 1302 bp, Arabidopsis thaliana
  misc_feature (1)..(1302): Ceres Seq. ID no. 5679604
  misc_feature (1)..(1302): Ortholog of  Ceres SEQ ID NO 13661767 as cited in SEQ ID NO 61423
atatatcgcgtggatttgaagacgaagaggaatcataaaaagcctaacgaagaagacgaagaagaagaggaacaaacaaccatgggtgaagtggttaaggtaatcgtaaatctcttgcttctgattctgatttcgtgaaagctcatcggaaaatttcttgtttcagctatgaaaacatgaatcgccgccgattgttaattaagtggtcttcaatcactgatcactattccaattttgatttttgttttattttaatcatcaaatttgatgttttctagtttcacttgttgtgtatgaaattcaggctttgtcttggaggttgcaatcgaaaatttcactaattgctgaacgttttttgtttctctttcaagcttagcatcataaatttatgttttcttgttgtgtttgtgtatgtgtgtttttgcttaggatggaagagaagaagtgatccaggcatggtatatggatgatagcgaagaggatcagagacttcctcaccacaaggatcctaaggagtttctatctttggacaaacttgcaggtctctttgtgtgtttcaattcagtgttcttctctctgtttctctatttgtttcagatgtaatgtttgtgtgcagagctgggagtacttagctggagacttgatgctgataactatgaaaccgatgaggatttgaaaaagatccgcgaatctcgtggttactcttacatggacttttgtgaggtatgcccggaaaagcttccaaactatgaagtgaaagtgaagagctttttcgaagaacatttgcacactgatgaagagatccgttactgcgttgcaggaagcggttactttgatgtgagggatcgcaatgaagcttggattagagtatgggtaaagaagggaggtatgatagtcttacctgctggaatatatcatcgcttcaccgtagactcagacaactatatcaaggcaatgcggcttttcgttggtgaaccggtctggacaccatacaatcgcccacacgaccacctccctgcaaggaaagagtacatcgataatttcgtgaaggtgaatgaaggtggtgtcatagacgcgtcagcctagaggattctcagtcttatgcatcagatttctataaactaagcatacaataaagagagctttctgtctcatgttggatattatgtcatctacagatccacttgtgaagaaactttgattcgtgtggctttggcattatggttgtgttgtaactgtatttatagtttatactccagaaatcaaactgtgttacattatcaatctctccaaagttttcct

SEQ ID NO: 74779 - protein, 125 aa, Arabidopsis thaliana; identical to SEQ ID NO: 25190
  peptide (1)..(125): Ceres Seq. ID no. 5679605

SEQ ID NO: 74780 - protein, 69 aa, Arabidopsis thaliana
  peptide (1)..(69): Ceres Seq. ID no. 5679606
MIAKRIRDFLTTRILRSFYLWTNLQVSLCVSIQCSSLCFSICFRCNVCVQSWEYLAGDLMLITMKPMRI

SEQ ID NO: 74781 - protein, 65 aa, Arabidopsis thaliana; identical to SEQ ID NO: 25191
  peptide (1)..(65): Ceres Seq. ID no. 5679607

SEQ ID NO: 74782 - DNA, 696 bp, Arabidopsis thaliana
  misc_feature (1)..(696): Ceres Seq. ID no. 5679645
  misc_feature (1)..(696): Ortholog of  Ceres SEQ ID NO 13654989 as cited in SEQ ID NO 63117
  misc_feature (1)..(696): Ortholog of  Ceres SEQ ID NO 13584744 as cited in SEQ ID NO 69137
tttatcgtctacgagctgatggaaagcggatcattggatacacagttacacggaccttctcggggatcggctttaacatggcacatgcggatgaagattgctcttgatacagcaagagctgttgagtatctccacgagcgttgtcgtcctccggttatccacagagatcttaaatcgtcaaatattctccttgattcttccttcaacgccaagatttcggattttggtcttgcggtaatggtgggggctcacggcaaaaacaacattaaactatcaggaacacttggttatgttgctccagaatatctcctagatggaaaattgacggataagagtgatgtttatgcgtttggtgtggttttacttgaactcttgttaggaagacggccggttgagaaattgagttcggttcagtgtcaatctcttgtcacttgggcaatgccccaacttacggatagatcaaagcttccgaaaatcgtggatccggttatcaaagatacaatggatcataagcacttataccaggtggcagccgtggcagtgctttgtgtacaaccagaaccgagttatcgaccgttgataaccgatgttcttcactcactagttccattggttccggtagagctaggagggactctccggttaataccatcatcgtcttgatttaagaaaataatattttttgcttcttttttt

SEQ ID NO: 74783 - protein, 220 aa, Arabidopsis thaliana; identical to SEQ ID NO: 34916
  peptide (1)..(220): Ceres Seq. ID no. 5679646

SEQ ID NO: 74784 - protein, 214 aa, Arabidopsis thaliana; identical to SEQ ID NO: 34917
  peptide (1)..(214): Ceres Seq. ID no. 5679647

SEQ ID NO: 74785 - protein, 192 aa, Arabidopsis thaliana; identical to SEQ ID NO: 34918
  peptide (1)..(192): Ceres Seq. ID no. 5679648

SEQ ID NO: 74786 - DNA, 1772 bp, Arabidopsis thaliana
  misc_feature (1)..(1772): Ceres Seq. ID no. 5679656
  misc_feature (1)..(1772): Ortholog of  Ceres SEQ ID NO 13581848 as cited in SEQ ID NO 51340
  misc_feature (1)..(1772): Ortholog of  Ceres SEQ ID NO 13595392 as cited in SEQ ID NO 56164
  misc_feature (1)..(1772): Ortholog of  Ceres SEQ ID NO 12618341 as cited in SEQ ID NO 64256
gtaatctcaatcacaaactatttcccccccttcgttcatcaaatcctcaagagaaaaaaaaaatccccaaaagcttcctcaaaaccctaacacagatctctcgatcttctccgatctgtcttttctcctaatctggtttagtttgattttattggattgaagatgtcagacgctttgaatatgactcttgatgaaattgtgaagaagagtaagagtgaaaggtctgcagctgcaaggtctggaggtaaaggagtttcccgtaagagtggacgtggacgtggtggacctaatggtgttgtaggaggtggaagaggaggtggacctgttcgtagaggtcctcttgctgttaatactcggccatcatcatccttctccataaacaaggcaagctcgaaatcttgattggaactctgtgccaccaaataccgaagcatgctaaaacttaagatggatgatcttttaatgctcttttgtccttggagaagaatcatacatgcatataccgttacttctgatgatgattcagattacaagaatcttctaacatcttcttagaaaagcttctttcctgcaattagtggtttttatggttaaaatctgggaacttcaagaggcatgaatagatgtgcagaagttttcggttgatattgtcactcgctataggtttattgaggagctcctttaagctaagtagtccacatagggttatctacagggggataaagcctgaaaatgtgtgtggttttagggggaatttcagaaattttaacagtaaataggatttatgatgggttatcaaagtgggggtatttgcactatgcatgaagttcacgatggtacatctggaatttcttcggagtgtgacggcagtctcagttttcgtttttggcttcagagactgactgataacaccacttgcccgcaggaagaggagcttgccatggcagaatcagaatgatttgtatgaagaaacccttagagctgttggggtatcaggagtggaagtcggaaccacagtttatattaccaaccttgatcagggagtgacaaatgaagatataagggaactctatgctgaaattggagagctgaaaagatatgcaattcactatgacaaaaatgggcgtccaagtggatcggctgaagttgtgtatatgagaagaagtgatgcaattcaagctatgaggaaatacaataatgtacttttggatggaaggcctatgaaactggagattctgggtggaaatactgaatctgctcctgtcgcagctcgtgttaatgtgactggattgaatggaaggatgaagaggagtgtcttcattggacaaggagttagaggtgggagagtaggaagaggaagaggttcaggtccttctgggagacgccttccactccaacaaaaccaacaaggtggtgtgacagctggtcgaggcgggttccgtggtagaggccggggtaatggtggtggcagagggaataaaagcggtgggcgaggtggaaagaagccagtggagaagtctgctgcggatctcgacaaagatctcgaaagctatcatgctgaagctatgaacatctcttaaacagaagcaagacttcgcatcttgtcatgtacttttgtgttctttattcttagtctctgactaaatatgtggcaaagtctggtttggtttaattacgtttaggatggctctactctgcttttattttcctcttttcttgtttcacactttcacagtcacttttggttattgaagttaaaagagatttagctg

SEQ ID NO: 74787 - protein, 141 aa, Arabidopsis thaliana
  peptide (1)..(141): Ceres Seq. ID no. 5679657
MRRSDAIQAMRKYNNVLLDGRPMKLEILGGNTESAPVAARVNVTGLNGRMKRSVFIGQGVRGGRVGRGRGSGPSGRRLPLQQNQQGGVTAGRGGFRGRGRGNGGGRGNKSGGRGGKKPVEKSAADLDKDLESYHAEAMNIS

SEQ ID NO: 74788 - protein, 132 aa, Arabidopsis thaliana
  peptide (1)..(132): Ceres Seq. ID no. 5679658
MRKYNNVLLDGRPMKLEILGGNTESAPVAARVNVTGLNGRMKRSVFIGQGVRGGRVGRGRGSGPSGRRLPLQQNQQGGVTAGRGGFRGRGRGNGGGRGNKSGGRGGKKPVEKSAADLDKDLESYHAEAMNIS

SEQ ID NO: 74789 - protein, 119 aa, Arabidopsis thaliana
  peptide (1)..(119): Ceres Seq. ID no. 5679659
MKLEILGGNTESAPVAARVNVTGLNGRMKRSVFIGQGVRGGRVGRGRGSGPSGRRLPLQQNQQGGVTAGRGGFRGRGRGNGGGRGNKSGGRGGKKPVEKSAADLDKDLESYHAEAMNIS

SEQ ID NO: 74790 - DNA, 1702 bp, Arabidopsis thaliana
  misc_feature (1)..(1702): Ceres Seq. ID no. 5679735
  misc_feature (1)..(1702): Ortholog of  Ceres SEQ ID NO 14307156 as cited in SEQ ID NO 54069
  misc_feature (1)..(1702): Ortholog of  Ceres SEQ ID NO 15169651 as cited in SEQ ID NO 64156
ctgttgtttgttttatcatctctccataattgcttcgatttctctgcaaagacacaacacaaaaagtgctttttttaatcagatattttctgggcttcactttaactctcttcgtgcttggttttccgatcttagtcgttactaattgagtcggagactgttcatttcctgattctgaagaaagttttggagaaggagaagatgtcaactctgcgagtgagctagggtttagtgtgttttccgatttttgagctcttggggattgttgttttctcttaaagagtcgattttgaatggcggtggagtatgtatgttgcagcccaaacttctttatacatatagctgtgattgtgtttcttgtcttgttcgctggactcatgtctggcttaacattgggtcttatgtctttgagtctcgttgatcttgaagttctcgctaaatccggtacacctgaacatcgtaaatatgcagcaaagatattgccagtggtaaagaatcagcacttgttgcttgtcactttacttatatgcaatgcagctgctatggagacgcttcctatttttcttgatggccttgtgacggcatggggtgccattttgatttcagttacattgattcttctctttggtgagattatacctcagtcgatttgttcacgttatggtttagcgattggtgcaacagtggctccgtttgtccgtgtcctagtctttatctgcttacctgttgcatggccaataagcaagcgctttttcgaagagctgagctgaaaacacttgtggattttcatggaaatgaggctggaaagggtggggagttgactcatgacgaaacgacaatcattgcaggagctcttgaactctctgagaaaatggtcaaagatgcaatgacaccaatatcggatatctttgtgattgatatcaatgccaaactagacagagacttgatgaacttgattcttgagaaagggcatagcagagttccagtatactatgagcagccaactaacataatcggccttgttctggtgaagaacttattaactatcaacccagatgaagaaatacctgtcaagaatgtcacgataagaaggattccaagagttccagaaatcttgcctttatatgacatattgaacgaattccagaaaggactcagccacatggctgttgttgtaagacagtgtgacaaaatccacccattaccttctaaaaatgggagtgttaaggaagcccgagtggatgtggatagtgagggaactcctactcctcaggagagaatgttaaggacaaaaagatcgcttcaaaagtggaagagctttccgaatcgagcaagttcgtttaaaggagggtcaaagagcaagaagtggtcaaaagacaatgatgcagacatcctgcaattgaatggcaatccgctgcctaaacttgctgaggaagaagaagcagtcggaatcattacgatggaggatgtcattgaagaacttctgcaggaggagatctttgacgaaactgatcaccattttgaagactcctaacacagagtgcatgaccactgaactggttatgaatgtcgaaaactttagtctttgttttcaactttcaaactgtcacttgtccggcgaatgtgtatcaatgtaggcatgaacaacaactttttctatggtttcaagatgttttctctctatatatatatcattggtctc

SEQ ID NO: 74791 - protein, 267 aa, Arabidopsis thaliana; identical to SEQ ID NO: 38927
  peptide (1)..(267): Ceres Seq. ID no. 5679736

SEQ ID NO: 74792 - protein, 220 aa, Arabidopsis thaliana; identical to SEQ ID NO: 38928
  peptide (1)..(220): Ceres Seq. ID no. 5679737

SEQ ID NO: 74793 - protein, 215 aa, Arabidopsis thaliana; identical to SEQ ID NO: 38929
  peptide (1)..(215): Ceres Seq. ID no. 5679738

SEQ ID NO: 74794 - DNA, 1121 bp, Arabidopsis thaliana
  misc_feature (1)..(1121): Ceres Seq. ID no. 5679743
  misc_feature (1)..(1121): Ortholog of  Ceres SEQ ID NO 14313796 as cited in SEQ ID NO 54544
aagttctcagctaatctaaattcctctgttcattttctgggttgtgcgatagtttctgaacagagttaggtttctttgttcatgtctgatttcgcaaaactctgtttgccataatttgtaggtgatttaccagttcatattcttcgtaatcacggctcttttcaaatttgatcaagtcactgactttgctggtagcacaaacttcgttatacttgctgtgttaacacttgttctcaaagcctcttggcattttcgacagatagtattgactttgctagttgtggtatggggtcttcgcttggggattttccttctaatgaggatcttgcaatggggggaagatcgtcgctttgatgaacagcgtggaaatatagtgagactaatcattttctggactcttcaggctgtgtgggtttggacggttagcttacctttaacacttgttaatgcaagtgatggtggtggatctcttaaacccgcagatgttatcggttggactatgtgggttttcggtttcttgattgaagctgcagctgatcaacagaagctatcattcaaaaactctcctgaaaacagaggaaaatggtgtgatgttggagtctggaagtattcaagacatccaaactacttcggtgagatgttactgtggtggggaatctttgtggctgcatcgcctgtgcttgaaggtgcagagtatcttgtcatattcggaccactctttctcactttgctacttctattcgtcagcggcataccattactcgaggcatcggctgacaaaaaacatggaaactcaggagcttacagatcctacaagaagacaacaagtcctctgattctgttcccaagaggagtgtatgggaacttaccaggatggttcaagacggtctttctcttcgagtttccattttacagccgaaatctccctcaagagttagggtagactccaaaacagcaaagagaaagaagtaaaagatgactgatttgtgatactcatatttgagttattgttcttcacaacactctttgataaaatttgtgtaaaaaattgcccgtaagaaactgaatttgtttgaaatattggacagtcttgacagattatctcagttgtatttggttct

SEQ ID NO: 74795 - protein, 208 aa, Arabidopsis thaliana; identical to SEQ ID NO: 37102
  peptide (1)..(208): Ceres Seq. ID no. 5679744

SEQ ID NO: 74796 - protein, 147 aa, Arabidopsis thaliana; identical to SEQ ID NO: 37103
  peptide (1)..(147): Ceres Seq. ID no. 5679745

SEQ ID NO: 74797 - DNA, 985 bp, Arabidopsis thaliana
  misc_feature (1)..(985): Ceres Seq. ID no. 5679750
  misc_feature (1)..(985): Ortholog of  Ceres SEQ ID NO 15173873 as cited in SEQ ID NO 62620
  misc_feature (1)..(985): Ortholog of  Ceres SEQ ID NO 13655610 as cited in SEQ ID NO 64148
  misc_feature (1)..(985): Ortholog of  Ceres SEQ ID NO 14302675 as cited in SEQ ID NO 0
aagaaagccctaaaatttaattagggtttcagtgtcttcaaattcacctatcctcagcctcaactctctcctctatccactctcagccggaaaatttttccttgattcattacgacagagagaaccatgccggcgaaacagaggaccccgaaggtcaacagaaaccctgatctgatcaggggtgttggtaaatactcgagatcccagatgtaccataagagaggtttgtgggctatcaaggccaaaaatggaggcgttttcccacgtcacgacgctaaatctaaggttgatgctccggtggagaagccaccgaagttctatccagctgaagatgttaagaaacctctccccaacaggcgcacggcaaaaccaaccaagctcagagctagcattactccaggtacagtgttgattatccttgctggtaggttcaagggaaagagagttgtcttccttaagcagcttgcctctggtttgcttcttgtgactggaccattcaagatcaatggtgttcctttgagacgtgttaaccaggcctatgtgattggcacttccacaaaggttgacatttctggagtcaccctcgataaattcgatgataagtactttggcaaggttgctgagaagaaaaagaagaagacagaaggagagttctttgaggctgagaaagaggagaagaaggagatcccacaggtgaagaaagatgaccagaaagctgtggatgcagctttgatcaaagccattgaagcagttccagagttgaagacttaccttggcgcaaggttttcattgaaacaaggaatgaagccccatgagcttgttttctagatttcattactttttttctgaggtctctagagtatctgtctcctgaagtgttttaccttctaaatggttgttttgttcttgttcactgaacacatacaatttttggcttatacattctctgttcttacgtatggacaaactatcgatcctgtttttg

SEQ ID NO: 74798 - protein, 233 aa, Arabidopsis thaliana; identical to SEQ ID NO: 22783
  peptide (1)..(233): Ceres Seq. ID no. 5679751

SEQ ID NO: 74799 - protein, 206 aa, Arabidopsis thaliana; identical to SEQ ID NO: 22784
  peptide (1)..(206): Ceres Seq. ID no. 5679752

SEQ ID NO: 74800 - DNA, 1219 bp, Arabidopsis thaliana
  misc_feature (1)..(1219): Ceres Seq. ID no. 5679772
  misc_feature (1)..(1219): Ortholog of  Ceres SEQ ID NO 13595351 as cited in SEQ ID NO 55934
  misc_feature (1)..(1219): Ortholog of  Ceres SEQ ID NO 13639645 as cited in SEQ ID NO 57488
aatcaacacacacaaacacacacacacacagcctttttccttcgttgatcgattgttaagctcgatccaatggcggataacaccgataatcggagatccttatggggagttccggagaagcttcagcttcacatagcgatgctgacgttgcaattcggttacgccggattccacgtggtgtctcgagctgctcttaacatgggaatcagcaaactcgtcttccctgtttatcgtaacatcatcgccttgcttcttctccttcccttcgcttacttccttgaaaagaaggagagaccagcgattactctcaactttctcatccagttcttctttttggcactcataggaataacagcgaggctctcggttacgtcttacacttgtttcttcggaatcattcagttcttgatcattgctgctttctgtgaaagagattctcaggcttgggtttttcactccggttgggagcttttcaccatcctctacgccggaatcgtagcgtctggaatcgcgtttgcggttcagatttggtgtattgacagagggggtccagtcttcgttgctgtttaccagcctgttcagactcttgtcgttgcgatcatggcttctattgcgttaggcgaagaattttatttgggcgggattattggagcggtcttgatcatagcgggactttacttcgtattgtacggtaagagcgaagagaggaaatttgcagcgcttgagaaggcagcgatccagtcctccgcggagcatggtattgaacgtgcacctgtttctcgcaactccatcaagtcgtccatcacaacaccactactccatcagtcaacggacaatgtttgactactttggacaaatcactctccagctaataattacaaatgccattacccaattaaaagggaacaatggtgtgccgttgtgttttatgacttttgtgtctgctttttttcttagtgttttctcttcttttttttttctaaaaaattattaattacctaagaaaggtttttgaagaaaggaaaaaaaatggtggatgagacatcattgttcatgaggatgatgatgatgatgatagtgatgaagaagactatgtgggagctttggattgagacttttctatatataatatctggctgatatattagtgccattttttcttacatttcttgtggggtttttctttcctttatcatcaatagaatgttataatttgcat

SEQ ID NO: 74801 - protein, 257 aa, Arabidopsis thaliana
  peptide (1)..(257): Ceres Seq. ID no. 5679773
MADNTDNRRSLWGVPEKLQLHIAMLTLQFGYAGFHVVSRAALNMGISKLVFPVYRNIIALLLLLPFAYFLEKKERPAITLNFLIQFFFLALIGITARLSVTSYTCFFGIIQFLIIAAFCERDSQAWVFHSGWELFTILYAGIVASGIAFAVQIWCIDRGGPVFVAVYQPVQTLVVAIMASIALGEEFYLGGIIGAVLIIAGLYFVLYGKSEERKFAALEKAAIQSSAEHGIERAPVSRNSIKSSITTPLLHQSTDNV

SEQ ID NO: 74802 - protein, 234 aa, Arabidopsis thaliana
  peptide (1)..(234): Ceres Seq. ID no. 5679774
MLTLQFGYAGFHVVSRAALNMGISKLVFPVYRNIIALLLLLPFAYFLEKKERPAITLNFLIQFFFLALIGITARLSVTSYTCFFGIIQFLIIAAFCERDSQAWVFHSGWELFTILYAGIVASGIAFAVQIWCIDRGGPVFVAVYQPVQTLVVAIMASIALGEEFYLGGIIGAVLIIAGLYFVLYGKSEERKFAALEKAAIQSSAEHGIERAPVSRNSIKSSITTPLLHQSTDNV

SEQ ID NO: 74803 - protein, 214 aa, Arabidopsis thaliana
  peptide (1)..(214): Ceres Seq. ID no. 5679775
MGISKLVFPVYRNIIALLLLLPFAYFLEKKERPAITLNFLIQFFFLALIGITARLSVTSYTCFFGIIQFLIIAAFCERDSQAWVFHSGWELFTILYAGIVASGIAFAVQIWCIDRGGPVFVAVYQPVQTLVVAIMASIALGEEFYLGGIIGAVLIIAGLYFVLYGKSEERKFAALEKAAIQSSAEHGIERAPVSRNSIKSSITTPLLHQSTDNV

SEQ ID NO: 74804 - DNA, 764 bp, Arabidopsis thaliana
  misc_feature (1)..(764): Ceres Seq. ID no. 5679791
  misc_feature (1)..(764): Ortholog of  Ceres SEQ ID NO 15177004 as cited in SEQ ID NO 57554
atagagtttggtaggtcgtattttcaacattttaaactcaatttttatgttgacaataacaaaaaaagaaaatcatatcatatatctcaacatatagagtctaacttttttcgccaaaccaaaagaaagaagaaaccaagaaacaagaaaaatgggtgttcttgatcacgtctctgaatatttcgattgttctcatggaagctccaagagacacaaaagtctacagacggtggatgtgagggttttgatagattgtgaaggatgcgagaggaaagtaaggagagctttagaaggaatgagaggaataagagatgtaaccatcgagccaaatgctcagaaagtgacagtggttgggtacgttgaaccaaacaaagtggtggctcgtatcattcaccgaaccggtaaaagagcagagctatatcctttcgttccttacgacgttgtggctcatccttacgcgtctggtgtttacgataacagagccccgactgggtacgttaggaacaccgagtatgatccacatgtgtcacgtctcgcacgtgctagctccactgaggttcgttatactacggcgtttagcgacgagaacgcctccgcttgtgttgttatgtgatgttttttttttttggtttaatttttttttactgggattattttttgtgtttggatgttgatgtttgtttatgtttccatcacgaatgtatttaagataagaacgagtgaaaaaaatgtaaattgcatggtgatgaattggtggttaaaac

SEQ ID NO: 74805 - protein, 153 aa, Arabidopsis thaliana; identical to SEQ ID NO: 25669
  peptide (1)..(153): Ceres Seq. ID no. 5679792

SEQ ID NO: 74806 - protein, 105 aa, Arabidopsis thaliana; identical to SEQ ID NO: 25670
  peptide (1)..(105): Ceres Seq. ID no. 5679793

SEQ ID NO: 74807 - DNA, 1126 bp, Arabidopsis thaliana
  misc_feature (1)..(1126): Ceres Seq. ID no. 5679801
  misc_feature (1)..(1126): Ortholog of  Ceres SEQ ID NO 12562983 as cited in SEQ ID NO 53309
aaacatctctcaacaacaacaacaaaacaaaacttgcacaatggtgaactttgttgaggtacaaaaaccattgttgtacggtctgatgaaaatggctggcgtcgttccttacactttagagatcgaaccagggacgaagatcaacttttgggtccctaaggaaaccctaaagaagaattccggtaccggaaaaccaacgaaacccgataaacctaaaaagcctgtcgtcttgttaatccatggtttcgctggcgaaggaatcgtgacgtggcagttccaagtcggtgcattatccaagaaatactcggtctacataccggacctcctctttttcggtggatcctacaccgacaactcggaccggtctccggcgtttcaagccgactgtttggtcaaggggcttcgtatcctcggcgtggataagtttgttcccgtagggtttagctacgggggcatggtggctttcaagatcgctgaagcttacccggacatggttagagcaatcgttgtgtctggttcgattcccacaatgaccgataccattaatgaggcgagcttgaaccggttagggtttagttcttccacggatctcttgttaccgacttctgttacgggacttaaggctctcttcaccattgctgtgcataaacccttgtggttccctaaacgattgttcaaagactacatcgaggtaatgtttaacaacagaaaagaaagagctgaactgttagaggctgttgtggtcagcaacaaggaagcgcaaatccctcatttcccacggaaaatacatttcttgtggggtgaaagtgatcaaatctttgatctcgaattggctagagacatgaaagaacaaataggtgagaacgcaacaatagagagtataaagaaggcaggccatttggtacaattggaaagaccttgtgtttacaataggcgtctcaaaaagtttcttgcatctattcactcggaagataaaattaaaatgctacattaagttctatttgatcctgatatactgtatgtatggatcatttgtgtcgagattgaataattattgggtttgtttttacttgatttgtctttttgtcatttactatgatcacaatatgtaatattaatctttatg

SEQ ID NO: 74808 - protein, 330 aa, Arabidopsis thaliana; identical to SEQ ID NO: 24341
  peptide (1)..(330): Ceres Seq. ID no. 5679802

SEQ ID NO: 74809 - protein, 317 aa, Arabidopsis thaliana; identical to SEQ ID NO: 24342
  peptide (1)..(317): Ceres Seq. ID no. 5679803

SEQ ID NO: 74810 - protein, 302 aa, Arabidopsis thaliana; identical to SEQ ID NO: 24343
  peptide (1)..(302): Ceres Seq. ID no. 5679804

SEQ ID NO: 74811 - DNA, 797 bp, Arabidopsis thaliana
  misc_feature (1)..(797): Ceres Seq. ID no. 5679807
  misc_feature (1)..(797): Ortholog of  Ceres SEQ ID NO 13658584 as cited in SEQ ID NO 66428
  misc_feature (1)..(797): Ortholog of  Ceres SEQ ID NO 13596269 as cited in SEQ ID NO 67972
attgcaaccatttctctgctgtttcttcgtcgtttagcttcagaggacgacaatccgctgtgtgtgtgggtgtgagtttcttaagagaagtcagaaacaatgattgggttgtttaaagtaaaggaaaagcaaagagaacaagctcaaaatgctactagaggaggagcttctgttaagaagcaatctgctggcgaacttcgtcttcacaaagatatatcagagttgaaccttcctagctcttgttcaatatcttttccaaatggcaaagatgatttgatgaactttgaagtatccattaaacctgatgatggatattaccacaatggtacgtttgtttcacattccaagtctctcctgtgtatccacatgaagctccaaaagttaaatgcaaaaccaaggtttatcatcccaatatcgatttggaaggaaacgtttgcctgaacatcttgcgtgaagattggaaacctgttcttaacattaacacagttatctacggactcttccatctgttcacggaacccaattctgaagatcccttgaaccatgatgctgcagcagttttgagggataacccaaagctctttgagaccaatgttcgcagggccatgaccggtggatatgtcggtcagacctttttcccgcgttgtatctaacaaagctctggtttgtcttcttcaaggaaaaagataagaaccaaaccctttgtccgccattgtatttcttctctttctcaaggaccctcgtttgtttgtttgatcttgtaaaattacattccgcgttaaagtaaccctttcctt

SEQ ID NO: 74812 - protein, 113 aa, Arabidopsis thaliana
  peptide (1)..(113): Ceres Seq. ID no. 5679808
MIGLFKVKEKQREQAQNATRGGASVKKQSAGELRLHKDISELNLPSSCSISFPNGKDDLMNFEVSIKPDDGYYHNGTFVSHSKSLLCIHMKLQKLNAKPRFIIPISIWKETFA

SEQ ID NO: 74813 - DNA, 1005 bp, Arabidopsis thaliana
  misc_feature (1)..(1005): Ceres Seq. ID no. 5679862
  misc_feature (1)..(1005): Ortholog of  Ceres SEQ ID NO 13581889 as cited in SEQ ID NO 50900
  misc_feature (1)..(1005): Ortholog of  Ceres SEQ ID NO 13581902 as cited in SEQ ID NO 52223
atgatttgtttgtaattagatcaggggtttaggtctttccattactttttaatgttttttctgttactgtctccgcgatctgattttacgacaatagagtttcgggttttgtcccattccagtttgaaaataaaggtccgtcttttaagtttgctggatcgataaacctgtgaagattgagtctagtcgatttattggatgatccattcttcatcgtttttttcttgcttcgaagttctgtataaccagatttgtctgtgtgcgattgtcattacctagccgtgtatcgagaactagggttttcgagtcaattttgccccttttggttatatctggttcgataacgattcatctggattagggttttaagtgatggctcgtaccaagcaaaccgctcgtaagtccaccggaggtaaagctccaaggaagcaacttgctactaaggctgctcgtaaatctgcaccaactactggtggagtcaagaaaccacatcgttaccgtcctggaactgttgctctccgtgaaatccgtaagtaccagaagagtactgagttgcttatcaggaaactgccatttcagaggctagtccgtgagattgctcaagatttcaagactgatttgcgtttccagagccatgctgtcttagctctccaggaagctgcagaagcatatcttgttggtctctttgaagacactaacctttgtgccattcatgccaagcgtgtgaccataatgcccaaagacattcagctcgctcgtcgtatcagaggtgaacgcgcttaagccaaccaagaatccgagatttggttcaagtagtttttgttttttatgaaagcaagatcttaattgctgtgttttttaaatctctgggtatgtagtagtaagagtagtaagaagtctgcaatctaagaatgttgtgttctttaagcttattattatgtgtgttgcgaactctttttaactcttttgttaaattcttatgttttcttaactcgtttgttcgtc

SEQ ID NO: 74814 - protein, 136 aa, Arabidopsis thaliana; identical to SEQ ID NO: 26403
  peptide (1)..(136): Ceres Seq. ID no. 5679863

SEQ ID NO: 74815 - DNA, 645 bp, Arabidopsis thaliana
  misc_feature (1)..(645): Ceres Seq. ID no. 5679864
  misc_feature (1)..(645): Ortholog of  Ceres SEQ ID NO 13581889 as cited in SEQ ID NO 50900
acaaccactacttcaatcatcccctattactgcttttgttacgaaagacaaaaaaacaaaacaaaacaaaagtcagctcaggcgaagaacagatggctcgtaccaagcaaaccgctcgtaagtccaccggaggtaaagctccaaggaagcaacttgctactaaggctgctcgtaaatctgcaccaactactggtggagtcaagaaaccacatcgttaccgtcctggaactgttgctctccgtgaaatccgtaagtaccagaagagtactgagttgcttatcaggaaactgccatttcagaggctagtccgtgagattgctcaagatttcaagactgatttgcgtttccagagccatgctgtcttagctctccaggaagctgcagaagcatatcttgttggtctctttgaagacactaacctttgtgccattcatgccaagcgtgtgaccataatgcccaaagacattcagctcgctcgtcgtatcagaggtgaacgcgcttaagccaaccaagaatccgagatttggttcaagtagtttttgttttttatgaaagcaagatcttaattgctgtgttttttaaatctctgggtatgtagtagtaagagtagtaagaagtctgcaatctaagaatgttgtgttcttt

SEQ ID NO: 74816 - protein, 166 aa, Arabidopsis thaliana
  peptide (1)..(166): Ceres Seq. ID no. 5679865
NHYFNHPLLLLLLRKTKKQNKTKVSSGEEQMARTKQTARKSTGGKAPRKQLATKAARKSAPTTGGVKKPHRYRPGTVALREIRKYQKSTELLIRKLPFQRLVREIAQDFKTDLRFQSHAVLALQEAAEAYLVGLFEDTNLCAIHAKRVTIMPKDIQLARRIRGERA

SEQ ID NO: 74817 - protein, 136 aa, Arabidopsis thaliana; identical to SEQ ID NO: 26403
  peptide (1)..(136): Ceres Seq. ID no. 5679866

SEQ ID NO: 74818 - protein, 101 aa, Arabidopsis thaliana
  peptide (1)..(101): Ceres Seq. ID no. 5679867
TTTTSIIPYYCFCYERQKNKTKQKSAQAKNRWLVPSKPLVSPPEVKLQGSNLLLRLLVNLHQLLVESRNHIVTVLELLLSVKSVSTRRVLSCLSGNCHFRG

SEQ ID NO: 74819 - DNA, 1537 bp, Arabidopsis thaliana
  misc_feature (1)..(1537): Ceres Seq. ID no. 5679887
  misc_feature (1)..(1537): Ortholog of  Ceres SEQ ID NO 14304944 as cited in SEQ ID NO 53041
  misc_feature (1)..(1537): Ortholog of  Ceres SEQ ID NO 15170354 as cited in SEQ ID NO 54190
  misc_feature (1)..(1537): Ortholog of  Ceres SEQ ID NO 14307253 as cited in SEQ ID NO 54783
  misc_feature (1)..(1537): Ortholog of  Ceres SEQ ID NO 15171508 as cited in SEQ ID NO 58526
  misc_feature (1)..(1537): Ortholog of  Ceres SEQ ID NO 14312300 as cited in SEQ ID NO 58632
  misc_feature (1)..(1537): Ortholog of  Ceres SEQ ID NO 13654989 as cited in SEQ ID NO 63117
  misc_feature (1)..(1537): Ortholog of  Ceres SEQ ID NO 13584744 as cited in SEQ ID NO 69137
ttctctctctctctctcgcttttgagatcatcgaacacaatcgaaacgaagaatcatttgaagaagaagaagatcgtgagaagcttaatgggttggatcccgtgttctgggaaatcgagtgggaggaataagacaaggaggaacggtgaccacaaactcgacaggaagtcttctgattgttctgtgtctacttcagagaaatctagggccaagtcgtccttgagtgaatccaaaagtaaaggctctgatcacattgtggcacaaacgtttacattctctgagttagctactgccactagaaacttcagaaaagaatgtcttataggagaaggaggatttggtagagtttacaaaggatacttggccagcactagccagacagcggctatcaagcaacttgatcataatggtttacaaggaaacagggagttcctcgtcgaggttctcatgttgagtcttcttcatcacccgaatcttgttaacttaataggatattgtgctgatggagatcaaaggcttctagtctacgagtacatgcccctaggttcacttgaagatcatttgcacgacatttcacctggtaagcagccacttgactggaacaccagaatgaaaatagctgccggtgctgcaaaaggtttggagtatctgcatgacaaaaccatgcctccagtgatctatcgagatttgaaatgctcaaatattttgctcgatgatgattactttccaaagctatccgacttcgggttggctaaacttggcccagttggggacaagtctcatgtgtccactcgggttatgggaacatacggatactgtgctcccgagtatgcaatgacaggccagctaacactcaaatcagacgtttacagcttcggtgttgttctgttggagattataactggtcggaaagcaatagacagttcaagatctactggagaacagaatctagtcgcatgggcaaggcctttgtttaaagacaggaggaaattctctcagatggctgatccaatgcttcaaggtcaataccctccgcgagggttataccaagcactcgctgtagcagcgatgtgcgtacaagagcagccaaatcttagacctctcattgctgacgtcgtcactgcactttcttacctcgcctcccaaaagtttgatcctctggctcagccagtccaaggatcccttttcgctccagggactccacctagatcaaagagggtctgaaaataatcccgagaaccgcaatgctgtgtaagttatgtagcttaaacccattccgtgctgtctttcttggagaggaaaggtggatgattttcagactaagtgtgaatgtatggcttaagagctacttgtagatatgtgtaagaagagatagattcatatagaggccggtttataatgttgttataggtgatgttgtttaatgtaatgtttattgagcgcttgctttcaaatgtgacaatttctcattattgtactgaggatgtctgcttcgattccaaagttattgtataaatattaaagtactatagttttc

SEQ ID NO: 74820 - protein, 407 aa, Arabidopsis thaliana
  peptide (1)..(407): Ceres Seq. ID no. 5679888
FSLSLSLLRSSNTIETKNHLKKKKIVRSLMGWIPCSGKSSGRNKTRRNGDHKLDRKSSDCSVSTSEKSRAKSSLSESKSKGSDHIVAQTFTFSELATATRNFRKECLIGEGGFGRVYKGYLASTSQTAAIKQLDHNGLQGNREFLVEVLMLSLLHHPNLVNLIGYCADGDQRLLVYEYMPLGSLEDHLHDISPGKQPLDWNTRMKIAAGAAKGLEYLHDKTMPPVIYRDLKCSNILLDDDYFPKLSDFGLAKLGPVGDKSHVSTRVMGTYGYCAPEYAMTGQLTLKSDVYSFGVVLLEIITGRKAIDSSRSTGEQNLVAWARPLFKDRRKFSQMADPMLQGQYPPRGLYQALAVAAMCVQEQPNLRPLIADVVTALSYLASQKFDPLAQPVQGSLFAPGTPPRSKRV

SEQ ID NO: 74821 - protein, 378 aa, Arabidopsis thaliana
  peptide (1)..(378): Ceres Seq. ID no. 5679889
MGWIPCSGKSSGRNKTRRNGDHKLDRKSSDCSVSTSEKSRAKSSLSESKSKGSDHIVAQTFTFSELATATRNFRKECLIGEGGFGRVYKGYLASTSQTAAIKQLDHNGLQGNREFLVEVLMLSLLHHPNLVNLIGYCADGDQRLLVYEYMPLGSLEDHLHDISPGKQPLDWNTRMKIAAGAAKGLEYLHDKTMPPVIYRDLKCSNILLDDDYFPKLSDFGLAKLGPVGDKSHVSTRVMGTYGYCAPEYAMTGQLTLKSDVYSFGVVLLEIITGRKAIDSSRSTGEQNLVAWARPLFKDRRKFSQMADPMLQGQYPPRGLYQALAVAAMCVQEQPNLRPLIADVVTALSYLASQKFDPLAQPVQGSLFAPGTPPRSKRV

SEQ ID NO: 74822 - protein, 258 aa, Arabidopsis thaliana
  peptide (1)..(258): Ceres Seq. ID no. 5679890
MLSLLHHPNLVNLIGYCADGDQRLLVYEYMPLGSLEDHLHDISPGKQPLDWNTRMKIAAGAAKGLEYLHDKTMPPVIYRDLKCSNILLDDDYFPKLSDFGLAKLGPVGDKSHVSTRVMGTYGYCAPEYAMTGQLTLKSDVYSFGVVLLEIITGRKAIDSSRSTGEQNLVAWARPLFKDRRKFSQMADPMLQGQYPPRGLYQALAVAAMCVQEQPNLRPLIADVVTALSYLASQKFDPLAQPVQGSLFAPGTPPRSKRV

SEQ ID NO: 74823 - DNA, 1276 bp, Arabidopsis thaliana
  misc_feature (1)..(1276): Ceres Seq. ID no. 5679932
  misc_feature (1)..(1276): Ortholog of  Ceres SEQ ID NO 14304623 as cited in SEQ ID NO 52909
agtaattagaaaactcatcgtcctcattgagctgcagatcccataatctctctcgccaatcatctcccttgcatcttaatcaaaggtgtattatatccgcaacaagatcattagagaaggctgttacaagtttgttttatgaccgcgtaacagctcacttggtaattgatgtggcctctttgttttctgcttaacaagctattaagagttgaggagaggaatcaggggatattagacggaaatggagattcgacttttccgaaatactgcctattcgatgatcccttggtgagtgatggaaagtacagagatgcagggttgccatcctcgtcccacatggatgtccctcatgtacatcagttagcttcatgggattgcggtctcgcttgtgttcttatggttctcagagcaagtggcatcgcaagctgcactcttgaggatttggctgagatatgctccacaaatagcatttggactgtcgatctcgcatatttactgcagaagttctgtgtggaattttcatattacacgataacatttggagcaaacccgaattattccatagaggaattttacaaggagcagctccctgaagatctggtgcgtgtcgatttgctcttcaggaaagcacatgaatctggcattattatacagtgcagatcagttagtatccatgagatttcttgtttgctattgtcggggaactatattgccattgcgttagtcgaccaggacaagctaagcaagtcttggttggaggaagtgcttgtctctggtcttcactccagcaattcttgttacactggtcactatgtcgtgatatgtggctatgatgctgttagggatgagttcgagatcagagatcccgccagttccaagatacatgagaggatctcgtcaaaatgcctggagaatgcccggaaatcgtttggcacagacgaagatcttctcctgataaacttggagaatatgaggaaccagaacggatattagaatagttgtcatcatcatcatcaaatcagttctggatgagaatgaaacctgagtgttttctcccagaagaacatgaggtgaaaagtatacgtctctatacatacgtctttacatatggatgctgccaaagaagaaggaaaagatatacatatgtcatgaaatatctcagtatctgtttgcgtttatgagattcttgtgttggcagttataattccttgttgtacaaattggtgaatagaaaagatttgattgattaaagtgttcgagcaataagagtgattcc

SEQ ID NO: 74824 - protein, 274 aa, Arabidopsis thaliana; identical to SEQ ID NO: 41076
  peptide (1)..(274): Ceres Seq. ID no. 5679933

SEQ ID NO: 74825 - protein, 218 aa, Arabidopsis thaliana; identical to SEQ ID NO: 41077
  peptide (1)..(218): Ceres Seq. ID no. 5679934

SEQ ID NO: 74826 - protein, 198 aa, Arabidopsis thaliana; identical to SEQ ID NO: 41078
  peptide (1)..(198): Ceres Seq. ID no. 5679935

SEQ ID NO: 74827 - DNA, 1375 bp, Arabidopsis thaliana
  misc_feature (1)..(1375): Ceres Seq. ID no. 5679936
  misc_feature (1)..(1375): Ortholog of  Ceres SEQ ID NO 13595497 as cited in SEQ ID NO 51127
tccataaggccacaacagatcttcttgttcctctctctcaatctctctctctaaaactcttattttcttcgtaagagatggaactagcgttgtctctaggcgacaatactaagaaacagttctcttttatggagaagaactcgaagattaataatccctctgtctcgtcgacatctacttccgagaaggatcttgggttctgcatggctttagatgttgcttttggtggtcacagatcgttgtcatcctcttcgtctccgtcggtagaggatgagaagaagaaaccggcgcccagagcaaaaaaatctgacgaatttagggtttcgtcttctgtagatccaccattacagcttcagcttcacttccctaattggctccctgagaacagtaaaggtcgacaaggaggaagaatgcccttaggagcagctacggttgtggaggaggaagaggaggaggaggaagcggtgcctagtatgtcagtatcgccgccggatagtgtaacgtcgtcgtttcaattggactttgggattaaaagttatggttatgagagaagaagcaataagagagatattgatgatgaagtggagagatcagcttcaagagccagcaacgaagacaacgatgacgagaatggatccactaggaagaaacttagactctccaaagaccaatctgcttttcttgaagacagcttcaaagaacacagtacccttaatcctaaacagaagattgcattggcgaagcagttgaatcttcgtcctcgtcaggttgaagtctggtttcaaaacagacgagccaggacaaagctgaattgagaaccttgaagacttccacacccttttacatgcaacttccggccactactctcactatgtgcccttcttgtgaacgtgttgccacttcagcagcacagccctccacgtcagctgcccacaacctctgtttgtccacgtcatcattgattccggttaagcctcggccggccaaacaagtttcatgaaagcacctgcgaaatacagtttgagcaaacggtcgagctagagtggttttaaaagttgtcttcttgtgtatatatttattttacttttcatattttattagagaccgctattttgaaagacgaatagattgattatccggttagtgttttgtttttcttagataggaccggataaaaaacagatggagcaaaagggttgacatgttttattgaatgatagaggaatatagaagaagacaaaaggaaaaggggaaaatatttggtttgatcttatagacttttatttgtgattaaagcaaaagggtttgtcgtgcaaaaaatcttcactagatacgtttaattatcgtgttttaaatttattaaacttatttttct

SEQ ID NO: 74828 - protein, 245 aa, Arabidopsis thaliana
  peptide (1)..(245): Ceres Seq. ID no. 5679937
MELALSLGDNTKKQFSFMEKNSKINNPSVSSTSTSEKDLGFCMALDVAFGGHRSLSSSSSPSVEDEKKKPAPRAKKSDEFRVSSSVDPPLQLQLHFPNWLPENSKGRQGGRMPLGAATVVEEEEEEEEAVPSMSVSPPDSVTSSFQLDFGIKSYGYERRSNKRDIDDEVERSASRASNEDNDDENGSTRKKLRLSKDQSAFLEDSFKEHSTLNPKQKIALAKQLNLRPRQVEVWFQNRRARTKLN

SEQ ID NO: 74829 - protein, 228 aa, Arabidopsis thaliana
  peptide (1)..(228): Ceres Seq. ID no. 5679938
MEKNSKINNPSVSSTSTSEKDLGFCMALDVAFGGHRSLSSSSSPSVEDEKKKPAPRAKKSDEFRVSSSVDPPLQLQLHFPNWLPENSKGRQGGRMPLGAATVVEEEEEEEEAVPSMSVSPPDSVTSSFQLDFGIKSYGYERRSNKRDIDDEVERSASRASNEDNDDENGSTRKKLRLSKDQSAFLEDSFKEHSTLNPKQKIALAKQLNLRPRQVEVWFQNRRARTKLN

SEQ ID NO: 74830 - protein, 203 aa, Arabidopsis thaliana
  peptide (1)..(203): Ceres Seq. ID no. 5679939
MALDVAFGGHRSLSSSSSPSVEDEKKKPAPRAKKSDEFRVSSSVDPPLQLQLHFPNWLPENSKGRQGGRMPLGAATVVEEEEEEEEAVPSMSVSPPDSVTSSFQLDFGIKSYGYERRSNKRDIDDEVERSASRASNEDNDDENGSTRKKLRLSKDQSAFLEDSFKEHSTLNPKQKIALAKQLNLRPRQVEVWFQNRRARTKLN

SEQ ID NO: 74831 - DNA, 926 bp, Arabidopsis thaliana
  misc_feature (1)..(926): Ceres Seq. ID no. 5680039
  misc_feature (1)..(926): Ortholog of  Ceres SEQ ID NO 14311392 as cited in SEQ ID NO 58307
  misc_feature (1)..(926): Ortholog of  Ceres SEQ ID NO 13599348 as cited in SEQ ID NO 0
aaaattccgaaattgtttcgaaaaatcctgaagaagaagaggtctttgaatcaacaacagttccatgttgtgcccaacgtatacaccaagtgtttaccattttcaaacgcaaaagccagttttccggaaacagaggtttcgggtttgttcatctacttctggtggtgaggatgatagattcaaagtagagtacactccttggcttatcgttgggttgggcaatccaggaaacaagtatcatggaacaagacacaatgttggtttcgagatgatcgatgtgttggctagaaaagaaggggtgttgatgaacactatacagtccaaagctctaatcggaatagtacaggtgctattgaagatgtacctatcttgttggctaaacctcagacttatatgaacttcagcggcgaatcggttggatctctagcttcacactatcgagtaccattgcgccacattttaatgatttacgatgagatggctttaccaaatggggttttgagacttcaaccgaaaggaggtcaaggctatcacaacggagtgaagagtgtaatggggcatttggatggtcgtcgaaactttcctcgtttaagcataggcattggtaaaccacctggaaacatggatatgaaagcttttcttcttcagaagtttagtccattggaacagaaacagatcgaggaagcactcgagcaaggaagtgaagcagtgaagactcttgtgcttaatggcttcaatcaaggaatttcgagatttaatcttgtgcagaaatataaattccataaagtatagactccgatttgcaataaaagcaaccatgtagagattggtttagcactttcattttatcgtctcaagagacactctttcgttacgaagtgtatgaagtttcttagattaatataattcagtctcgagaaactatc

SEQ ID NO: 74832 - protein, 132 aa, Arabidopsis thaliana; identical to SEQ ID NO: 27644
  peptide (1)..(132): Ceres Seq. ID no. 5680040

SEQ ID NO: 74833 - protein, 110 aa, Arabidopsis thaliana
  peptide (1)..(110): Ceres Seq. ID no. 5680041
MLCPTYTPSVYHFQTQKPVFRKQRFRVCSSTSGGEDDRFKVEYTPWLIVGLGNPGNKYHGTRHNVGFEMIDVLARKEGVLMNTIQSKALIGIVQVLLKMYLSCWLNLRLI

SEQ ID NO: 74834 - protein, 109 aa, Arabidopsis thaliana; identical to SEQ ID NO: 27646
  peptide (1)..(109): Ceres Seq. ID no. 5680042

SEQ ID NO: 74835 - DNA, 1418 bp, Arabidopsis thaliana
  misc_feature (1)..(1418): Ceres Seq. ID no. 5680045
  misc_feature (1)..(1418): Ortholog of  Ceres SEQ ID NO 15176709 as cited in SEQ ID NO 1148
  misc_feature (1)..(1418): Ortholog of  Ceres SEQ ID NO 13658922 as cited in SEQ ID NO 66316
cttttctattttattggcttctcaaaacgaaataacgaaatcgcctcctcttcttctcctcctcgacctggaaatcaatctttcgccgccgagttcttctctctgcggcggagaatcaattagcaatctccaggtttttcacttcaaaacctttccttttattatcaaattttgttcctttttagctttaggatttgatatttctagaacccagaagaaactcttgcccataacatctctatatttattggtatagaattaggtgagggaaaagaggatggctttgatcggaaaatccgagagattctctgctgattttgtgatgggtggtgctgcagccattgttgccaaatctgcagctgctccaatcgaaagggtgaagcttttactgcagaatcaaggggagatgataaagactggacatctcataagaccttacactggtttgggtaattgctttaccagaatctatagagaagaaggtgttttgtccttttggagaggaaaccaagccaatgtcatacgatatttccctacacaggcttccaactttgcatttaaaggttacttcaagaaccttcttggatgttcgaaagagaaagatggttacttgaagtggtttgctggaaatgtagcttcgggaagtgctgctggagcaacaacttccttgtttctgtaccatttggattatgcgcggacccgtttaggcactgatgcaaaggaatgttctgttaatggcaagagacagtttaaagggatgatcgatgtgtatcgtaaaactttgtcaagtgacggtattaaaggtctttaccgtggatttggtgtgtcaatagtgggaatcactctttaccgaggaatgtattttgggatgtacgacaccatcaaacccattgtgttagtcggttccttagagggaaacttcttggctagttttctattgggttggagtattactacctctgcaggcgtcattgcttacccttttgacacacttaggaggagaatgatgcttacatcaggacaacctgttaaataccggaacaccattcatgccttaagagagatattgaagtcggaagggttctatgcgctatatagaggagttactgcgaacatgcttcttggagtagcaggagcaggagtgcttgcgggatatgatcagcttcaccagattgcttataagcattgggttcagtagttttggaccaaacccgaaacgatgacaatgaaagctgagctcaaaaagagaaggttagtaaacaccaagaagtctcacttgctttccaatgtattgtgttaattaacagaatctcggaatcattaaccgattgaaccagcagaagatagggaaaattgttcatagttcttgtgcagtaacattgttatatcaataatccaagaaaggcctatttgatttt

SEQ ID NO: 74836 - protein, 306 aa, Arabidopsis thaliana; identical to SEQ ID NO: 23275
  peptide (1)..(306): Ceres Seq. ID no. 5680046

SEQ ID NO: 74837 - protein, 291 aa, Arabidopsis thaliana; identical to SEQ ID NO: 23276
  peptide (1)..(291): Ceres Seq. ID no. 5680047

SEQ ID NO: 74838 - protein, 263 aa, Arabidopsis thaliana; identical to SEQ ID NO: 23277
  peptide (1)..(263): Ceres Seq. ID no. 5680048

SEQ ID NO: 74839 - DNA, 1294 bp, Arabidopsis thaliana
  misc_feature (1)..(1294): Ceres Seq. ID no. 5680049
  misc_feature (1)..(1294): Ortholog of  Ceres SEQ ID NO 13658922 as cited in SEQ ID NO 66316
ctattttattggcttctcaaaacgaaataacgaaatcgcctcctcttcttctcctcctcgacctggaaatcaatctttcgccgccgagttcttctctctgcggcggagaatcaattagcaatctccagaattaggtgagggaaaagaggatggctttgatcggaaaatccgagagattctctgctgattttgtgatgggtggtgctgcagccattgttgccaaatctgcagctgctccaatcgaaagggtgaagcttttactgcagaatcaaggggagatgataaagactggacatctcataagaccttacactggtttgggtaattgctttaccagaatctatagagaagaaggtgttttgtccttttggagaggaaaccaagccaatgtcatacgatatttccctacacaggcttccaactttgcatttaaaggttacttcaagaaccttcttggatgttcgaaagagaaagatggttacttgaagtggtttgctggaaatgtagcttcgggaagtgctgctggagcaacaacttccttgtttctgtaccatttggattatgcgcggacccgtttaggcactgatgcaaaggaatgttctgttaatggcaagagacagtttaaagggatgatcgatgtgtatcgtaaaactttgtcaagtgacggtattaaaggtctttaccgtggatttggtgtgtcaatagtgggaatcactctttaccgaggaatgtattttgggatgtacgacaccatcaaacccattgtgttagtcggttccttagagggaaacttcttggctagttttctattgggttggagtattactacctctgcaggcgtcattgcttacccttttgacacacttaggaggagaatgatgcttacatcaggacaacctgttaaataccggaacaccattcatgccttaagagagatattgaagtcggaagggttctatgcgctatatagaggagttactgcgaacatgcttcttggagtagcaggagcaggagtgcttgcgggatatgatcagcttcaccagattgcttataagcattgggttcagtagttttggaccaaacccgaaacgatgacaatgaaagctgagctcaaaaagagaaggttagtaaacaccaagaagtctcacttgctttccaatgtattgtgttaattaacagaatctcggaatcattaaccgattgaaccagcagaagatagggaaaattgttcatagttcttgtgcagtaacattgttatatcaataatccaagaaaggcctatttgatttttgtg

SEQ ID NO: 74840 - protein, 306 aa, Arabidopsis thaliana; identical to SEQ ID NO: 23275
  peptide (1)..(306): Ceres Seq. ID no. 5680050

SEQ ID NO: 74841 - protein, 291 aa, Arabidopsis thaliana; identical to SEQ ID NO: 23276
  peptide (1)..(291): Ceres Seq. ID no. 5680051

SEQ ID NO: 74842 - protein, 263 aa, Arabidopsis thaliana; identical to SEQ ID NO: 23277
  peptide (1)..(263): Ceres Seq. ID no. 5680052

SEQ ID NO: 74843 - DNA, 1217 bp, Arabidopsis thaliana
  misc_feature (1)..(1217): Ceres Seq. ID no. 5680053
  misc_feature (1)..(1217): Ortholog of  Ceres SEQ ID NO 13638097 as cited in SEQ ID NO 57043
  misc_feature (1)..(1217): Ortholog of  Ceres SEQ ID NO 13596416 as cited in SEQ ID NO 62177
  misc_feature (1)..(1217): Ortholog of  Ceres SEQ ID NO 13659338 as cited in SEQ ID NO 66875
agaaccgtttgccctctctctctctatcttccttatctctctccgccactctccttctctttctccgaactcttcgatggccggtctactcaaaacgccgtctttacatctcacaccaactcttcttcatgctccttctgtaccctttaagcccttttgcgtatctttcgccggaggaagaaacgttagcgtctcactctctcgccgagcttctctccggtctgtctctagcggctatcctctccgcttactaaacctcgtaccctttgcttcgggagaagctgagacgacggagacggaggtggaatcgaacgaacccgaagttcaggagacggatggtgctgttgatgtcgagaatgaaaatgccagtgctgaggagggtgaagctgaggaagaagaagcagctgttatcacagcgttgctgaaatcctataaagaagctttagcagacaacaacgaggggaagattgctgagatagaagcatctttaaagtccatagaagatgaaaaatttctgcttgcggataaagtagcgtctttatccaatgagttatcggtggagagggatcggcttataagaatcagtgcagatttcgacaacttcaggaagaggactgagagggaaaggctaaaccttgtttcaaatgctcaaggagaggttgtagagaatcttttggctgttttggataatttcgagagagctaaatcccaaattaaggtggagactgagggagaagagaaagtcactaatagctatcagagcatatacaaacagtttgtagaaattctgggatcacttggtgttatccatgtggagacagtcggcaagcagtttgatccaatgctacatgaggcaataatgagagaagactctgcggaatacgaagagggtatagtactagaagaatacaggaaaggtttcttgctaggtgaaaggcttttacgtccttcaatggtgaaagtatcagctggacctggaccagaaaagccccttgaagctgaaggagaagaagccacagcacaaggaagcgcagaagaagaatcatcttcatcttgaaattgaagatgatcaagactcagcagttttgtgtgcgtgtgtgtgagagagatacagagataaaagagggagaggtctgttttaccattattgttgttattgttattgatacgttatatcatttctacagagtctagaagtaatatagatcgacattttt

SEQ ID NO: 74844 - protein, 351 aa, Arabidopsis thaliana; identical to SEQ ID NO: 39696
  peptide (1)..(351): Ceres Seq. ID no. 5680054

SEQ ID NO: 74845 - protein, 326 aa, Arabidopsis thaliana; identical to SEQ ID NO: 39697
  peptide (1)..(326): Ceres Seq. ID no. 5680055

SEQ ID NO: 74846 - DNA, 1269 bp, Arabidopsis thaliana
  misc_feature (1)..(1269): Ceres Seq. ID no. 5680073
  misc_feature (1)..(1269): Ortholog of  Ceres SEQ ID NO 14303405 as cited in SEQ ID NO 54555
cttttgatccaagtttggttgcccagaaatatcaaagaaaaaaaaacaaagctttgttgtttctggcagtagaatcattcatggctttctttgcgtgttaaacattcactaacctaaaaactaaaacttcgttttcagcaatcatgagattcaacaagggaactaaagtcgaagtgttgagcaaatcatcggttccatctggcgcctggcggtctgcagagatcatatcaggaaatgggcattactacactgtcatgtatgatcataatgatggtacagagagggtaccgaggaagagtatgaggcctgagcctcctcgtttacaagttcttgatgcttggtgtcctggtgacattcttgaggttttccaaagttgttcgtggaagatggcaatcgtttccaaggttttaggaaacggttgtttcttggttagattacttggttcctcactgaagttcaaggtgactaaatccgatattcgggttagacaatcttggcaagataacgagtggatcatgattggacagggtacatcaagattaagcgcacagacttcaacaggagaactaaggagaaaggtgaatccgaaaggcgactacatttcatctgagagcaaagacaagcttgatgagtctgatgtacctttgtcagtaggtctaaagaaacggacttactctttggttgaacctcacaatcaaactagagctttagctgcttatcctccaaggtttcgtgaagaagtgaaagaagaagaagaagatagagagagtgttgcttcttctgttggtagttgttgcatggatactgatggtctcagtgctgtttcattcaatcccattgaaaccggtaactctagtgacacagagtcatcgtcttgtggctacgggaaggtcaagaagttggtggttccaagaaaaggctcagaggctgctgatgttcataggttagagctggatgcataccgaagcagtatcgagagattgcacgcatccggaccaatcataacatgggaacaagaaacgtggattacaaatctccgtctcaaattgaacatttcgaatgaggaacatctgatgcagataagaaaccttatctctgacgataacagtactatatacagatagcagcagcagcagcattgagaactacagtttgtgttacatagaataaaaactgagtgtagattgtacaaatgtcattttatttttcattcaggttttttgatttaattccaaacttgtgaaagaaaatttgatcatctttactctt

SEQ ID NO: 74847 - protein, 326 aa, Arabidopsis thaliana; identical to SEQ ID NO: 42187
  peptide (1)..(326): Ceres Seq. ID no. 5680074

SEQ ID NO: 74848 - protein, 289 aa, Arabidopsis thaliana; identical to SEQ ID NO: 42188
  peptide (1)..(289): Ceres Seq. ID no. 5680075

SEQ ID NO: 74849 - protein, 274 aa, Arabidopsis thaliana; identical to SEQ ID NO: 42189
  peptide (1)..(274): Ceres Seq. ID no. 5680076

SEQ ID NO: 74850 - DNA, 696 bp, Arabidopsis thaliana
  misc_feature (1)..(696): Ceres Seq. ID no. 5680132
  misc_feature (1)..(696): Ortholog of  Ceres SEQ ID NO 14311773 as cited in SEQ ID NO 59245
attgttgcctagagaaaaaaaggaaaagagagaaagagttaccccaaaaaatgagcgaagaacagctgcagaaacctatagattgtgctgatgtaaaaggagaggcagagaagatttcgacaacggagggaggcattaaggcggcggaggacaaagagaaaggtgttgtagccgaggcctccggtgaacagcggagggagaagttaaccagaaaaaggtggtagctaatcctctgaaatcggaaggaaccataacaattggagaggctctagaggcagcggttctcacggcagggaataagccggtggagtggagtgacgcagccgccattcaagcggccgaggttagagctacggggcggaccaatatcatgcccggcggtgttgcggcttcagctcaatcagccgccactcttaatgctcgtatcggctctgacgataccaagactacgctagccgacgttctcactggagcgagtagcaaattaccatcggataaagcagcaacgagaaaggacgcagagggagtgactggcgccgagatgaggaacgatcctcatctcactacatacccaaccggtgtggctgcctctgtcgctgccgccgctcggatcaatcagtccaaatgatgcaattcttctttcttgttattgagaagcaagtttatataaacttaaacaaatgtatatatgttgat

SEQ ID NO: 74851 - protein, 85 aa, Arabidopsis thaliana
  peptide (1)..(85): Ceres Seq. ID no. 5680133
MPGGVAASAQSAATLNARIGSDDTKTTLADVLTGASSKLPSDKAATRKDAEGVTGAEMRNDPHLTTYPTGVAASVAAAARINQSK

SEQ ID NO: 74852 - protein, 73 aa, Arabidopsis thaliana
  peptide (1)..(73): Ceres Seq. ID no. 5680134
CCLEKKRKREKELPQKMSEEQLQKPIDCADVKGEAEKISTTEGGIKAAEDKEKGVVAEASGEQRREKLTRKRW

SEQ ID NO: 74853 - protein, 57 aa, Arabidopsis thaliana
  peptide (1)..(57): Ceres Seq. ID no. 5680135
MSEEQLQKPIDCADVKGEAEKISTTEGGIKAAEDKEKGVVAEASGEQRREKLTRKRW

SEQ ID NO: 74854 - DNA, 1068 bp, Arabidopsis thaliana
  misc_feature (1)..(1068): Ceres Seq. ID no. 5680140
  misc_feature (1)..(1068): Ortholog of  Ceres SEQ ID NO 12364737 as cited in SEQ ID NO 51089
  misc_feature (1)..(1068): Ortholog of  Ceres SEQ ID NO 12581561 as cited in SEQ ID NO 53617
  misc_feature (1)..(1068): Ortholog of  Ceres SEQ ID NO 12625474 as cited in SEQ ID NO 64169
atttcatagcaaaacaccaaaacagagttcacagaaacatattcaaagatttttcacaaatattaccattttaaatctataaacaatgacgaactcggtggctaagttggcactactagggttttgcattctgcaagtgacgagcttacttgttccgcaagcaaatgctagggctttccttgtgtttggagattctctcgttgacaatggtaacaatgactttcttgctaccactgctcgtgccgataattacccttatggtatcgatttcccaactcatcgtcctacgggccgtttctccaatggtctaaacattccagatctcgtcaattctctcttcctgactacgttgtctttgtcatttctgaataccgcaaagtcttacggaaaatgtacgatttgggtgctcgacgtgtccttgtgactggaacaggaccaatgggttgcgtcccggccgagctggcgcaacgtagccgcaacggcgagtgtgctaccgaactccaacgagccgcgtcactattcaacccacaactaattcaaatgataacagacctcaacaacgaagttggatcttcggccttcattgccgctaatactcaacaaatgcacatggacttcattagcgacccacaagcatatggattcgtcacgtcgaaggtggcttgttgtggacaagggccgtacaatgggatagggctatgcactccattatcaaatctttgcccaaacagagatctctttgccttttgggatccttttcacccatcagaaaaagcaagtagaatcatagctcaacaaatcctcaatggctctcctgaatacatgcatcccatgaatcttagcaccatcctcaccgttgattccatgacctaagcttctattcctcatctatcccaaatccactttatgctttgtttttgttttgcctttctcgtttattatatatttttacattggcactttaattagtttccttgagttatgttgtgagttttgtgttgttcatcaataattagtcaccaattgtgagctgagaagtaatattcaacaatcttacgaatgttcact

SEQ ID NO: 74855 - protein, 160 aa, Arabidopsis thaliana
  peptide (1)..(160): Ceres Seq. ID no. 5680141
MYDLGARRVLVTGTGPMGCVPAELAQRSRNGECATELQRAASLFNPQLIQMITDLNNEVGSSAFIAANTQQMHMDFISDPQAYGFVTSKVACCGQGPYNGIGLCTPLSNLCPNRDLFAFWDPFHPSEKASRIIAQQILNGSPEYMHPMNLSTILTVDSMT

SEQ ID NO: 74856 - protein, 144 aa, Arabidopsis thaliana
  peptide (1)..(144): Ceres Seq. ID no. 5680142
MGCVPAELAQRSRNGECATELQRAASLFNPQLIQMITDLNNEVGSSAFIAANTQQMHMDFISDPQAYGFVTSKVACCGQGPYNGIGLCTPLSNLCPNRDLFAFWDPFHPSEKASRIIAQQILNGSPEYMHPMNLSTILTVDSMT

SEQ ID NO: 74857 - protein, 112 aa, Arabidopsis thaliana; identical to SEQ ID NO: 43372
  peptide (1)..(112): Ceres Seq. ID no. 5680143

SEQ ID NO: 74858 - DNA, 1241 bp, Arabidopsis thaliana
  misc_feature (1)..(1241): Ceres Seq. ID no. 5680165
  misc_feature (1)..(1241): Ortholog of  Ceres SEQ ID NO 15180156 as cited in SEQ ID NO 0
aatttgataaacaccgatgattcgattctaagggaagaagatctctctctactacgacaagctcaactctttcgttttcgagaaaccaattccaaagatcatcctaaacaattcgaaaccacaacaatgttcaacaacaacagtgtctcgatctcagtatctgacgacgaatctaacgatttgaatcggatccgagctcgtacccgacgaaagcggaagaaagtgagtcacagaaccagctacgagcttcctcgtcatgttctaaggctttttgtgagatactgggtcgtcttagtttttcttctcgctgttgggttgcttgtatttgaatcaacgaggatcggattcaaatctagtgacttgaagaaaccagatttgaatgggaaagagagtcctagtaagaaaaatgaaggaaatttgaatcgattggatcctactaccaaagttattggtggtgttagacaacgttgtttgaagcttttaccacctgaggagcttgagcatcttgatatcttagagcgtaaagattcaggctctccggttaagagagttgtgtatctaactgatacggatgtgtcggtgggagaaatgagaggtgttcgtggtaatgggacgcggtttaatttattcacggggaaccagacttttgctgagagagaaaatagttttcaggtaagggaaacagtttctttgcattgtgggtttttcaatgaaaatgggggatttaggatttcggataaggataagaagtttatgacatcatgtgaagtagtggtctcgacgtgtgcgtttggtggtggagataacctttatgaacctattggaatgtctaagacatcaagtcaaaaggtttgctatgttgcgttttgggatgaagttactcttacaacacaagaagcagagggtcataagatcgatgagaatgatcacattggaaagtggcgtattgtgattgtaaaggatcttccttttacagaccaaaggcttaatgggaagatcccaaaggtactactcatctacttcagaggcacatgtgatgatttgtactgcacgtagcaatcttattcgctgggtgttaaacgtttctgattatgcgttcatggtactgtgtaaaatgtttccattacaaccaaatttaaccttctttggttttcattttgtgctgtgtaaaatggtatgtgctcgatttgaattagctcactgttgtcttttttttttccttacatcttttaatcttgttt

SEQ ID NO: 74859 - protein, 351 aa, Arabidopsis thaliana; identical to SEQ ID NO: 40856
  peptide (1)..(351): Ceres Seq. ID no. 5680166

SEQ ID NO: 74860 - protein, 309 aa, Arabidopsis thaliana; identical to SEQ ID NO: 40857
  peptide (1)..(309): Ceres Seq. ID no. 5680167

SEQ ID NO: 74861 - DNA, 1270 bp, Arabidopsis thaliana
  misc_feature (1)..(1270): Ceres Seq. ID no. 5680194
  misc_feature (1)..(1270): Ortholog of  Ceres SEQ ID NO 15226049 as cited in SEQ ID NO 55683
  misc_feature (1)..(1270): Ortholog of  Ceres SEQ ID NO 13597225 as cited in SEQ ID NO 63994
acgttttatcaaaagtctaagctactctgcaattcatttgccggcgaaaattctcaggatcatttgctcagctaaaaaatggatcaagagtgtccctttgctgccgaaagcataatccagaaatgccctttcctgagaaacatcaacaagcctaccaatttgtccttctcctccttgagttttccaattccggtgcaaggaggtaaaggtcctatttttgaagatggtcctggatttgattcagcattcaagctcttccatgggaaagatggtattgtgccgctttctggtttcgctgatgattctgaagatgaggcgggtcgtcgtgctctgcaattcaatccacttgctggtaaggtagctacaataagcctatcagcttttggtcctggaggcccttttggttttggtcctttctcagagaaatggaagaaacaacagaagaaacctaaaccttccaaaaaccaacagtctggggactcttcgaaacatgaggcagttggagacgaatggttaaaaaccgggaattgtcctatcgccaagtcttttagagctgcaagcaaagtcatgcctcttatttctaaagcattaacgctaccacctggtatgaaatatagatgtccagctcctatagtagctgctagagctgcactttcgaagactgctttggtcaaaagtcttcgccctcagcctttacctgaaaagatgcttgcaatcgctctcatgggaatggctgcaaatgtgcctctaggtgtatggagagaacacacaaagaagttttcgcctgcatggtttttggctgtccatgctgctgtgccttttatagcaatgcttaggaaatctgttctgatgcccaaaacagccatggctttgaccattggagcttcgatcttgggacaggtgattgggtcaagagctgagcgttaccgtctcaaagcagtagctgagaaaatggttcctgtaaccgctatggtttctggatacaaccagagccctggcgactcaggcatttctgggggacattgtggtataggggagggagtgaagcaggtttattacaatgtaaatattggagagtctgctaaatcaactggactctgttattgagagaatgttcttattgatttcagaaactacaaattactatgtaaggattggatatttgtgtgtgagggaaggtttttgtaattcagtgaattgtgtaaaccataacaatggtgtcgttttatcccttcaaaatgggtctaaataaaaggttaataattccctc

SEQ ID NO: 74862 - protein, 342 aa, Arabidopsis thaliana; identical to SEQ ID NO: 42126
  peptide (1)..(342): Ceres Seq. ID no. 5680195

SEQ ID NO: 74863 - protein, 179 aa, Arabidopsis thaliana; identical to SEQ ID NO: 42127
  peptide (1)..(179): Ceres Seq. ID no. 5680196

SEQ ID NO: 74864 - DNA, 1410 bp, Arabidopsis thaliana
  misc_feature (1)..(1410): Ceres Seq. ID no. 5680221
  misc_feature (1)..(1410): Ortholog of  Ceres SEQ ID NO 15171501 as cited in SEQ ID NO 58322
actccgaccgtttcctttctcacaagccaatggcgcaacttactaattccctcaattatctcttttctgtttctctcttattatttgtatcgttccactgcttatgttttcgtttttcgttggttgcagcttgttcaaactccactgacgatcaacagattcaacaccatcaccaccggaaatgggttggtccctcaggccacaaagtcatcaccgtctcacttaacggccacgctcagtttcgctccgtccaagacgctgtggattccataccaaagaacaataacaagagcatcacaatcaagattgctcccggattttacagagagaaagtggtggttccagctacaaaaccgtacataacgttcaaaggagctggtagggatgtgaccgctatagagtggcacgaccgtgcgtccgaccttggcgctaacggtcaacagttacgtacctatcaaaccgcttccgtcaccgtctacgctaattatttcaccgctagaaacattagcttcacggtactctattcaattctaacgcaattatatatatagggaaactttcacaaaaatgcgagtctttctttattttattttaaattgtgaagaatactgcgccggctccattgccggggatgcaagggtggcaagcggtggcgtttaggatctccggcgacaaagctttcttttccggctgcgggttttacggtgcacaagacactttatgcgacgatgctggccgtcattacttcaaggagtgttacattgaaggctctatcgactttatctttggtaatggccgctccatgtataaagattgtgagttgcattcgatagcgtcaagattcgggtcgatagcggcgcatggtaggacatgcccggaagagaaaacgggtttcgcgttcgtgggttgtcgggtaacaggtacgggtccattgtatgtgggccgggccatgggacaatactcacgtatcgtttacgcctacacttactttgatgctctcgtcgctcacggtggttgggacgattgggaccacaaatccaacaaaagcaagacggcatttttcggagtgtacaattgctatgggccaggagcagcagcgacgagaggcgtgtcttgggctagagctttggactatgaatcggcccatccatttatcgctaagagcttcgttaatgggagacattggatcgctcctcgagatgcttaaccaacttcaaaccttggcggggtttcttttcctaattcctcggttcctcccagtcccaagtcctaaaagcttactatatttttatcattcgtttatttcttttattgtttattttttccaatttatttatacattgtgtgatcgtacaacaaagtattgcttcttcttcatctgtatccatttcagttaaatgttttgagctt

SEQ ID NO: 74865 - protein, 191 aa, Arabidopsis thaliana; identical to SEQ ID NO: 25038
  peptide (1)..(191): Ceres Seq. ID no. 5680222

SEQ ID NO: 74866 - protein, 182 aa, Arabidopsis thaliana
  peptide (1)..(182): Ceres Seq. ID no. 5680223
SDRFLSHKPMAQLTNSLNYLFSVSLLLFVSFHCLCFRFSLVAACSNSTDDQQIQHHHHRKWVGPSGHKVITVSLNGHAQFRSVQDAVDSIPKNNNKSITIKIAPGFYREKVVVPATKPYITFKGAGRDVTAIEWHDRASDLGANGQQLRTYQTASVTVYANYFTARNISFTVLYSILTQLYI

SEQ ID NO: 74867 - protein, 173 aa, Arabidopsis thaliana
  peptide (1)..(173): Ceres Seq. ID no. 5680224
MAQLTNSLNYLFSVSLLLFVSFHCLCFRFSLVAACSNSTDDQQIQHHHHRKWVGPSGHKVITVSLNGHAQFRSVQDAVDSIPKNNNKSITIKIAPGFYREKVVVPATKPYITFKGAGRDVTAIEWHDRASDLGANGQQLRTYQTASVTVYANYFTARNISFTVLYSILTQLYI

SEQ ID NO: 74868 - DNA, 506 bp, Arabidopsis thaliana
  misc_feature (1)..(506): Ceres Seq. ID no. 5680229
  misc_feature (1)..(506): Ortholog of  Ceres SEQ ID NO 13595818 as cited in SEQ ID NO 56698
tcattttgatggttatatataggtttatgatgtgacaaagttcttggatgatcatcctggtggtgatgaggttatcttgacttctacagggaaagatgcgaccgatgatttcgaggatgtgggacatagttcgactgcgaaagccatgctagatgagtactatgtgggtgatattgacacagctactgtgccggttaaagctaagtttgtgcctcctacgtcgacgaaagccgtggctactcaggataagagctcggattttgttattaagctccttcagttccttgttccacttctaatcttaggcttggctttcggcattcggtactacactaagaccaaggctccttcttcttgaaagattgaattgtggcctaagtgaattgcttgtgtacgacgtggttaaactctgtctctacctctgtttgtcttgtaagacatcattatattctctattccaatcaactgatagacctttgatttttaagccatctacctttgttgtc

SEQ ID NO: 74869 - protein, 70 aa, Arabidopsis thaliana; identical to SEQ ID NO: 26075
  peptide (1)..(70): Ceres Seq. ID no. 5680230

SEQ ID NO: 74870 - protein, 48 aa, Arabidopsis thaliana; identical to SEQ ID NO: 26076
  peptide (1)..(48): Ceres Seq. ID no. 5680231

SEQ ID NO: 74871 - protein, 45 aa, Arabidopsis thaliana; identical to SEQ ID NO: 26077
  peptide (1)..(45): Ceres Seq. ID no. 5680232

SEQ ID NO: 74872 - DNA, 789 bp, Arabidopsis thaliana
  misc_feature (1)..(789): Ceres Seq. ID no. 5680328
  misc_feature (1)..(789): Ortholog of  Ceres SEQ ID NO 13638893 as cited in SEQ ID NO 55835
  misc_feature (1)..(789): Ortholog of  Ceres SEQ ID NO 13661656 as cited in SEQ ID NO 61607
  misc_feature (1)..(789): Ortholog of  Ceres SEQ ID NO 14309331 as cited in SEQ ID NO 0
aaaaccgacctacaaaatcccttcttcttcctcttcactctttctcattttccaccattaaaaaacctctctactctctcctcaaaaactcaaaagagcaaaaaaaagagaagaagaatcaaaatcccacacaatggcaacacactcttccttcaccgcaacaacacctctctttctcatcgttcttctatccctatcctccgtctcagttctcggcgcatctcaccaccacgcaacggcgccggctccgtctgtagactgttcgactctcatactcaacatggctgactgtttatccttcgtttcgagcggaggcacggtggcgaaaccggaaggtacatgttgctctggtcttaagacggtgcttaaagctgactctcagtgtctatgtgaagcgtttaagagcagtgcttctcttggagttactttgaatatcactaaggcttctactcttcccgccgcatgcaagcttcacgctccttctatcgctacttgtggattgtctgttgctccaagtactgctccaggagtagctgctgctggacctgagacagccggatttctagctccaaatccttcttcagggaacgatggatcttctttgattccgacctcgttcacaactgtactcagtgccgtactgttcgttttgttcttctctagtgcgtaaaaaaaaacctgaatcttttttcaccagctagatttggctgtatgaaattgattaatggtttttattagggttaatctatgtatgttttggagtgttctgtttttagaccatatcggttt

SEQ ID NO: 74873 - protein, 178 aa, Arabidopsis thaliana; identical to SEQ ID NO: 24576
  peptide (1)..(178): Ceres Seq. ID no. 5680329

SEQ ID NO: 74874 - protein, 129 aa, Arabidopsis thaliana; identical to SEQ ID NO: 24577
  peptide (1)..(129): Ceres Seq. ID no. 5680330

SEQ ID NO: 74875 - protein, 95 aa, Arabidopsis thaliana; identical to SEQ ID NO: 24578
  peptide (1)..(95): Ceres Seq. ID no. 5680331

SEQ ID NO: 74876 - DNA, 1110 bp, Arabidopsis thaliana
  misc_feature (1)..(1110): Ceres Seq. ID no. 5680342
  misc_feature (1)..(1110): Ortholog of  Ceres SEQ ID NO 15226909 as cited in SEQ ID NO 61336
  misc_feature (1)..(1110): Ortholog of  Ceres SEQ ID NO 15179474 as cited in SEQ ID NO 0
attcaaaattatataaaatgggaagcagcagcgacgagacgccagtggttctcatcacaggatgttctcagggaggaatcggtcacgcgttggcgcgtgagttctcggctaatggttgtcgtgtggtggcgacgagtcgatcgcagaagacgatgactgaattggagaaagattccaagttctttgtgcaagagctcgatgttcagtctgagcagagcgtgagtaaagttgtgtcgaaagttatcgacaaatttggtcagattgatgttttggttaataacgccggagttcagtgtatcggacctttggcggagattccaatttcagccatggattacaccttcaacaccaatgtgctcggtgaatgaaaattttcgagttacttcttatatgcacaccatgtgtttgttaaaattcttgactcaactctttcatgttttattttgctctgttgatttgggttgtgagaagtctcttcaagaactgaactttgtaaagaaactttgcaggttccatgaggatgactcaagctgttgtacctcacatggcgtctaagaaaaagggaaagattgtgaacataggaagtattagcataatggcaccaggaccatgggctggggtttatactgcatcaaaagctgctcttcatgctcttaccgacactttaaggttggagcttaagccatttgggattgatgtaatcaacattgtaccaggaggtattcaatcaaacatagctaactcagggatatcgagtttcaacaatttacctgaattgaaactatacaaaccgttcgaggacgctatccgtgagagagcgtttctgtcgcaaaacataaagccgatacccacagagacttttgcgaaagagactgtttccgtggtgctgaagaaaaacccaccggcttggtactctacaggtaggttatctacagtcatggcgatcatgcaccatataccgattttcatgaaagattttctgttgactaagagttttatgaaaaagggagtaaaacctgaatagttgtgttcttggttagaaactgttttaaatgtatccaacaaagtaaatgtgttgcctaaccatgttacatctttagtaaaaggatt

SEQ ID NO: 74877 - protein, 169 aa, Arabidopsis thaliana; identical to SEQ ID NO: 40840
  peptide (1)..(169): Ceres Seq. ID no. 5680343

SEQ ID NO: 74878 - protein, 167 aa, Arabidopsis thaliana; identical to SEQ ID NO: 40841
  peptide (1)..(167): Ceres Seq. ID no. 5680344

SEQ ID NO: 74879 - protein, 159 aa, Arabidopsis thaliana; identical to SEQ ID NO: 40842
  peptide (1)..(159): Ceres Seq. ID no. 5680345

SEQ ID NO: 74880 - DNA, 1248 bp, Arabidopsis thaliana
  misc_feature (1)..(1248): Ceres Seq. ID no. 5680352
  misc_feature (1)..(1248): Ortholog of  Ceres SEQ ID NO 13597260 as cited in SEQ ID NO 63885
  misc_feature (1)..(1248): Ortholog of  Ceres SEQ ID NO 15180208 as cited in SEQ ID NO 0
ctgagttttcttcttctctcttatttctctcccaagtttcttattttttttcctctttactttacacaaaggaacaacaaataatgtggaaccttaacgactcacccgatcatcacgaagaatccgacagtagagggaatccggtcggacacgtgtcaaacgggatgagtcaatctgcaacgtggctaccgtttgtgcttccggtgaccaggaatttctttccggctcaaagcatggaaccgggagttcgttggtccggtttcaatagtgtcggtaagtcggatccaagcggatcgggtcgaccagaagagccggagatatcaccgccgataaagaagagccgacgtggtcctcgctcacgtagctctcagtatcgaggagttacgttttaccgacgaaccggaagatgggagtcacatatttgggactgtgggaagcaagtgtacttaggtggatttgacactgcacatgctgctgctcgagcctatgatcgagcggcgattaaattcagaggtgtagatgcagatattaatttcgacattgaagactaccttgacgatttgaaacagatgggaaatttgacaaaggaagagtttatgcatgtacttagaaggcaaagcactgggtttccaagaggcagttctaaatacagaggtgttactttgcacaaatgtggaagatgggagtcacgtttgggtcaattcctcaacaaaaagtacgtttatttgggtctctttgataccgagattgaagctgctagagcttatgataaagcggcaataaagtgtaatgggaaagacgctgttaccaattttgaccctaaagtatacgaggaagaagaagatcttagctcagagacgacgaggaacggtcataatcttggtctaagtctaggagaatcatcatctgaagagtttagactcaagtctgatattgcaagcataagaagtaggattagagatgaggagagattattagggagcgatctatcgctagcaatgatgacgacgactgtcagatcggaaaagcagcaatcggacggtggaggaaatcgagtggtgggaatggcagcatcatcaggattctctcctcaaccttccccttaccgcattcctcgcaccttccacttctctcgtccctgattcatcatcatcatcatcactatcatcacaatcatcatctgagctagtgttaaccaagttatgctttaatgaatttgagttattctcgagctatttttgggctctg

SEQ ID NO: 74881 - protein, 379 aa, Arabidopsis thaliana
  peptide (1)..(379): Ceres Seq. ID no. 5680353
EFSSSLLFLSQVSYFFSSLLYTKEQQIMWNLNDSPDHHEESDSRGNPVGHVSNGMSQSATWLPFVLPVTRNFFPAQSMEPGVRWSGFNSVGKSDPSGSGRPEEPEISPPIKKSRRGPRSRSSQYRGVTFYRRTGRWESHIWDCGKQVYLGGFDTAHAAARAYDRAAIKFRGVDADINFDIEDYLDDLKQMGNLTKEEFMHVLRRQSTGFPRGSSKYRGVTLHKCGRWESRLGQFLNKKYVYLGLFDTEIEAARAYDKAAIKCNGKDAVTNFDPKVYEEEEDLSSETTRNGHNLGLSLGESSSEEFRLKSDIASIRSRIRDEERLLGSDLSLAMMTTTVRSEKQQSDGGGNRVVGMAASSGFSPQPSPYRIPRTFHFSRP

SEQ ID NO: 74882 - protein, 352 aa, Arabidopsis thaliana; identical to SEQ ID NO: 26969
  peptide (1)..(352): Ceres Seq. ID no. 5680354

SEQ ID NO: 74883 - protein, 325 aa, Arabidopsis thaliana; identical to SEQ ID NO: 26970
  peptide (1)..(325): Ceres Seq. ID no. 5680355

SEQ ID NO: 74884 - DNA, 767 bp, Arabidopsis thaliana
  misc_feature (1)..(767): Ceres Seq. ID no. 5680415
  misc_feature (1)..(767): Ortholog of  Ceres SEQ ID NO 12583413 as cited in SEQ ID NO 56816
  misc_feature (1)..(767): Ortholog of  Ceres SEQ ID NO 15168480 as cited in SEQ ID NO 57927
acaatagtctccttgtgtttctctttatatttgtctctataactctctttcgttaaagtttcataaaacctcaacgaactccttccatggcagcaggactatcaacaatcgccgtaacactcaaaccactcaaccgctcttctttctccgcaaaccaccctatatccaccgcagttttccctccatctctaagattcaacggcttccgacgtcgaaagattctcaccgtttgtttcgtcgtggaagaacggaaacaaagctctcccatggacgatgacaacaaaccagaaagcacgacaagctcttctgagatcttgatgacgtcgcggcttctcaagaaagcggagaagaagaaatcagagaggttcacttatttaatagcagctgtgatgtcgagctttggtatcacttctatggctataatggctgtttattaccgattttcttggcaaatgaagggaggtgaagtgtctgtgttagagatgtttggtacatttgctctttccgttggtgctgccggactgggaataacgatgtttggaatggcttacatgttcgttcacgatggacttgtgcacaagagattccctgtaggtcccattgccaacgttccttaccttcgaaaggtcgccgccgctcaccagctacaccacacagacaaattcaaaggtgtaccatatgggctgtttcttggaccaaaggaagtagaagaagtgggaggaaaagaagagttggagaaagagataagccggagaatcaaattatac

SEQ ID NO: 74885 - protein, 227 aa, Arabidopsis thaliana; identical to SEQ ID NO: 35763
  peptide (1)..(227): Ceres Seq. ID no. 5680416

SEQ ID NO: 74886 - protein, 167 aa, Arabidopsis thaliana; identical to SEQ ID NO: 35764
  peptide (1)..(167): Ceres Seq. ID no. 5680417

SEQ ID NO: 74887 - protein, 150 aa, Arabidopsis thaliana; identical to SEQ ID NO: 35765
  peptide (1)..(150): Ceres Seq. ID no. 5680418

SEQ ID NO: 74888 - DNA, 1192 bp, Arabidopsis thaliana
  misc_feature (1)..(1192): Ceres Seq. ID no. 5680421
  misc_feature (1)..(1192): Ortholog of  Ceres SEQ ID NO 13590776 as cited in SEQ ID NO 64877
  misc_feature (1)..(1192): Ortholog of  Ceres SEQ ID NO 12780534 as cited in SEQ ID NO 65670
  misc_feature (1)..(1192): Ortholog of  Ceres SEQ ID NO 13598301 as cited in SEQ ID NO 68281
aaaccgacattgacctgacagtttcttacgccggcgagcgaactcgacgaagaagacaacttccttttgttgcacctgtgagtctgcgaccatggctatgcaatctggtattgggttatcgaagattttgattctagctggagcaggttatactagtacgattctggttaagaatgggaagatggcagatattttgggtgagcttcaggctttggttaagcgatttgagaaatctggagatcatgtagatgatgattctgatgccatgactactcagatgcaacgattagcaatggaggttcggcaattggcttcgtcgcggcagataactgttatgaatggagctcagggagctgattttacaccgtttattgtcccggcagcgacattgggagcattaggctatggctatatgtggttcaagggaatttcattctctgatatcatgtgtgtaacgaagcggaacatggaaaatgcagtgtcgaacttgaccaagcatttggataccgtttcagaagctattttgaatgctaagaagcacctgagccagcggcttcagaaggtggacgataagctagacttgcagaaagatctcttaaagggagtccaggataatgtgggtttggctcttgaggatcttgctaacattggagatgattttgacgcaatgcatagcatctttggtggtatgggtgggaaattagatagcattgagtacaagcagaatattgcgaacatgggtttgatatatctgtgcgactctttgggtggagaaaatcacaagatgccggatatattgatgcaggagaagcttcggctttcagggaagtcaaacacatgtatagtacttacaaccgaagaaacttcaagctcagagggtttaaaagaaagcgataagatacagctactagatgactgctaattcaaatggtgccaatatatcatcaagcaagaagccacgagtctgatagcattgacgagaatgaccctggatttggatagaaagaaggtataggattaataggagtgattattatgtattggtatttagaatagtgtgtcctttgaggcaagtaagaagattgagaaaaataaaaagaatgtgctttttttttccttcaattttttcgcatccaacaaaaaatgaaacctatattttttctaataatatactgcattatgcacaatttgt

SEQ ID NO: 74889 - protein, 276 aa, Arabidopsis thaliana; identical to SEQ ID NO: 38074
  peptide (1)..(276): Ceres Seq. ID no. 5680422

SEQ ID NO: 74890 - protein, 274 aa, Arabidopsis thaliana; identical to SEQ ID NO: 38075
  peptide (1)..(274): Ceres Seq. ID no. 5680423

SEQ ID NO: 74891 - protein, 246 aa, Arabidopsis thaliana; identical to SEQ ID NO: 38076
  peptide (1)..(246): Ceres Seq. ID no. 5680424

SEQ ID NO: 74892 - DNA, 1247 bp, Arabidopsis thaliana
  misc_feature (1)..(1247): Ceres Seq. ID no. 5680451
  misc_feature (1)..(1247): Ortholog of  Ceres SEQ ID NO 13595341 as cited in SEQ ID NO 56398
  misc_feature (1)..(1247): Ortholog of  Ceres SEQ ID NO 15173764 as cited in SEQ ID NO 57550
  misc_feature (1)..(1247): Ortholog of  Ceres SEQ ID NO 15227118 as cited in SEQ ID NO 59038
  misc_feature (1)..(1247): Ortholog of  Ceres SEQ ID NO 13597299 as cited in SEQ ID NO 63785
  misc_feature (1)..(1247): Ortholog of  Ceres SEQ ID NO 13663895 as cited in SEQ ID NO 66923
acaattatctcagttttgacctctctgaagattaagcaaaataacacttcgttcgttcgtactctatgaactcgctgctgacctcctccacatccttagccctgccgtgtgcgataccgatcgtcttcgtcaatttcttaagttctttttgttctccaattcatggtggtaccaacgatttagctactgaagtttagaaagcccccaatttttgttttcgttttagcgtttcccgatctgtgaattgggtatcagctccaaaggtttaatgcccagtaaagttatcgaggacgagagtttaggggtcttacagtgcgagtgaatttagattaaaaggtacaaactttaccttttggtcggaactgggaagagggggaatcggacatgattcagttactattcctggttctgttcgtagaaggtgcgattgcgttcttactactggtaaagattggtcctttaagggagcttgtaatgaagagcttagaccagcttaaattggggaaacgtcctgctactctgaaaaccatcgctggaaccatgtctgtgatcctcctgtcgaatctcatgaatatcattaagatccagaacaagggtgccaaacttgggacaatgtctccaatggatcaagtcctctggagaacacacttgctcgaggcttctcttatgggtgttgtgctcttttttggcttcattattgaccggacacatcattacctcgaaaagctaatcactttaagaagcaatgtcgggtcatcgaaaggagaactagaagaacttaggaaggagagaatcgaactgaaggagaaagaagagaagacatccaaggaaattaagcagctgaaagaaaaactgtcgtgtgtttcagagaatctcaagaaactagagaaggaatccaaagagaaagaaacgaagctcgaaacagctgaagcccatgtcacagctctccaaaagcagtcttcagagctattgttggagtatgacagattgctagaagacaaccaaaatctccaaagccagattttggttggaaccaagaaaacctgaagtgatttaagattcttaagagctctttgatagagttttagagtgttttgtgaacgaatgcggaaatggtaagtggcaaccaaggaattcttgtactcgttttttttttgcgctcttggttcctacccattgatgctgtcttccaaatattataatgttacgtaaattaacaacatcagtaagaagccatctaaacaatg

SEQ ID NO: 74893 - protein, 220 aa, Arabidopsis thaliana; identical to SEQ ID NO: 21982
  peptide (1)..(220): Ceres Seq. ID no. 5680452

SEQ ID NO: 74894 - protein, 190 aa, Arabidopsis thaliana; identical to SEQ ID NO: 21983
  peptide (1)..(190): Ceres Seq. ID no. 5680453

SEQ ID NO: 74895 - protein, 168 aa, Arabidopsis thaliana; identical to SEQ ID NO: 21984
  peptide (1)..(168): Ceres Seq. ID no. 5680454

SEQ ID NO: 74896 - DNA, 651 bp, Arabidopsis thaliana
  misc_feature (1)..(651): Ceres Seq. ID no. 5680455
  misc_feature (1)..(651): Ortholog of  Ceres SEQ ID NO 13581682 as cited in SEQ ID NO 57913
  misc_feature (1)..(651): Ortholog of  Ceres SEQ ID NO 14304144 as cited in SEQ ID NO 59152
ctctctctctctctctctgtctcttgtcttatcatttatctctctaacggcgaggcaatgggttttccggtgggatattctgagctacttctcccaaaaatctttttctacttgttatctttcttaggtttgatacgtaaactcatctccacaatgttcaagatcattggtctaccagatttcttagaacctgaaccgacggctgacgaattgtcgacatatatttcatcggggatgtttggaccgttggatgatgggttataatcagatgacgtgtccactttgtcgtacacagtttatacctgatcatcttcaactggagtttaatcaaaggctctggtctcaatcttctgctgtttcttctcaacttcttgatgaatcatcatcttaggacgtattaaatctttgtccaaacaaaaaaaaaagacatattaaatcctttttttttggtactttcattgggaattgggtttggtgtgagatcgatgtaaatattaaacaaaaaaaaaaaggtagtggttacaggttaatgaaaaaagaaagaagaagaaaatttgtacttatccatccctgaaagatgaaattacattttgagttattataaagttgtaaactttttttttttgttaaggaaaaaaaaaatcatttgct

SEQ ID NO: 74897 - protein, 87 aa, Arabidopsis thaliana
  peptide (1)..(87): Ceres Seq. ID no. 5680456
LSLSLSVSCLIIYLSNGEAMGFPVGYSELLLPKIFFYLLSFLGLIRKLISTMFKIIGLPDFLEPEPTADELSTYISSGMFGPLDDGL

SEQ ID NO: 74898 - protein, 68 aa, Arabidopsis thaliana; identical to SEQ ID NO: 42824
  peptide (1)..(68): Ceres Seq. ID no. 5680457

SEQ ID NO: 74899 - protein, 46 aa, Arabidopsis thaliana; identical to SEQ ID NO: 42825
  peptide (1)..(46): Ceres Seq. ID no. 5680458

SEQ ID NO: 74900 - DNA, 1831 bp, Arabidopsis thaliana
  misc_feature (1)..(1831): Ceres Seq. ID no. 5680473
  misc_feature (1)..(1831): Ortholog of  Ceres SEQ ID NO 13594494 as cited in SEQ ID NO 51293
  misc_feature (1)..(1831): Ortholog of  Ceres SEQ ID NO 12598249 as cited in SEQ ID NO 61073
  misc_feature (1)..(1831): Ortholog of  Ceres SEQ ID NO 13582815 as cited in SEQ ID NO 68106
aatttcgtttcgacatatttcgcgattcgtctaaggtaaaaaaaaactcatctttttttcttttagatcgttaatttttgatcagcgattcgctcttctgatctgtgttctttaagcttgtcttctctcttgattcgatctgctgaaaacctagaaatttttgatttttttgtttgttttgctccatgtgtatgggtatatttacgattttaacaaaacaaaaatatgaattgaggttttttatttagcgaattgggttttaattgttcacattcgtttggctctctcgaggtgagtgataaagtatagaactttcttatgcttaggatcttaaattcgagttctttgatttacctgtcatgtgttattgattgatctcatttatattggtgtatgcaatttgattgggtttactggagattgatctgtgacctaatcaatgagtgataacattgctggttcatctgatttctcatctggtgtgtctgctcgattccctgaagaaagtttgaaactcaggcttggtttgtgcagtttgattgatttatctcattacttgactctggtgtacttgattctttgatgaaagcttgaagttaatgtttggtttgtgcaatatgattgggattaactgcatttgatctctgaccaaaatcagtgattaattacattgcttggttatctcattacttgagtttggtgttcctgcatgatcccctgagcttgaagttcatgcttggtttgtccaattgtgacctaaattgatgttttcttgtggtatcttttcgtaggttttgttactgattgagaaaacatgggaggtgacaatgataatgacaaagacaaagggtttcatgggtatcctcccgctggatacccaccccctggggcttatccacccgctggatacccacaacaaggttaccctccaccacccggtgcttacccgcctgcaggttatcctccgggtgcctacccacctgctcctggtggttatcctcccgcccctggttatggtggttatcctccagctcctggttatggaggttatcctcctgcacctggtcatggtggttaccctcctgctggctatcctgctcatcactcaggtactgtgtttcttttgctaatggtttttttctcccatgtagtttgccagttaagtgttgtaatggtcactgtacaaacaagttaaaataggagaagttgtttatatgttgttttgtgattgtctgtatgttcattgctaaaatctgagatttagtatcatatttggtgttaaatgtcactttggtttctttattcatgctgttatttatacttgtttcaggacacgcaggaggaattgggggtatgattgcaggtgctgcagctgcctatggagctcaccacgtagctcatagctctcacggtccttacggacatgctgcatatggtcacggttttggccatggtcatggctatggctatggtcatggtcatggtaagttcaagcatgggaagcacgggaagttcaagcatgggaagcatggaatgtttggaggaggcaagttcaagaagtggaagtgatctagttaataccttttgtgaatctgtctggactgaccaatgtttcaaataagccctaaacattatataagttgactttcgtcggttagattgctggttcgagttggaataattgaaacttaattagtatcaaatcttattgtgtactttaaagctatcgttggctttataatgacagattctggtttcggtgtgttgttttaagatttttgtatatactgttttttacattgcttaagcttatagaagtcatgattatgat

SEQ ID NO: 74901 - protein, 126 aa, Arabidopsis thaliana; identical to SEQ ID NO: 43491
  peptide (1)..(126): Ceres Seq. ID no. 5680474

SEQ ID NO: 74902 - protein, 100 aa, Arabidopsis thaliana
  peptide (1)..(100): Ceres Seq. ID no. 5680475
MIMTKTKGFMGILPLDTHPLGLIHPLDTHNKVTLHHPVLTRLQVILRVPTHLLLVVILPPLVMVVILQLLVMEVILLHLVMVVTLLLAILLITQVLCFFC

SEQ ID NO: 74903 - protein, 98 aa, Arabidopsis thaliana
  peptide (1)..(98): Ceres Seq. ID no. 5680476
MTKTKGFMGILPLDTHPLGLIHPLDTHNKVTLHHPVLTRLQVILRVPTHLLLVVILPPLVMVVILQLLVMEVILLHLVMVVTLLLAILLITQVLCFFC

SEQ ID NO: 74904 - DNA, 1225 bp, Arabidopsis thaliana
  misc_feature (1)..(1225): Ceres Seq. ID no. 5680501
  misc_feature (1)..(1225): Ortholog of  Ceres SEQ ID NO 13596030 as cited in SEQ ID NO 62043
ttctttacttgattgcttattcatctgttgattctgtggttagataagggtatatgagtttgttggacatgggtggagatatgatggaagatgattgggaatttgcgtcatcatcaaaccctaaaagaaccctagttcttgtgggccgtactggaaacggaaagagtgcgacaggtaacagtatccttgggaggaaagcttttaggtcaagagctagaactgtaggagtgacaagcacgtgcgagtcacagagagttgttcaagaagatggtgatatcattaatgttgttgatactcctggtttgtttgatttgtctactgcagctgattttattggtaaagagattgtgaggtgtataagtttggcagaagatgggattcatgcgatcttgttggtattctctgtgaggcggcttgctgaagaggagcaaactgtgcttagtttcttgcaagcgctattcggcagtaagatcgctgactatatgatcgttgtttttaccggtggcgatgagttggaagagaatgaggagacattggaggagtatttggctgactattgccctgagtttcttaaagaaattcttgggatatgtgacaatcggttggtgttgtttaataacaagactactgataaggtgaagaaagctgagcaagttcagaagcttctctcacttgttgaatctgttgttaaacagaacaatggaaaaccgtattcagatgagttgttccatgagctacaggaagaggctatcaagctaagggaccagaaaaaggaggttgagttacttcagggttactctaataatgagatagatgagttcaagaagcaaatcgatatgtcctatgataggcagcttagccgcatcaccgagatggtggagactaagctgagagacactgctaagagactagagcagcaactaggtgaagagcaagctgcaagacttgaagcggagaagagggcaaacgaagttcagaagcggtcgagcgatgagattaagaagctcagagagaatctggagagggcggaaaaagagacgaaggaacttcagaaaaaactgggaaagtgcatcaatctatgatatgttgagatgttgtagctccagtgaaatctgataagatcattcatgtcaagtttttttatgtagtcttttgttttcttttggttttttaacaatatggttttatcattaatggcagtgtgttataagtttgcttaaatcat

SEQ ID NO: 74905 - protein, 342 aa, Arabidopsis thaliana; identical to SEQ ID NO: 23839
  peptide (1)..(342): Ceres Seq. ID no. 5680502

SEQ ID NO: 74906 - protein, 337 aa, Arabidopsis thaliana; identical to SEQ ID NO: 23840
  peptide (1)..(337): Ceres Seq. ID no. 5680503

SEQ ID NO: 74907 - protein, 333 aa, Arabidopsis thaliana; identical to SEQ ID NO: 23841
  peptide (1)..(333): Ceres Seq. ID no. 5680504

SEQ ID NO: 74908 - DNA, 1565 bp, Arabidopsis thaliana
  misc_feature (1)..(1565): Ceres Seq. ID no. 5680516
  misc_feature (1)..(1565): Ortholog of  Ceres SEQ ID NO 13656486 as cited in SEQ ID NO 69202
accaatttctccagtttcccactccacatccaaaaaaacagtgtaataataatcataatcacctgatcaatctcttacataaaagctacagatctggttttatacaatcatcaccgcaccaagttcctaaaggtttcgactttactgtttctattttcggaaagagagtgcaagattgaaatcgaagatgaaggcggcaacaaggccgatccacgccgtgacgacatgggttcgtcggcaaccaccaaaggttaaaggttttctcggtgttgtctccgccatgactgccctcgttttgttgagagtgattgttcatgaccacgacaatctttttgtcgctgctgaagctgttcattcccttggaatctccgtccttatctataaactcaccaaggagaggacttgtgctggtatattcgatttcttgattttgaagtttctagatttaggttttgattagtggattagtgattattgaatttgattttcccctgatctgtttcgatttcgaattagggtttgtttgatgctattgaattcgtacaaagttgcaatctttgaatgatatgttttgacaggattatctctcaagtcacaagagctaacagctctgtttttggcggtgagactgtattgtagttttgtgatggagtttgatattcacacgttacttgactcggctacattggtgactacactttttgttatctatatgatccgttttaagctcaaagctagttatatggacgacaaagacaattttgctatctactacgtcgttattccatgtgttgttctatcagtactcattcacccatcaacacatcatcatataatcaataagatttcttgggccttctgtgtttaccttgaagctgtttcagtccttcctcaacttagagtcatgcaaaacactaaggtacttttaaaaagcttgaaactagtccctgtcctttaccctttttaaattagtaacgcatgtgtcgtcttagatcgtggagccatttacagcacattacgtattcgctttggggatcgctaggttcttgagttgtgcacactgggtccttcaggttttggacactcgagggcggttattgactgctttaggatatggtttctggcctataatggttcttctctctgaaatcgtccaaaccttcattctagccgacttctgctactactatgtcaagaggtaaatcattaatgctttcagtcatcgtcatgtttgttgatacattggttgtagttatgtgatgattgctgatcttaaagacattgtgaagggtgttgtaagtattttatgtttttggtgtgtggcagtttaatgggtggtcagcttgttcttcgtctcccgtcaggtgttgtgtgaaatttggtgtataagaagaagatacggtgttgctttgagcttatggtgtggtgtaatgatccatgtcttgcaggctaatcgttttgagtcttctctaatctcttttttttttttttttccctttatgttttttcttttcttagaggacttgtaaagaaaaaaagggaattaattagagattttgagtttt

SEQ ID NO: 74909 - protein, 106 aa, Arabidopsis thaliana; identical to SEQ ID NO: 40760
  peptide (1)..(106): Ceres Seq. ID no. 5680517

SEQ ID NO: 74910 - protein, 90 aa, Arabidopsis thaliana
  peptide (1)..(90): Ceres Seq. ID no. 5680518
MKAATRPIHAVTTWVRRQPPKVKGFLGVVSAMTALVLLRVIVHDHDNLFVAAEAVHSLGISVLIYKLTKERTCAGIFDFLILKFLDLGFD

SEQ ID NO: 74911 - protein, 84 aa, Arabidopsis thaliana; identical to SEQ ID NO: 40762
  peptide (1)..(84): Ceres Seq. ID no. 5680519

SEQ ID NO: 74912 - DNA, 574 bp, Arabidopsis thaliana
  misc_feature (1)..(574): Ceres Seq. ID no. 5680527
  misc_feature (1)..(574): Ortholog of  Ceres SEQ ID NO 13594900 as cited in SEQ ID NO 52042
agatagaacagtgaagaagaaatgggaaggatattcacggtggagcttgaaggaagatcttacagatgcaggttctgcagaacccatctcgctcttcccgatgatcttgtctctcggtcgtttcattgccgtagaggaaaggcttacctcttcaaccgttcggtgaacataagtatgggtcctctagaggaaagactgatgctttccggtatgcacaccgtagctgacattttctgctgctgttgtggacagaatgttggctggaaatacgaatcagcgcacgagaaagctcagaagtataaagaaggcaaatttgttctggaaagaggaaggatcgtggatgaaatcgatttatcaactgaggtttatatcgatactcatggtagcacaagcgacacagaagattcttaaatgttaccttttttctgtgtgtttgtcaagagcagagcttgttagtgtagaaatctgtagcatgtttatagagatgtgtatcaaacttgttgtgttgtttttatatctcgtagaaattttatgtgaattcgaatctttattttaaatccaataaaaactcatt

SEQ ID NO: 74913 - protein, 129 aa, Arabidopsis thaliana
  peptide (1)..(129): Ceres Seq. ID no. 5680528
MGRIFTVELEGRSYRCRFCRTHLALPDDLVSRSFHCRRGKAYLFNRSVNISMGPLEERLMLSGMHTVADIFCCCCGQNVGWKYESAHEKAQKYKEGKFVLERGRIVDEIDLSTEVYIDTHGSTSDTEDS

SEQ ID NO: 74914 - protein, 100 aa, Arabidopsis thaliana
  peptide (1)..(100): Ceres Seq. ID no. 5680529
MLAGNTNQRTRKLRSIKKANLFWKEEGSWMKSIYQLRFISILMVAQATQKILKCYLFSVCLSRAELVSVEICSMFIEMCIKLVVLFLYLVEILCEFESLF

SEQ ID NO: 74915 - protein, 78 aa, Arabidopsis thaliana
  peptide (1)..(78): Ceres Seq. ID no. 5680530
MGPLEERLMLSGMHTVADIFCCCCGQNVGWKYESAHEKAQKYKEGKFVLERGRIVDEIDLSTEVYIDTHGSTSDTEDS

SEQ ID NO: 74916 - DNA, 1616 bp, Arabidopsis thaliana
  misc_feature (1)..(1616): Ceres Seq. ID no. 5680546
  misc_feature (1)..(1616): Ortholog of  Ceres SEQ ID NO 13590691 as cited in SEQ ID NO 66290
cccaacactagcaagcaaaaattcttcatcgactcaaattcaaaaactcatctctctctatctctatttctctggttccatagctcaccgtcgcatcgcagatctactccttccgcaataaattttaccggcggaggtatcagatctcgccgatctgttgtagcagctactgtattttgggcttctcatttgatattggggaaacgaggagtagaggacgatggaaaatctgatctctctggttaacaagatacagagagcttgcacggctttaggagaccatggagactccagcgctttacctactctttgggattccttgcctgcgatcgccgtcgttggtggtcagagctcagggaagtcttcagtcctggagagcatcgtgggaaaggactttttaccccgtggatctggcattgttactcgaaggccccttgtcttacagttgcaaaagatcgatgatggaacccgggagtatgcagagtttcttcacctcccgaggaaaaagtttactgattttgctgctgtgaggaaggagattcaagatgagactgacagagagactggacgcagcaaggctatttctagtgttcccattcaccttagcatatactctcccaatgttgtcaacttgacactgatagatcttccagggcttacaaaagttgctgttgatggacaatctgatagtatagtgaaggacattgaaaacatggttcggtcctacattgaaaagcccaactgcatcattttggcaatctcacctgcaaaccaagatcttgctacctcagatgcaattaaaatttcccgtgaggttgatccatcgggggacagaacatttggtgtcttgacaaagattgatcttatggacaaggggacggatgcagtggaaattctggaagggagatcttttaaacttaaatatccgtgggttggtgtcgtcaaccgttcccaagcagatattaacaagaatgtcgacatgattgcggctcggaaaagagagagggagtacttttccaatactactgagtataggcaccttgctaataaaatgggttccgagcatttggcaaagatgctctccaagcatctagaacgtgtgatcaagtcgagaattcctggcattcagtcacttattaacaaaacagtattagagctggaaactgaactaagtcgccttggaaagcctattgcagctgatgcaggggggaagttgtactcaataatggagatatgtcggctttttgatcaaatattcaaagagcatcttgatggagtgcgtgctggtggtgaaaaagtgtacaacgtgtttgataaccagcttcctgcggctctgaagagactccaatttgacaagcagctagcgatggacaacatccggaagctggtcactgaggctgatggttaccagcctcacttgattgctcctgagcaaggttaccgtcgtctcattgagtcttctattgtctccatcagaggccctgctgaagcatctgttgacaccgtatgaactctttactttcatctctaaaaagatgtatcaaaaacctaacacaaaacaataagcttctctctccgtttttttttttttctatggttaaatattaggttcatgc

SEQ ID NO: 74917 - protein, 429 aa, Arabidopsis thaliana
  peptide (1)..(429): Ceres Seq. ID no. 5680547
MENLISLVNKIQRACTALGDHGDSSALPTLWDSLPAIAVVGGQSSGKSSVLESIVGKDFLPRGSGIVTRRPLVLQLQKIDDGTREYAEFLHLPRKKFTDFAAVRKEIQDETDRETGRSKAISSVPIHLSIYSPNVVNLTLIDLPGLTKVAVDGQSDSIVKDIENMVRSYIEKPNCIILAISPANQDLATSDAIKISREVDPSGDRTFGVLTKIDLMDKGTDAVEILEGRSFKLKYPWVGVVNRSQADINKNVDMIAARKREREYFSNTTEYRHLANKMGSEHLAKMLSKHLERVIKSRIPGIQSLINKTVLELETELSRLGKPIAADAGGKLYSIMEICRLFDQIFKEHLDGVRAGGEKVYNVFDNQLPAALKRLQFDKQLAMDNIRKLVTEADGYQPHLIAPEQGYRRLIESSIVSIRGPAEASVDTV

SEQ ID NO: 74918 - protein, 265 aa, Arabidopsis thaliana
  peptide (1)..(265): Ceres Seq. ID no. 5680548
MVRSYIEKPNCIILAISPANQDLATSDAIKISREVDPSGDRTFGVLTKIDLMDKGTDAVEILEGRSFKLKYPWVGVVNRSQADINKNVDMIAARKREREYFSNTTEYRHLANKMGSEHLAKMLSKHLERVIKSRIPGIQSLINKTVLELETELSRLGKPIAADAGGKLYSIMEICRLFDQIFKEHLDGVRAGGEKVYNVFDNQLPAALKRLQFDKQLAMDNIRKLVTEADGYQPHLIAPEQGYRRLIESSIVSIRGPAEASVDTV

SEQ ID NO: 74919 - protein, 214 aa, Arabidopsis thaliana
  peptide (1)..(214): Ceres Seq. ID no. 5680549
MDKGTDAVEILEGRSFKLKYPWVGVVNRSQADINKNVDMIAARKREREYFSNTTEYRHLANKMGSEHLAKMLSKHLERVIKSRIPGIQSLINKTVLELETELSRLGKPIAADAGGKLYSIMEICRLFDQIFKEHLDGVRAGGEKVYNVFDNQLPAALKRLQFDKQLAMDNIRKLVTEADGYQPHLIAPEQGYRRLIESSIVSIRGPAEASVDTV

SEQ ID NO: 74920 - DNA, 675 bp, Arabidopsis thaliana
  misc_feature (1)..(675): Ceres Seq. ID no. 5680607
  misc_feature (1)..(675): Ortholog of  Ceres SEQ ID NO 13581889 as cited in SEQ ID NO 50900
aatgttttttctgttactgtctccgcgatctgattttacgacaatagagtttcgggttttgtcccattccagtttgaaaataaagatggctcgtaccaagcaaaccgctcgtaagtccaccggaggtaaagctccaaggaagcaacttgctactaaggctgctcgtaaatctgcaccaactactggtggagtcaagaaaccacatcgttaccgtcctggaactgttgctctccgtgaaatccgtaagtaccagaagagtactgagttgcttatcaggaaactgccatttcagaggctagtccgtgagattgctcaagatttcaagactgatttgcgtttccagagccatgctgtcttagctctccaggaagctgcagaagcatatcttgttggtctctttgaagacactaacctttgtgccattcatgccaagcgtgtgaccataatgcccaaagacattcagctcgctcgtcgtatcagaggtgaacgcgcttaagccaaccaagaatccgagatttggttcaagtagtttttgttttttatgaaagcaagatcttaattgctgtgttttttaaatctctgggtatgtagtagtaagagtagtaagaagtctgcaatctaagaatgttgtgttctttaagcttattattatgtgtgttgcgaactctttttaac

SEQ ID NO: 74921 - protein, 164 aa, Arabidopsis thaliana; identical to SEQ ID NO: 28280
  peptide (1)..(164): Ceres Seq. ID no. 5680608

SEQ ID NO: 74922 - protein, 136 aa, Arabidopsis thaliana; identical to SEQ ID NO: 26403
  peptide (1)..(136): Ceres Seq. ID no. 5680609

SEQ ID NO: 74923 - DNA, 1676 bp, Arabidopsis thaliana
  misc_feature (1)..(1676): Ceres Seq. ID no. 5680648
  misc_feature (1)..(1676): Ortholog of  Ceres SEQ ID NO 14303423 as cited in SEQ ID NO 54243
  misc_feature (1)..(1676): Ortholog of  Ceres SEQ ID NO 12611314 as cited in SEQ ID NO 56535
  misc_feature (1)..(1676): Ortholog of  Ceres SEQ ID NO 13661438 as cited in SEQ ID NO 61414
attaagacgggatgttgtaattaaacacctaccaacagacaaaatcaaaagataggaagccacgtatgcatatatttaggtgaagcttttgataaaacaaagcgttgggctcttccaaatatcaaaacaagtttttttttgtttgttggcttataattcacctgagaaaaacaatatcaatcggctcgttttctctcctcagtgtttcttcagtagtcctgcgagatcgtataagagattcgaaaccctaatctatcaatttgatcctgtccattctctgttattgtttgagaattgtgcaatccgatggggacgatgcaccggagtggtgctcccagaaggacaaatgaaaatgcgaagcttatcataacgacaatcgtgggagtggtgtttggtttttttgttggtatcacattaccattaggttcctttagaaagattagcttaccttcaggccttatgtcatctcttgatgtagccatgtcagatgggaaattgttttctggtggcagatcacctgaagatattggttcaagaaagtctcctaagatatatgttccaaccaatccgcatggtgcagaactacttcctcctgggattatagtggcagaaacagatttctacttgcgccgattatggggtgaacctagtgaagatttgaagaagaagccaaagtatctcgtaacttttacagttggatttgagcagagaaacaacattaatgcagctgttaagaagttttctgaagatttccaaatattgttattccattatgatggccgaacaactgagtgggaccagtttgagtggtctaaaaatgcaatacatatcagtgcaaaaaagcaaacaaaatggtggtatgcaaagagatttttgcatcctgatgttgtctcagcttatgagtatatatttatatgggatgaagatcttggagtcgagcacttcaatgcagataggtgaattacttgtctgaaattgtagttgcagatcagtgacaatctttacaatttttattttaaattttcaggtacgttgagttagttaagaagcatggtttggagatttctcaaccaggcttagagccaaacaacggacttacatgggaaatgacaaagaggagaggtgaccgagatgtccacaaagaaactaaggaaaaaccaggatggtgcagtgatccacatttacctccatgtgctgcgtttgttgagattatggcacctgtattttctagagaagcatggcgatgtgtatggcatatgattcagaatgatcttgttcatggatggggtctcgattttgctctcagacgatgcgttgagcctgctcatgagaagattggtgtggtagattcacagtggattatccatcaagtgattccttcccttggaagtcagggtgagtcggaggaggggaaatctccatggcaaggggtgagggagagatgcagaaacgaatggacgatgttccagaatcgcgtggcagaagctgataaagcatacatggaacaacacaaggtaaaagaataatttgggcctcttcttactctgtctctgtaaatgaagcttacgtttccctgatcaagtgagtgtgaggagagagatctatgtagtcccctatttagtttaaaacatctcagatatatctacattattagctttttacctaatatatttctt

SEQ ID NO: 74924 - protein, 217 aa, Arabidopsis thaliana; identical to SEQ ID NO: 42653
  peptide (1)..(217): Ceres Seq. ID no. 5680649

SEQ ID NO: 74925 - protein, 214 aa, Arabidopsis thaliana; identical to SEQ ID NO: 42654
  peptide (1)..(214): Ceres Seq. ID no. 5680650

SEQ ID NO: 74926 - protein, 166 aa, Arabidopsis thaliana; identical to SEQ ID NO: 42655
  peptide (1)..(166): Ceres Seq. ID no. 5680651

SEQ ID NO: 74927 - DNA, 1400 bp, Arabidopsis thaliana
  misc_feature (1)..(1400): Ceres Seq. ID no. 5680668
  misc_feature (1)..(1400): Ortholog of  Ceres SEQ ID NO 13597476 as cited in SEQ ID NO 65132
agaagaagtagacgatgttggaagaacaatagaggaagagactgtgtgtgaaaaaagagaaagaggagaggaagctgaaacattgactccatgggagcaacactccagcatcataagcatccctcgattcgactacaaagctccctcttctctgcttcatcattctcattccggattcctcgtcacctgcaacatcaaaagggagaaaagtgctactaaagaggtcatgtccatccttggaaaggtatcgtcacaattctccatcattagtgaggcaaaagtttggatttttgttccttcatttagaagataactcagagtgattgataaccaattgtggtagagaaacactatatttgaaacgaaagtgattataagtgcagtggtgggggttctctaatgttcagcttgtctcacggaaatcaaacttttgatttgttcagtatattgggtccatgcatgaggagaaacctgaagttctaaactctactgcatccaaaaaacaaaaagtttgtgcacaagagacagaggaaggcggagagaagactgtacctcttgagaatgatgccttgcaggaaacaggtgaaaatccaaatgttgaggatcttaaattagcaaatgaagaacacaattctctcatgtcattggttaagctaacaaagagtggcttgcttctctttactttccctgttgaaaactctcccaatacaacgaatatcgtatcacgagtcttccagtctatggaatctggagctttgaaggcaccaatctggtgccatcggatattcccagttcaagctacttgtggtttgacagagaaagaacttcgggaaacagtatcaaagcttgttcagcggtttgtcaatgataaagacaatacactatcaaaacctgtgaagtttgcagctgggtatcaacgtagaggtgcggaggagacgaaaggaaagattcggaaagacgcttcagatgttctagttcaatgtccgttgctggaccgcattaaatgctttgaaactgtggcagctggagtgaaagacattgtaccagattcagttgtggatctcaaatctccagagttatgtgttctggtggaactgttaccgctctctagaatatcaagtggctcctttgtagctgctgtttcagtgcttccacatagactcgttagcacaaagccgaaactctgcatcaagcctctagtccctgaatccaaacacaaaaagggaccaaactgacaggtgcaaaggctgatcgctgcattcgattttcgagagccaaagatatcaatagaagttgtaatctctctgtttttgtttagatatgtcttttgctttcagtatctctaatggagttaacaacaatgtctgacctatgttattcaagagaacaaagataaaccc

SEQ ID NO: 74928 - protein, 259 aa, Arabidopsis thaliana; identical to SEQ ID NO: 38843
  peptide (1)..(259): Ceres Seq. ID no. 5680669

SEQ ID NO: 74929 - protein, 198 aa, Arabidopsis thaliana; identical to SEQ ID NO: 38844
  peptide (1)..(198): Ceres Seq. ID no. 5680670

SEQ ID NO: 74930 - protein, 164 aa, Arabidopsis thaliana; identical to SEQ ID NO: 38845
  peptide (1)..(164): Ceres Seq. ID no. 5680671

SEQ ID NO: 74931 - DNA, 1233 bp, Arabidopsis thaliana
  misc_feature (1)..(1233): Ceres Seq. ID no. 5680685
  misc_feature (1)..(1233): Ortholog of  Ceres SEQ ID NO 14311463 as cited in SEQ ID NO 51400
cctaaagtttgaaactttgaacataaaaattgtatttttttttttgaagtttccagcaaaaaaaaaattgaaactttcagtgattggaattttaatttgtgttttagtttggtgggtttctttatcgggatcgttgtcgtggatttttgtttgtagcagcttgaaagacgatgtcgtcgtcgccggacattgccggaatcttagataatacgaaggagcttgatcggttaagaaaagaacaagaggaagttcttgtggagattaataagatgcataagaagcttcaagctacgccggagatagttgagaagcctggtgatatttcattgtcaaagcttaaaaatttgtacattcaagcaaaagagctttcagaaagtgaagtaaccgtttcaaatattctgcttactcagttggattctctgcttccatctggaccaactgggcaacaacgcagaaaattagtggcagaaggcaacgaacagaagagaaagagaatgaaagtagatacagatgtaacaagagtttctccttccatgagaaatcaaatcgaggcatatgctagtctaaagggtgaacaggttgctgcaagagtcacagctgaagatgccgagaaggatgaatggtttgtggtgaaagttattcacttcgacagagaaacaaaagaagttgaagtacttgatgaagaaccaggagatgatgaagaaggaggtggccagaggacgtataaactatcaatgtcatgtattttaccgtttccaaaacggaatgatccttcaagcacacaagagtttataccagggaaacacgtcttagctgtatatccaggaaccacagccctctacaaggcaactgttataagtaccccacgaaagaggaaatctgacgagtacttgctagaatttgatgatgatgaagaagacggagcattacctcaaagaacagtgccattccacaaagtggtagctttaccagaaggccatcgccagtaattttagatggatacaatgaaataagagacgatttctttgggccagagtgtaagttaagagttgttgcctttgtttgtgatgatgactttgaagaataaaaaggtatgttttaactttttattatttcaatttgtggcaaaactactctagcaacatttgtaacatttaaatgtgtatatatgaatggaaccatgggtatgtatatcatattgagacacaatttaaaaaaaaattacatttttct

SEQ ID NO: 74932 - protein, 272 aa, Arabidopsis thaliana; identical to SEQ ID NO: 36861
  peptide (1)..(272): Ceres Seq. ID no. 5680686

SEQ ID NO: 74933 - protein, 239 aa, Arabidopsis thaliana; identical to SEQ ID NO: 36862
  peptide (1)..(239): Ceres Seq. ID no. 5680687

SEQ ID NO: 74934 - protein, 164 aa, Arabidopsis thaliana; identical to SEQ ID NO: 36863
  peptide (1)..(164): Ceres Seq. ID no. 5680688

SEQ ID NO: 74935 - DNA, 1233 bp, Arabidopsis thaliana
  misc_feature (1)..(1233): Ceres Seq. ID no. 5680689
  misc_feature (1)..(1233): Ortholog of  Ceres SEQ ID NO 12608620 as cited in SEQ ID NO 60192
  misc_feature (1)..(1233): Ortholog of  Ceres SEQ ID NO 13654314 as cited in SEQ ID NO 67914
ataccgaattacatatatatctcgctcgctctcttctttgttcttgctccttgttctagttcggatttttcttttgaagtgaaatggttaacgctacagttgcgagaaacattgccggcatttgtggaaatgtcatctccttgttcttgttcttatctcccatacctacgttcataaccatatacaagaagaaaaaggtggaggagtacaaagctgacccatacttagccacggttctaaattgcgcactatgggtcttttatggcttaccaatggttcaaccagatagtctccttgtgatcaccataaatggtaccggtttagccattgagctggtgtatctcgctatcttcttcttcttttctccaactagtcgcaaggtttagtaatttccattcatatctcaattcttttcacttaattttattaaatgttttttccaatcattatctaaacctaaaatcgctattaggtttggcttaaattgaaagctaaaacattatagtaataagaagtggtagactatgattgattctgttttaggatagtgataggcaaaacaaaatgtttgtagatttttttttttttttctgaaattattttaatcaaattggttcatggtgcaggtgaaagtggggctatggttaataggagagatggtgtttgtaggaatagtagccacatgcacattgctattgttccacacacataaccagagatcttcttttgttggaatcttttgtgtcatttttgttagtctcatgtatattgctcctctcaccatcatgagtaaggtgatcaagaccaaaagtgtgaagtacatgccattctctctctcacttgccaatttcctcaatggtgtcgtttgggttatttatgcacttattaagttcgaccttttcattttgattggaaatggacttggaacggtatcaggagcagtacaacttatactctatgcttgctattacaagacaacaccaaaagatgatgaagatgaagaagatgaggagaatctttctaaggttaactctcagttacaacttagtggcaacagtggacaagctaaacgagtttcagcttgattatatgtttggattcatgagatatgaatttagttttatgtttttttttaagcttttggctgatttaactttaagtaactctattattttcgcgtttcctttttgtaaaatgcaaactctttttcttctatgaaagatattaactatt

SEQ ID NO: 74936 - protein, 155 aa, Arabidopsis thaliana
  peptide (1)..(155): Ceres Seq. ID no. 5680690
MVQVKVGLWLIGEMVFVGIVATCTLLLFHTHNQRSSFVGIFCVIFVSLMYIAPLTIMSKVIKTKSVKYMPFSLSLANFLNGVVWVIYALIKFDLFILIGNGLGTVSGAVQLILYACYYKTTPKDDEDEEDEENLSKVNSQLQLSGNSGQAKRVSA

SEQ ID NO: 74937 - protein, 142 aa, Arabidopsis thaliana; identical to SEQ ID NO: 35365
  peptide (1)..(142): Ceres Seq. ID no. 5680691

SEQ ID NO: 74938 - protein, 107 aa, Arabidopsis thaliana
  peptide (1)..(107): Ceres Seq. ID no. 5680692
MYIAPLTIMSKVIKTKSVKYMPFSLSLANFLNGVVWVIYALIKFDLFILIGNGLGTVSGAVQLILYACYYKTTPKDDEDEEDEENLSKVNSQLQLSGNSGQAKRVSA

SEQ ID NO: 74939 - DNA, 759 bp, Arabidopsis thaliana
  misc_feature (1)..(759): Ceres Seq. ID no. 5680693
  misc_feature (1)..(759): Ortholog of  Ceres SEQ ID NO 15176693 as cited in SEQ ID NO 1078
  misc_feature (1)..(759): Ortholog of  Ceres SEQ ID NO 12615074 as cited in SEQ ID NO 62676
  misc_feature (1)..(759): Ortholog of  Ceres SEQ ID NO 13598819 as cited in SEQ ID NO 0
  misc_feature (1)..(759): Ortholog of  Ceres SEQ ID NO 13600371 as cited in SEQ ID NO 0
catacatacgtagagagatccaaaatacccaacctcgcagagtaaaagcaaaaagaagaagaaatcagagagaatgtcgtggcaagcatacgttgatgagcatttgatgtgtgatgtcggcgacggccaaggtcaccaccttaccgccgccgctatcatcggccatgatggtagcgtttgggctcagagcgctaattttcctcagttcaaacctcaagagatcacagacattatgaaggatttcgatgagcctggtcacctcgctcccacgggtatgttcctcgcagggctaaagtatatggtcatccaaggcgagcctaatgctgtcatccgtggcaagaagggagctgggggaatcacgatcaagaaaacaggacaatcaatggtgtttggtctgtacgaagagccagtgactccaggacaatgcaacatggttgtcgagaggttgggtgattacttgatcgaacagggtctttgaaccatctacaatgttttatatctctttctctataaatcattaaacctttgtttctctttttgggttttggttttccgtttctataatttaattttgggtcttcctggtttctactttagccaagtttaacagaaagcttaagcctaaggttgcagataataacactaagcctgtgtgaagaagccaagacttataagacttttgtttcttttttctctttttcatggttattgattaatttgtgtttttaaaaaaaaattaattttatagtattgttgcgt

SEQ ID NO: 74940 - protein, 134 aa, Arabidopsis thaliana; identical to SEQ ID NO: 30068
  peptide (1)..(134): Ceres Seq. ID no. 5680694

SEQ ID NO: 74941 - protein, 123 aa, Arabidopsis thaliana; identical to SEQ ID NO: 30069
  peptide (1)..(123): Ceres Seq. ID no. 5680695

SEQ ID NO: 74942 - protein, 81 aa, Arabidopsis thaliana; identical to SEQ ID NO: 30070
  peptide (1)..(81): Ceres Seq. ID no. 5680696

SEQ ID NO: 74943 - DNA, 1435 bp, Arabidopsis thaliana
  misc_feature (1)..(1435): Ceres Seq. ID no. 5680747
  misc_feature (1)..(1435): Ortholog of  Ceres SEQ ID NO 15170609 as cited in SEQ ID NO 52683
aagaacaacagaaaatttcaaaatggtttctcagataatctcgtgtttatctcaatcttcgtctcttctatgtttatccgattcaaggaggttaattcttccgaagacttgtacttacggcggtttgagccggttttctccaggatttgctagccgccggttatttacggttaatcggaagaaatggagatcggcctgcattttcaactctggaaaggaacctggaggagagggaaaggttactgtctcactgactctatctaaattagattcttgtttagtttccggtctgaatttttctgaggcagctctatgtaacttgttcaattgaatccaaattctattggaatgtgaaaaaagactagacctttgagaaattatttgaagttttgattgttatatttgttgtagttacaaggaggtagctcagagtggccgatacttcagagatgggaagttccatggggatggcagacagtttcgttaacttcgtttgcttgtgcactaaggcagttttgttttgacaggattaaccgagatggcagtcataccgtttttaggaatcgacgttgagaaactgaccttggacgataaggcggagattttgttcctggatcaaggcctaacaaccgcggtggtacttgctgtcatattcactgttgccaaaaccttcgacccacttcctgaagatattcttcgctatgatttgagacaacccgtcaacctgcaaaaaggatggcttgtgtggggtggaatcggtctggttggtgctgttggtgctattgcgttaacaggtgttgttttatccgtgttcaggacagaagcacctgaaagggaggtagactctttgatgaagcttcttccattaattggatcctcaaacataagcaccttaagcttagtgggcataactggaatccttgctccacttctggaggagaccgtgtttcgcggattcttcatggtctctcttaccaaatgggtcccgaccccaatagcgatcatcatcagctcagctgcgtttgcccttgcccatttcacacctggtgaattcccgcagctgtttattctaggaagtgttttgggattatcatatgcacaaacccgcaatctcattaccccaatggtcatacacggtttctggaactcgggagttattttgctactcacttttcttcagatccaagggtatgacattaaggagctattgcaggcaaactagctctgagccatgctctttgtgctgtccgcatttaacatcaaaaagcttcattatgtgctcgatgttagtaagatattttgtattcgagaacagatttcatacttaatgcaatttgggttttggtagagttatctttattacaacatcatgacagtaatgtatgaactaatatggtagagatgaatctttttggaacaaaaaacaaatttattt

SEQ ID NO: 74944 - protein, 227 aa, Arabidopsis thaliana; identical to SEQ ID NO: 23346
  peptide (1)..(227): Ceres Seq. ID no. 5680748

SEQ ID NO: 74945 - protein, 123 aa, Arabidopsis thaliana; identical to SEQ ID NO: 41553
  peptide (1)..(123): Ceres Seq. ID no. 5680749

SEQ ID NO: 74946 - DNA, 1280 bp, Arabidopsis thaliana
  misc_feature (1)..(1280): Ceres Seq. ID no. 5680750
  misc_feature (1)..(1280): Ortholog of  Ceres SEQ ID NO 14314434 as cited in SEQ ID NO 52401
  misc_feature (1)..(1280): Ortholog of  Ceres SEQ ID NO 14303939 as cited in SEQ ID NO 54286
  misc_feature (1)..(1280): Ortholog of  Ceres SEQ ID NO 14307760 as cited in SEQ ID NO 54741
  misc_feature (1)..(1280): Ortholog of  Ceres SEQ ID NO 14307540 as cited in SEQ ID NO 59670
  misc_feature (1)..(1280): Ortholog of  Ceres SEQ ID NO 15179003 as cited in SEQ ID NO 0
  misc_feature (1)..(1280): Ortholog of  Ceres SEQ ID NO 15179235 as cited in SEQ ID NO 0
aaattgtcttttgtctcctttccttttcgtttttagggtttttttttcttagcacagctctctcttctcaatttccccaaatgaaataaattcctccgaaagtttatagatttcactctcccccgaactatacaaaattccctcaaaaggaaaaactaaaaagccgatcttggcttttttgtttctgagtgcatctcgatacttggaagcattctttggtgaggctgattcattctcatctgtgaaagtctttggcttttgaagcaatactatggaaggaattcagcatcctatacctcgcactgtcgaagaggtttttagcgactttcgtggtcgtagagctggtctcatcaaggctctctctactgatgtacagaagttttaccatcagtgtgaccctgagaaggaaaacttgtgtctttatggacttccaaatgagacatgggaggttaatcttcccgttgaggaggtccctcctgagcttcctgaaccagcgttaggcatcaatttcgcaagggacggaatgcaagaaaaagactggatttctttggttgcagttcacagtgattcatggcttatctctgttgcattttactttggtgcacgtttcggatttggcaagaatgagaggaagaggctcttccagatgataaatgatctcccaaccattttcgaggttgtaactggcaatgcaaagcaatccaaggatcaatctgctaaccacaacagtagcagaagcaaatctagtggtggcaagcctcgtcattctgaatctcacactaaggcttcaaagatgtcccctccaccaagaaaagaagatgagagcggagatgaggatgaagatgacgagcaaggtgctgtttgtggtgcgtgtggcgacaactatggaggagatgagttctggatatgttgtgatgcttgcgagaaatggttccatgggaaatgcgtgaagatcacaccagcaaaggctgagcatatcaaacattacaaatgcccaagttgcactaccagcaagaaaatgaaagcctgaaagtgataataacattagagcctgtgaaagaggaaaacgttttcacagtttaagaagacagtacaagagtttagctgtgggaagaagaagaaacaaaaggcttctgattgcgtagttttaatgggattgagacagcttacagttagtaatgtctctttctcttttcttttctttttttttgctgttaatgttaaaatgttatgactaatttgtcttaagtttctgagaaaattctgtcttttaagcactc

SEQ ID NO: 74947 - protein, 252 aa, Arabidopsis thaliana; identical to SEQ ID NO: 37432
  peptide (1)..(252): Ceres Seq. ID no. 5680751

SEQ ID NO: 74948 - protein, 168 aa, Arabidopsis thaliana; identical to SEQ ID NO: 37433
  peptide (1)..(168): Ceres Seq. ID no. 5680752

SEQ ID NO: 74949 - protein, 127 aa, Arabidopsis thaliana; identical to SEQ ID NO: 37434
  peptide (1)..(127): Ceres Seq. ID no. 5680753

SEQ ID NO: 74950 - DNA, 1627 bp, Arabidopsis thaliana
  misc_feature (1)..(1627): Ceres Seq. ID no. 5680760
  misc_feature (1)..(1627): Ortholog of  Ceres SEQ ID NO 15174513 as cited in SEQ ID NO 58979
  misc_feature (1)..(1627): Ortholog of  Ceres SEQ ID NO 13584616 as cited in SEQ ID NO 65234
  misc_feature (1)..(1627): Ortholog of  Ceres SEQ ID NO 15178939 as cited in SEQ ID NO 0
atttttctcgaacaccgaaaacactttcgaaccctaaaagacagaacactgtgtcaattttcattacctgggaacgaaaagcaaaatcaaagacaataattttttccccgagagagaaaatgcagaggttgaagcagcagcagcagcagcaacaagttatgatgcagcaagctcttatgcagcaacagtctctctaccatcctggtctccttgccccgccacagatagaaccaatcccaagtggaaatctcccccctggttttgatccaagtacttgccgcagtgtgtacgttggaaacatccatattcaggtgacggaacctctgcttcaagaggtttttgctggcactggtcctgtagaaagctgtaaactaattaggaaagaaaagtcttcttatgggtttgtgcactactttgatcgaagatcggctggtcttgcaatcctttctctcaatggaaggcatttgtttgggcaacctatcaaggttaactgggcttatgcgagtggccagagggaggatacatcaagtcacttcaatatatttgttggggatttgagtccggaggttactgatgcaatgctgtttacttgcttctctgtctacccgacttgctcggatgcaagagttatgtgggatcagaaaactgggcgttcaagaggatttggatttgtttccttccgtaaccaacaggatgcccagactgcaatagatgagataactgggaaatggcttggttccaggcagatacgttgcaactgggcgacaaagggagccacttctggtgaggacaaacagagctctgattccaaaagcgtcgtggaacttaccagtggtgtctcggaggatggtaaagatactactaatggtgaagctcctgagaacaatgctcagtacacaactgtttacgtcggtaatcttgctccagaggtgtcccaggttgatcttcaccgccacttccattcccttggtgctggggtcatagaggaagtccgtgttcaaagagacaaaggtttcggatttgtgagatactctactcatgtagaggcagccctcgctattcagatgggaaacacacattcctaccttagtggcaggcaaatgaagtgttcttggggaagcaagccaactccagcaggaacagcttcaaacccgcttcctccaccagctcctgcaccaatcccgggattctcagcgagtgatctcttggcttacgagaggcaactagcgatgagcaagatggcaggaatgaatccgatgatgcatcacccgcagggacaacatgcttttaaacaagctgcaatgggagccactggttcaaaccaggcaatatatgacggtggttaccagaacgcgcagcagctcatgtactaccagtaagatcttcctcggagccgttacttgagcgaagagttctttcttttcttcttttttgttatgtaacgtctttattgtatctttttcttttcttctaacttatgttcttgttataatgttatcatgtagctgtgggtttgtggtttgtgttccacgttttttcttttgttaactactacggtttacgtttttgcacatcttcaacttctttctctttctctttctctaacttaatcttatttattgggtcg

SEQ ID NO: 74951 - protein, 458 aa, Arabidopsis thaliana
  peptide (1)..(458): Ceres Seq. ID no. 5680761
FSRTPKTLSNPKRQNTVSIFITWERKAKSKTIIFSPREKMQRLKQQQQQQQVMMQQALMQQQSLYHPGLLAPPQIEPIPSGNLPPGFDPSTCRSVYVGNIHIQVTEPLLQEVFAGTGPVESCKLIRKEKSSYGFVHYFDRRSAGLAILSLNGRHLFGQPIKVNWAYASGQREDTSSHFNIFVGDLSPEVTDAMLFTCFSVYPTCSDARVMWDQKTGRSRGFGFVSFRNQQDAQTAIDEITGKWLGSRQIRCNWATKGATSGEDKQSSDSKSVVELTSGVSEDGKDTTNGEAPENNAQYTTVYVGNLAPEVSQVDLHRHFHSLGAGVIEEVRVQRDKGFGFVRYSTHVEAALAIQMGNTHSYLSGRQMKCSWGSKPTPAGTASNPLPPPAPAPIPGFSASDLLAYERQLAMSKMAGMNPMMHHPQGQHAFKQAAMGATGSNQAIYDGGYQNAQQLMYYQ

SEQ ID NO: 74952 - protein, 419 aa, Arabidopsis thaliana; identical to SEQ ID NO: 30258
  peptide (1)..(419): Ceres Seq. ID no. 5680762

SEQ ID NO: 74953 - protein, 406 aa, Arabidopsis thaliana; identical to SEQ ID NO: 30259
  peptide (1)..(406): Ceres Seq. ID no. 5680763

SEQ ID NO: 74954 - DNA, 1655 bp, Arabidopsis thaliana
  misc_feature (1)..(1655): Ceres Seq. ID no. 5680772
  misc_feature (1)..(1655): Ortholog of  Ceres SEQ ID NO 13657220 as cited in SEQ ID NO 66169
  misc_feature (1)..(1655): Ortholog of  Ceres SEQ ID NO 13663074 as cited in SEQ ID NO 69191
cttcttcttcgtcttcttctcggtactctgagagagtgagagagaagcaacaatggaggttttctactacttggtgtttggagtcatggctgccgtagtggcagcgttggagcttagcaagacgaacaaggatcggatcaacacttcgtcttccttcaattcattcaagaacaattacctcctcgttttctctattatgatggctggggattggcttcagggtccttatgtgtattacctttacagcacttatggttttggaaaaggagatattggtcagctattcattgctggttttggttcgtcaatgttgtttggaactattgttggatctctggctgacaaacagggtcgaaagagggcatgtgttacatactgtatagtttacatactaagttgcatcaccaagcactctccacagtacaaagttttgatggttggccgtatcttgggtggtattgctacatctctcttgttttctgctttcgagtcctggctaattgcagagcacaataagaggaactttgagcaacagtggctgtcacttacattctctaaggctgtatttcttggaaacggtctggtggctatcctttcgggattgtttggcaatcttcttgttgacactttttcctttggtcctgttgctccctttgacgccgctgcgtgctttcttgcaattggaatggcgatcatattgggaacatggtctgagaattttggagatccatctgacagcaaagacttgctgactcagttcaaagttgctgccatagcaattgcttcagatgaaaagattgcattgctgggcgctattcagtctctattcgaagcctcgatgtacacctttgttttcctctggacaccagctcttagcccaaacgatgaagaaattccacatggcttcgtctttgcaaccttcatgttagcctcaatgttgggaagctcccttgcagctcgtctcatgtctcgctcatctctcagagtcgaaaactacatgcaaattgtctttctagtctcggctgcttcacttcttcttcccattacaacaagtgtcttggtgacaccgtcaaaggtgaaagacgaaggattgtcgttaactagctccattcagctgcttggtttctgtgtttttgagtcttgtgtcggaatattttggccttcgataatgaagatgaggtcgcagtatatacctgaagaagcacgaagcaccataatgaatttcttccgtgttccactcaacatctttgtctgcatcgtcttgtacaacgtggacgcatttccgatcacaatcatgtttggtatgtgctcaatcttcctcttcgtagcctccatattacaacggcggcttatggtcatctctgaaaagccaaaggcagaagattggagtccgatgaaggagcgaaactcggaagttgatcctcttaccctctgattgtgtccactcctaagctcgtcaaattcctaatttcattttttggtgatttttttttttttttttttttgagaaatagaaaaagaacaatcagaatgaagaaaggtaatgatttgctcttagctttttacatgtatggttattgatgctgattgtttgatagggtatgtaactctatatttacctttacgcacaattaccaatcaagtcttattatttt

SEQ ID NO: 74955 - protein, 460 aa, Arabidopsis thaliana; identical to SEQ ID NO: 70724
  peptide (1)..(460): Ceres Seq. ID no. 5680773

SEQ ID NO: 74956 - protein, 449 aa, Arabidopsis thaliana; identical to SEQ ID NO: 70725
  peptide (1)..(449): Ceres Seq. ID no. 5680774

SEQ ID NO: 74957 - protein, 412 aa, Arabidopsis thaliana; identical to SEQ ID NO: 70726
  peptide (1)..(412): Ceres Seq. ID no. 5680775

SEQ ID NO: 74958 - DNA, 595 bp, Arabidopsis thaliana
  misc_feature (1)..(595): Ceres Seq. ID no. 5682868
  misc_feature (1)..(595): Ortholog of  Ceres SEQ ID NO 13596261 as cited in SEQ ID NO 67817
tcccgattgttttctaccctcttcggattaacattgacgggctcttgttcccttccgytcgattattatctacctcaaatgtgaggttcggttgcctcactgccggtctcatttctgtaatcttcttgggtgcaaacttcatcccaagcatttgggatgctttccaattcactggagcaaccgccgctgtttgtctcggcttcatcttcccagcttctattatactaaaggatcgtcatgacaaagcaacaaacagggacacaaccttatctattttcatgattgttcttgcggtattgtccaatgcaatcgccatttacagcgatgcttatgcgctattcaagaagaacgcgcctcgtgagtaatcccggtatgagataatctgcagtttggtgttgaaaaaaagcttttgttttttcttctatgtgaaatcaaataatgaagaagacaagacttctcttctcttatatgtttgtacttttgtcgttgagtgttctaagcggacttttgctttggggttatataccaataccaccatgagtgttgtttgtaaaaaacttgtataaaaattgtaatgcagatacatattttgccc

SEQ ID NO: 74959 - protein, 120 aa, Arabidopsis thaliana
  peptide (1)..(120): Ceres Seq. ID no. 5682869
  misc_feature (19)..(19): Xaa is any aa, unknown or other
PIVFYPLRINIDGLLFPSXRLLSTSNVRFGCLTAGLISVIFLGANFIPSIWDAFQFTGATAAVCLGFIFPASIILKDRHDKATNRDTTLSIFMIVLAVLSNAIAIYSDAYALFKKNAPRE

SEQ ID NO: 74960 - DNA, 679 bp, Arabidopsis thaliana
  misc_feature (1)..(679): Ceres Seq. ID no. 5731184
  misc_feature (1)..(679): Ortholog of  Ceres SEQ ID NO 12465083 as cited in SEQ ID NO 68239
tggagagagcgaagaggactttgtcatttcggctcagccaccatcgaaatcgactctctgttcgatggtattgacttctacggctcctatcacccgtgccagattcgaggagcttaacatagatctcttcagaaagtgtatggagcctgttgagaagtgtcttcgtgatgctaagatggacaagaactcaatcgatgatgttgtccttgttggtggctcaacccgtatccccaaggtccagcaattgctcgttgacttcttcaacggcaaggagctttgcaaatctatcaaccccgatgaggctgttgcatatggtgctgctgtccaggcagctattctcagtggtgagggtaatgagaaggttcaagatctcctcttgcttgatgtcacaccactatctcttggtcttgaaaccgctggaggagtcatgactgtcttgatccagaggaatacaaccatccccacaaagaaggagcaagtcttctcaacttattcagacaaccaacccggtgttttgatccaagtctatgaaggcgagagagcaagaaccaaggacaacaacctgttgggtaaattcgagctttctggtatccctccagcaccaagaggtgttcctcaaatcactgtctgttttgacattgatgcaaacggtatcctcaacgggccagagagaactagt

SEQ ID NO: 74961 - protein, 226 aa, Arabidopsis thaliana
  peptide (1)..(226): Ceres Seq. ID no. 5731185
GESEEDFVISAQPPSKSTLCSMVLTSTAPITRARFEELNIDLFRKCMEPVEKCLRDAKMDKNSIDDVVLVGGSTRIPKVQQLLVDFFNGKELCKSINPDEAVAYGAAVQAAILSGEGNEKVQDLLLLDVTPLSLGLETAGGVMTVLIQRNTTIPTKKEQVFSTYSDNQPGVLIQVYEGERARTKDNNLLGKFELSGIPPAPRGVPQITVCFDIDANGILNGPERTS

SEQ ID NO: 74962 - protein, 205 aa, Arabidopsis thaliana
  peptide (1)..(205): Ceres Seq. ID no. 5731186
MVLTSTAPITRARFEELNIDLFRKCMEPVEKCLRDAKMDKNSIDDVVLVGGSTRIPKVQQLLVDFFNGKELCKSINPDEAVAYGAAVQAAILSGEGNEKVQDLLLLDVTPLSLGLETAGGVMTVLIQRNTTIPTKKEQVFSTYSDNQPGVLIQVYEGERARTKDNNLLGKFELSGIPPAPRGVPQITVCFDIDANGILNGPERTS

SEQ ID NO: 74963 - protein, 180 aa, Arabidopsis thaliana
  peptide (1)..(180): Ceres Seq. ID no. 5731187
MEPVEKCLRDAKMDKNSIDDVVLVGGSTRIPKVQQLLVDFFNGKELCKSINPDEAVAYGAAVQAAILSGEGNEKVQDLLLLDVTPLSLGLETAGGVMTVLIQRNTTIPTKKEQVFSTYSDNQPGVLIQVYEGERARTKDNNLLGKFELSGIPPAPRGVPQITVCFDIDANGILNGPERTS

SEQ ID NO: 74964 - DNA, 1303 bp, Arabidopsis thaliana
  misc_feature (1)..(1303): Ceres Seq. ID no. 5755193
  misc_feature (1)..(1303): Ortholog of  Ceres SEQ ID NO 13598741 as cited in SEQ ID NO 62749
  misc_feature (1)..(1303): Ortholog of  Ceres SEQ ID NO 12587535 as cited in SEQ ID NO 64020
  misc_feature (1)..(1303): Ortholog of  Ceres SEQ ID NO 15176854 as cited in SEQ ID NO 64525
  misc_feature (1)..(1303): Ortholog of  Ceres SEQ ID NO 12586366 as cited in SEQ ID NO 68983
  misc_feature (1)..(1303): Ortholog of  Ceres SEQ ID NO 15178891 as cited in SEQ ID NO 0
acaaggacattttgataatatccacaggcatgttaccaaacggagacttcgagctaggaccaaaaccatcagacatgaaaggaacagaaatactaaacaaactagcaataccaaactgggaagtcacaggattcgtcgaatacattaaatcaggacataaacaaggagacatgcttctcgttgttcccgccggtaaattcgctgtaagacttgggaacgaagcatcgatcaaacaaagacttaaagtggttaaaggaatgtattactcactcacttttagtgctgctagaacttgtgcacaagacgagagacttaacatatctgtagcacctgactccggtgtgattccgattcagacggtttatagtagtagtggttgggatttatatgcttgggcgtttcaagctgagagtgatgttgctgaagttgtgattcataatcctggtgttgaggaagatccagcttgtggtccacttattgatggtgttgctatgagatctctttaccctcctagaccaactaataagaacattttgaaaaacggaggatttgaagaaggtccattagtattacccggctcgacaactggagttttgatcccaccgtttatagaagacgaccactctcctttacctggatggatggtggagtctctcaaagctgtcaagtacgtagacgttgaacatttctcagtcccacagggtcgcagagctattgagcttgtagcgggtaaagagagtgccatcgctcaagtggttcggactgtcattgggaagacttacgtgctgtcttttgcggttggagacgccaacaatgcttgcaaaggatcaatggtggttgaggcttttgcaggaaaagatacacttaaggtcccttacgagtcgaaaggcacaggagggtttaaacgagcttctattcgatttgtggcggtttcgacccgatcaagaattatgttctacagcactttctatgccatgaggagcgatgatttctcgtcattgtgtgggcctgtgatcgatgatgtcaagcttataagcgttcgtaaaccatagatgaatcaccaatcctattacaagaaaatgcatcgtgtggtcttcttttattttccttaaactgtctttggtgtgtgttggattttattgaaacgagaaggtgaaaaaaacagagttttatttacgagagttagggttttatataggcagatgggcctttgcttatattgtattttcttgtatgagaaggcaaaagaaacgttgcctatatcttatgtatctaggccttttaatttttatggaagagttac

SEQ ID NO: 74965 - protein, 349 aa, Arabidopsis thaliana
  peptide (1)..(349): Ceres Seq. ID no. 5755194
KDILIISTGMLPNGDFELGPKPSDMKGTEILNKLAIPNWEVTGFVEYIKSGHKQGDMLLVVPAGKFAVRLGNEASIKQRLKVVKGMYYSLTFSAARTCAQDERLNISVAPDSGVIPIQTVYSSSGWDLYAWAFQAESDVAEVVIHNPGVEEDPACGPLIDGVAMRSLYPPRPTNKNILKNGGFEEGPLVLPGSTTGVLIPPFIEDDHSPLPGWMVESLKAVKYVDVEHFSVPQGRRAIELVAGKESAIAQVVRTVIGKTYVLSFAVGDANNACKGSMVVEAFAGKDTLKVPYESKGTGGFKRASIRFVAVSTRSRIMFYSTFYAMRSDDFSSLCGPVIDDVKLISVRKP

SEQ ID NO: 74966 - protein, 340 aa, Arabidopsis thaliana
  peptide (1)..(340): Ceres Seq. ID no. 5755195
MLPNGDFELGPKPSDMKGTEILNKLAIPNWEVTGFVEYIKSGHKQGDMLLVVPAGKFAVRLGNEASIKQRLKVVKGMYYSLTFSAARTCAQDERLNISVAPDSGVIPIQTVYSSSGWDLYAWAFQAESDVAEVVIHNPGVEEDPACGPLIDGVAMRSLYPPRPTNKNILKNGGFEEGPLVLPGSTTGVLIPPFIEDDHSPLPGWMVESLKAVKYVDVEHFSVPQGRRAIELVAGKESAIAQVVRTVIGKTYVLSFAVGDANNACKGSMVVEAFAGKDTLKVPYESKGTGGFKRASIRFVAVSTRSRIMFYSTFYAMRSDDFSSLCGPVIDDVKLISVRKP

SEQ ID NO: 74967 - protein, 325 aa, Arabidopsis thaliana
  peptide (1)..(325): Ceres Seq. ID no. 5755196
MKGTEILNKLAIPNWEVTGFVEYIKSGHKQGDMLLVVPAGKFAVRLGNEASIKQRLKVVKGMYYSLTFSAARTCAQDERLNISVAPDSGVIPIQTVYSSSGWDLYAWAFQAESDVAEVVIHNPGVEEDPACGPLIDGVAMRSLYPPRPTNKNILKNGGFEEGPLVLPGSTTGVLIPPFIEDDHSPLPGWMVESLKAVKYVDVEHFSVPQGRRAIELVAGKESAIAQVVRTVIGKTYVLSFAVGDANNACKGSMVVEAFAGKDTLKVPYESKGTGGFKRASIRFVAVSTRSRIMFYSTFYAMRSDDFSSLCGPVIDDVKLISVRKP

SEQ ID NO: 74968 - DNA, 1117 bp, Arabidopsis thaliana
  misc_feature (1)..(1117): Ceres Seq. ID no. 5755197
  misc_feature (1)..(1117): Ortholog of  Ceres SEQ ID NO 12611971 as cited in SEQ ID NO 53205
  misc_feature (1)..(1117): Ortholog of  Ceres SEQ ID NO 12615976 as cited in SEQ ID NO 62440
actggatttgatgatgttgtagatgatgcaatggcgatattcgtagctttaaattcacctgaagttgatgtcattggcctcactactatctttggaaacgtgtataccactctcgccactcgaaacgccttgcatttgttggaggttgcgggtaggaccgatattccggtggctgaaggaacacataaaaccttcttgaacgatacgaagcttcgaatagctgactttgttcatggaaaagatgggcttggcaaccaaaacttccctccacctaaaggaaaaccaattgaaaagtctggacctgagtttttagttgaacaagcaaagctttgccctggtgaaatcacggttgttgctttgggaccactaacaaatctcgcgttggctgttcagcttgatccagagttttcgaaaaatgtcggacaaattgttcttcttggtggagcatttgcagtaaacggaaatgtaaatccagcttcggaagctaatatttttggcgatcccgaagctgcagatattgtgttcacatgtggggccgatataattgctgtgggaatcaatgtgacccatcaagttattatgacagctgatgacaaggacaaactagcatcatcgaaggggaaattagctcaatatctctgtaaaatccttgatgtgtactatgattatcatctcacggcttacgaaatcaaaggtgtgtaccttcatgatcctgcgacgatccttgcggctttccttccttctctattcacttatacagaaggagttgctagagtgcagacaagtggtatcactaggggactcactttactgtacaacaatcttaagaggtttgaggaagcgaacgagtggtcagacaaaccaacggtaaaagtggcagtgacggttgatgctcctgcagtcgtgaagctcataatggataggcttatggagtcttaaaccatcttgggtcgttaattagttatctctttctctttgatgtttcactattgcgagccatttctcttgttaaaaataaggctcctcttgctgcattatttatttattgtttaatctttattaaaacgaatattattatgttaccaattaccaataataaagttaagatttttcctcc

SEQ ID NO: 74969 - protein, 312 aa, Arabidopsis thaliana
  peptide (1)..(312): Ceres Seq. ID no. 5755198
TGFDDVVDDAMAIFVALNSPEVDVIGLTTIFGNVYTTLATRNALHLLEVAGRTDIPVAEGTHKTFLNDTKLRIADFVHGKDGLGNQNFPPPKGKPIEKSGPEFLVEQAKLCPGEITVVALGPLTNLALAVQLDPEFSKNVGQIVLLGGAFAVNGNVNPASEANIFGDPEAADIVFTCGADIIAVGINVTHQVIMTADDKDKLASSKGKLAQYLCKILDVYYDYHLTAYEIKGVYLHDPATILAAFLPSLFTYTEGVARVQTSGITRGLTLLYNNLKRFEEANEWSDKPTVKVAVTVDAPAVVKLIMDRLMES

SEQ ID NO: 74970 - protein, 302 aa, Arabidopsis thaliana; identical to SEQ ID NO: 25008
  peptide (1)..(302): Ceres Seq. ID no. 5755199

SEQ ID NO: 74971 - DNA, 1391 bp, Arabidopsis thaliana
  misc_feature (1)..(1391): Ceres Seq. ID no. 5776952
  misc_feature (1)..(1391): Ortholog of  Ceres SEQ ID NO 15176709 as cited in SEQ ID NO 1148
  misc_feature (1)..(1391): Ortholog of  Ceres SEQ ID NO 13658922 as cited in SEQ ID NO 66316
atattcgtttcttcgatctgtgttttttagatctgtaagagttcaaaatggttgatcaagttcagcaccccactattgcgcagaaagctgccgggcagttcatgcgttcaagtgtttccaaggacgttcaagtgggttaccagaggccttctatgtatcaaagacatgcaacctacggaaactactccaatgctgcatttcaatttcctccgacatcccggatgttggcaacaactgcttctcccgtgtttgtccaaaccccaggagagaaggggttcactaactttgcccttgactttctgatgggtggtgtttctgctgccgtctccaagactgctgctgctcctattgaacgtgttaagcttttgatccagaaccaggatgagatgattaaagctggcaggctttctgaaccctacaagggtattggtgactgtttcggcaggacgattaaggatgaaggttttggttctctatggagaggaaacactgccaatgttatccgttatttccccactcaggccttgaactttgccttcaaagattacttcaaaagacttttcaactttaagaaggacagagatggttactggaagtggtttgctggtaacttggcatctggaggagcagctggtgcctcttcccttctgtttgtgtactcccttgactatgcccgtacccgtctagctaatgatgccaaggctgcaaagaaaggaggtggtggaagacagtttgatggtcttgttgatgtctacagaaagacacttaagactgatggtattgctggtctgtaccgtggattcaacatctcatgtgttggtatcattgtctaccgtggtctgtactttggactctatgactctgtgaagcctgttctcctcactggtgacttacaggacagtttcttcgctagtttcgctcttggatgggttattaccaatggtgcgggtcttgcatcctaccccattgacactgtccgcagaagaatgatgatgacgtctggtgaagctgtcaagtacaagagttctttggacgccttcaagcagatcctcaagaatgaaggagccaagtcactcttcaagggagctggtgccaacattctgcgtgctgttgcaggtgctggtgtgctttccggttacgacaaattgcagctgattgtcttcggtaagaagtacggatcaggaggtgcctaagcattgcttcttcctccttttttcgattttaattgcggttttaaggcccgcaataaactgagatgttgatgaaattttttttgcttaagacttagggaggcatgtgccctaaaccaaattttatatcgttctgacgccaactttttttacttatggaataattcatgtttgagagagtttgttagactcttcgatttt

SEQ ID NO: 74972 - protein, 381 aa, Arabidopsis thaliana; identical to SEQ ID NO: 27757
  peptide (1)..(381): Ceres Seq. ID no. 5776953

SEQ ID NO: 74973 - protein, 363 aa, Arabidopsis thaliana; identical to SEQ ID NO: 27758
  peptide (1)..(363): Ceres Seq. ID no. 5776954

SEQ ID NO: 74974 - protein, 346 aa, Arabidopsis thaliana; identical to SEQ ID NO: 27759
  peptide (1)..(346): Ceres Seq. ID no. 5776955

SEQ ID NO: 74975 - DNA, 1312 bp, Arabidopsis thaliana
  misc_feature (1)..(1312): Ceres Seq. ID no. 5777008
  misc_feature (1)..(1312): Ortholog of  Ceres SEQ ID NO 15179641 as cited in SEQ ID NO 56414
  misc_feature (1)..(1312): Ortholog of  Ceres SEQ ID NO 14316049 as cited in SEQ ID NO 67036
  misc_feature (1)..(1312): Ortholog of  Ceres SEQ ID NO 14313252 as cited in SEQ ID NO 67134
  misc_feature (1)..(1312): Ortholog of  Ceres SEQ ID NO 14302220 as cited in SEQ ID NO 69121
aaacccaaaccctcactcactattttcacattctcttctctctcgatatcatctaaatctctctcgatctcaatttcgcaaaatggctgacaagaagatcagaatcggaatcaacggtttcggaagaatcggtcgtttggttgctagagttgttcttcagagggatgatgttgagctcgtcgctgttaacgatcctttcatcaccaccgagtacatgacatacatgtttaagtatgacagtgttcacggtcagtggaagcaccatgagcttaaggtgaaggatgacaaaactcttctcttcggtgagaagccagtcactgttttcggcatcaggaaccctgaggacatcccatggggtgaggctggagctgactttgttgttgagtctactggtgtcttcactgacaaagacaaggctgctgctcacttgaagggtggtgctaaaaaggttgtcatctctgccccaagcaaagatgcgcccatgttcgttgttggtgtcaacgagcacgagtacaagtctgaccttgacattgtttccaacgctagttgcaccactaactgccttgctcctcttgccaaggttattaatgacaggtttggcattgttgagggactcatgaccactgtccactctatcactgctactcagaagacagttgatggtccatcaatgaaggactggagaggtggaagagctgcttccttcaacattattcctagcagcactggtgccgccaaggctgttgggaaagtgttgccatccctcaatggaaaattgaccggaatgtctttccgtgttccaaccgttgatgtctcagttgttgatctcaccgttagacttgagaaagctgcaacatacgacgaaatcaagaaggccatcaaggaggaatctgaaggcaaaatgaagggaattttgggatacactgaggatgatgttgtgtctaccgactttgttggtgacaacaggtcaagcattttcgatgccaaggctgggattgcattgagcgacaagtttgtgaagttggtgtcatggtacgacaacgaatggggttacagttctcgtgtcgttgaccttatcgttcacatgtcaaaggcctaagcttacaccggcgagagtttgtgtgtggttgagttcgtactgttctgaataaaaaaaaggagaaaagaaaactcgagttgttatgttttttcactgattccatgcgcagtcatgagagtttgtagcttttgtctttttgctttctcttaatgtttccctgctttatttactgaaaccattggtttggttttttatgttaattaagtttttagt

SEQ ID NO: 74976 - protein, 365 aa, Arabidopsis thaliana
  peptide (1)..(365): Ceres Seq. ID no. 5777009
NPNPHSLFSHSLLSRYHLNLSRSQFRKMADKKIRIGINGFGRIGRLVARVVLQRDDVELVAVNDPFITTEYMTYMFKYDSVHGQWKHHELKVKDDKTLLFGEKPVTVFGIRNPEDIPWGEAGADFVVESTGVFTDKDKAAAHLKGGAKKVVISAPSKDAPMFVVGVNEHEYKSDLDIVSNASCTTNCLAPLAKVINDRFGIVEGLMTTVHSITATQKTVDGPSMKDWRGGRAASFNIIPSSTGAAKAVGKVLPSLNGKLTGMSFRVPTVDVSVVDLTVRLEKAATYDEIKKAIKEESEGKMKGILGYTEDDVVSTDFVGDNRSSIFDAKAGIALSDKFVKLVSWYDNEWGYSSRVVDLIVHMSKA

SEQ ID NO: 74977 - protein, 338 aa, Arabidopsis thaliana; identical to SEQ ID NO: 22717
  peptide (1)..(338): Ceres Seq. ID no. 5777010

SEQ ID NO: 74978 - protein, 294 aa, Arabidopsis thaliana; identical to SEQ ID NO: 22718
  peptide (1)..(294): Ceres Seq. ID no. 5777011

SEQ ID NO: 74979 - DNA, 1216 bp, Arabidopsis thaliana
  misc_feature (1)..(1216): Ceres Seq. ID no. 5787228
  misc_feature (1)..(1216): Ortholog of  Ceres SEQ ID NO 15179641 as cited in SEQ ID NO 56414
  misc_feature (1)..(1216): Ortholog of  Ceres SEQ ID NO 14302220 as cited in SEQ ID NO 69121
actcactattttcacattctcttctctctcgatatcatctaaatctctctcgatctcaatttcgcaaaatggctgacaagaagatcagaatcggaatcaacggtttcggaagaatcggtcgtttggttgctagagttgttcttcagagggatgatgttgagctcgtcgctgttaacgatcctttcatcaccaccgagtacatgacatacatgtttaagtatgacagtgttcacggtcagtggaagcaccatgagcttaaggtgaaggatgacaaaactcttctcttcggtgagaagccagtcactgttttcggcatcaggaaccctgaggacatcccatggggtgaggctggagctgactttgttgttgagtctactggtgtcttcactgacaaagacaaggctgctgctcacttgaagggtggtgctaaaaaggttgtcatctctgccccaagcaaagatgcgcccatgttcgttgttggtgtcaacgagcacgagtttggcattgttgagggactcatgaccactgtccactctatcactgctactcagaagacagttgatggtccatcaatgaaggactggagaggtggaagagctgcttccttcaacattattcctagcagcactggtgccgccaaggctgttgggaaagtgttgccatccctcaatggaaaattgaccggaatgtctttccgtgttccaaccgttgatgtctcagttgttgatctcaccgttagacttgagaaagctgcaacatacgacgaaatcaagaaggccatcaaggaggaatctgaaggcaaaatgaagggaattttgggatacactgaggatgatgttgtgtctaccgactttgttggtgacaacaggtcaagcattttcgatgccaaggctgggattgcattgagcgacaagtttgtgaagttggtgtcatggtacgacaacgaatggggttacagttctcgtgtcgttgaccttatcgttcacatgtcaaaggcctaagcttacaccggcgagagtttgtgtgtggttgagttcgtactgttctgaataaaaaaaaggagaaaagaaaactcgagttgttatgttttttcactgattccatgcgcagtcatgagagtttgtagcttttgtctttttgctttctcttaatgtttccctgctttatttactgaaaccattggtttggttttttatgttaattaagtttttagttc

SEQ ID NO: 74980 - protein, 332 aa, Arabidopsis thaliana
  peptide (1)..(332): Ceres Seq. ID no. 5787229
SLFSHSLLSRYHLNLSRSQFRKMADKKIRIGINGFGRIGRLVARVVLQRDDVELVAVNDPFITTEYMTYMFKYDSVHGQWKHHELKVKDDKTLLFGEKPVTVFGIRNPEDIPWGEAGADFVVESTGVFTDKDKAAAHLKGGAKKVVISAPSKDAPMFVVGVNEHEFGIVEGLMTTVHSITATQKTVDGPSMKDWRGGRAASFNIIPSSTGAAKAVGKVLPSLNGKLTGMSFRVPTVDVSVVDLTVRLEKAATYDEIKKAIKEESEGKMKGILGYTEDDVVSTDFVGDNRSSIFDAKAGIALSDKFVKLVSWYDNEWGYSSRVVDLIVHMSKA

SEQ ID NO: 74981 - protein, 310 aa, Arabidopsis thaliana
  peptide (1)..(310): Ceres Seq. ID no. 5787230
MADKKIRIGINGFGRIGRLVARVVLQRDDVELVAVNDPFITTEYMTYMFKYDSVHGQWKHHELKVKDDKTLLFGEKPVTVFGIRNPEDIPWGEAGADFVVESTGVFTDKDKAAAHLKGGAKKVVISAPSKDAPMFVVGVNEHEFGIVEGLMTTVHSITATQKTVDGPSMKDWRGGRAASFNIIPSSTGAAKAVGKVLPSLNGKLTGMSFRVPTVDVSVVDLTVRLEKAATYDEIKKAIKEESEGKMKGILGYTEDDVVSTDFVGDNRSSIFDAKAGIALSDKFVKLVSWYDNEWGYSSRVVDLIVHMSKA

SEQ ID NO: 74982 - protein, 266 aa, Arabidopsis thaliana
  peptide (1)..(266): Ceres Seq. ID no. 5787231
MTYMFKYDSVHGQWKHHELKVKDDKTLLFGEKPVTVFGIRNPEDIPWGEAGADFVVESTGVFTDKDKAAAHLKGGAKKVVISAPSKDAPMFVVGVNEHEFGIVEGLMTTVHSITATQKTVDGPSMKDWRGGRAASFNIIPSSTGAAKAVGKVLPSLNGKLTGMSFRVPTVDVSVVDLTVRLEKAATYDEIKKAIKEESEGKMKGILGYTEDDVVSTDFVGDNRSSIFDAKAGIALSDKFVKLVSWYDNEWGYSSRVVDLIVHMSKA

SEQ ID NO: 74983 - DNA, 1332 bp, Arabidopsis thaliana
  misc_feature (1)..(1332): Ceres Seq. ID no. 5787280
  misc_feature (1)..(1332): Ortholog of  Ceres SEQ ID NO 13504028 as cited in SEQ ID NO 56107
gatacatctcctcgtcgccgttcttcggattttcactcttctgctcgaaaggtctctcactcttctcttttttaatctattgaaattgaaacttcccttctcttctcttctcttctctgtagcactcctgcttctagtttagctgctcttcttcttctacttgctgcaacaactccaaatcatcatttctcttgttccaggcagtgcttgagaatcattgaagaaggtgatcgctggtgctgttttgataactcaaagccgttttgctgaaagagggttaccaaagttagaagctcaagaacttggagctgtgtcttctttttgtatcatgccatattttattcagaggcttttcaatacttgcaagtcatctctctcacctaatggtcctgtgtctgaggaggccttagacaaggttcgcaatgtcttggagaaaatcaagccgtctgatgttggtctcgaacaggaagctcaattggtgcgtaattggcctggtcctgggaacgagcgtaatggaaaccatcattctctgccagcaataaaataccttcagttacatgagtgtgacagcttctcgattggaattttctgcatgccacctgggtctatcataccacttcataatcatccaggcatgacagtgctaagcaagcttgtttatggttcaatgcacgttaagtcatatgattgggctgagcctgaccaatcagagctagacgatccattacaagcaagacccgcgaagctggtcaaggatattgatatgacttcccctagcccagcaaccactctatatccaacaaccggtggcaacattcattgtttcaaagccattactcattgtgcaatcttcgacatcttatctcctccatactcttctactcatggcagacactgcaactacttccgaaaatccccaatgctagacttacctggtgagattgaagtgatgaatggagaagtgatctcaaatgtgacatggcttgaagagtatcaacctccagataactttgtgatatggagagttccgtacagaggtccagtgattagaaaatgagaaatacaaaaaggattaaacatattaaaaaagagcagaaagagaaaggtgcttatgatcaggagaataattggtaaaccattcagaggctggctgcataatggtcgaggttcttacataattgtgaccacattaagttccagcctatgtcgttgtatgataatgattacttcactagtttaatattataattttttccccctatttttatatgcagctacacaaaaaattgctcataaacagtgttctatttagttatcataaattttgtttcc

SEQ ID NO: 74984 - protein, 242 aa, Arabidopsis thaliana; identical to SEQ ID NO: 40454
  peptide (1)..(242): Ceres Seq. ID no. 5787281

SEQ ID NO: 74985 - protein, 154 aa, Arabidopsis thaliana; identical to SEQ ID NO: 40455
  peptide (1)..(154): Ceres Seq. ID no. 5787282

SEQ ID NO: 74986 - protein, 140 aa, Arabidopsis thaliana; identical to SEQ ID NO: 40456
  peptide (1)..(140): Ceres Seq. ID no. 5787283

SEQ ID NO: 74987 - DNA, 777 bp, Arabidopsis thaliana
  misc_feature (1)..(777): Ceres Seq. ID no. 5787284
  misc_feature (1)..(777): Ortholog of  Ceres SEQ ID NO 13594501 as cited in SEQ ID NO 51327
atttcttgttattatccacgaacgaagaaaaacctagaaaacagttgaagaaagaaaatcacaagagaagccatggccggaattggaccgattactcaggattgggaaccagttgtgatccgcaagagagctcctaacgctgcagctaagcgcgacgagaagactgtcaacgccgctcgtcgaagcggcgccgatattgagaccgttcgaaaattcaatgctggatcgaacaaggctgcatcaagcggcacctccttgaacacaaagaagctagatgatgatactgagaacttatctcatgatcgtgtgcccactgaattgaagaaagccatcatgcaagctagaggggagaagaagctgactcagtcccaacttgcccatctgatcaatgagaagccacaagtgatccaagaatacgagtctgggaaagcaattccgaatcaacagatcctttcaaagctggagagggcacttggtgctaaactccgtggaaagaagtagaagtgtagaacaaagctcttaaaggtaacaacaaaagctgatcgcagtttctctccagtccacatgctttaccatatcctaaaaactatatctatgtatggtttggtttaatggcgtagtagtttgttgcgaggaatctttcatgatgtaagaaaaacaaagctgtttggaaccttttgtcattataaataatctcttctctttctttttcgtcatgtctcgtaaactttatctgccacggatgtatgttcttaaagaaattgaagattgaaattg

SEQ ID NO: 74988 - protein, 142 aa, Arabidopsis thaliana; identical to SEQ ID NO: 40131
  peptide (1)..(142): Ceres Seq. ID no. 5787285

SEQ ID NO: 74989 - DNA, 807 bp, Arabidopsis thaliana
  misc_feature (1)..(807): Ceres Seq. ID no. 5787298
  misc_feature (1)..(807): Ortholog of  Ceres SEQ ID NO 12556910 as cited in SEQ ID NO 39
  misc_feature (1)..(807): Ortholog of  Ceres SEQ ID NO 13594970 as cited in SEQ ID NO 56328
  misc_feature (1)..(807): Ortholog of  Ceres SEQ ID NO 12585079 as cited in SEQ ID NO 63137
acacgaatcttgtttagtaaaaagcgcagctgcaaaaaaaatcgagtagagaagaagtaggcagacaaagaagaagaagaagaagttctcggcgtgcttcaatggcgatatcagtagcagcttcgtcctctatggccgtgatggttccacgtgttcccgccgtatccacccgttgctccgccgtcccttatcttcctcctcgctcctttggccgatcctctttcaccgttccgttgaagcttgtttcagggaatggattgcaaaaagttgaattgttgaagacaagagcttcttcagaagagacctcgtccattgataccaacgaactcatcacagatttgaaggaaaagtgggatggtcttgagaacaaatctactgtacttatatatggaggaggagccattgttgctgtttggttatcttccattgttgttggtgccatcaactctgttcctctggtaacaacactctctatataattcttttgagattagaaaatgtgtaatgagtttgagttaaagtgatgtttccatttcttgtgtttgtagcttccgaaagttatggaacttgtcggtctcgggtacactggatggtttgtctacagataccttctcttcaagtcaagcagaaaggaattggctgaggatattgaatccttgaagaagaagatcgcaggaagcgaatagattcattttcaaataaaaccagctttctctctgtatgttttcctgtaatatcgtgttatattatacaatgtctctgtttcaacattgtatctgttgcatctgaaactattatcttggatcc

SEQ ID NO: 74990 - protein, 125 aa, Arabidopsis thaliana; identical to SEQ ID NO: 39021
  peptide (1)..(125): Ceres Seq. ID no. 5787299

SEQ ID NO: 74991 - protein, 115 aa, Arabidopsis thaliana; identical to SEQ ID NO: 39022
  peptide (1)..(115): Ceres Seq. ID no. 5787300

SEQ ID NO: 74992 - protein, 112 aa, Arabidopsis thaliana; identical to SEQ ID NO: 39023
  peptide (1)..(112): Ceres Seq. ID no. 5787301

SEQ ID NO: 74993 - DNA, 889 bp, Arabidopsis thaliana
  misc_feature (1)..(889): Ceres Seq. ID no. 5787381
  misc_feature (1)..(889): Ortholog of  Ceres SEQ ID NO 13594828 as cited in SEQ ID NO 56431
  misc_feature (1)..(889): Ortholog of  Ceres SEQ ID NO 14316363 as cited in SEQ ID NO 57222
  misc_feature (1)..(889): Ortholog of  Ceres SEQ ID NO 15177754 as cited in SEQ ID NO 57945
  misc_feature (1)..(889): Ortholog of  Ceres SEQ ID NO 13594354 as cited in SEQ ID NO 58082
  misc_feature (1)..(889): Ortholog of  Ceres SEQ ID NO 14316408 as cited in SEQ ID NO 58228
  misc_feature (1)..(889): Ortholog of  Ceres SEQ ID NO 13528075 as cited in SEQ ID NO 60188
  misc_feature (1)..(889): Ortholog of  Ceres SEQ ID NO 13600483 as cited in SEQ ID NO 0
attgttcttgaacatctccgaagctaactccgaacatcaaaactgtatcttcttctcctcctcctccttggcccttttcacaaagggacaaagagtttttgttgtcagtaacttcaagctctaagctatggctgtcaccaagatttatattgtgtactattccttgcacggccacgtcgagacaatggcacgagaggtacttcggggagtaaactctgttccagacgtggaagcaacactttggcaagtgccagagacattaccggagaaaatattggagaaagtgaaggccgttccaagaccggacgatgtgccggatattcgaccagaacaactggcggaagccgacggattcatgtttggctttccttctaggtttggagtgatggcatcacaggtcatgactttctttgacaatacaaatgatctctggactacacaggctctcgctgggaaacctgcaggaatcttctggagtacgggtttccacggtggaggccaagaactaactgcgttgacggcagtgacaaaactggctcatcacgggatgatatttgtaccggtaggatacacattcggtaaaagtatgtacgagatgggagaggtgaaaggtggttcgccttatggctcagggacttatgcagctgatggatcacgcgagccaacagagctggagattcagcaggcaaattaccatggcaagtactttgcaggaatagccaagaaactcaagaaacggtctcctgtctaaattctaaaccatatcaactctgtgtttcctatactaaacaatctgtaaatgtaaaggtgaacactgaaaataagatcgacatatacagagcaaaacaccggtgtgtaagctaatggtcaataaatcacattttccatt

SEQ ID NO: 74994 - protein, 207 aa, Arabidopsis thaliana; identical to SEQ ID NO: 30130
  peptide (1)..(207): Ceres Seq. ID no. 5787382

SEQ ID NO: 74995 - protein, 188 aa, Arabidopsis thaliana; identical to SEQ ID NO: 30131
  peptide (1)..(188): Ceres Seq. ID no. 5787383

SEQ ID NO: 74996 - protein, 131 aa, Arabidopsis thaliana; identical to SEQ ID NO: 30132
  peptide (1)..(131): Ceres Seq. ID no. 5787384

SEQ ID NO: 74997 - DNA, 1316 bp, Arabidopsis thaliana
  misc_feature (1)..(1316): Ceres Seq. ID no. 5787483
  misc_feature (1)..(1316): Ortholog of  Ceres SEQ ID NO 14311961 as cited in SEQ ID NO 51512
  misc_feature (1)..(1316): Ortholog of  Ceres SEQ ID NO 13664220 as cited in SEQ ID NO 61151
  misc_feature (1)..(1316): Ortholog of  Ceres SEQ ID NO 13597477 as cited in SEQ ID NO 65160
aacgccacaatcatggctttgttcttatctcctaaaaccatcactcttctcttcttctccctctccctcgcactctactgcagcatcgatcctttccaccactgcgccatttccgatttccccaatttcgtctctcacgaagttatctctccacgtcccgacgaagttccatgggagagagattcacaaaattcacttcagaaatcaaagattctgttttttaaccaaatccaaggtccagagagcgtcgcctttgattctctcggacgtggtccgtacacaggcgttgctgatggtagggttttgttttgggatggagagaaatggattgatttcgcttatacttcgagtaatcgatcggagatttgtgatccgaagccttctgctttgagttacttgaggaatgaacatatatgtggtcgtcctttaggtcttcgtttcgataagagaaccggagatttgtatatagctgatgcttatatgggacttttgaaagttggtcctgaaggtggtttagcaacgccgcttgtaactgaagctgaaggtgtgccgttggggtttactaatgatcttgacattgctgatgatggaactgtttactttacagatagcagcattagttaccagaggaggaacttcttgcagctcgttttctctggagacaatactgggagggttctaaagtatgatccagtagctaagaaagctgttgttttggtctcaaatcttcagtttccgaatggtgtctctatcagcagagacggttctttctttgtattctgcgaaggagatattggaagcctacgaagatactggttgaaaggcgagaaagctggaacgacagatgtgtttgcgtatttaccagggcatcctgataacgtaagaaccaaccaaaagggtgaattttgggtagcgcttcattgcagacgcaactactactcatacttaatggcaagatatcctaagctgaggatgttcatactgagactgccaatcactgcgagaactcactactcgttccagatagggttacggccgcacgggttggtggttaagtatagtcctgaagggaagcttatgcatgttttggaagatagtgaagggaaagttgtgagatcagtaagtgaagtggaagaaaaagatgggaagctttggatgggaagtgtgttgatgaactttgttgctgtctatgacctctgattacttgacctatacgtaaaccacttcactcagtttctagatttagcaaattcccaaaactgttaggtgtgtactgaaaaaatcaaacacttagcacaaacaaactcaatgttatt

SEQ ID NO: 74998 - protein, 399 aa, Arabidopsis thaliana; identical to SEQ ID NO: 39520
  peptide (1)..(399): Ceres Seq. ID no. 5787484

SEQ ID NO: 74999 - protein, 395 aa, Arabidopsis thaliana; identical to SEQ ID NO: 39521
  peptide (1)..(395): Ceres Seq. ID no. 5787485

SEQ ID NO: 75000 - protein, 239 aa, Arabidopsis thaliana; identical to SEQ ID NO: 39522
  peptide (1)..(239): Ceres Seq. ID no. 5787486

SEQ ID NO: 75001 - DNA, 1947 bp, Arabidopsis thaliana
  misc_feature (1)..(1947): Ceres Seq. ID no. 5787705
  misc_feature (1)..(1947): Ortholog of  Ceres SEQ ID NO 15177678 as cited in SEQ ID NO 0
tatttgggttcgtctctgttaggttcgtgagggaggggttgatctagttgttgttgttaggatttggatcgattcttttcatggaagggtgtctcttattgatacccgtacgagaagattattgtttagatttggattagagctaggttttttttgtttcaataggaaatgtctgttgctgatgttgctttaagcccgattcatagaggatcggcgtttgctgttggtggtttcggacaatcgacgacgacgcattactctgttaaatcggttttggtgttccttagtgtttctggttctacgatgcctatgctcatcttggagtctgattctattgctgaggttaaacttaggatccagacttgtaatggttttagggttagaagacagaaacttgttttcagtggtcgagagcttgccaggaatgcctcacgtgtgaaggactatggtgtgactggtggtagtgtgttgcatttggtgcttaagctctatgatcctttgcttgttactgtgattactacttgcggcaaggtctttcagtttcatgtggatcgtcgtagaaatgttgggtatttgaagaaacggatctctaaagagggtaaagggtttcctgaggttgatgatcaagagatcttgtttaaaggagagaagcttgatgacaacagaatcattgatgggatttgtaaagatggaaactctgtaatccatttgctggttaagaaatcggtggaagacacggtgaaaagagaagaagacactgctactggtaaagactccttgttagagccgttgttcttaaccccgatgtgaaattacctgaggttctcgaggatatgattgaccggacggttgatgggttgaacaaaggtagtccaccagtgagatcagctgaagggacaggagggacatatctgatgcaagattcttcaggtctcaactatgtatctgtgttcaagcctatggatgaagaaccaatggctgtgaacaatcctcagcagcttcctgtgtcatcagacggtcagggattgaagagaggaactagagtaggagaaggggcaacaagagaagttgcagcttacttgttagatcatccaaagagcggactaagatctgtgtctaaagaagttatgggttttgccggtgtgccaccaactgctatggtcagaagctcacacaaagtgtataactacccaaatgggttcagcagctgtgctacaaaagatgccaaagttggttctttgcaaatgttcatgaagaacaatggaagctgcgaagacatcggccctggagcgtttcctgttgaggaagtgcacaaaatctgtgtctttgacataagaatggcaaatgcagatcgacatgctggaaacatattgaccgggaaaagcgaagaaggaaaaactcttcttattcccatcgatcatggttattgtttgcccgagaattttgaagattgcacatttgagtggctctactggccgcaagcgaaactcccgttttctgcagacaccattgactacataaactctctagactccgaacaagacattgcgcttctgcaactccatggctggaatgttcctgaagctgtctcacgcactctacgtatctccacgatgctgctgaagaaaggcgttgagagaaacctgacgccatatcaaataggaagcgtaatgtgcagagaaacggtgaacaaagactcagcgattgaagagatagtgagagaagctcataactcggtgttgcctgcgtcaagcgaggctacgtttcttgaagcagtatctgtggccatggatcgtcgtctggacgagctaactaagtaaccagtcttaagtacataataaagtttggttttatggtatgtatatgtatatgatgtaatgtatctattatgtttgttttcgttgagaaaaacgttgataggctcttcttggataattttttccttcc

SEQ ID NO: 75002 - protein, 328 aa, Arabidopsis thaliana
  peptide (1)..(328): Ceres Seq. ID no. 5787706
MIDRTVDGLNKGSPPVRSAEGTGGTYLMQDSSGLNYVSVFKPMDEEPMAVNNPQQLPVSSDGQGLKRGTRVGEGATREVAAYLLDHPKSGLRSVSKEVMGFAGVPPTAMVRSSHKVYNYPNGFSSCATKDAKVGSLQMFMKNNGSCEDIGPGAFPVEEVHKICVFDIRMANADRHAGNILTGKSEEGKTLLIPIDHGYCLPENFEDCTFEWLYWPQAKLPFSADTIDYINSLDSEQDIALLQLHGWNVPEAVSRTLRISTMLLKKGVERNLTPYQIGSVMCRETVNKDSAIEEIVREAHNSVLPASSEATFLEAVSVAMDRRLDELTK

SEQ ID NO: 75003 - protein, 301 aa, Arabidopsis thaliana
  peptide (1)..(301): Ceres Seq. ID no. 5787707
MQDSSGLNYVSVFKPMDEEPMAVNNPQQLPVSSDGQGLKRGTRVGEGATREVAAYLLDHPKSGLRSVSKEVMGFAGVPPTAMVRSSHKVYNYPNGFSSCATKDAKVGSLQMFMKNNGSCEDIGPGAFPVEEVHKICVFDIRMANADRHAGNILTGKSEEGKTLLIPIDHGYCLPENFEDCTFEWLYWPQAKLPFSADTIDYINSLDSEQDIALLQLHGWNVPEAVSRTLRISTMLLKKGVERNLTPYQIGSVMCRETVNKDSAIEEIVREAHNSVLPASSEATFLEAVSVAMDRRLDELTK

SEQ ID NO: 75004 - protein, 286 aa, Arabidopsis thaliana
  peptide (1)..(286): Ceres Seq. ID no. 5787708
MDEEPMAVNNPQQLPVSSDGQGLKRGTRVGEGATREVAAYLLDHPKSGLRSVSKEVMGFAGVPPTAMVRSSHKVYNYPNGFSSCATKDAKVGSLQMFMKNNGSCEDIGPGAFPVEEVHKICVFDIRMANADRHAGNILTGKSEEGKTLLIPIDHGYCLPENFEDCTFEWLYWPQAKLPFSADTIDYINSLDSEQDIALLQLHGWNVPEAVSRTLRISTMLLKKGVERNLTPYQIGSVMCRETVNKDSAIEEIVREAHNSVLPASSEATFLEAVSVAMDRRLDELTK

SEQ ID NO: 75005 - DNA, 1268 bp, Arabidopsis thaliana
  misc_feature (1)..(1268): Ceres Seq. ID no. 5787750
  misc_feature (1)..(1268): Ortholog of  Ceres SEQ ID NO 13596803 as cited in SEQ ID NO 62267
tagagcttcataatccctagttgcccaaaaggattctgggttttgtgagaatgatgacgtcatgtcggaatatagatttaggtacgatgatgatggcatgtggttgtggccgtcgtcagtttccttcattagcgaagactgtttgtaagtttactagcagcaatagaagctatggcggtctggtgactctgtttgagctagtagctgttgatctgcagactttgaatgacaatcttttatcgattgttggtgcggaaaatccggttttgatatctgcggctgagcagattttcggagctggtggtaaaagaatgagaccgggtttggtattccttgtatcacatgccacggcggaattagcaggcctaaaggaactaacaacagaacaccggcgtttggctgagatcatcgagatgatacacactgcaagcttgatacacgacgatgtgttagacgagagtgacatgcgaagaggaaaggaaacagttcatgagcttttcggcacaagagtagcggtgctagctggagatttcatgtttgctcaagcgtcatggtacttagcaaatctcgagaatcttgaagttattaagctcatcagtcaggtgatcaaagactttgcaagcggagagataaagcaggcgtccagcttatttgactgcgacaccaagctcgacgagtacttactcaaaagtttctacaagacagcctctttagtggctgcgagcaccaaaggagctgccattttcagcagagttgagcctgatgtgacagaacaaatgtacgagtttgggaagaatctcggtctctctttccagatagttgatgatattttggatttcactcagtcgacagagcagctcgggaagccagcagggagtgatttggctaaaggtaacttaacagcacctgtgattttcgctctggagagggagccaaggctaagagagatcattgagtcagagttttgtgaggcgggttctctggaagaagcgattgaagcggtgacaaaaggtggggggattaagagagcacaagaattggctagggagaaagctgatgacgctataaagaatctacagtgtctacctcgaagtggcttcaggtcggctctagaagatatggtgttgtataacctcgaaagaattgattagctttccaaaagaagttggaaacactgagacatgcttatagacttatagtacagtaaaacacacacaaaagaggaatgattgtaactcctatttcaaaagtaataacacatgatttcg

SEQ ID NO: 75006 - protein, 366 aa, Arabidopsis thaliana
  peptide (1)..(366): Ceres Seq. ID no. 5787751
MMTSCRNIDLGTMMMACGCGRRQFPSLAKTVCKFTSSNRSYGGLVTLFELVAVDLQTLNDNLLSIVGAENPVLISAAEQIFGAGGKRMRPGLVFLVSHATAELAGLKELTTEHRRLAEIIEMIHTASLIHDDVLDESDMRRGKETVHELFGTRVAVLAGDFMFAQASWYLANLENLEVIKLISQVIKDFASGEIKQASSLFDCDTKLDEYLLKSFYKTASLVAASTKGAAIFSRVEPDVTEQMYEFGKNLGLSFQIVDDILDFTQSTEQLGKPAGSDLAKGNLTAPVIFALEREPRLREIIESEFCEAGSLEEAIEAVTKGGGIKRAQELAREKADDAIKNLQCLPRSGFRSALEDMVLYNLERID

SEQ ID NO: 75007 - protein, 365 aa, Arabidopsis thaliana
  peptide (1)..(365): Ceres Seq. ID no. 5787752
MTSCRNIDLGTMMMACGCGRRQFPSLAKTVCKFTSSNRSYGGLVTLFELVAVDLQTLNDNLLSIVGAENPVLISAAEQIFGAGGKRMRPGLVFLVSHATAELAGLKELTTEHRRLAEIIEMIHTASLIHDDVLDESDMRRGKETVHELFGTRVAVLAGDFMFAQASWYLANLENLEVIKLISQVIKDFASGEIKQASSLFDCDTKLDEYLLKSFYKTASLVAASTKGAAIFSRVEPDVTEQMYEFGKNLGLSFQIVDDILDFTQSTEQLGKPAGSDLAKGNLTAPVIFALEREPRLREIIESEFCEAGSLEEAIEAVTKGGGIKRAQELAREKADDAIKNLQCLPRSGFRSALEDMVLYNLERID

SEQ ID NO: 75008 - protein, 354 aa, Arabidopsis thaliana
  peptide (1)..(354): Ceres Seq. ID no. 5787753
MMMACGCGRRQFPSLAKTVCKFTSSNRSYGGLVTLFELVAVDLQTLNDNLLSIVGAENPVLISAAEQIFGAGGKRMRPGLVFLVSHATAELAGLKELTTEHRRLAEIIEMIHTASLIHDDVLDESDMRRGKETVHELFGTRVAVLAGDFMFAQASWYLANLENLEVIKLISQVIKDFASGEIKQASSLFDCDTKLDEYLLKSFYKTASLVAASTKGAAIFSRVEPDVTEQMYEFGKNLGLSFQIVDDILDFTQSTEQLGKPAGSDLAKGNLTAPVIFALEREPRLREIIESEFCEAGSLEEAIEAVTKGGGIKRAQELAREKADDAIKNLQCLPRSGFRSALEDMVLYNLERID

SEQ ID NO: 75009 - DNA, 1398 bp, Arabidopsis thaliana
  misc_feature (1)..(1398): Ceres Seq. ID no. 5787997
  misc_feature (1)..(1398): Ortholog of  Ceres SEQ ID NO 13596216 as cited in SEQ ID NO 68515
atagatacgcattggttttttcttttttgaagattctcgcttcttactacatgtgtatcaatcgatctctacccagattctccggaggagctttgagtcttgtcgtatagatgcagtgaaggtcctttgttagatgggaaaacttgttcttgagttgtcaaaagagaatcagttggagactaccgattgtggagtcagtgatcacggttctccacctatcaagaatgaagaacatgaggcaccacgttacagttcagacaaagacacgggtttaccaacttgccgtgtatgccagtgtgcagaatctgatagaagaggagatgctgctttagggtttttgggaattactcctccggtttcagaacctcgtagaagcaatgcgggtgaagaaaccgttgatcagagaagctcggttgtcaaatctagcggattcatcgaactgataagtcctgatggagaagtttttgtttgtgcaaacgacgatatagaaatgggagcgtggcagcatcgagataagttgctagaacttggatgttcttgcaagaatgatctcgctttggtacactatgcttgtgcattgaaatggtttgtcaaccacggatcaactgtttgtgagatatgcggaaaaaccacggagaatataagaacagttgatttcaacaaagtggttatcgccttaaaagattacgcagcgctaagagaaagaacagcggatggagatccaaatcctgtagtggttaacaacaacaccagttcgtcagggattgatcctgatgcagttgcagccattcgaaggcaacgacttagtgagatatcgttatggtttggtcctcattgttcaaccaacaacaacaatagtagtaattccgctgctgcagggacggcttcttctcaggttacatctgaacaacctgtgggtatagtaaactttgatatcttgcctatggaaagccgtgcgactaaatgggcggtggaaggtaccggaatactacttgcaaccggattactcacagttactttggcttggctcattgctcctcgtgtcggaaagagaactgcaaagagtggtctacacatacttctaggtggtctctgtgctttaacagtagtcatcttcttcagattcgttgtgctgacaagaatcaggtacggaccagcacgttactgggcaatattgttcgtcttctggtttcttgtgtttggcatttgggcttcacgttcacacgcttctcactcctccacatgataaattctccatcatccttcaagacacaaaatgtactctttttggtctctgtcaatatcatgtacgttattctctttcaagacacaaaatgtacaattaattactcttatcaaaaagaaaaaaaggggtgaaactgaatgttatcatctcac

SEQ ID NO: 75010 - protein, 370 aa, Arabidopsis thaliana
  peptide (1)..(370): Ceres Seq. ID no. 5787998
MGKLVLELSKENQLETTDCGVSDHGSPPIKNEEHEAPRYSSDKDTGLPTCRVCQCAESDRRGDAALGFLGITPPVSEPRRSNAGEETVDQRSSVVKSSGFIELISPDGEVFVCANDDIEMGAWQHRDKLLELGCSCKNDLALVHYACALKWFVNHGSTVCEICGKTTENIRTVDFNKVVIALKDYAALRERTADGDPNPVVVNNNTSSSGIDPDAVAAIRRQRLSEISLWFGPHCSTNNNNSSNSAAAGTASSQVTSEQPVGIVNFDILPMESRATKWAVEGTGILLATGLLTVTLAWLIAPRVGKRTAKSGLHILLGGLCALTVVIFFRFVVLTRIRYGPARYWAILFVFWFLVFGIWASRSHASHSST

SEQ ID NO: 75011 - protein, 251 aa, Arabidopsis thaliana; identical to SEQ ID NO: 25730
  peptide (1)..(251): Ceres Seq. ID no. 5787999

SEQ ID NO: 75012 - DNA, 924 bp, Arabidopsis thaliana
  misc_feature (1)..(924): Ceres Seq. ID no. 5788084
  misc_feature (1)..(924): Ortholog of  Ceres SEQ ID NO 13592961 as cited in SEQ ID NO 20522
  misc_feature (1)..(924): Ortholog of  Ceres SEQ ID NO 13595998 as cited in SEQ ID NO 68161
ttttgaaaagtttctaacctctaggccaccactcatggctactctgttcatgaagctggtgagcttctttctaattctatctactttttgtctcactactgtgaactcggagccacagtgccataatttcaaatcgatcattagtttcggcgattctattgccgacactggaaacttgctcgccctctccgatcctaccaatctccctaaggtcgcgtttctaccgtacggagaaaccttcttccaccatccgaccggccgtttctcaaacggccgcctcatcatcgatttcattgctgaatttttgggttttccgcttgtgcctcctttttacggatctcaaaatgcaaattttgagaaaggagttaattttgcggttggaggagcaacggcactggaacgttcctttcttgaagagagaggcattcattttccttacaccaacgttagtttagccgtacagcttagtagcttcaaggagagtttgcctaacttatgtgtctctccttcagactgcagagatatgatagaaaattctttgattctcatgggagaaattggagggaatgactataactacgcattctttgtgggcaaaaacattgaagagatcaaagagctggttccgcttgttattgaaactatctcttctgcaatcacgggagttgattggtatgggggggaaaacatttctggtgcccggagagttcccgctcggatgctcagtagcctatttgagtttatatcaaacatcaaacatagaagaatatgatcctctaacaggatgtttgaaatggctgaacaagttttcagaataccacgacgagcagcttcaagcagaactcaacagacttcagaagttgtaccctcatgtcaacatcatatacgctgactactacaacacactgttgcgtcttgcccaag

SEQ ID NO: 75013 - protein, 256 aa, Arabidopsis thaliana
  peptide (1)..(256): Ceres Seq. ID no. 5788085
FEKFLTSRPPLMATLFMKLVSFFLILSTFCLTTVNSEPQCHNFKSIISFGDSIADTGNLLALSDPTNLPKVAFLPYGETFFHHPTGRFSNGRLIIDFIAEFLGFPLVPPFYGSQNANFEKGVNFAVGGATALERSFLEERGIHFPYTNVSLAVQLSSFKESLPNLCVSPSDCRDMIENSLILMGEIGGNDYNYAFFVGKNIEEIKELVPLVIETISSAITGVDWYGGENISGARRVPARMLSSLFEFISNIKHRRI

SEQ ID NO: 75014 - protein, 245 aa, Arabidopsis thaliana
  peptide (1)..(245): Ceres Seq. ID no. 5788086
MATLFMKLVSFFLILSTFCLTTVNSEPQCHNFKSIISFGDSIADTGNLLALSDPTNLPKVAFLPYGETFFHHPTGRFSNGRLIIDFIAEFLGFPLVPPFYGSQNANFEKGVNFAVGGATALERSFLEERGIHFPYTNVSLAVQLSSFKESLPNLCVSPSDCRDMIENSLILMGEIGGNDYNYAFFVGKNIEEIKELVPLVIETISSAITGVDWYGGENISGARRVPARMLSSLFEFISNIKHRRI

SEQ ID NO: 75015 - protein, 240 aa, Arabidopsis thaliana
  peptide (1)..(240): Ceres Seq. ID no. 5788087
MKLVSFFLILSTFCLTTVNSEPQCHNFKSIISFGDSIADTGNLLALSDPTNLPKVAFLPYGETFFHHPTGRFSNGRLIIDFIAEFLGFPLVPPFYGSQNANFEKGVNFAVGGATALERSFLEERGIHFPYTNVSLAVQLSSFKESLPNLCVSPSDCRDMIENSLILMGEIGGNDYNYAFFVGKNIEEIKELVPLVIETISSAITGVDWYGGENISGARRVPARMLSSLFEFISNIKHRRI

SEQ ID NO: 75016 - DNA, 880 bp, Arabidopsis thaliana
  misc_feature (1)..(880): Ceres Seq. ID no. 5788132
  misc_feature (1)..(880): Ortholog of  Ceres SEQ ID NO 13600601 as cited in SEQ ID NO 497
  misc_feature (1)..(880): Ortholog of  Ceres SEQ ID NO 13664283 as cited in SEQ ID NO 61283
  misc_feature (1)..(880): Ortholog of  Ceres SEQ ID NO 12635513 as cited in SEQ ID NO 0
  misc_feature (1)..(880): Ortholog of  Ceres SEQ ID NO 15179044 as cited in SEQ ID NO 0
  misc_feature (1)..(880): Ortholog of  Ceres SEQ ID NO 15179333 as cited in SEQ ID NO 0
aaaaaaaaataaaacagagcaaaatggccgtagttttacgtggaggcatcaccggaggatttcttcaccatcgtcgtgacgcttcatccgtcatcacaagaagaatctcatccgtcaaagccgcaggaggaggcatcaacccaacggtggctgttgaacgtgccacgtggctacctggactaaaccctcctccttatcttgatggaaatttagctggagattacgggtttgacccactcgggttaggagaggatccggaaagcttgaagtggtatgttcaagcagagcttgttcactctcgtttcgctatgctcggtgttgcaggaatactcttcactgatctccttcggaccacagggattcgtaatttaccggtttggtatgaagctggagctgtgaaatttgattttgctagtacaaaaactctcatagttgtacagtttctacttatggggtttgctgagactaaaaggtatatggattttgtctctccgggatcacaagccaaagaaggatcgtttttctttggacttgaagcagcactcgaggggctcgagcctggatatcccggaggaccgcttttaaacccattaggccttgctaaggatgttcaaaatgctcatgactggaagcttaaggagatcaagaacggtcgtctagcgatgatggcgatgctcgggttctttgttcaagcctctgtgactcacactggccctattgataaccttgttgagcatctctctaatccatggcataagaccatcattcaaaccctcttcacctctacatcttaggtacattcttttgtaatgaaaaattcgattattcgacaagtgtatcaatacctttatttcatttaagagtacaacaaatctgttct

SEQ ID NO: 75017 - protein, 263 aa, Arabidopsis thaliana
  peptide (1)..(263): Ceres Seq. ID no. 5788133
KKIKQSKMAVVLRGGITGGFLHHRRDASSVITRRISSVKAAGGGINPTVAVERATWLPGLNPPPYLDGNLAGDYGFDPLGLGEDPESLKWYVQAELVHSRFAMLGVAGILFTDLLRTTGIRNLPVWYEAGAVKFDFASTKTLIVVQFLLMGFAETKRYMDFVSPGSQAKEGSFFFGLEAALEGLEPGYPGGPLLNPLGLAKDVQNAHDWKLKEIKNGRLAMMAMLGFFVQASVTHTGPIDNLVEHLSNPWHKTIIQTLFTSTS

SEQ ID NO: 75018 - protein, 256 aa, Arabidopsis thaliana; identical to SEQ ID NO: 37618
  peptide (1)..(256): Ceres Seq. ID no. 5788134

SEQ ID NO: 75019 - protein, 161 aa, Arabidopsis thaliana; identical to SEQ ID NO: 37619
  peptide (1)..(161): Ceres Seq. ID no. 5788135

SEQ ID NO: 75020 - DNA, 630 bp, Arabidopsis thaliana
  misc_feature (1)..(630): Ceres Seq. ID no. 5788149
  misc_feature (1)..(630): Ortholog of  Ceres SEQ ID NO 15172660 as cited in SEQ ID NO 68708
agctccggcgccaccattaaaatctctcgatctctatctgcgaaatttcacggtatttgaaatggcgacagttccaggacaattgatctgggagatcgtgaagaacaacaactgtttcttggtgaagcagttcggtagaggaaactctaaggttcaattcagcaaggagactaacaacctcaccaacgttcactcttacaagcactctggtcttgcaaacaaaaagactgtgaccatccaggccgctgacaaggaccaagctgttgtgctcgccaccaccaagaccaagaagcagaacaagcctaagctctctgtcaacaagtctatcctcaagaaggaattccccaggatgtcaaaggctgttgctaaccaggtggtggacaactactacaggccggacttgaagaaagctgcacttgctagactcagcgccatcagcaaaggtctcagggttgccaagtccggtgccaagcaaagaaacagacaagcttaagcttcttctttcacaatctgttttttttgaagtaaaagattttgttgaacaggttttatttaagttgttgctttgaagttgaaccataatgctattctcctttttcattatccttattataaaggagttagaagttt

SEQ ID NO: 75021 - protein, 163 aa, Arabidopsis thaliana
  peptide (1)..(163): Ceres Seq. ID no. 5788150
APAPPLKSLDLYLRNFTVFEMATVPGQLIWEIVKNNNCFLVKQFGRGNSKVQFSKETNNLTNVHSYKHSGLANKKTVTIQAADKDQAVVLATTKTKKQNKPKLSVNKSILKKEFPRMSKAVANQVVDNYYRPDLKKAALARLSAISKGLRVAKSGAKQRNRQA

SEQ ID NO: 75022 - protein, 143 aa, Arabidopsis thaliana [sequence omitted]

SEQ ID NO: 75023 - DNA, 737 bp, Arabidopsis thaliana
  misc_feature (1)..(737): Ceres Seq. ID no. 5788156
  misc_feature (1)..(737): Ortholog of  Ceres SEQ ID NO 15172660 as cited in SEQ ID NO 68708
ccggcgccaccattaaaatctctcgatctctatctgcgaaatttcacggtgagcttagtattactctcaattgttctcagtaggtatttgaaatggcgacagttccaggacaattgatctgggagatcgtgaagaacaacaactgtttcttggtgaagcagttcggtagaggaaactctaaggttcaattcagcaaggagactaacaacctcaccaacgttcactcttacaagcactctggtcttgcaaacaaaaagactgtgaccatccaggccgctgacaaggaccaagctgttgtgctcgccaccaccaagaccaagaagcagaacaagcctaagctctctgtcaacaagtctatcctcaagaaggaattccccaggatgtcaaaggctgttgctaaccaggtggtggacaactactacaggccggacttgaagaaagctgcacttgctagactcagcgccatcagcaaaggtctcagggttgccaagtccggtgccaagcaaagaaacagacaagcttaagcttcttctttcacaatctgttttttttgaagtaaaagattttgttgaacaggttttatttaagttgttgctttgaagttgaaccataatgctattctcctttttcattatccttattataaaggagttagaagtttatcttgttatgcttgatgtttctggtgtgcttgtgttacattttgttagatccttttatcgaatcaagaactttct

SEQ ID NO: 75024 - protein, 143 aa, Arabidopsis thaliana [sequence omitted]

SEQ ID NO: 75025 - DNA, 762 bp, Arabidopsis thaliana
  misc_feature (1)..(762): Ceres Seq. ID no. 5788185
  misc_feature (1)..(762): Ortholog of  Ceres SEQ ID NO 13589868 as cited in SEQ ID NO 55521
  misc_feature (1)..(762): Ortholog of  Ceres SEQ ID NO 15226426 as cited in SEQ ID NO 55985
  misc_feature (1)..(762): Ortholog of  Ceres SEQ ID NO 14312250 as cited in SEQ ID NO 59168
  misc_feature (1)..(762): Ortholog of  Ceres SEQ ID NO 15173326 as cited in SEQ ID NO 63793
  misc_feature (1)..(762): Ortholog of  Ceres SEQ ID NO 12617659 as cited in SEQ ID NO 65286
  misc_feature (1)..(762): Ortholog of  Ceres SEQ ID NO 12780566 as cited in SEQ ID NO 65822
  misc_feature (1)..(762): Ortholog of  Ceres SEQ ID NO 15179979 as cited in SEQ ID NO 0
gaagaagaaaagatctgagaggtggtcgaatgatccaagagaagaagaacaatctctcttagatcgtttgatctgatccaatcgaagaagaagatgggaatcttattcacgcggatgttctcttccgtctttggtaacaaagaagctcgaatcctcgtcctcggtctcgacaatgctggaaaaaccacaatcctctatcggcttcagatgggggaagttgtctctacgattccgactattggatttaacgttgagactgtgcagtacaacaatatcaagtttcaggtctgggatttaggtggacaaacaagcatcaggccatactggcgatgctatttcccgaatacacaagcagtgatctatgttgttgactcgagtgatacagatagaatcggggtggcgaaagaggagtttcatgcaattttagaggaagatgaattgaaaggtgcggtggttctgatatttgcaaacaagcagaagccttggagttgcataagataaagagtcgtcaatgggcaatcttcaaaacttgtgctgtgaaaggcgagggacttttcgagggattggactggttgagtaatacattgaagtcgggaagtggctaaaatcatcgtcatacaccaatctgtcacatttctcaagagtgtaactttgatcatttttacttattggtttgtttagtatcttttttttatcttagttcttcatcttaaagagttaatatcaatgacatgttcacttaatattctctttttgttgttt

SEQ ID NO: 75026 - protein, 135 aa, Arabidopsis thaliana; identical to SEQ ID NO: 41723
  peptide (1)..(135): Ceres Seq. ID no. 5788186

SEQ ID NO: 75027 - protein, 128 aa, Arabidopsis thaliana; identical to SEQ ID NO: 41724
  peptide (1)..(128): Ceres Seq. ID no. 5788187

SEQ ID NO: 75028 - protein, 97 aa, Arabidopsis thaliana; identical to SEQ ID NO: 41725
  peptide (1)..(97): Ceres Seq. ID no. 5788188

SEQ ID NO: 75029 - DNA, 1138 bp, Arabidopsis thaliana
  misc_feature (1)..(1138): Ceres Seq. ID no. 5788253
  misc_feature (1)..(1138): Ortholog of  Ceres SEQ ID NO 15169372 as cited in SEQ ID NO 58778
aaaatatttgcagaggaagagagagagagagagagagatcatgggaatatatggagtgatgacagggaaaaaaggaaagagtgggtttggatctgcttctactgctgaagatgttactcaagccattgatgccagtcatctcactgccatcatcacaggtggaacaagtgggattggattggaggcagctagagtgttagcaatgagaggagctcatgtcatcattgccgcaagaaacccaaaagctgctaatgagtctaaagagatgattcttcagatgaaccctaatgctcgcgtcgactatctccagatcgatgtctcttccatcaaatcagtcagatccttcgttgatcagtttcttgcccttaatgttcctctcaacattctcataaacaatgcaggtgttatgttttgtcctttcaagctcaccgaagatgggattgaatcacaattcgcaacaaaccacattggtcattttctgttgacgaatctgcttctggacaaaatgaaaagtaccgcaagagaaagtggagtccaaggaaggattgtgaatctgtcatctattgctcatacttatacttactctgaaggtatcaagttccaaggcatcaatgaccctgctgggatattcggagagaagggcttatggacagtccaaactctcaaacttgttgcactccaatgcactctctcgtagactacaggaagaaggtgtgaacatcactataaattcggtgcaccctggtcttgtcaccactaatctctttcgctactccggttttagcatgaaggtcttcagggctatgactttcctcttttggaaaaatatacctcagggagcagcaacaacatgctacgttgcacttcatccagatctcgaaggcgtcaccggaaagtatttcggcgactgtaacatcgttgctccgagcaaatttgctaccaacaattctctcgccgataaactttgggatttcagtgtctttctcatcgattctatctctaaataatctatcatcatcaagacaaattcttagacattcaaaatttatttatccttcttgatattgttacattaatgccatatctttttcaccaccacatatttctttatggaataccataatttagaaatcattat

SEQ ID NO: 75030 - protein, 231 aa, Arabidopsis thaliana
  peptide (1)..(231): Ceres Seq. ID no. 5788254
KYLQRKREREREIMGIYGVMTGKKGKSGFGSASTAEDVTQAIDASHLTAIITGGTSGIGLEAARVLAMRGAHVIIAARNPKAANESKEMILQMNPNARVDYLQIDVSSIKSVRSFVDQFLALNVPLNILINNAGVMFCPFKLTEDGIESQFATNHIGHFLLTNLLLDKMKSTARESGVQGRIVNLSSIAHTYTYSEGIKFQGINDPAGIFGEKGLWTVQTLKLVALQCTLS

SEQ ID NO: 75031 - protein, 218 aa, Arabidopsis thaliana
  peptide (1)..(218): Ceres Seq. ID no. 5788255
MGIYGVMTGKKGKSGFGSASTAEDVTQAIDASHLTAIITGGTSGIGLEAARVLAMRGAHVIIAARNPKAANESKEMILQMNPNARVDYLQIDVSSIKSVRSFVDQFLALNVPLNILINNAGVMFCPFKLTEDGIESQFATNHIGHFLLTNLLLDKMKSTARESGVQGRIVNLSSIAHTYTYSEGIKFQGINDPAGIFGEKGLWTVQTLKLVALQCTLS

SEQ ID NO: 75032 - protein, 212 aa, Arabidopsis thaliana
  peptide (1)..(212): Ceres Seq. ID no. 5788256
MTGKKGKSGFGSASTAEDVTQAIDASHLTAIITGGTSGIGLEAARVLAMRGAHVIIAARNPKAANESKEMILQMNPNARVDYLQIDVSSIKSVRSFVDQFLALNVPLNILINNAGVMFCPFKLTEDGIESQFATNHIGHFLLTNLLLDKMKSTARESGVQGRIVNLSSIAHTYTYSEGIKFQGINDPAGIFGEKGLWTVQTLKLVALQCTLS

SEQ ID NO: 75033 - DNA, 1593 bp, Arabidopsis thaliana
  misc_feature (1)..(1593): Ceres Seq. ID no. 5788407
  misc_feature (1)..(1593): Ortholog of  Ceres SEQ ID NO 13659033 as cited in SEQ ID NO 66372
  misc_feature (1)..(1593): Ortholog of  Ceres SEQ ID NO 12625899 as cited in SEQ ID NO 69079
actacaccataaaaagagaaaggcgtaaaaaggaaaaagaaaaaaaaaggtaaacgttataataaaagaaaaaaaaaaatatgacaacggcgttgttttcaccgtctaaccgtagaaaacgccgtctcacacacttcttcttcaccgtactcgctttcatcttactcgccgccttcatctacggccacgatttcatctctttctctcgtcgatctcttcactctccgacgatcgtccaccaatccgcaatcgtcgttgtagttgacgaacctcctccgcctccaccaacatctcctcctccgccttctcctccaccaccgtctcctccaccaccatctcctccaccgccatctcctccgccacctgcttttgcagtaggtaaaacgccggaaggatgcgatgtcttcaaagggaattgggtcaaagactggtcaacgcgtccactttacagagaatccgagtgtccgtacattcagccgcagctcacttgccgcacgcatggccgtcccgatagtgattatcagtcatggagatggcgacctgattcctgctcacttccttcgttagtctctctctccgttcgattttgaatgcgattcggtgattgatcttcagatcggatttgctctgtggttgttgaatgtgttaataggtttaatgcgacggtgatgttggagagcttaagagggaagaagatgatgttcgttggagattcgttgaacagaggaatgtatgtttctctcatctgtcttcttcattcacaaatcccagagaactccaaatccatggatactttcggatcactcaccgtcttctctctcaaggattacaatgcaacgattgagttctattgggcaccgtttcttctagaatcgaattcagataacgcaacagttcatagagtatcagatcgaattgtgaggaaaggatcgatcaacaaacacggtaggcattggcgaggggctgatatagttgtgttcaacacatacttgtggtggaggactggcttcaaaatgaagatcttgttctttcaaggatgagaagaagagaatcgttgagatggagagtgaagatgcttatagaatggcgttgaagactatggttaaatgggtgaagaagaatatggatccattgaagacgagggttttctttgctaccatgtctcctactcattacaagggcgaggattggggaggcgaacaaggaaaaaattgttacaatcaaacgacaccgatccaagacatgaaccattggccatcagactgcagcaaaaccttaatgaaagtgataggagaggaattagaccaaagagcagagtttccggtgacggtacttaacattacacaactctctggctatcggaaagacgcgcacacgtcaatctacaagaagcaatggagcccattgacgaaggagcagctagcaaatccggctagctactcagactgtatacattggtgcttgcctggtcttcaagatacttggaacgagcttttctttgccaagttattttatccatgattcttttctctaaattcaagatttttttagaactgtaattgtaaattatggttataatttttgttaattacg

SEQ ID NO: 75034 - protein, 169 aa, Arabidopsis thaliana
  peptide (1)..(169): Ceres Seq. ID no. 5788408
MTTALFSPSNRRKRRLTHFFFTVLAFILLAAFIYGHDFISFSRRSLHSPTIVHQSAIVVVVDEPPPPPPTSPPPPSPPPPSPPPPSPPPPSPPPPAFAVGKTPEGCDVFKGNWVKDWSTRPLYRESECPYIQPQLTCRTHGRPDSDYQSWRWRPDSCSLPSLVSLSVRF

SEQ ID NO: 75035 - protein, 153 aa, Arabidopsis thaliana; identical to SEQ ID NO: 39788
  peptide (1)..(153): Ceres Seq. ID no. 5788409

SEQ ID NO: 75036 - protein, 145 aa, Arabidopsis thaliana; identical to SEQ ID NO: 39789
  peptide (1)..(145): Ceres Seq. ID no. 5788410

SEQ ID NO: 75037 - DNA, 1698 bp, Arabidopsis thaliana
  misc_feature (1)..(1698): Ceres Seq. ID no. 5788469
  misc_feature (1)..(1698): Ortholog of  Ceres SEQ ID NO 14315257 as cited in SEQ ID NO 52552
  misc_feature (1)..(1698): Ortholog of  Ceres SEQ ID NO 13597574 as cited in SEQ ID NO 64677
  misc_feature (1)..(1698): Ortholog of  Ceres SEQ ID NO 13597843 as cited in SEQ ID NO 64850
  misc_feature (1)..(1698): Ortholog of  Ceres SEQ ID NO 13597678 as cited in SEQ ID NO 65375
  misc_feature (1)..(1698): Ortholog of  Ceres SEQ ID NO 13596180 as cited in SEQ ID NO 67941
  misc_feature (1)..(1698): Ortholog of  Ceres SEQ ID NO 13591190 as cited in SEQ ID NO 68044
  misc_feature (1)..(1698): Ortholog of  Ceres SEQ ID NO 13595961 as cited in SEQ ID NO 68223
  misc_feature (1)..(1698): Ortholog of  Ceres SEQ ID NO 14313563 as cited in SEQ ID NO 68700
atgggaggctttcgtggggaacaagcaagagaaatcgccaaagcgttagatcgaagcagccaccgttttttgtggtctcttcgtcgagcatcttcgaatatttttaaagaatctcaaaaagagtctatgaatatcgaagaagttctcccattcagtcaaaaacaagaaacaggagcttgtcttctccccgagattagaagaaggactaacatgaaatttgagcttgttttcatcccctatcccggaatcggtcatctccgatcaacggtagaaatggcaaagctactagtggaccgtgaaactcgtctctctatctccgttatcatccttcctttcatttccgaaggcgaagtcggtgcttccgattacatcgcagccctctccgcctcatccaacaaccgcctccgctacgaagttatctccgccgtagatcaaccaaccatcgagatgacgacaattgaaatccatatgaagaaccaagaaccaaaggtgagaagcaccgttgcaaaactccttgaagactattcgtctaaaccggactcgccgaagatcgctggctttgttctagacatgttttgcacttcgatggtagatgtagcgaacgagtttggtttcccgagttatatgttttacacctccagtgccgggattctctcagttacatatcatgttcaaatgttgtgcgatgagaacaagtacgatgttagtgaaaatgattatgcagactcggaagctgtgttgaactttccgagtttgagtcgtccttatccggtgaagtgtcttcctcacgctctggcagctaatatgtggctcccggtgtttgtaaaccaagcgagaaagtttagggagatgaaaggtattttggtaaatactgttgctgagcttgaaccttatgtgttaaagtttctttctagtagtgatactcctcctgtttatcctgttggaccattgttgcatcttgagaaccaacgtgatgattctaaggacgagaaacggttggagattatacggtggttggatcagcaaccaccaagttcggttgtgtttctctgctttgggagcatgggaggcttcggtgaggaacaagtaagagagatcgcaatcgcgttagagcgaagtgggcaccggtttctctggtctcttcgtcgcgcatctccgaatatattcaaagaacttccaggagagtttactaatctagaggaagttctcccggaaggattctttgatcgaacgaaagatataggtaaagtgattggatgggctccacaagtagccgttcttgcgaatccggctataggaggtttcgtaactcattgcgggtggaattctacgctagagagtctttggtttggtgttccaacagctgcatggccgttatacgcagagcagaagttcaatgctttcttaatggtggaggagcttggattggcggtggagataaggaagtattggcgaggtgaacatttggcgggattaccgacggctactgtgacagcggaggagatagagaaagcaatcatgtgtctaatggaacaagatagtgacgtgaggaaaagagtgaaggatatgagcgagaaatgccatgtggctttaatggatggtggatcgtcgcgtactgcgttgcaaaagtttattgaagaggttgcgaagaatatagtttcactagataaggaatttgagcatgtagctcttaaatga

SEQ ID NO: 75038 - protein, 565 aa, Arabidopsis thaliana
  peptide (1)..(565): Ceres Seq. ID no. 5788470
MGGFRGEQAREIAKALDRSSHRFLWSLRRASSNIFKESQKESMNIEEVLPFSQKQETGACLLPEIRRRTNMKFELVFIPYPGIGHLRSTVEMAKLLVDRETRLSISVIILPFISEGEVGASDYIAALSASSNNRLRYEVISAVDQPTIEMTTIEIHMKNQEPKVRSTVAKLLEDYSSKPDSPKIAGFVLDMFCTSMVDVANEFGFPSYMFYTSSAGILSVTYHVQMLCDENKYDVSENDYADSEAVLNFPSLSRPYPVKCLPHALAANMWLPVFVNQARKFREMKGILVNTVAELEPYVLKFLSSSDTPPVYPVGPLLHLENQRDDSKDEKRLEIIRWLDQQPPSSVVFLCFGSMGGFGEEQVREIAIALERSGHRFLWSLRRASPNIFKELPGEFTNLEEVLPEGFFDRTKDIGKVIGWAPQVAVLANPAIGGFVTHCGWNSTLESLWFGVPTAAWPLYAEQKFNAFLMVEELGLAVEIRKYWRGEHLAGLPTATVTAEEIEKAIMCLMEQDSDVRKRVKDMSEKCHVALMDGGSSRTALQKFIEEVAKNIVSLDKEFEHVALK

SEQ ID NO: 75039 - protein, 523 aa, Arabidopsis thaliana
  peptide (1)..(523): Ceres Seq. ID no. 5788471
MNIEEVLPFSQKQETGACLLPEIRRRTNMKFELVFIPYPGIGHLRSTVEMAKLLVDRETRLSISVIILPFISEGEVGASDYIAALSASSNNRLRYEVISAVDQPTIEMTTIEIHMKNQEPKVRSTVAKLLEDYSSKPDSPKIAGFVLDMFCTSMVDVANEFGFPSYMFYTSSAGILSVTYHVQMLCDENKYDVSENDYADSEAVLNFPSLSRPYPVKCLPHALAANMWLPVFVNQARKFREMKGILVNTVAELEPYVLKFLSSSDTPPVYPVGPLLHLENQRDDSKDEKRLEIIRWLDQQPPSSVVFLCFGSMGGFGEEQVREIAIALERSGHRFLWSLRRASPNIFKELPGEFTNLEEVLPEGFFDRTKDIGKVIGWAPQVAVLANPAIGGFVTHCGWNSTLESLWFGVPTAAWPLYAEQKFNAFLMVEELGLAVEIRKYWRGEHLAGLPTATVTAEEIEKAIMCLMEQDSDVRKRVKDMSEKCHVALMDGGSSRTALQKFIEEVAKNIVSLDKEFEHVALK

SEQ ID NO: 75040 - protein, 495 aa, Arabidopsis thaliana; identical to SEQ ID NO: 50258
  peptide (1)..(495): Ceres Seq. ID no. 5788472

SEQ ID NO: 75041 - DNA, 1530 bp, Arabidopsis thaliana
  misc_feature (1)..(1530): Ceres Seq. ID no. 5806527
  misc_feature (1)..(1530): Ortholog of  Ceres SEQ ID NO 13504578 as cited in SEQ ID NO 59850
atgggagacgataagaaagatcagaagcagctttcttcatacttgaaagctaaaaacttttcatgtgattcacatttttcattttattggctaatgtcgaggctaatcttcttaattctcgccattctcttctctcttcaattcgttttctaccctttaaatttcatctcctcttcttctcaacctctgatcaaattctctgtttcacccgtcgtatccggatccgggtcggttcatgaaccggaccaaaccgaactcaagcacgtcgttttcggaatcgccgcctctgcgaaattctggaaacaccgtaaagactacgtgaagctctggtggaaaccaaacggtgaaatgaacggcgtcgtttggttagaccaacacattaaccaaaacgacaacgtttcgaaaacattacctccgatcagaatctcctccgacacgtctaggtttcagtacagatacccaaagggtctccgatcggcgatcagaatcacgagaatcgtctcggagacggtgaggctgttgaacggaacagagttggagaaaaacgtgaggtggattgtgatgggagacgacgacactgtgtttttcccggagaatcttgtcaaggttttgagaaagtacgatcacaatcagttttattacatcggaagctcgtcggagagtcatatacagaatctcaagttctcttacgggatggcttatggaggaggagggttcgcgattagctatccgttggctaaagcattagagaaaatgcaagatcgttgtattcagagatattcggaattgtacggctccgatgatcggattcatgcttgtatgtcggaactcggtgttcctttgactaaggaagttggcttccatcagattgatttatacgggaaacttctgggcctattatcggcccatccactggctcctctagtatcgatccaccatttagacttagtggatccagtattcccaaacatgggccgagtcaacgccatgagacgtttcatggtccccgcaaaactcgactcaccgagcctcgcgcagcaatcaatctgctacgacgcggaccaccgatggaccgtgtctgtctcgtggggatacacagtccagatcatacgtggcgtgttgtcagctagagagatggtgatccccacgcgcacgttcatcgattggtacaaacaggcagacgaaagaagctatgcttttaacacgcgtcctatcgccaaaagcgcgtgtcagcgtccgcgagtgtattacctgtccaacgcgcttcctgacttggctttgcgtagaactgctagtgaatacgtgagatggtacgacatgtgggagcctgaatgtgactgggatatgtcggatccttcggaatttgaacgggtcattgtttataagaaacccgacccggatagatggaataaacatagggctccgagaagagattgttgtagagtattgcccacgacgaagaatgggactatggtaatcgatgtaggagcttgtaaagatgatgaatttgctgaattccttgtcaaatag

SEQ ID NO: 75042 - protein, 509 aa, Arabidopsis thaliana
  peptide (1)..(509): Ceres Seq. ID no. 5806528
MGDDKKDQKQLSSYLKAKNFSCDSHFSFYWLMSRLIFLILAILFSLQFVFYPLNFISSSSQPLIKFSVSPVVSGSGSVHEPDQTELKHVVFGIAASAKFWKHRKDYVKLWWKPNGEMNGVVWLDQHINQNDNVSKTLPPIRISSDTSRFQYRYPKGLRSAIRITRIVSETVRLLNGTELEKNVRWIVMGDDDTVFFPENLVKVLRKYDHNQFYYIGSSSESHIQNLKFSYGMAYGGGGFAISYPLAKALEKMQDRCIQRYSELYGSDDRIHACMSELGVPLTKEVGFHQIDLYGKLLGLLSAHPLAPLVSIHHLDLVDPVFPNMGRVNAMRRFMVPAKLDSPSLAQQSICYDADHRWTVSVSWGYTVQIIRGVLSAREMVIPTRTFIDWYKQADERSYAFNTRPIAKSACQRPRVYYLSNALPDLALRRTASEYVRWYDMWEPECDWDMSDPSEFERVIVYKKPDPDRWNKHRAPRRDCCRVLPTTKNGTMVIDVGACKDDEFAEFLVK

SEQ ID NO: 75043 - protein, 478 aa, Arabidopsis thaliana; identical to SEQ ID NO: 72467
  peptide (1)..(478): Ceres Seq. ID no. 5806529

SEQ ID NO: 75044 - protein, 393 aa, Arabidopsis thaliana; identical to SEQ ID NO: 72468
  peptide (1)..(393): Ceres Seq. ID no. 5806530

SEQ ID NO: 75045 - DNA, 1197 bp, Arabidopsis thaliana
  misc_feature (1)..(1197): Ceres Seq. ID no. 5806852
  misc_feature (1)..(1197): Ortholog of  Ceres SEQ ID NO 13584612 as cited in SEQ ID NO 65223
atggggaagaagaacaagagaagtcaagacgagtctgagctcgaattggagccagagctaacgaaaataatcgatggagactctaaaaagaagaaaaataagaataagaagaagagaagccatgaagatacggagatagaaccggagcaaaagatgagtctcgacggagactcgaaggaggagaagataaagaagaagaggaagaacaagaaccaagaggaggagccagagcttgtgacggagaaaacgaaagtccaagaggaggaaaagggaaatgtagaagagggtagagccactgttagcatagccatagctggttcaatcatccacaacactcaatcacttgagctcgccacacgcctcgccggccaaattgctcgtgcagctacaattttccgaatcgacgagatcgtagtgttcgacaataagagcagctcagaaatcgaatcagctgctacgaatgcttctgatagcaatgaaagtggtgcctcctttctcgttcgtatcttgaagtatctagagacaccacaatatttgaggaaatctctcttccccaagcaaaatgatcttagatatgtgggtatgttgccacctcttgatgctcctcaccatctgcgtaagcacgagtgggaacaataccgtgaaggtgtgacactgagtgaaaaggctccaaattctgagggtacattggttgatgtgggtttaagcaagagtgttgttgttgatcaagtgctgggtccaggaattagagtcacggtagccatgggaactgaccacgatttagatttggtacgccagattgttccaccctctaagccaagggaagaagcaggaatgtattggggatacaaagtacgatatgcatcacaattaagttcagtattcaaggaatgccctttcgagggtggttacgattatttgattggtacctcggagcacggcctggtaattagttcatctgagctgaaaataccaacatttaggcacctattgattgcatttggtggacttgctgggcttgaagaaagtattgaagatgataatcagtataaggggaaaaacgttcgagatgtgtttaatgtatacttgaatacttgtccacatcaaggtagccgaaccattcgagcagaggaagcgatgtttatatcacttcagtacttccaggaacccatcagcagggcagtgagaagactttaa

SEQ ID NO: 75046 - protein, 398 aa, Arabidopsis thaliana
  peptide (1)..(398): Ceres Seq. ID no. 5806853
MGKKNKRSQDESELELEPELTKIIDGDSKKKKNKNKKKRSHEDTEIEPEQKMSLDGDSKEEKIKKKRKNKNQEEEPELVTEKTKVQEEEKGNVEEGRATVSIAIAGSIIHNTQSLELATRLAGQIARAATIFRIDEIVVFDNKSSSEIESAATNASDSNESGASFLVRILKYLETPQYLRKSLFPKQNDLRYVGMLPPLDAPHHLRKHEWEQYREGVTLSEKAPNSEGTLVDVGLSKSVVVDQVLGPGIRVTVAMGTDHDLDLVRQIVPPSKPREEAGMYWGYKVRYASQLSSVFKECPFEGGYDYLIGTSEHGLVISSSELKIPTFRHLLIAFGGLAGLEESIEDDNQYKGKNVRDVFNVYLNTCPHQGSRTIRAEEAMFISLQYFQEPISRAVRRL

SEQ ID NO: 75047 - protein, 347 aa, Arabidopsis thaliana
  peptide (1)..(347): Ceres Seq. ID no. 5806854
MSLDGDSKEEKIKKKRKNKNQEEEPELVTEKTKVQEEEKGNVEEGRATVSIAIAGSIIHNTQSLELATRLAGQIARAATIFRIDEIVVFDNKSSSEIESAATNASDSNESGASFLVRILKYLETPQYLRKSLFPKQNDLRYVGMLPPLDAPHHLRKHEWEQYREGVTLSEKAPNSEGTLVDVGLSKSVVVDQVLGPGIRVTVAMGTDHDLDLVRQIVPPSKPREEAGMYWGYKVRYASQLSSVFKECPFEGGYDYLIGTSEHGLVISSSELKIPTFRHLLIAFGGLAGLEESIEDDNQYKGKNVRDVFNVYLNTCPHQGSRTIRAEEAMFISLQYFQEPISRAVRRL

SEQ ID NO: 75048 - protein, 204 aa, Arabidopsis thaliana
  peptide (1)..(204): Ceres Seq. ID no. 5806855
MLPPLDAPHHLRKHEWEQYREGVTLSEKAPNSEGTLVDVGLSKSVVVDQVLGPGIRVTVAMGTDHDLDLVRQIVPPSKPREEAGMYWGYKVRYASQLSSVFKECPFEGGYDYLIGTSEHGLVISSSELKIPTFRHLLIAFGGLAGLEESIEDDNQYKGKNVRDVFNVYLNTCPHQGSRTIRAEEAMFISLQYFQEPISRAVRRL

SEQ ID NO: 75049 - DNA, 960 bp, Arabidopsis thaliana
  misc_feature (1)..(960): Ceres Seq. ID no. 6404551
  misc_feature (1)..(960): Ortholog of  Ceres SEQ ID NO 14314252 as cited in SEQ ID NO 57492
  misc_feature (1)..(960): Ortholog of  Ceres SEQ ID NO 12608276 as cited in SEQ ID NO 57871
  misc_feature (1)..(960): Ortholog of  Ceres SEQ ID NO 13598492 as cited in SEQ ID NO 63882
  misc_feature (1)..(960): Ortholog of  Ceres SEQ ID NO 13657914 as cited in SEQ ID NO 66230
  misc_feature (1)..(960): Ortholog of  Ceres SEQ ID NO 13595877 as cited in SEQ ID NO 67702
atggaatctgaaatcgcctccgagtttcttcctttctgccggatttacaaagacggtcgtgtagaacgactcatcggcaccgataccatcccggcctctctagatccaacatacgacgtcgtttcaaaagacgttatatactcaccggagaataacctctccgttcgtctcttcctccctcacaaatcaacaaaactcaccgccggtaacaagctccctctacttatctacatccacggcggagcttggatcatcgagtcacctttctccccactctaccacaattacctcactgaagtagtcaaatccgctaactgcctcgctgtctctgttcagtatcgccgtgcaccggaagatcctgttccggcggcttatgaagatgtatggtccgcgattcagtggatttttgctcattctaatggatctggtcctgtagattggattaacaaacacgccgatttcggtaaagttttcctcggcggagatagcgcaggcggtaacatatcgcatcacatggcgatgaaagctggtaaagagaagaagctagatctcaaaatcaaaggtattgctgttgttcatccagctttctggggaacagatccggttgatgaatacgatgtgcaagataaagaaacgagaagcggaatcgcggaaatttgggagaagattgcgagtccgaatagtgttaatgggacggatgatccgttgtttaatgtaaacggatccgggtcggatttttctgggttgggatgtgataaggttttggttgcggtagctgggaaagatgtgtttgttaggcaaggattggcttatgcggcgaagctggagaagtgtgagtgggaaggtactgttgaggtggttgaggaagaaggtgaggaccatgtgtttcatttgcagaatcctaaatctgataaggctttgaaattcttgaagaagtttgtcgagtttattattggttga

SEQ ID NO: 75050 - protein, 319 aa, Arabidopsis thaliana
  peptide (1)..(319): Ceres Seq. ID no. 6404552
MESEIASEFLPFCRIYKDGRVERLIGTDTIPASLDPTYDVVSKDVIYSPENNLSVRLFLPHKSTKLTAGNKLPLLIYIHGGAWIIESPFSPLYHNYLTEVVKSANCLAVSVQYRRAPEDPVPAAYEDVWSAIQWIFAHSNGSGPVDWINKHADFGKVFLGGDSAGGNISHHMAMKAGKEKKLDLKIKGIAVVHPAFWGTDPVDEYDVQDKETRSGIAEIWEKIASPNSVNGTDDPLFNVNGSGSDFSGLGCDKVLVAVAGKDVFVRQGLAYAAKLEKCEWEGTVEVVEEEGEDHVFHLQNPKSDKALKFLKKFVEFIIG

SEQ ID NO: 75051 - DNA, 1143 bp, Arabidopsis thaliana
  misc_feature (1)..(1143): Ceres Seq. ID no. 6404758
  misc_feature (1)..(1143): Ortholog of  Ceres SEQ ID NO 14312416 as cited in SEQ ID NO 55270
  misc_feature (1)..(1143): Ortholog of  Ceres SEQ ID NO 15225352 as cited in SEQ ID NO 67888
atgattcttcgattgaaagaccaaacgctcatcaaaatcaattcaactcgttcgtacttatcttccttagttttccgacgagattctcactcgcaggctcggacaaaacccgatcacgaccgccggagaagaggatacgagagggatgtgagaatcgaggagaagaaggaacacgatggattgtttctgtgcaagagcaaaggccaacaccttcttaccaacactagaatcctcgactccattgttcgaagctccgatatcaggccgactgatacagtcttggagatcggacctggcactggaaatctcacgatgaaacttcttgaagctgctcagaatgtcgtagccgtcgagctagataagcgtatggtggagattctacgcaaaagggtttctgaccatggttttgcagataaacttacgattattcaaaaagatgttctgaagacagattttcctcactttgatctcgtggttgcaaatattccttacaacatatcttcccctcttgtggccaagcttgtatacggctccaatacttttcgaagcgccacactcttgcttcaaaaggaattctcccgccggctcctggcaaatccaggagattccgatttcaatagattggcggtgaacgttaagttagtagctgatgttaaatttgtgatggatgtaagtaaaagagagtttgttccacctcctaaagttgattcatctgtaattaggattacaccaaaggagataataccggatgttaatgttcaagaatggttggcattcactcgcacgtgtttcgggaagaagaataagacgcttggttccatgtttaggcagaagaaaaaggtcatggaattgcagagtttgtctgcagggaggcatggctcgaatgttgaggttatgaatcagacaggtggtgattctgacagtgatgttgaagaagatgggaaagatgatttgttgtgtttggatacagatgcaagtatgttcaaggaaagggtaattgaaattctgagaacaaatgggttcgaagagaagagaccatccaagctttcacatcgtgagttgttacatttgctttctttgtttaaccaagctggaatttttttccatgatattacatcattacaaatggatctacacgaataa

SEQ ID NO: 75052 - protein, 380 aa, Arabidopsis thaliana
  peptide (1)..(380): Ceres Seq. ID no. 6404759
MILRLKDQTLIKINSTRSYLSSLVFRRDSHSQARTKPDHDRRRRGYERDVRIEEKKEHDGLFLCKSKGQHLLTNTRILDSIVRSSDIRPTDTVLEIGPGTGNLTMKLLEAAQNVVAVELDKRMVEILRKRVSDHGFADKLTIIQKDVLKTDFPHFDLVVANIPYNISSPLVAKLVYGSNTFRSATLLLQKEFSRRLLANPGDSDFNRLAVNVKLVADVKFVMDVSKREFVPPPKVDSSVIRITPKEIIPDVNVQEWLAFTRTCFGKKNKTLGSMFRQKKKVMELQSLSAGRHGSNVEVMNQTGGDSDSDVEEDGKDDLLCLDTDASMFKERVIEILRTNGFEEKRPSKLSHRELLHLLSLFNQAGIFFHDITSLQMDLHE

SEQ ID NO: 75053 - protein, 276 aa, Arabidopsis thaliana
  peptide (1)..(276): Ceres Seq. ID no. 6404760
MKLLEAAQNVVAVELDKRMVEILRKRVSDHGFADKLTIIQKDVLKTDFPHFDLVVANIPYNISSPLVAKLVYGSNTFRSATLLLQKEFSRRLLANPGDSDFNRLAVNVKLVADVKFVMDVSKREFVPPPKVDSSVIRITPKEIIPDVNVQEWLAFTRTCFGKKNKTLGSMFRQKKKVMELQSLSAGRHGSNVEVMNQTGGDSDSDVEEDGKDDLLCLDTDASMFKERVIEILRTNGFEEKRPSKLSHRELLHLLSLFNQAGIFFHDITSLQMDLHE

SEQ ID NO: 75054 - protein, 258 aa, Arabidopsis thaliana
  peptide (1)..(258): Ceres Seq. ID no. 6404761
MVEILRKRVSDHGFADKLTIIQKDVLKTDFPHFDLVVANIPYNISSPLVAKLVYGSNTFRSATLLLQKEFSRRLLANPGDSDFNRLAVNVKLVADVKFVMDVSKREFVPPPKVDSSVIRITPKEIIPDVNVQEWLAFTRTCFGKKNKTLGSMFRQKKKVMELQSLSAGRHGSNVEVMNQTGGDSDSDVEEDGKDDLLCLDTDASMFKERVIEILRTNGFEEKRPSKLSHRELLHLLSLFNQAGIFFHDITSLQMDLHE

SEQ ID NO: 75055 - DNA, 864 bp, Arabidopsis thaliana
  misc_feature (1)..(864): Ceres Seq. ID no. 6404879
  misc_feature (1)..(864): Ortholog of  Ceres SEQ ID NO 14316459 as cited in SEQ ID NO 57754
atgattgtttgttttttttgtggacagaagcaggtattgaagcaattggagccatggtgtgaacttaaagataaagtggttcttgtgacaggtgcttcctctggtatagggagagagatctgtcttgatctatgcaaagctggttgtaagattgtagcagcagctcgtcgtgttgatcgtctcaactctctctgttctgaaatcaacagctttggtgctatcggagtccaagccgtagcacttgagctagacgtttcatcagaagcagacactattcgaaaagcggttaaagaagcttgggaaacctttggaaagatcgatgttttgatcaataatgccggaatcagaggcaatgtcaagtcgagtttggatttgtcagaagaagaatgggacaaagtctttagaaccaacttaaccggatcttggttaatatccaaatacgtctgccttttgatgcgtgacgctgagcgcgggggctcggtgattaacgtctcgtcgatctctgggcttcatcgcggtttgttgcgcggtggactagcgtatgcttgttccaaaggtggtgttgacaccatgacgaggatgatggctattgagttagctgtttataagatcagagtgaactcgatcgcaccggggattttcaggtcagagatcacacaaggtcttttccagaaagagtggctcaagaaggttacggaaaaggttgtaccattaaagatgcaacagactgtggatccggggcttacatctcttgttcgctatctcattcacgattcttctcaatatgtcaccgggaatacatacattgtcgattccggaactacactgcccggtgtgcccattttttcttctctttctccgtag

SEQ ID NO: 75056 - protein, 287 aa, Arabidopsis thaliana
  peptide (1)..(287): Ceres Seq. ID no. 6404880
MIVCFFCGQKQVLKQLEPWCELKDKVVLVTGASSGIGREICLDLCKAGCKIVAAARRVDRLNSLCSEINSFGAIGVQAVALELDVSSEADTIRKAVKEAWETFGKIDVLINNAGIRGNVKSSLDLSEEEWDKVFRTNLTGSWLISKYVCLLMRDAERGGSVINVSSISGLHRGLLRGGLAYACSKGGVDTMTRMMAIELAVYKIRVNSIAPGIFRSEITQGLFQKEWLKKVTEKVVPLKMQQTVDPGLTSLVRYLIHDSSQYVTGNTYIVDSGTTLPGVPIFSSLSP

SEQ ID NO: 75057 - DNA, 1240 bp, Arabidopsis thaliana
  misc_feature (1)..(1240): Ceres Seq. ID no. 6405154
  misc_feature (1)..(1240): Ortholog of  Ceres SEQ ID NO 15179139 as cited in SEQ ID NO 1093
  misc_feature (1)..(1240): Ortholog of  Ceres SEQ ID NO 15226793 as cited in SEQ ID NO 58689
atcacgataaaaatgcatagtacataaagtatccattaaaacgtagatctagtctcttcacaacacttcaacagttcaactaataacgcaaaaatcagtttctctttgagtaagtgtttattacaattaaactaactcaggcaagtctatgatcatggcttcttctgctgctgcatcgatctctatgataactctaaggaacctctctcgcaatcatcaatctcaccaaagcacttttctcggtttctctagatccttccataaccaaaggatctcatctaacagtccaggtctctccacacgagcaagatccaccacttcctccactggaggtttcttcagaaccatttgcagcagcagtagcaatgactactccagaccaagtaagtaaaaagttaacctttatgctcacaactaagtacccatttcatgatttgagaaaattagcatcaaattaggtataagaacaaaaaaagaatcaacctttaagctcaaaatcaagtacccatttcacaaaaactgatttttattttgtgaaaaatctcagctaagatccaagagcttaacgtctacgagttcaacgaaggtgatcgaaacagtccagcggttttaaaactagggaaaaaaccagatcagctttgtctcggagatcttgtccccttcacaaacaaactctacacaggagatctcacaaaacgcataggaatcaccgcaggtctctgcgttttgatccaacatgttccagagaagaaaggtgatcgctttgaagcttcttacagtttctacttcggagattatggtcacatatcagttcaaggaccttatctcacttacgaggacacgtttcttgctatcaccggtggctccggcgtgtttgaaggagcttatggacaggtcaagcttcgtcagcttgtgtatcctacgaagctgttttacactttctacttgaaaggtgttgctgctgatttacctgtggagcttaccggaaaacatgttgagccgtcgaaggaagtgaaaccggcggctgaagctcaggcgactcagcccggcgctacgatcgctaactttactaattgaaatctaaatctttgtgggtgtctttgtcatggatcttattgggctgttgttcattgtgtttacattttaataatgggcctaaataatgagcctttgtattgggccgttctcgtaagcgtaatgtgtcccgtccctataagctggatttaagcgcgtgaactcc

SEQ ID NO: 75058 - protein, 80 aa, Arabidopsis thaliana
  peptide (1)..(80): Ceres Seq. ID no. 6405155
MIMASSAAASISMITLRNLSRNHQSHQSTFLGFSRSFHNQRISSNSPGLSTRARSTTSSTGGFFRTICSSSSNDYSRPSK

SEQ ID NO: 75059 - protein, 78 aa, Arabidopsis thaliana
  peptide (1)..(78): Ceres Seq. ID no. 6405156
MASSAAASISMITLRNLSRNHQSHQSTFLGFSRSFHNQRISSNSPGLSTRARSTTSSTGGFFRTICSSSSNDYSRPSK

SEQ ID NO: 75060 - protein, 70 aa, Arabidopsis thaliana
  peptide (1)..(70): Ceres Seq. ID no. 6405157
MFQRRKVIALKLLTVSTSEIMVTYQFKDLISLTRTRFLLSPVAPACLKELMDRSSFVSLCILRSCFTLST

SEQ ID NO: 75061 - DNA, 1360 bp, Arabidopsis thaliana
  misc_feature (1)..(1360): Ceres Seq. ID no. 6405343
  misc_feature (1)..(1360): Ortholog of  Ceres SEQ ID NO 13596816 as cited in SEQ ID NO 62287
acgaataagaaaagaagagaaacatcaaacatctttggtttgcttccctcgtacccgttcttcatacaagtatgatcatctgctgtctctatatagacatacatacaaaaaaaacttgtataagatttgaaactaaaatattaaatttatcctctattttgcaggcacgcctttaattatggattgtcatagaaagacgttcttgttgaagtttttgtgcgtggcatttctgttaaactacagcaatgttggctttgtagacgcagcaacaaacattggcttgaactacggcctccttggagacaacctcccgcctccatctgaagttatcaacctctacaagtccttaagtgttaccaatattcggatcttcgacacaactacggatgtccttaacgcctttcgagggaatcgcaatatcggagttatggtagacgtgaagaaccaagacttagaggctctttcggtcagcgaagaagctgttaacacctggttcgtgaccaacattgagccttacttagctgatgtcaacatcacgttcattgctgtcgggaacgaagtcatcccaggggaaatcggctcttatgtgctacccgtcatgaaatctctcaccaacattgtcaagtcgaggagtctcccgatcttgatcagcaccacggtggctatgaccaaccttggccagtcatatccaccttcggccggagatttcatgcctcaagcacgtgaacaacttaccccggtgctgaagtttttgtctcaaacaaatacgcctatcctcgtcaacatctacccctacttcgcatatgctgctgatcctatcaacattcagctcgactatgccatcttcaacaccaacaaggtcgtggtccaagacgggccacttggttatacaaacatgttcgatgtgatatttgatgcgttcgtatgggcaatggagaaagaaggtgtgaaggatttaccaatggtggtaacagaaactggatggccatctgctggtaacggaaacttaacgactccagatatcgcatctatatacaataccaattttgttaaacatgtggaaagcggtaaagggacgccaaagagaccaaagagtggcattagtggatttctatttgcgacgttcaatgagaatcaaaagccagcgggaaccgaacaaaattttgggttatataatccaacagatatgaagcccatctacaagatgttttgatttttagattcttgattttatagactatcccaaatcattagtaaattaatgatgctctaatagttgtaatagagcgggataaaatcaagatctacaacaacattcattttatatgttgtatgatcttcttaaataaaaaaacttaag

SEQ ID NO: 75062 - protein, 344 aa, Arabidopsis thaliana; identical to SEQ ID NO: 47779
  peptide (1)..(344): Ceres Seq. ID no. 6405344

SEQ ID NO: 75063 - protein, 261 aa, Arabidopsis thaliana; identical to SEQ ID NO: 47780
  peptide (1)..(261): Ceres Seq. ID no. 6405345

SEQ ID NO: 75064 - protein, 204 aa, Arabidopsis thaliana; identical to SEQ ID NO: 47781
  peptide (1)..(204): Ceres Seq. ID no. 6405346

SEQ ID NO: 75065 - DNA, 639 bp, Arabidopsis thaliana
  misc_feature (1)..(639): Ceres Seq. ID no. 6406870
  misc_feature (1)..(639): Ortholog of  Ceres SEQ ID NO 13591265 as cited in SEQ ID NO 61046
  misc_feature (1)..(639): Ortholog of  Ceres SEQ ID NO 15224932 as cited in SEQ ID NO 62225
atgaagatcagacttagcataaccatcatacttttatcatacacagtggctacggtggccggacaacaatgcggtcgtcaaggcggtggtcgaacttgtcccggtaacatctgctgcagtcagtacggttactgtggtaccaccgcggactactgttctccgaccaacaactgtcagagcaattgttggggaagtgggcctagcggaccaggggagagcgcgtcgaacgtacgcgccacctaccatttctataatccggcgcagaataattgggatttgagagccgtgagtgcttattgctccacgtgggatgctgataagccgtacgcatggcggagcaagtatggctggaccgccttctgcgggccggcaggacctcgtggtcaagcttcttgcggcaagtgtttaagggtgaagaacacaagaacaaatgctgcagtaactgtgagaatagtggaccaatgcagcaacggaggcttggatttggatgtagcaatgttcaatcaaatagacaccgatggttttggctatcaacaaggccatctcattgttgactaccaatttgtcgactgtggcaatgagctcattgggcagcctgattccagaaacatgcttgtttcggccattgatcgcgtttga

SEQ ID NO: 75066 - protein, 212 aa, Arabidopsis thaliana; identical to SEQ ID NO: 28152
  peptide (1)..(212): Ceres Seq. ID no. 6406871

SEQ ID NO: 75067 - DNA, 977 bp, Arabidopsis thaliana
  misc_feature (1)..(977): Ceres Seq. ID no. 6407773
  misc_feature (1)..(977): Ortholog of  Ceres SEQ ID NO 14312228 as cited in SEQ ID NO 59237
aaaccaaataatctctcgtttctaaacaaactagtggtgagtgaatcttctctggtgagtaatggaagtgagtatgtctttgaatgcgttaactcggcttcctctgaagaacacaggaagattcgaagaggttggtttagcgagacactctctgtttagctcaagaacggcatgccgagagacggcggtacagcagcggcggatggtttttgtggtggaggctaagggaaagaaaggtatggcggcgcgtcagtatcaacgtacacctcctcctatgcctaagattgaagacgatggaaacccaagattcgttatcttcattcgtatggccaatgtgtatctttggtatcctctgagtataatagctggtggtactactgctaagatcatggttgctgcaaaagataacctcttggggaagtatatctacaaagacaccattgcaagaaacattgccgctgttatttacagagatgagaaagagattcaaaagacagcaattaagcagcatcgtgtcttgcgtacagccaccgagtttcgatatggctacaaacttgtagaaaacggaaacatgagagctgcacttagtacttcagatgttattgagctcccaacccaggaccagcttaaaacagtgttcgacaaagttaaagactactttggggatgcaaaagagtcattcggaaagctatcatcgctgaacccggggagtgacgaaaaaactgaagaaacctcggatgagaaagccaaggcctgaggctgaacaattgacacttggttggttgattttgatgtctcaaccgtctcggtatgggctgcagaaggtcactggatatgacgagactaccgctattttgtgcacattttctctatacatctctcacagaaacagcttctgttaaatctcttgtaacatataacttattgtgtattgtagatttgttgaaagaaagagccattggttacaacttgcaatt

SEQ ID NO: 75068 - protein, 231 aa, Arabidopsis thaliana; identical to SEQ ID NO: 31029
  peptide (1)..(231): Ceres Seq. ID no. 6407774

SEQ ID NO: 75069 - protein, 227 aa, Arabidopsis thaliana; identical to SEQ ID NO: 31030
  peptide (1)..(227): Ceres Seq. ID no. 6407775

SEQ ID NO: 75070 - protein, 184 aa, Arabidopsis thaliana; identical to SEQ ID NO: 31031
  peptide (1)..(184): Ceres Seq. ID no. 6407776

SEQ ID NO: 75071 - DNA, 866 bp, Arabidopsis thaliana
  misc_feature (1)..(866): Ceres Seq. ID no. 6407825
  misc_feature (1)..(866): Ortholog of  Ceres SEQ ID NO 15179163 as cited in SEQ ID NO 0
aactgtgcgctcttgttatctctgctttgaagtgaaatcagctttggctatggcttcttcgacagctttgtctctctcatggagctcctctccttgttggtcacacagcttcaatggcggtgcaaatgaaaccctaaaagtatctgagcgaaggttcaattttgaagttgtttcccagaagaaagctaagaaacttcgcaaggtaattttgaaagaggatgtgacggatttgggtaagcaagggcaattacttgatgtgaaagctggatttttcagaaacttcctcttgcctactggaaaggctcagcttatgactccacttctgctcaaggaattgaagatggaagacgaacggattgaggcagagaagcaaagggtgaaagaagaggcacaacaactggcgatggtattccaaaccgttggtgctttcaaggttaaacgcaaaggcggtaaaggcaaactgatatttggatctgtcacagctcaagacctcgtcgacatcatcaaatcacagctccaaaaggacatcgacaaacgccttgtctctctcccagaaatccgtgaaaccggagaatacatagccgaactcaagcttcaccccgatgtcactgctcgagttaagatcaatgttttcgctaactaaaccttcaacgattcaagactcctactgcatcccaaggaacgtatagagagggaaaagagagtagcctcttgtggtgaggattgaaggttgtgaagtttttcctttagattgtttgatgcatttgtatttttgctatttttggaatctggaaacgctaaaagtataatattctcttgcaagttatgatatttacttgaagttatattgtattcatttgtctgtt

SEQ ID NO: 75072 - protein, 213 aa, Arabidopsis thaliana
  peptide (1)..(213): Ceres Seq. ID no. 6407826
TVRSCYLCFEVKSALAMASSTALSLSWSSSPCWSHSFNGGANETLKVSERRFNFEVVSQKKAKKLRKVILKEDVTDLGKQGQLLDVKAGFFRNFLLPTGKAQLMTPLLLKELKMEDERIEAEKQRVKEEAQQLAMVFQTVGAFKVKRKGGKGKLIFGSVTAQDLVDIIKSQLQKDIDKRLVSLPEIRETGEYIAELKLHPDVTARVKINVFAN

SEQ ID NO: 75073 - protein, 197 aa, Arabidopsis thaliana
  peptide (1)..(197): Ceres Seq. ID no. 6407827
MASSTALSLSWSSSPCWSHSFNGGANETLKVSERRFNFEVVSQKKAKKLRKVILKEDVTDLGKQGQLLDVKAGFFRNFLLPTGKAQLMTPLLLKELKMEDERIEAEKQRVKEEAQQLAMVFQTVGAFKVKRKGGKGKLIFGSVTAQDLVDIIKSQLQKDIDKRLVSLPEIRETGEYIAELKLHPDVTARVKINVFAN

SEQ ID NO: 75074 - protein, 110 aa, Arabidopsis thaliana
  peptide (1)..(110): Ceres Seq. ID no. 6407828
MTPLLLKELKMEDERIEAEKQRVKEEAQQLAMVFQTVGAFKVKRKGGKGKLIFGSVTAQDLVDIIKSQLQKDIDKRLVSLPEIRETGEYIAELKLHPDVTARVKINVFAN

SEQ ID NO: 75075 - DNA, 1327 bp, Arabidopsis thaliana
  misc_feature (1)..(1327): Ceres Seq. ID no. 6407941
  misc_feature (1)..(1327): Ortholog of  Ceres SEQ ID NO 15226198 as cited in SEQ ID NO 62150
cggtatgcctagcgatatttttcaacgccattgacgacgctttatataccactgtgactgttcttttagttttgagtatgttaatgatcgcgaggaaagctttggcctcggcgcatactaaggcgtttcgtttggcaacaagggatgtacattgctttagttccatcttagtgtctcctcctctcgtgtcacttgacttgcctgaaaattggattccttactctgatcctccacctcctgtttcctttgagactgaacagaagactgtggtgatagatggtaatgttatcgctgaggaaatcagaacaaagattattagtgaagtggggaagatgaaaaaggctgttggaaaagtccctggtcttgctgttgttttggttggtgaacaaagagactcgcaaacttatgttcgcaacaaaattaaagcttgtgaagaaactggcattaaatctgttttggctgaattaccagaggattgtactgaaggacagattatcagtgtattgagaaaattcaatgaagacacgtctattcacggaattcttgtgcaacttcctttaccccaacatcttaatgaatcaaaaatcttgaatatggtgagattggagaaagatgttgatgggtttcatccattaaacgtggggaatcttgcaatgagagggagggaaccgctgtttgtatcttgcactcctaagggctgtgtggagttgttgataagaacgggtgttgaaatagcaggaaaaaatgctgtggtcataggcagaagcaacatcgttggactaccaatgtctttattattgcagaggcatgacgcgacagtaagcacggtgcatgcgtttacaaaggatccagagcacattactaggaaggcggatatcgttatagcagcagcgggtatacctaatttagttcgtggaagttggcttaagcctggagcagttgtcattgatgttggaacaactccagtcgaggatagtagctgtgagtttggttaccgtcttgtcggggatgtatgttacgaggaagcgttaggtgttgcctcggctatcactcccgtaccgggaggagttggacctatgacgatcaccatgctactatgcaatactttggaggctgctaagcggatcttcctctgagtatggtatctctgtctattactaaatatattttgtaatgttagataggagactccatgctgttcgagttattaacgatctcttttgaattattgtataatagacctggcgattgtgatgccatggtttatcctaactcatcagcatctttagcatcaagttcaactaaacaagtattcatgttttcgttt

SEQ ID NO: 75076 - protein, 377 aa, Arabidopsis thaliana
  peptide (1)..(377): Ceres Seq. ID no. 6407942
VCLAIFFNAIDDALYTTVTVLLVLSMLMIARKALASAHTKAFRLATRDVHCFSSILVSPPLVSLDLPENWIPYSDPPPPVSFETEQKTVVIDGNVIAEEIRTKIISEVGKMKKAVGKVPGLAVVLVGEQRDSQTYVRNKIKACEETGIKSVLAELPEDCTEGQIISVLRKFNEDTSIHGILVQLPLPQHLNESKILNMVRLEKDVDGFHPLNVGNLAMRGREPLFVSCTPKGCVELLIRTGVEIAGKNAVVIGRSNIVGLPMSLLLQRHDATVSTVHAFTKDPEHITRKADIVIAAAGIPNLVRGSWLKPGAVVIDVGTTPVEDSSCEFGYRLVGDVCYEEALGVASAITPVPGGVGPMTITMLLCNTLEAAKRIFL

SEQ ID NO: 75077 - protein, 352 aa, Arabidopsis thaliana
  peptide (1)..(352): Ceres Seq. ID no. 6407943
MLMIARKALASAHTKAFRLATRDVHCFSSILVSPPLVSLDLPENWIPYSDPPPPVSFETEQKTVVIDGNVIAEEIRTKIISEVGKMKKAVGKVPGLAVVLVGEQRDSQTYVRNKIKACEETGIKSVLAELPEDCTEGQIISVLRKFNEDTSIHGILVQLPLPQHLNESKILNMVRLEKDVDGFHPLNVGNLAMRGREPLFVSCTPKGCVELLIRTGVEIAGKNAVVIGRSNIVGLPMSLLLQRHDATVSTVHAFTKDPEHITRKADIVIAAAGIPNLVRGSWLKPGAVVIDVGTTPVEDSSCEFGYRLVGDVCYEEALGVASAITPVPGGVGPMTITMLLCNTLEAAKRIFL

SEQ ID NO: 75078 - protein, 350 aa, Arabidopsis thaliana
  peptide (1)..(350): Ceres Seq. ID no. 6407944
MIARKALASAHTKAFRLATRDVHCFSSILVSPPLVSLDLPENWIPYSDPPPPVSFETEQKTVVIDGNVIAEEIRTKIISEVGKMKKAVGKVPGLAVVLVGEQRDSQTYVRNKIKACEETGIKSVLAELPEDCTEGQIISVLRKFNEDTSIHGILVQLPLPQHLNESKILNMVRLEKDVDGFHPLNVGNLAMRGREPLFVSCTPKGCVELLIRTGVEIAGKNAVVIGRSNIVGLPMSLLLQRHDATVSTVHAFTKDPEHITRKADIVIAAAGIPNLVRGSWLKPGAVVIDVGTTPVEDSSCEFGYRLVGDVCYEEALGVASAITPVPGGVGPMTITMLLCNTLEAAKRIFL

SEQ ID NO: 75079 - DNA, 975 bp, Arabidopsis thaliana
  misc_feature (1)..(975): Ceres Seq. ID no. 6407969
  misc_feature (1)..(975): Ortholog of  Ceres SEQ ID NO 15171366 as cited in SEQ ID NO 51578
  misc_feature (1)..(975): Ortholog of  Ceres SEQ ID NO 14306949 as cited in SEQ ID NO 54919
  misc_feature (1)..(975): Ortholog of  Ceres SEQ ID NO 14308536 as cited in SEQ ID NO 55469
  misc_feature (1)..(975): Ortholog of  Ceres SEQ ID NO 15175723 as cited in SEQ ID NO 57875
  misc_feature (1)..(975): Ortholog of  Ceres SEQ ID NO 14314909 as cited in SEQ ID NO 58002
  misc_feature (1)..(975): Ortholog of  Ceres SEQ ID NO 15179772 as cited in SEQ ID NO 64248
atggccgtcgatctaatgcgtttccctaagatagatgatcaaacggctattcaggaagctgcatcgcaaggtttacaaagtatggaacatctgatccgtgtcctctctaaccgtcccgaacaacaacacaacgttgactgctccgagatcactgacttcaccgtttctaaattcaaaaccgtcatttctctccttaaccgtactggtcacgctcggttcagacgcggaccggttcactccacttcctctgccgcatctcagaaactacagagtcagatcgttaaaaatactcaacctgaggctccgatagtgagaacaactacgaatcaccctcaaatcgttcctccaccgtctagtgtaacactcgatttctctaaaccaagcatcttcggcaccaaagctaagagcgccgagctggaattctccaaagaaaacttcagtgtttctttaaactcctcattcatgtcgtcggcgataaccggagacggcagcgtctccaatggaaaaatcttccttgcttctgctccgttgcagcctgttaactcttccggaaaaccaccgttggctggtcatccttacagaaagagatgtctcgagcatgagcactcagagagtttctccggaaaagtctccggctccgcctacggaaagtgccattgcaagaaaaggaaaaatcggatgaagagaaccgtgagagtaccggcgataagtgcaaagatcgccgatattccaccggacgaatattcgtggaggaagtacggacaaaaaccgatcaagggctcaccacacccacgtggttactacaagtgcagtacattcagaggatgtccagcgaggaaacacgtggaacgagcattagatgatccagcgatgcttattgtgacatacgaaggagagcaccgtcataaccaatccgcgatgcaggagaatatttcttcttcaggcattaatgatttagtgtttgcctcggcttga

SEQ ID NO: 75080 - protein, 324 aa, Arabidopsis thaliana
  peptide (1)..(324): Ceres Seq. ID no. 6407970
MAVDLMRFPKIDDQTAIQEAASQGLQSMEHLIRVLSNRPEQQHNVDCSEITDFTVSKFKTVISLLNRTGHARFRRGPVHSTSSAASQKLQSQIVKNTQPEAPIVRTTTNHPQIVPPPSSVTLDFSKPSIFGTKAKSAELEFSKENFSVSLNSSFMSSAITGDGSVSNGKIFLASAPLQPVNSSGKPPLAGHPYRKRCLEHEHSESFSGKVSGSAYGKCHCKKRKNRMKRTVRVPAISAKIADIPPDEYSWRKYGQKPIKGSPHPRGYYKCSTFRGCPARKHVERALDDPAMLIVTYEGEHRHNQSAMQENISSSGINDLVFASA

SEQ ID NO: 75081 - protein, 319 aa, Arabidopsis thaliana
  peptide (1)..(319): Ceres Seq. ID no. 6407971
MRFPKIDDQTAIQEAASQGLQSMEHLIRVLSNRPEQQHNVDCSEITDFTVSKFKTVISLLNRTGHARFRRGPVHSTSSAASQKLQSQIVKNTQPEAPIVRTTTNHPQIVPPPSSVTLDFSKPSIFGTKAKSAELEFSKENFSVSLNSSFMSSAITGDGSVSNGKIFLASAPLQPVNSSGKPPLAGHPYRKRCLEHEHSESFSGKVSGSAYGKCHCKKRKNRMKRTVRVPAISAKIADIPPDEYSWRKYGQKPIKGSPHPRGYYKCSTFRGCPARKHVERALDDPAMLIVTYEGEHRHNQSAMQENISSSGINDLVFASA

SEQ ID NO: 75082 - protein, 297 aa, Arabidopsis thaliana
  peptide (1)..(297): Ceres Seq. ID no. 6407972
MEHLIRVLSNRPEQQHNVDCSEITDFTVSKFKTVISLLNRTGHARFRRGPVHSTSSAASQKLQSQIVKNTQPEAPIVRTTTNHPQIVPPPSSVTLDFSKPSIFGTKAKSAELEFSKENFSVSLNSSFMSSAITGDGSVSNGKIFLASAPLQPVNSSGKPPLAGHPYRKRCLEHEHSESFSGKVSGSAYGKCHCKKRKNRMKRTVRVPAISAKIADIPPDEYSWRKYGQKPIKGSPHPRGYYKCSTFRGCPARKHVERALDDPAMLIVTYEGEHRHNQSAMQENISSSGINDLVFASA

SEQ ID NO: 75083 - DNA, 576 bp, Arabidopsis thaliana
  misc_feature (1)..(576): Ceres Seq. ID no. 6408927
  misc_feature (1)..(576): Ortholog of  Ceres SEQ ID NO 13597380 as cited in SEQ ID NO 64054
ctttacatgtatcagcaagtgctcgaggccgcggttgtggccatgcctcatcctcggcctcgagcacttgctgatacatgaaaaaggctgtgtttcaagactcaacacagatgctcaaaactttaacaagaagcttaacgctgctgcttcaaagcttcagaagcaatattccgatcttaagattgttkcttcgacatctactctccactttatgatcttgttcagaacccttccaaatccggattcacggaagcaaccaaaggatgttgtggaacaggaacagtcgagacaacttcactcttgtgcaacccgaaatcgtttgggacatgctccaatgctactcagtatgtgttctgggacagtgtgcatccttctgaagctgccaatgagattcttgccactgccctaattggacagggcttttctctcctcggttgatctcacgtatttatcttatattctcttttcaaatcgctgtttctatcacacatgagtcatacatttgtttttctttgaattatgtatcaaagcatcactgttttactaaaaatgtattgaaacttattacaagtactg

SEQ ID NO: 75084 - protein, 135 aa, Arabidopsis thaliana
  peptide (1)..(135): Ceres Seq. ID no. 6408928
  misc_feature (63)..(63): Xaa is any aa, unknown or other
FTCISKCSRPRLWPCLILGLEHLLIHEKGCVSRLNTDAQNFNKKLNAAASKLQKQYSDLKIVXSTSTLHFMILFRTLPNPDSRKQPKDVVEQEQSRQLHSCATRNRLGHAPMLLSMCSGTVCILLKLPMRFLPLP

SEQ ID NO: 75085 - DNA, 3126 bp, Arabidopsis thaliana
  misc_feature (1)..(3126): Ceres Seq. ID no. 6428581
  misc_feature (1)..(3126): Ortholog of  Ceres SEQ ID NO 14311183 as cited in SEQ ID NO 58495
  misc_feature (1)..(3126): Ortholog of  Ceres SEQ ID NO 13502874 as cited in SEQ ID NO 66298
  misc_feature (1)..(3126): Ortholog of  Ceres SEQ ID NO 12614124 as cited in SEQ ID NO 68392
atgtcattcttatcattttctcctatttctctggacttattatctagtaatgtcttcttaaccattctagcgattatcatatccggtttacttaaaaccattacgtaccggaaacacaattcgaaccatttaaatctcccgcccggcccaccaggatggccggtgatcggaaacttatttcagttcacgcgctccgggaaacagtttttcgagtacgtcgaggatctcgtaaagatctacggtccgattcttactctcaggcttggtactcgaacaatgatcatcatctccgacgccagtctcgcccacgaagcgttaatcgaacgtggagcacaattcgcgacccgacccgttgaaactccgacccggaaaatcttcagctccagtgaaatcacagttcattccgctatgtatggacctgtgtggaggtcattgagacggaacatggttcagaacatgcttagctcgaatcggctcaaggagtttggttctgttagaaaatccgccatggataaactcatcgagagaatcaaatctgaagctagagacaacgatggactcgtctgggttctgcaaaacagcagatacgctgcgttttgtgttttattagatatctgttttggagttgagatggaagaggaatcaattgagaagatggatcagttgatgacggcgatattaaacgccgttgatccaaaactccacgattaccttccgatcttaacgccgtttaactacaatgagagaaatcgtgctcttaagcttcgtcgggaacttgtagatttcgtcgtcggattcatcgagaaacgacggaaggcgattcggaccgcaacggtatcgtctttctcgtatcttgatacactctttgatcttagaatcatcgaaggaagtgaaacgacgccgtctgatgaagatcttgtaacgctctgttcggagtttctcaatgccggtacggacacgactggggcggcgatcgagtggggaatcgcagagttgatagcgaatcccgagattcaatctcgactgtacgatgagattaaatcaacggttggagatcgtgcggtcgatgaaagagacgtggacaaaatggtcttgttacaagctgtagtcaaagagattctccggcgacatccaccgacttactttacattaagtcacggtgtaacggaaccaacgactctctctggctataacatccctgtcggggtcaacattgagttttatcttcccggaattagtgaagacccgaagatctggtcagagccaaaaaagttcgaccctgaccggttcttatcagggcgggaagacgccgatataacaggagttgctggagtgaagatgatgccttttggtgttggccgtaggatctgtccggggatgggaatggcgacggtacatgtgcatttgatgatagcgaggatggttcaagagttcgagtggttagcctatccaccgcagagcgagatggattttgccgggaagttggtgtttgcggttgtgatgaagaagccgttgagggccatggtgagacctaggctacaaacaaagctcagtgaaaagaagaagaaaaacaagaagctaaaaatgtctatcctttcgtttcctcacactttctttaacatctctccttcactcttctacactatccttatatccagtttagttctactgatcctcacgcgccggagtgctaaatcaaagatcgtgaagcttcctccaggtcctccggggtggccggtggttggaaacctcttccaattcgcgcgctccgggaagcagttttacgagtacgttgacgatgtaaggaaaaaatacggtcctatctacacgttgaggatgggaagtcgaacaatgatcataatctctgattcagctctcgtccacgacgttctgattcaacgtggaccaatgttcgcaacccgacccaccgagaatccgacccgaaccatcttcagctccaacactttcaccgttaacgcttcagcgtacggtccagtatggcgatccctgagaaagaacatggtacagaacatgttaagctcgatccggttcagagaattcgggtcgttgagacaatccgcaatggataaactcgtcgagaggatcaaatcagaagctaaagacaacgacggtcttgtttgggtcctaagaaacgcaagattcgctgcgttttgtattcttttggagatgtgttttggaatcgaaatggatgaagaatcgatattgaatatggatcaagtgatgaagaaagtgttgatcacactcaatccaagactcgatgattatctcccgattcttgctccgttttattccaaggagagagcaagagctctcgaggttcgttgtgaacaagttgatttcatcgttaaactcatcgagagacgacggagagcgattcagaagccggggactgataaaacggcgtcgtctttttcttatcttgatacactctttgaccttaaaaccgaaggtcgtataacgacgccgtctaatgaagagcttgtgtcgctctgctctgagtttcttaacggtggtacggatacgacggggacggcgatcgagtggggtatagcgcaactgattgtgaatcctgagattcaatctcggctctacgatgagattaaatcaacggttggagatcgtgaggttgaggaaaaagatgtggataaaatggtctttttacaagccgttgttaaggagattttacggaaacatcctccgacatactttacgttgactcattccgtcacggagccgacgacggtcgccggttacgatgttcccgttgggattaacgttgagttttatcttccgggaataaatgaggatccaaagctttggtctgatccgaagaaatttaacccggatcggtttatttcgggtaaggaggaagcggacataaccggtgtaaccggagttaaaatgatgccgttcggtattggccgtcggatctgtccggggctagcgatggcgaccgtacacgtgcatttgatgctagcgaagatggttcaagagtttgagtggagcgcttatccgccggaaagtgaaattgatttcgccgggaaattggagtttacggtggtaatgaagaaaccgttgagagccatggttaagccaagggtctaa

SEQ ID NO: 75086 - protein, 1041 aa, Arabidopsis thaliana
  peptide (1)..(1041): Ceres Seq. ID no. 6428582
MSFLSFSPISLDLLSSNVFLTILAIIISGLLKTITYRKHNSNHLNLPPGPPGWPVIGNLFQFTRSGKQFFEYVEDLVKIYGPILTLRLGTRTMIIISDASLAHEALIERGAQFATRPVETPTRKIFSSSEITVHSAMYGPVWRSLRRNMVQNMLSSNRLKEFGSVRKSAMDKLIERIKSEARDNDGLVWVLQNSRYAAFCVLLDICFGVEMEEESIEKMDQLMTAILNAVDPKLHDYLPILTPFNYNERNRALKLRRELVDFVVGFIEKRRKAIRTATVSSFSYLDTLFDLRIIEGSETTPSDEDLVTLCSEFLNAGTDTTGAAIEWGIAELIANPEIQSRLYDEIKSTVGDRAVDERDVDKMVLLQAVVKEILRRHPPTYFTLSHGVTEPTTLSGYNIPVGVNIEFYLPGISEDPKIWSEPKKFDPDRFLSGREDADITGVAGVKMMPFGVGRRICPGMGMATVHVHLMIARMVQEFEWLAYPPQSEMDFAGKLVFAVVMKKPLRAMVRPRLQTKLSEKKKKNKKLKMSILSFPHTFFNISPSLFYTILISSLVLLILTRRSAKSKIVKLPPGPPGWPVVGNLFQFARSGKQFYEYVDDVRKKYGPIYTLRMGSRTMIIISDSALVHDVLIQRGPMFATRPTENPTRTIFSSNTFTVNASAYGPVWRSLRKNMVQNMLSSIRFREFGSLRQSAMDKLVERIKSEAKDNDGLVWVLRNARFAAFCILLEMCFGIEMDEESILNMDQVMKKVLITLNPRLDDYLPILAPFYSKERARALEVRCEQVDFIVKLIERRRRAIQKPGTDKTASSFSYLDTLFDLKTEGRITTPSNEELVSLCSEFLNGGTDTTGTAIEWGIAQLIVNPEIQSRLYDEIKSTVGDREVEEKDVDKMVFLQAVVKEILRKHPPTYFTLTHSVTEPTTVAGYDVPVGINVEFYLPGINEDPKLWSDPKKFNPDRFISGKEEADITGVTGVKMMPFGIGRRICPGLAMATVHVHLMLAKMVQEFEWSAYPPESEIDFAGKLEFTVVMKKPLRAMVKPRV

SEQ ID NO: 75087 - protein, 949 aa, Arabidopsis thaliana
  peptide (1)..(949): Ceres Seq. ID no. 6428583
MIIISDASLAHEALIERGAQFATRPVETPTRKIFSSSEITVHSAMYGPVWRSLRRNMVQNMLSSNRLKEFGSVRKSAMDKLIERIKSEARDNDGLVWVLQNSRYAAFCVLLDICFGVEMEEESIEKMDQLMTAILNAVDPKLHDYLPILTPFNYNERNRALKLRRELVDFVVGFIEKRRKAIRTATVSSFSYLDTLFDLRIIEGSETTPSDEDLVTLCSEFLNAGTDTTGAAIEWGIAELIANPEIQSRLYDEIKSTVGDRAVDERDVDKMVLLQAVVKEILRRHPPTYFTLSHGVTEPTTLSGYNIPVGVNIEFYLPGISEDPKIWSEPKKFDPDRFLSGREDADITGVAGVKMMPFGVGRRICPGMGMATVHVHLMIARMVQEFEWLAYPPQSEMDFAGKLVFAVVMKKPLRAMVRPRLQTKLSEKKKKNKKLKMSILSFPHTFFNISPSLFYTILISSLVLLILTRRSAKSKIVKLPPGPPGWPVVGNLFQFARSGKQFYEYVDDVRKKYGPIYTLRMGSRTMIIISDSALVHDVLIQRGPMFATRPTENPTRTIFSSNTFTVNASAYGPVWRSLRKNMVQNMLSSIRFREFGSLRQSAMDKLVERIKSEAKDNDGLVWVLRNARFAAFCILLEMCFGIEMDEESILNMDQVMKKVLITLNPRLDDYLPILAPFYSKERARALEVRCEQVDFIVKLIERRRRAIQKPGTDKTASSFSYLDTLFDLKTEGRITTPSNEELVSLCSEFLNGGTDTTGTAIEWGIAQLIVNPEIQSRLYDEIKSTVGDREVEEKDVDKMVFLQAVVKEILRKHPPTYFTLTHSVTEPTTVAGYDVPVGINVEFYLPGINEDPKLWSDPKKFNPDRFISGKEEADITGVTGVKMMPFGIGRRICPGLAMATVHVHLMLAKMVQEFEWSAYPPESEIDFAGKLEFTVVMKKPLRAMVKPRV

SEQ ID NO: 75088 - protein, 905 aa, Arabidopsis thaliana
  peptide (1)..(905): Ceres Seq. ID no. 6428584
MYGPVWRSLRRNMVQNMLSSNRLKEFGSVRKSAMDKLIERIKSEARDNDGLVWVLQNSRYAAFCVLLDICFGVEMEEESIEKMDQLMTAILNAVDPKLHDYLPILTPFNYNERNRALKLRRELVDFVVGFIEKRRKAIRTATVSSFSYLDTLFDLRIIEGSETTPSDEDLVTLCSEFLNAGTDTTGAAIEWGIAELIANPEIQSRLYDEIKSTVGDRAVDERDVDKMVLLQAVVKEILRRHPPTYFTLSHGVTEPTTLSGYNIPVGVNIEFYLPGISEDPKIWSEPKKFDPDRFLSGREDADITGVAGVKMMPFGVGRRICPGMGMATVHVHLMIARMVQEFEWLAYPPQSEMDFAGKLVFAVVMKKPLRAMVRPRLQTKLSEKKKKNKKLKMSILSFPHTFFNISPSLFYTILISSLVLLILTRRSAKSKIVKLPPGPPGWPVVGNLFQFARSGKQFYEYVDDVRKKYGPIYTLRMGSRTMIIISDSALVHDVLIQRGPMFATRPTENPTRTIFSSNTFTVNASAYGPVWRSLRKNMVQNMLSSIRFREFGSLRQSAMDKLVERIKSEAKDNDGLVWVLRNARFAAFCILLEMCFGIEMDEESILNMDQVMKKVLITLNPRLDDYLPILAPFYSKERARALEVRCEQVDFIVKLIERRRRAIQKPGTDKTASSFSYLDTLFDLKTEGRITTPSNEELVSLCSEFLNGGTDTTGTAIEWGIAQLIVNPEIQSRLYDEIKSTVGDREVEEKDVDKMVFLQAVVKEILRKHPPTYFTLTHSVTEPTTVAGYDVPVGINVEFYLPGINEDPKLWSDPKKFNPDRFISGKEEADITGVTGVKMMPFGIGRRICPGLAMATVHVHLMLAKMVQEFEWSAYPPESEIDFAGKLEFTVVMKKPLRAMVKPRV

SEQ ID NO: 75089 - DNA, 684 bp, Arabidopsis thaliana
  misc_feature (1)..(684): Ceres Seq. ID no. 6429790
  misc_feature (1)..(684): Ortholog of  Ceres SEQ ID NO 12364737 as cited in SEQ ID NO 51089
  misc_feature (1)..(684): Ortholog of  Ceres SEQ ID NO 12581561 as cited in SEQ ID NO 53617
  misc_feature (36)..(36): n is a, c, t, g, unknown, or other
  misc_feature (55)..(55): n is a, c, t, g, unknown, or other
  misc_feature (113)..(113): n is a, c, t, g, unknown, or other
  misc_feature (116)..(116): n is a, c, t, g, unknown, or other
  misc_feature (143)..(143): n is a, c, t, g, unknown, or other
  misc_feature (146)..(146): n is a, c, t, g, unknown, or other
  misc_feature (155)..(155): n is a, c, t, g, unknown, or other
  misc_feature (176)..(176): n is a, c, t, g, unknown, or other
  misc_feature (186)..(186): n is a, c, t, g, unknown, or other
  misc_feature (201)..(201): n is a, c, t, g, unknown, or other
  misc_feature (216)..(216): n is a, c, t, g, unknown, or other
  misc_feature (239)..(239): n is a, c, t, g, unknown, or other
  misc_feature (249)..(249): n is a, c, t, g, unknown, or other
  misc_feature (430)..(430): n is a, c, t, g, unknown, or other
  misc_feature (491)..(491): n is a, c, t, g, unknown, or other
  misc_feature (492)..(492): n is a, c, t, g, unknown, or other
  misc_feature (497)..(497): n is a, c, t, g, unknown, or other
  misc_feature (504)..(504): n is a, c, t, g, unknown, or other
  misc_feature (507)..(507): n is a, c, t, g, unknown, or other
  misc_feature (517)..(517): n is a, c, t, g, unknown, or other
  misc_feature (525)..(525): n is a, c, t, g, unknown, or other
  misc_feature (528)..(528): n is a, c, t, g, unknown, or other
  misc_feature (530)..(530): n is a, c, t, g, unknown, or other
  misc_feature (536)..(536): n is a, c, t, g, unknown, or other
  misc_feature (537)..(537): n is a, c, t, g, unknown, or other
  misc_feature (544)..(544): n is a, c, t, g, unknown, or other
  misc_feature (547)..(547): n is a, c, t, g, unknown, or other
  misc_feature (553)..(553): n is a, c, t, g, unknown, or other
  misc_feature (561)..(561): n is a, c, t, g, unknown, or other
  misc_feature (566)..(566): n is a, c, t, g, unknown, or other
  misc_feature (569)..(569): n is a, c, t, g, unknown, or other
  misc_feature (580)..(580): n is a, c, t, g, unknown, or other
  misc_feature (605)..(605): n is a, c, t, g, unknown, or other
  misc_feature (634)..(634): n is a, c, t, g, unknown, or other
  misc_feature (636)..(636): n is a, c, t, g, unknown, or other
  misc_feature (641)..(641): n is a, c, t, g, unknown, or other
  misc_feature (642)..(642): n is a, c, t, g, unknown, or other
  misc_feature (661)..(661): n is a, c, t, g, unknown, or other
  misc_feature (666)..(666): n is a, c, t, g, unknown, or other
  misc_feature (670)..(670): n is a, c, t, g, unknown, or other
  misc_feature (680)..(680): n is a, c, t, g, unknown, or other
gtgtgaatggaacaggaccaatggtttgcgtcccgnccaagatggcgcaacgtancccgcaacgggcaagtgtgctacctaactccaacgagccgtggtcactattcaccccnccnactaattcgaatgataacagtcctcancancgaagttgnatcttcggccttcattgccgntaatactcancaaatgcacatgganttcattagcgacccncaagcatatggattcgtcacgtngaaggtggcntgttgtggacaagggccgtacaatgggatagggctatgcactccattatcaaatctttgcccaaacagagatctctttgccttttgggatccttttcacccatcagaaaaagcaagtagaatcatagctcaacaaatcctcaatggctctcctgaatacatgcatcccatgaatcttagcnccatcctcaccgttgattccatgacctaagcttctattcctcatctatcccaaatccactnnatgcnttgtttntgntttgcctttntcgtttantananattttnncattggngcnttaatnagtttccntgagntangttgtgagttntgtgttgttcatcaataattagtcnccaattgtgagctgagaagtaatattcancnatctnncgaatgttcgctatcattnttttntgtncaatcttttnattt

SEQ ID NO: 75090 - protein, 150 aa, Arabidopsis thaliana
  peptide (1)..(150): Ceres Seq. ID no. 6429791
  misc_feature (10)..(10): Xaa is any aa, unknown or other
  misc_feature (17)..(17): Xaa is any aa, unknown or other
  misc_feature (36)..(36): Xaa is any aa, unknown or other
  misc_feature (37)..(37): Xaa is any aa, unknown or other
  misc_feature (46)..(46): Xaa is any aa, unknown or other
  misc_feature (47)..(47): Xaa is any aa, unknown or other
  misc_feature (50)..(50): Xaa is any aa, unknown or other
  misc_feature (57)..(57): Xaa is any aa, unknown or other
  misc_feature (60)..(60): Xaa is any aa, unknown or other
  misc_feature (65)..(65): Xaa is any aa, unknown or other
  misc_feature (70)..(70): Xaa is any aa, unknown or other
  misc_feature (78)..(78): Xaa is any aa, unknown or other
  misc_feature (81)..(81): Xaa is any aa, unknown or other
  misc_feature (142)..(142): Xaa is any aa, unknown or other
MEQDQWFASXPRWRNVXRNGQVCYLTPTSRGHYSPXXLIRMITVLXXEVXSSAFIAXNTXQMHMXFISDXQAYGFVTXKVXCCGQGPYNGIGLCTPLSNLCPNRDLFAFWDPFHPSEKASRIIAQQILNGSPEYMHPMNLSXILTVDSMT

SEQ ID NO: 75091 - protein, 110 aa, Arabidopsis thaliana
  peptide (1)..(110): Ceres Seq. ID no. 6429792
  misc_feature (6)..(6): Xaa is any aa, unknown or other
  misc_feature (7)..(7): Xaa is any aa, unknown or other
  misc_feature (10)..(10): Xaa is any aa, unknown or other
  misc_feature (17)..(17): Xaa is any aa, unknown or other
  misc_feature (20)..(20): Xaa is any aa, unknown or other
  misc_feature (25)..(25): Xaa is any aa, unknown or other
  misc_feature (30)..(30): Xaa is any aa, unknown or other
  misc_feature (38)..(38): Xaa is any aa, unknown or other
  misc_feature (41)..(41): Xaa is any aa, unknown or other
  misc_feature (102)..(102): Xaa is any aa, unknown or other
MITVLXXEVXSSAFIAXNTXQMHMXFISDXQAYGFVTXKVXCCGQGPYNGIGLCTPLSNLCPNRDLFAFWDPFHPSEKASRIIAQQILNGSPEYMHPMNLSXILTVDSMT

SEQ ID NO: 75092 - protein, 89 aa, Arabidopsis thaliana
  peptide (1)..(89): Ceres Seq. ID no. 6429793
  misc_feature (4)..(4): Xaa is any aa, unknown or other
  misc_feature (9)..(9): Xaa is any aa, unknown or other
  misc_feature (17)..(17): Xaa is any aa, unknown or other
  misc_feature (20)..(20): Xaa is any aa, unknown or other
  misc_feature (81)..(81): Xaa is any aa, unknown or other
MHMXFISDXQAYGFVTXKVXCCGQGPYNGIGLCTPLSNLCPNRDLFAFWDPFHPSEKASRIIAQQILNGSPEYMHPMNLSXILTVDSMT

SEQ ID NO: 75093 - DNA, 1962 bp, Arabidopsis thaliana
  misc_feature (1)..(1962): Ceres Seq. ID no. 6429827
  misc_feature (1)..(1962): Ortholog of  Ceres SEQ ID NO 13600216 as cited in SEQ ID NO 569
atgtcgttctccgattcagagtcatcctctcacggaggaggaggaggagattacaagttctttcgtcagatcagccgcgatcgattgctccacgagatgcttggatctaccaaaaccggggattctaaagcttggaagatactaataatggatagagttacggtcaaagtaatgtctcagtcttgcaagatggctgatatcactgatcaaggcatttccttggtagaagaactttttaagagaagggaaccaatgcctggcatggacgctatctactttatccaaccttccaaagagaagtaccatcatccttatctcttctccttccatccatggactatcattgtcatgtttctatccgacatgtctggccgggaacccttgtacaggaaggcatttatctttttcagttccactatccccaaagaattggtcaatcacatcaaaagtgattctagcgttttaccacgcattggtgctttacgcgagggatttctaactgatcatgagcaagcattggaaacgctctatgctgaagatgctgagaattcacgccactttcatatttgtttgaatattatggctactagaattgctaccgtatttgcttccctcaaggaactaccctttgttcggtatcgagctgctaagtccactgcttcgagggacttggttccatcaaagcttgctgctgcaatttgggactgtatctcaaaatataaagccattcccaacttcccccagaccgaaacatgtgagctgctcattgtggatagatcagtggatcagatcgctcctatcatacacgaatggacctatgatgctatgtgccatgatttgcttgacatggaggggaataaacatgtcattgaggttcccagtaaaactggtgggcctccggagaaaaaggagatagtgcttgaagatcatgatccagtgtggcttgagcttcgacacacacatatagcagatgctagcgagcgtttgcatgagaaaatgaccaactttgcttcaaaaaacaaagccgcacaaatgagatcaagggacggtagcgagttgtctacacgagatctacagaaaatagttcaggctttgccgcaatatggagaacaagttgacaaactctccactcatgtagagctagctggaaaaattaatagaataatcagagacacaggacttcgggatcttgggcagctggaacaagatcttgtttttggagatgcaggtgccaaggacgttatcaactttctgaggacgaatcaggacacaaacccggaaaacaaattacggcttttgatgatttatgcaacagtgtaccccgagaagtttgaaggtgacaagggtgtgaagctaatgcagcttgctagattatcacctgtggatatgaaggttataagcaacatgcaattgatagctggatccccagaaaacaaagctaagtccggtagtttctccctcaaatttgacgctggaaagacaaaacaagcaaacaggaaagatcgatctggtgaagaagaaacatggcaactgttccggttttatcccatgatcgaggagctgcttgagaaactcgtgaaaggcgatctatctaaaagcgactatctatgtatgaaccaatcaagtcataaggaggagagtgaagcaagaacaggatctgtcaggaagagttctgctcctacagcgttcatatctttcttcacacccagtgactcagtgttgaaaagtgcttctacggagttcaagaagctggggcaacgcatctttgtattcataattggtggggcaactcgatccgagctccgagtttgccacaagttgacaagcagtttgaggagagaagtggtactaggctccactagtttcgatgatcccccacagtacatcacgaagctgaaattgctgtcggaaaaagacatacaaggggctcctgctcagcccttcaaaccacaatactggtga

SEQ ID NO: 75094 - protein, 653 aa, Arabidopsis thaliana
  peptide (1)..(653): Ceres Seq. ID no. 6429828
MSFSDSESSSHGGGGGDYKFFRQISRDRLLHEMLGSTKTGDSKAWKILIMDRVTVKVMSQSCKMADITDQGISLVEELFKRREPMPGMDAIYFIQPSKEKYHHPYLFSFHPWTIIVMFLSDMSGREPLYRKAFIFFSSTIPKELVNHIKSDSSVLPRIGALREGFLTDHEQALETLYAEDAENSRHFHICLNIMATRIATVFASLKELPFVRYRAAKSTASRDLVPSKLAAAIWDCISKYKAIPNFPQTETCELLIVDRSVDQIAPIIHEWTYDAMCHDLLDMEGNKHVIEVPSKTGGPPEKKEIVLEDHDPVWLELRHTHIADASERLHEKMTNFASKNKAAQMRSRDGSELSTRDLQKIVQALPQYGEQVDKLSTHVELAGKINRIIRDTGLRDLGQLEQDLVFGDAGAKDVINFLRTNQDTNPENKLRLLMIYATVYPEKFEGDKGVKLMQLARLSPVDMKVISNMQLIAGSPENKAKSGSFSLKFDAGKTKQANRKDRSGEEETWQLFRFYPMIEELLEKLVKGDLSKSDYLCMNQSSHKEESEARTGSVRKSSAPTAFISFFTPSDSVLKSASTEFKKLGQRIFVFIIGGATRSELRVCHKLTSSLRREVVLGSTSFDDPPQYITKLKLLSEKDIQGAPAQPFKPQYW

SEQ ID NO: 75095 - protein, 621 aa, Arabidopsis thaliana
  peptide (1)..(621): Ceres Seq. ID no. 6429829
MLGSTKTGDSKAWKILIMDRVTVKVMSQSCKMADITDQGISLVEELFKRREPMPGMDAIYFIQPSKEKYHHPYLFSFHPWTIIVMFLSDMSGREPLYRKAFIFFSSTIPKELVNHIKSDSSVLPRIGALREGFLTDHEQALETLYAEDAENSRHFHICLNIMATRIATVFASLKELPFVRYRAAKSTASRDLVPSKLAAAIWDCISKYKAIPNFPQTETCELLIVDRSVDQIAPIIHEWTYDAMCHDLLDMEGNKHVIEVPSKTGGPPEKKEIVLEDHDPVWLELRHTHIADASERLHEKMTNFASKNKAAQMRSRDGSELSTRDLQKIVQALPQYGEQVDKLSTHVELAGKINRIIRDTGLRDLGQLEQDLVFGDAGAKDVINFLRTNQDTNPENKLRLLMIYATVYPEKFEGDKGVKLMQLARLSPVDMKVISNMQLIAGSPENKAKSGSFSLKFDAGKTKQANRKDRSGEEETWQLFRFYPMIEELLEKLVKGDLSKSDYLCMNQSSHKEESEARTGSVRKSSAPTAFISFFTPSDSVLKSASTEFKKLGQRIFVFIIGGATRSELRVCHKLTSSLRREVVLGSTSFDDPPQYITKLKLLSEKDIQGAPAQPFKPQYW

SEQ ID NO: 75096 - protein, 604 aa, Arabidopsis thaliana
  peptide (1)..(604): Ceres Seq. ID no. 6429830
MDRVTVKVMSQSCKMADITDQGISLVEELFKRREPMPGMDAIYFIQPSKEKYHHPYLFSFHPWTIIVMFLSDMSGREPLYRKAFIFFSSTIPKELVNHIKSDSSVLPRIGALREGFLTDHEQALETLYAEDAENSRHFHICLNIMATRIATVFASLKELPFVRYRAAKSTASRDLVPSKLAAAIWDCISKYKAIPNFPQTETCELLIVDRSVDQIAPIIHEWTYDAMCHDLLDMEGNKHVIEVPSKTGGPPEKKEIVLEDHDPVWLELRHTHIADASERLHEKMTNFASKNKAAQMRSRDGSELSTRDLQKIVQALPQYGEQVDKLSTHVELAGKINRIIRDTGLRDLGQLEQDLVFGDAGAKDVINFLRTNQDTNPENKLRLLMIYATVYPEKFEGDKGVKLMQLARLSPVDMKVISNMQLIAGSPENKAKSGSFSLKFDAGKTKQANRKDRSGEEETWQLFRFYPMIEELLEKLVKGDLSKSDYLCMNQSSHKEESEARTGSVRKSSAPTAFISFFTPSDSVLKSASTEFKKLGQRIFVFIIGGATRSELRVCHKLTSSLRREVVLGSTSFDDPPQYITKLKLLSEKDIQGAPAQPFKPQYW

SEQ ID NO: 75097 - DNA, 1311 bp, Arabidopsis thaliana
  misc_feature (1)..(1311): Ceres Seq. ID no. 6429865
  misc_feature (1)..(1311): Ortholog of  Ceres SEQ ID NO 14313049 as cited in SEQ ID NO 54099
atggcggctcaacttcaaccttataacatcatcgagacctgtcacatctctcccccaaagggcaccgttgcatccaccactcttcctctcaccttcttcgatgccccctggctctctctcccactcgccgattctctcttcttcttctcttaccaaaactcaactgaatctttcctccaagactttgtacccaacctcaaacattccctctccatcactctccaacatttcttcccttacgccggtaaactgattatcccgcctcgtcccgaccctccatatttacactacaacgctggcgaagactctcttgttttcaccgtagcagagtctactgaaaccgacttcgaccaactgaagtctgattcccctaaagatatcagtgtgttgcatggcgtcttgcccaagttacctcctcctcacgtctctccggaaggaattcagatgcgaccaataatggcaatgcaagtcaccatcttccctggagctggaatctgtataggcaactcagctacacatgttgtagcagatggagtcaccttcagtcatttcatgaagtattggatgtcattgaccaaatccagcggcaaagatccggccacggttcttctaccctctctgcctattcacagctgcagaaacataatcaaggacccaggagaggtagccgcaggacatttggagcggttttggagccaaaactctgcaaaacacagttcacatgttacgcctgagaacatggtcagagccacttttacattgagccggaagcagatagacaatctcaagagttgggttacagagcagtctgagaatcaatctcctgtttctaccttcgtggtgactctagctttcatttgggaatcgtctcaagtacacacaaccaataccacaaacatactttggcaactgtatggctcctggtatcgtatcagtcaagaacacgatttgctaggagaaaaatgcgtcatggctgcttcagatgcaatcacagcgagaatcaaagatatgttatcaagcgatctgttgaagacagcaccaagatggggacaaggagtacgtaaatgggtcatgtcccattatccaacctcaattgcaggagctccgaaattgggactgtatgacatggattttggattaggaaagccctgcaaaatggagatagtgcacatagaaacaggtggttctatcgcattctcagagtccagagacggcagcaatggagttgagattggaatagcactagagaagaagaaaatggatgtgtttgactcacttctacaaaaggggatcaagaaattcgcaacgtag

SEQ ID NO: 75098 - protein, 436 aa, Arabidopsis thaliana
  peptide (1)..(436): Ceres Seq. ID no. 6429866
MAAQLQPYNIIETCHISPPKGTVASTTLPLTFFDAPWLSLPLADSLFFFSYQNSTESFLQDFVPNLKHSLSITLQHFFPYAGKLIIPPRPDPPYLHYNAGEDSLVFTVAESTETDFDQLKSDSPKDISVLHGVLPKLPPPHVSPEGIQMRPIMAMQVTIFPGAGICIGNSATHVVADGVTFSHFMKYWMSLTKSSGKDPATVLLPSLPIHSCRNIIKDPGEVAAGHLERFWSQNSAKHSSHVTPENMVRATFTLSRKQIDNLKSWVTEQSENQSPVSTFVVTLAFIWESSQVHTTNTTNILWQLYGSWYRISQEHDLLGEKCVMAASDAITARIKDMLSSDLLKTAPRWGQGVRKWVMSHYPTSIAGAPKLGLYDMDFGLGKPCKMEIVHIETGGSIAFSESRDGSNGVEIGIALEKKKMDVFDSLLQKGIKKFAT

SEQ ID NO: 75099 - protein, 288 aa, Arabidopsis thaliana
  peptide (1)..(288): Ceres Seq. ID no. 6429867
MRPIMAMQVTIFPGAGICIGNSATHVVADGVTFSHFMKYWMSLTKSSGKDPATVLLPSLPIHSCRNIIKDPGEVAAGHLERFWSQNSAKHSSHVTPENMVRATFTLSRKQIDNLKSWVTEQSENQSPVSTFVVTLAFIWESSQVHTTNTTNILWQLYGSWYRISQEHDLLGEKCVMAASDAITARIKDMLSSDLLKTAPRWGQGVRKWVMSHYPTSIAGAPKLGLYDMDFGLGKPCKMEIVHIETGGSIAFSESRDGSNGVEIGIALEKKKMDVFDSLLQKGIKKFAT

SEQ ID NO: 75100 - protein, 284 aa, Arabidopsis thaliana
  peptide (1)..(284): Ceres Seq. ID no. 6429868
MAMQVTIFPGAGICIGNSATHVVADGVTFSHFMKYWMSLTKSSGKDPATVLLPSLPIHSCRNIIKDPGEVAAGHLERFWSQNSAKHSSHVTPENMVRATFTLSRKQIDNLKSWVTEQSENQSPVSTFVVTLAFIWESSQVHTTNTTNILWQLYGSWYRISQEHDLLGEKCVMAASDAITARIKDMLSSDLLKTAPRWGQGVRKWVMSHYPTSIAGAPKLGLYDMDFGLGKPCKMEIVHIETGGSIAFSESRDGSNGVEIGIALEKKKMDVFDSLLQKGIKKFAT

SEQ ID NO: 75101 - DNA, 792 bp, Arabidopsis thaliana
  misc_feature (1)..(792): Ceres Seq. ID no. 6429900
  misc_feature (1)..(792): Ortholog of  Ceres SEQ ID NO 12617391 as cited in SEQ ID NO 64114
  misc_feature (1)..(792): Ortholog of  Ceres SEQ ID NO 13595922 as cited in SEQ ID NO 69293
  misc_feature (1)..(792): Ortholog of  Ceres SEQ ID NO 12635496 as cited in SEQ ID NO 0
atgaaacacattttttttaactcgtgtataaccaaaaaaaatatagaggacgaaacgcagtttaactacgagaagaaaggagagaaggggccagagaactggggaagactaaagccagagtgggcaatgtgtggaaaaggcaacatgcagtctccgattgatcttacggacaaaagagtcttgattgatcataatcttggataccttcgtagccagtatttaccttcaaatgccaccattaagaacagaggccatgatatcatgatgaaatttgaaggaggaaatgcaggtttaggtatcactattaatggtactgaatataaacttcaacagattcattggcactctccttccgaacacacactcaatggcaaaaggtttgttcttgaggaacacatggttcatcagagcaaagatggacgcaacgctgttgtcgctttcttttacaaattgggaaaacctgactattttctcctcacgttggaaagatacttgaagaggataactgatacacacgaatcccaggaatttgtcgagatggttcatcctagaacattcggttttgaatcaaaacactattatagatttatcggatcacttacaactccaccgtgttctgaaaatgtgatttggacgatttccaaagagatgaggactgtgacattaaaacaattgatcatgcttcgagtgactgtacacgatcaatctaactcaaatgctagaccgcttcagcgtaaaaatgagcgtccggtggcactttacataccaacatggcatagtaaactatattaa

SEQ ID NO: 75102 - protein, 263 aa, Arabidopsis thaliana
  peptide (1)..(263): Ceres Seq. ID no. 6429901
MKHIFFNSCITKKNIEDETQFNYEKKGEKGPENWGRLKPEWAMCGKGNMQSPIDLTDKRVLIDHNLGYLRSQYLPSNATIKNRGHDIMMKFEGGNAGLGITINGTEYKLQQIHWHSPSEHTLNGKRFVLEEHMVHQSKDGRNAVVAFFYKLGKPDYFLLTLERYLKRITDTHESQEFVEMVHPRTFGFESKHYYRFIGSLTTPPCSENVIWTISKEMRTVTLKQLIMLRVTVHDQSNSNARPLQRKNERPVALYIPTWHSKLY

SEQ ID NO: 75103 - protein, 221 aa, Arabidopsis thaliana
  peptide (1)..(221): Ceres Seq. ID no. 6429902
MCGKGNMQSPIDLTDKRVLIDHNLGYLRSQYLPSNATIKNRGHDIMMKFEGGNAGLGITINGTEYKLQQIHWHSPSEHTLNGKRFVLEEHMVHQSKDGRNAVVAFFYKLGKPDYFLLTLERYLKRITDTHESQEFVEMVHPRTFGFESKHYYRFIGSLTTPPCSENVIWTISKEMRTVTLKQLIMLRVTVHDQSNSNARPLQRKNERPVALYIPTWHSKLY

SEQ ID NO: 75104 - protein, 215 aa, Arabidopsis thaliana
  peptide (1)..(215): Ceres Seq. ID no. 6429903
MQSPIDLTDKRVLIDHNLGYLRSQYLPSNATIKNRGHDIMMKFEGGNAGLGITINGTEYKLQQIHWHSPSEHTLNGKRFVLEEHMVHQSKDGRNAVVAFFYKLGKPDYFLLTLERYLKRITDTHESQEFVEMVHPRTFGFESKHYYRFIGSLTTPPCSENVIWTISKEMRTVTLKQLIMLRVTVHDQSNSNARPLQRKNERPVALYIPTWHSKLY

SEQ ID NO: 75105 - DNA, 2385 bp, Arabidopsis thaliana
  misc_feature (1)..(2385): Ceres Seq. ID no. 6429908
  misc_feature (1)..(2385): Ortholog of  Ceres SEQ ID NO 13623497 as cited in SEQ ID NO 0
atgttagcgattcgatcgtcgaattacctccgatgcataccttctctctgtactaaaacccaaatctctcaattctcctccgtgttaatctcttttagccgccaaatttcccacttgcgtcttagctcgtgccatagagccatgtcttcttcccgcccttctgcatttgatgctctcatgtccaatgctcgtgcagccgccaagaagaagactccccagacaactaatttgtctcgctcgccgaacaaaaggaaaattggagaaacccaagatgctaatttgggcaaaactattgtttccgaaggtacacttccaaaaacggaggatctgctggagcctgtttctgattctgcaaatcccagatcggatacatcgtcaattgcggaggattcaaagacgggagcgaaaaaggctaagactttgagcaagacagacgaaatgaagagcaaaattggattgctgaagaagaagccgaatgatttcgatcctgaaaaaatgtcttgctgggagaaaggggagagagttccgtttctgtttgtcgcattggcttttgatctgatctcaaatgaaagtggccggattgtgattactgatattctgtgtaacatgttgagaactgttattgccactactcctgaggatttggtcgctactgtttatctttcggcgaatgagattgccccggctcatgaaggtgtagaattgggaattggtgagagtacaattatcaaggctatctctgaggcttttggtagaactgaggatcatgttaagaagcagaatacggaactgggagacttgggacttgtagcaaaaggaagccgttcgactcagactatgatgttcaagcccgaaccattgactgttgtcaaggttttcgatacgtttcgacaaattgctaaggaaagtggaaaagatagtaatgaaaagaagaagaatcgaatgaaggcacttcttgtggcgacaacagactgtgaacctctttacttaacacgattacttcaggcaaaattgcggttagggttctcaggtcagactgtcttagccgcattgggacaagccgctgtatataatgaagagcactcaaagccacccccaaataccaagtctcctttagaagaggctgcaaagattgttaaacaagtattcactgtacttcctgtctatgacattattgttcctgctcttctaagtggcggtgtgtggaatcttccaaaaacttgtaactttacattgggtgttccaattggacccatgcttgcaaaaccaaccaaaggtgtagctgagatactgaataaattccaggacatcgttttcacatgtgaatacaaatatgatggggaacgtgcacagatacattttatggaggatggtacatttgagatatacagtcgaaatgctgaaagaaacactgggaagtacccggatgttgctcttgcgttatcaagattaaagaagccttctgtgaaatcttttattctggattgtgaagttgttgctttcgacagggagaaaaagaaaattcttccgttccagattttgagcactcgagcccgtaaaaatgtgaatgtcaatgatatcaaggttggcgtatgcatctttgcttttgacatgttatatctaaatggccaacaacttatccaggagaatcttaaaattcgccgagagaagctatacgaatcatttgaggaagatcctgggtatttccagtttgcaactgctgtaacatctaacgatatcgatgaaatacaaaagtttcttgacgcttctgttgatgttggcattggggactctgtggatcttgtaccaattgctgctttccatggacgtggaaaacgcacaggtgtctatggtgcatttttactcgcttgctatgatgttgataaggaagagttccagagcatttgtaaaattggtactggattttctgatgccatgcttgacgagcggtcgtccagtcttcgctctcaagtgattgctactccaaaacatgaattcttatttaattgtaatgattcaaatatccagcaatactaccgagttggagacagcctcaatccagatgtttggtttgagcccactgaggtaggattatgtttgctttttcgccattctatcgtatgggttgaaatgaaaggtaaaaaatatgtttgcttaaaggtctgggaagtgaaagcagctgacttaacaattagccctgtgcaccgtgcagctactggcatagtggatcctgataaggggatttctcttcgttttcctcgtctacttcgtgtacgggaagacaagaagcccgaggaagcaacatcatctgagcagattgctgatttgtaccaagctcagaaacacaatcatccaagtaatgaagtcaaaggtgacgatgattga

SEQ ID NO: 75106 - protein, 794 aa, Arabidopsis thaliana
  peptide (1)..(794): Ceres Seq. ID no. 6429909
MLAIRSSNYLRCIPSLCTKTQISQFSSVLISFSRQISHLRLSSCHRAMSSSRPSAFDALMSNARAAAKKKTPQTTNLSRSPNKRKIGETQDANLGKTIVSEGTLPKTEDLLEPVSDSANPRSDTSSIAEDSKTGAKKAKTLSKTDEMKSKIGLLKKKPNDFDPEKMSCWEKGERVPFLFVALAFDLISNESGRIVITDILCNMLRTVIATTPEDLVATVYLSANEIAPAHEGVELGIGESTIIKAISEAFGRTEDHVKKQNTELGDLGLVAKGSRSTQTMMFKPEPLTVVKVFDTFRQIAKESGKDSNEKKKNRMKALLVATTDCEPLYLTRLLQAKLRLGFSGQTVLAALGQAAVYNEEHSKPPPNTKSPLEEAAKIVKQVFTVLPVYDIIVPALLSGGVWNLPKTCNFTLGVPIGPMLAKPTKGVAEILNKFQDIVFTCEYKYDGERAQIHFMEDGTFEIYSRNAERNTGKYPDVALALSRLKKPSVKSFILDCEVVAFDREKKKILPFQILSTRARKNVNVNDIKVGVCIFAFDMLYLNGQQLIQENLKIRREKLYESFEEDPGYFQFATAVTSNDIDEIQKFLDASVDVGIGDSVDLVPIAAFHGRGKRTGVYGAFLLACYDVDKEEFQSICKIGTGFSDAMLDERSSSLRSQVIATPKHEFLFNCNDSNIQQYYRVGDSLNPDVWFEPTEVGLCLLFRHSIVWVEMKGKKYVCLKVWEVKAADLTISPVHRAATGIVDPDKGISLRFPRLLRVREDKKPEEATSSEQIADLYQAQKHNHPSNEVKGDDD

SEQ ID NO: 75107 - protein, 747 aa, Arabidopsis thaliana
  peptide (1)..(747): Ceres Seq. ID no. 6429910
MSSSRPSAFDALMSNARAAAKKKTPQTTNLSRSPNKRKIGETQDANLGKTIVSEGTLPKTEDLLEPVSDSANPRSDTSSIAEDSKTGAKKAKTLSKTDEMKSKIGLLKKKPNDFDPEKMSCWEKGERVPFLFVALAFDLISNESGRIVITDILCNMLRTVIATTPEDLVATVYLSANEIAPAHEGVELGIGESTIIKAISEAFGRTEDHVKKQNTELGDLGLVAKGSRSTQTMMFKPEPLTVVKVFDTFRQIAKESGKDSNEKKKNRMKALLVATTDCEPLYLTRLLQAKLRLGFSGQTVLAALGQAAVYNEEHSKPPPNTKSPLEEAAKIVKQVFTVLPVYDIIVPALLSGGVWNLPKTCNFTLGVPIGPMLAKPTKGVAEILNKFQDIVFTCEYKYDGERAQIHFMEDGTFEIYSRNAERNTGKYPDVALALSRLKKPSVKSFILDCEVVAFDREKKKILPFQILSTRARKNVNVNDIKVGVCIFAFDMLYLNGQQLIQENLKIRREKLYESFEEDPGYFQFATAVTSNDIDEIQKFLDASVDVGIGDSVDLVPIAAFHGRGKRTGVYGAFLLACYDVDKEEFQSICKIGTGFSDAMLDERSSSLRSQVIATPKHEFLFNCNDSNIQQYYRVGDSLNPDVWFEPTEVGLCLLFRHSIVWVEMKGKKYVCLKVWEVKAADLTISPVHRAATGIVDPDKGISLRFPRLLRVREDKKPEEATSSEQIADLYQAQKHNHPSNEVKGDDD

SEQ ID NO: 75108 - protein, 735 aa, Arabidopsis thaliana
  peptide (1)..(735): Ceres Seq. ID no. 6429911
MSNARAAAKKKTPQTTNLSRSPNKRKIGETQDANLGKTIVSEGTLPKTEDLLEPVSDSANPRSDTSSIAEDSKTGAKKAKTLSKTDEMKSKIGLLKKKPNDFDPEKMSCWEKGERVPFLFVALAFDLISNESGRIVITDILCNMLRTVIATTPEDLVATVYLSANEIAPAHEGVELGIGESTIIKAISEAFGRTEDHVKKQNTELGDLGLVAKGSRSTQTMMFKPEPLTVVKVFDTFRQIAKESGKDSNEKKKNRMKALLVATTDCEPLYLTRLLQAKLRLGFSGQTVLAALGQAAVYNEEHSKPPPNTKSPLEEAAKIVKQVFTVLPVYDIIVPALLSGGVWNLPKTCNFTLGVPIGPMLAKPTKGVAEILNKFQDIVFTCEYKYDGERAQIHFMEDGTFEIYSRNAERNTGKYPDVALALSRLKKPSVKSFILDCEVVAFDREKKKILPFQILSTRARKNVNVNDIKVGVCIFAFDMLYLNGQQLIQENLKIRREKLYESFEEDPGYFQFATAVTSNDIDEIQKFLDASVDVGIGDSVDLVPIAAFHGRGKRTGVYGAFLLACYDVDKEEFQSICKIGTGFSDAMLDERSSSLRSQVIATPKHEFLFNCNDSNIQQYYRVGDSLNPDVWFEPTEVGLCLLFRHSIVWVEMKGKKYVCLKVWEVKAADLTISPVHRAATGIVDPDKGISLRFPRLLRVREDKKPEEATSSEQIADLYQAQKHNHPSNEVKGDDD

SEQ ID NO: 75109 - DNA, 1404 bp, Arabidopsis thaliana
  misc_feature (1)..(1404): Ceres Seq. ID no. 6430084
  misc_feature (1)..(1404): Ortholog of  Ceres SEQ ID NO 13594345 as cited in SEQ ID NO 58043
  misc_feature (1)..(1404): Ortholog of  Ceres SEQ ID NO 12614112 as cited in SEQ ID NO 60891
  misc_feature (1)..(1404): Ortholog of  Ceres SEQ ID NO 13662880 as cited in SEQ ID NO 65422
  misc_feature (1)..(1404): Ortholog of  Ceres SEQ ID NO 12779098 as cited in SEQ ID NO 67698
  misc_feature (1)..(1404): Ortholog of  Ceres SEQ ID NO 13596180 as cited in SEQ ID NO 67941
  misc_feature (1)..(1404): Ortholog of  Ceres SEQ ID NO 13595961 as cited in SEQ ID NO 68223
atgggatcccgttttgtttctaacgaacaaaaaccacacgtagtttgcgtgccttacccagctcaaggccacattaaccctatgatgaaagtggctaaactcctccacgtcaaaggcttccacgtcaccttcgtcaacaccgtctacaaccacaaccgtctactccgatcccgtggggccaacgcactcgatggacttccttccttccagttcgagtcaatacctgacggtcttccggagactggcgtggacgccacgcaggacatccctgccctttccgagtccacaacgaaaaactgtctcgttccgttcaagaagcttctccagcggattgtcacgagagaggatgtccctccggtgagctgtattgtatcagatggttcgatgagctttactcttgacgtagcggaagagcttggtgttccggagattcatttttggaccactagtgcttgtggcttcatggcttatctacacttttatctcttcatcgagaagggtttatgtccagtaaaagatgcgagttgcttgacgaaggaatacttggacacagttatagattggataccgtcaatgaacaatgtaaaactaaaagacattcctagttttatacgtaccactaatcctaacgacataatgctcaacttcgttgtccgtgaggcatgtcgaaccaaacgtgcctctgctatcattctgaacacgtttgatgaccttgaacatgacataatccagtctatgcaatccattttaccaccggtttatccaatcggaccgcttcatctcttagtaaacagggagattgaagaagatagtgagattggaaggatgggatcaaatctatggaaagaggagactgagtgcttgggatggcttaatactaagtctcgaaatagcgttgtttatgttaactttgggagcataacaataatgaccacggcacagcttttggagtttgcttggggtttggcggcaacgggaaaggagtttctatgggtgatgcggccggattcagtagccggagaggaggcagtgattccaaaagagtttttagcggagacagctgatcgaagaatgctgacaagttggtgtcctcaggagaaagttctttctcatccggcggtcggagggttcttgacccattgcgggtggaattcgacgttagaaagtctttcatgcggagttccaatggttggtattgagatcggtggagatgtcaagaggggagaggttgaggcggtggttagagagctcatggatggagagaaaggaaagaaaatgagagagaaggctgtagagtggcggcgcttggccgagaaagctacaaagcttccgtgtggttcgtcggtgataaattttgagacgattgtcaacaaggttctcttgggaaagatccctaacacgtaa

SEQ ID NO: 75110 - protein, 467 aa, Arabidopsis thaliana
  peptide (1)..(467): Ceres Seq. ID no. 6430085
MGSRFVSNEQKPHVVCVPYPAQGHINPMMKVAKLLHVKGFHVTFVNTVYNHNRLLRSRGANALDGLPSFQFESIPDGLPETGVDATQDIPALSESTTKNCLVPFKKLLQRIVTREDVPPVSCIVSDGSMSFTLDVAEELGVPEIHFWTTSACGFMAYLHFYLFIEKGLCPVKDASCLTKEYLDTVIDWIPSMNNVKLKDIPSFIRTTNPNDIMLNFVVREACRTKRASAIILNTFDDLEHDIIQSMQSILPPVYPIGPLHLLVNREIEEDSEIGRMGSNLWKEETECLGWLNTKSRNSVVYVNFGSITIMTTAQLLEFAWGLAATGKEFLWVMRPDSVAGEEAVIPKEFLAETADRRMLTSWCPQEKVLSHPAVGGFLTHCGWNSTLESLSCGVPMVGIEIGGDVKRGEVEAVVRELMDGEKGKKMREKAVEWRRLAEKATKLPCGSSVINFETIVNKVLLGKIPNT

SEQ ID NO: 75111 - protein, 440 aa, Arabidopsis thaliana
  peptide (1)..(440): Ceres Seq. ID no. 6430086
MMKVAKLLHVKGFHVTFVNTVYNHNRLLRSRGANALDGLPSFQFESIPDGLPETGVDATQDIPALSESTTKNCLVPFKKLLQRIVTREDVPPVSCIVSDGSMSFTLDVAEELGVPEIHFWTTSACGFMAYLHFYLFIEKGLCPVKDASCLTKEYLDTVIDWIPSMNNVKLKDIPSFIRTTNPNDIMLNFVVREACRTKRASAIILNTFDDLEHDIIQSMQSILPPVYPIGPLHLLVNREIEEDSEIGRMGSNLWKEETECLGWLNTKSRNSVVYVNFGSITIMTTAQLLEFAWGLAATGKEFLWVMRPDSVAGEEAVIPKEFLAETADRRMLTSWCPQEKVLSHPAVGGFLTHCGWNSTLESLSCGVPMVGIEIGGDVKRGEVEAVVRELMDGEKGKKMREKAVEWRRLAEKATKLPCGSSVINFETIVNKVLLGKIPNT

SEQ ID NO: 75112 - protein, 439 aa, Arabidopsis thaliana
  peptide (1)..(439): Ceres Seq. ID no. 6430087
MKVAKLLHVKGFHVTFVNTVYNHNRLLRSRGANALDGLPSFQFESIPDGLPETGVDATQDIPALSESTTKNCLVPFKKLLQRIVTREDVPPVSCIVSDGSMSFTLDVAEELGVPEIHFWTTSACGFMAYLHFYLFIEKGLCPVKDASCLTKEYLDTVIDWIPSMNNVKLKDIPSFIRTTNPNDIMLNFVVREACRTKRASAIILNTFDDLEHDIIQSMQSILPPVYPIGPLHLLVNREIEEDSEIGRMGSNLWKEETECLGWLNTKSRNSVVYVNFGSITIMTTAQLLEFAWGLAATGKEFLWVMRPDSVAGEEAVIPKEFLAETADRRMLTSWCPQEKVLSHPAVGGFLTHCGWNSTLESLSCGVPMVGIEIGGDVKRGEVEAVVRELMDGEKGKKMREKAVEWRRLAEKATKLPCGSSVINFETIVNKVLLGKIPNT

SEQ ID NO: 75113 - DNA, 2319 bp, Arabidopsis thaliana
  misc_feature (1)..(2319): Ceres Seq. ID no. 6430108
  misc_feature (1)..(2319): Ortholog of  Ceres SEQ ID NO 13654989 as cited in SEQ ID NO 63117
  misc_feature (1)..(2319): Ortholog of  Ceres SEQ ID NO 13655640 as cited in SEQ ID NO 63844
  misc_feature (1)..(2319): Ortholog of  Ceres SEQ ID NO 13584744 as cited in SEQ ID NO 69137
atgtcagacttaggcgagtcgccgagttcttcaccaccagcaccaccagctgataccgctcctccaccagagactccatcagaaaactcagctcttccacctgttgattcctctcctcctagtccaccagctgattcatcatcaacaccgccgctgtcagaaccatccactcctcctccagattcacagcttcctcctttaccttcgattcttcctccgctaacagattctccacctccaccttccgattcttctccacccgttgattcaaccccttctccgccgccaccgacgtcaaacgaatctccttctcctccagaagattccgaaacaccacctgctccaccaaatgaatccaatgacaacaaccctcctccgtctcaagatcttcaatcgcctcctccatcgtcgccgtcgccgaatgtaggacccacaaacccggaatcaccaccgttacaatctcctccagctccaccagcatcagatcctacaaattcaccgccagcttcaccattagaccctaccaatcctcccccaatacaaccatcaggaccagccacttctcctccggctaatcccaacgctccgccgagcccattccccacagtaccacccaaaactccttctagtggacctgtggtgtctccatctctcacatcccctagtaaaggaactcctactccaaaccaaggcaatggagatggcggtggcggtggtggcggctatcaagggaagactatggttggtatggctgtagccggtttcgcaatcatggcgcttataggcgttgtgttcttagtgagaagaaagaaaaagagaaacattgatagctataatcactcacagtacttgccacatcccaatttctctgttaaatcagatggattcttatacggtcaagatccaggtaaaggatactcctctggtcctaatggttcaatgtataacaattcacagcaacaacaatcctctatgggaaacagttatggtacagctggtggtggttatcctcatcatcaaatgcaatcaagtggcacacctgactctgctatactcggaagtggccagactcatttcagttacgaagagcttgctgagataacacaaggctttgctcgcaaaaacattcttggagaaggcggatttggatgtgtctataaaggtacattgcaggatggtaaagttgttgcggttaagcagcttaaagctggaagtggacaaggtgaccgtgaattcaaagcagaggttgagatcatcagccgcgttcatcatcgccatttggtctctctggttggttactgcatttcagaccagcatagattgcttatctatgagtatgtttctaatcaaaccttggagcatcatttgcatggaaagggtttgccagttttagagtggtctaagagagtccggatcgctataggatcagccaaagggttggcatatcttcacgaagactgtcatccgaaaatcattcacagagatataaagtcagcaaatattcttctagatgatgaatatgaagctcaggcaataatgaaatcctccttttcgttaaatctatcttatgactgtaaagttttagttaatgagacttgttctgttttttggatgtttaggttgctgattttggacttgctagactcaatgatacaacacaaactcatgtttcaactcgggttatgggaaccttcgggtaagcaaacattcatcacaaactctactccaaaactggaccttattgatccaatgcctgatgaaaagtacctagcgccggaatatgcatcaagtggaaaattgactgatagatccgatgtattctcattcggggttgttctcttagagcttgtaactggacggaaaccagttgaccagactcagcctctaggagaagagagtttggttgaatgggcgcgcccgctgcttctcaaagccattgagaccggagatttaagcgaactgattgatacacggcttgaaaagcgttatgtggagcatgaagtcttcagaatgatcgagacagccgctgcatgtgttagacattctggtccaaaacgcccacgcatggttcaggttgtgagagcattggactgcgacggagactcgggagatattagcaacggaatcaaaattgggcaaagcacaacttatgactcagggcaatacaatgaagacattatgaaattcaggaaaatggcgtttggtggtgataacagcgtagagtcaggattgtacagtggaaactactctgccaaaagctcttcagatttctcagggaatgaatctgagactcggcctttcaacaaccgacggttctga

SEQ ID NO: 75114 - protein, 772 aa, Arabidopsis thaliana
  peptide (1)..(772): Ceres Seq. ID no. 6430109
MSDLGESPSSSPPAPPADTAPPPETPSENSALPPVDSSPPSPPADSSSTPPLSEPSTPPPDSQLPPLPSILPPLTDSPPPPSDSSPPVDSTPSPPPPTSNESPSPPEDSETPPAPPNESNDNNPPPSQDLQSPPPSSPSPNVGPTNPESPPLQSPPAPPASDPTNSPPASPLDPTNPPPIQPSGPATSPPANPNAPPSPFPTVPPKTPSSGPVVSPSLTSPSKGTPTPNQGNGDGGGGGGGYQGKTMVGMAVAGFAIMALIGVVFLVRRKKKRNIDSYNHSQYLPHPNFSVKSDGFLYGQDPGKGYSSGPNGSMYNNSQQQQSSMGNSYGTAGGGYPHHQMQSSGTPDSAILGSGQTHFSYEELAEITQGFARKNILGEGGFGCVYKGTLQDGKVVAVKQLKAGSGQGDREFKAEVEIISRVHHRHLVSLVGYCISDQHRLLIYEYVSNQTLEHHLHGKGLPVLEWSKRVRIAIGSAKGLAYLHEDCHPKIIHRDIKSANILLDDEYEAQAIMKSSFSLNLSYDCKVLVNETCSVFWMFRLLILDLLDSMIQHKLMFQLGLWEPSGKQTFITNSTPKLDLIDPMPDEKYLAPEYASSGKLTDRSDVFSFGVVLLELVTGRKPVDQTQPLGEESLVEWARPLLLKAIETGDLSELIDTRLEKRYVEHEVFRMIETAAACVRHSGPKRPRMVQVVRALDCDGDSGDISNGIKIGQSTTYDSGQYNEDIMKFRKMAFGGDNSVESGLYSGNYSAKSSSDFSGNESETRPFNNRRF

SEQ ID NO: 75115 - protein, 526 aa, Arabidopsis thaliana
  peptide (1)..(526): Ceres Seq. ID no. 6430110
MVGMAVAGFAIMALIGVVFLVRRKKKRNIDSYNHSQYLPHPNFSVKSDGFLYGQDPGKGYSSGPNGSMYNNSQQQQSSMGNSYGTAGGGYPHHQMQSSGTPDSAILGSGQTHFSYEELAEITQGFARKNILGEGGFGCVYKGTLQDGKVVAVKQLKAGSGQGDREFKAEVEIISRVHHRHLVSLVGYCISDQHRLLIYEYVSNQTLEHHLHGKGLPVLEWSKRVRIAIGSAKGLAYLHEDCHPKIIHRDIKSANILLDDEYEAQAIMKSSFSLNLSYDCKVLVNETCSVFWMFRLLILDLLDSMIQHKLMFQLGLWEPSGKQTFITNSTPKLDLIDPMPDEKYLAPEYASSGKLTDRSDVFSFGVVLLELVTGRKPVDQTQPLGEESLVEWARPLLLKAIETGDLSELIDTRLEKRYVEHEVFRMIETAAACVRHSGPKRPRMVQVVRALDCDGDSGDISNGIKIGQSTTYDSGQYNEDIMKFRKMAFGGDNSVESGLYSGNYSAKSSSDFSGNESETRPFNNRRF

SEQ ID NO: 75116 - protein, 523 aa, Arabidopsis thaliana
  peptide (1)..(523): Ceres Seq. ID no. 6430111
MAVAGFAIMALIGVVFLVRRKKKRNIDSYNHSQYLPHPNFSVKSDGFLYGQDPGKGYSSGPNGSMYNNSQQQQSSMGNSYGTAGGGYPHHQMQSSGTPDSAILGSGQTHFSYEELAEITQGFARKNILGEGGFGCVYKGTLQDGKVVAVKQLKAGSGQGDREFKAEVEIISRVHHRHLVSLVGYCISDQHRLLIYEYVSNQTLEHHLHGKGLPVLEWSKRVRIAIGSAKGLAYLHEDCHPKIIHRDIKSANILLDDEYEAQAIMKSSFSLNLSYDCKVLVNETCSVFWMFRLLILDLLDSMIQHKLMFQLGLWEPSGKQTFITNSTPKLDLIDPMPDEKYLAPEYASSGKLTDRSDVFSFGVVLLELVTGRKPVDQTQPLGEESLVEWARPLLLKAIETGDLSELIDTRLEKRYVEHEVFRMIETAAACVRHSGPKRPRMVQVVRALDCDGDSGDISNGIKIGQSTTYDSGQYNEDIMKFRKMAFGGDNSVESGLYSGNYSAKSSSDFSGNESETRPFNNRRF

SEQ ID NO: 75117 - DNA, 5118 bp, Arabidopsis thaliana
  misc_feature (1)..(5118): Ceres Seq. ID no. 6430154
  misc_feature (1)..(5118): Ortholog of  Ceres SEQ ID NO 14311059 as cited in SEQ ID NO 53484
atggcttgtggaatcacagacagtccctcaaaggcttttccaagagcgttgcgagatgtaaaggataggagcgggcaagaggagtttctctgggaagctgatatggttaaaataaaggcccaagatttgaaggggaaagaggtgcgattaaacactcgtcttctgtaccagcagacaaagttcaacttactccgtgaagaaagcgagggatatgccaaattggccactcttttgtgccgaggatctgcaagttcttcgcacaatgcatcagcagcaacgatgggaattatcaagtcattaattgggcattttgacctggatccaaaccgtgttttcgacattgttttagattgctttgaactcgaacaagattacgacacatttctcaatctaattcctatctttcccaagtctcatgcttcacaaattcttggatttaaattccaatactatcagagactagaggtgaatagccctgttccagttgggctctataagcttacagccttgctagtaaaggaagagtttatcaatcttgaaagcatatatgcacatctgctacctaaggacgaggaagtttttgaggattataatgtttcttctgcaaagcggtttgaagaggccaataaaattggaaagattaatctcgctgctactgggaaggatcttatggaagatgagaagcaaggagatgtcacagtagatctctttgctgctttagacatggaaagtgaagctgttactgagcgattaccagagcttgaaaataatcagactctgggcctacttaatggtttcctctctgtggacgattggtatcatgcaaatatcttgttcgagcgtcttgcacctcttaatccagtggcacacgatcagatctgtagtgggttgtttaggcttatagagaagtcaatcactcattcttatcgcattgctcgtcagacacgttttcaaagttcttcttctgcgagcacagttaagctcacacccactgctaatacgacagctaataggacttatctagatcttccgaaagaagtgtttcaaatgcttgttactgttggaccctacctctaccgcaatacacaattgttgcagaagatttgtagagtattaagggcttactacttgtcggccttggatcttgttcgcgatgggtcaaatcaagaaggtagtgcatatgaagtttctcgtgggcacctgaaagaagttaggttgagagtggaagaagctctaggaacatgtcttctgccatcgttacagttagtacctgcaaatccagcagttggtcatgagatttgggaagtgatgagtctccttccatatgaggctcgttatcgcttatatggtgagtgggaaaaggacgatgagcagaatcctttgttgttggcagcaaggcaagtggcaaagttggatactagaagaattctgaaacggcttgcaaaagaaaatctgaagcagttaggaaggatggtggcaaaactagctcatgccaatcccatgacggtgcttcggacaattgtaaatcagattgaagcatacagagatatgattgctcctgttgtggatgccttcaagtacttgacacagcttgagtatgatatcctggaatatgtagtgattgagagactggcacaaagcggacgagataaacttaaagacgacgggattaatttatcagactggcttcaatctttggcatccttttggggtcacctgtgtaagaagtatccatcaatggagttgaggggtctttttcagtatctcgtaaaccagttaaagaggggccaagggattgagcttgttcttctccaggaactggtccagcagatggcaaatgtacaatacactgagaaccttactgaagatcagttggatgccatggcaggaagtgagactttacgttatcatgcaacatcatttggcatgatgcgaaacaacaaggcacttatcaaatcatcaaaccgtctacgagattcgttacttccaaatgatgaaccaaagttagctatcccccttttgttacttatcgcgcagcatcgttctctagttgtggtgaatgcggatgcgccttatattaagatggtcactgaacagttcgacagatgtcatggaattcttctccaatacgtggacttcctttctagtgctgtcagtcctactactgcttatgctcggctggtaccttcgcttgatgagcttgttcatacataccatctcgaagcagaggtcgcatttttggtatttcgccctgtgatgaggctcttcaagtgtcgacggaatggtgatgtttcatggcctttagatagtggggaatctatggatgcggattctgaaatatcagagtctgagagttccatgattctcgatgtcggtacatctgaaaaagctgtaacgtggtctgatgttcttgatacagtaaggacaatgctgccctcaaaagcttggaatagtctatcgccagacctctacgctacattttgggggcttacgctttatgatctccatgtccccagaaatcgttatgagtctgagatatctaaacagcatactgcccttaagacacttgaagaggttgctgataattctagctcagcaattaccaagaggaagaaagagaaggaaaggattcaagagtctcttgatcgtctaaccggtgagctgaaaaagcatgaagaacatgtggcttctgtccgtagaaggctttcacgtgaaaaggatacatggttgagctcctgtccagatactttgaagattaatatggagttcctgcagcgttgtattttccctcgttgcacatttagcatggcagattctgtgtactgcgcgatgtttgtaaatatgcttcactcgcttggaacacccttttttaacactgtcaaccacattgatgtcctgatatgtaaaacgctgcaaccaatgatctgctgctgtactgaatatgaagttggaagactggggaggtttttgtttgagaccttgaagattgcataccactggaagagtaaagaatcagtctatgaacatgagtgcggaaacatgccagggtttgctgtttattatagatacccgaacagccagcgtgtcacatttggacaatttgtgaagtatttagctatcacgtgttctgcttcaattaatggtaacaaagtcttgttccttctgtgtttcatgtctgtttcatctgttgatctgaaagccaagattaaaaatgatgagcgagaggaccttaaggtcttagcaactggtgttggggctgctctgtctgcaagaaaaccacattgggttacagacgaagaatttagcatgggcttccttgaactaaaggctccgccagtacatactccaaaacatgcttcttcccagaatggcttgttagttggtgtctcccaaggtgaaccaactggggaaagagctactgttaaccagcagcctgagtctggtggattgggcaaggaccagatgttgaaaactaaacctctagatggaagaacggaaagtataccttcaaaatctgatcaaggacatctaaaatcaaagggaggcaatccattggattcccaaccatccatatctaagaagtcaatggaacaaaaggaaacagatgaaacacccagaatatctgacgagaatcctgtcaaacctgcttcaaaatattctgaagccgagttaaaagcttcctctaaacgaggtgcgtcagtgaacaaatctgcaaagcaagattttggaaaagatgatggaaagtccggtaaagctattggaagaacatccacagctgacaaagatcttaattatctggagagcaggcaatcaggtttgaccaaagctctttccagcacagcagccaatggtagcatagctactgggtcgtccaaagtaaaagatgatggcgctgaagctttggatgcacaaaagcaatcttctcggactgttcattcccctaggcatgaaattgtcacttctgtgagatccagtgataggttacaaaaacgagctaatgctgttgaagatagtgaaaggataagtaaacgtcgtaaaggagatgctgagcacaaagagcatgacagtgagcctcgatcgagtgaccgagatagatcagtcgaggcccgattggatttaaacaaaacagttactgatgaccaaagcacccatagggatcaagatagatcaaaggataagggttatgaaagacaggatcgagaccacagagaaagagtcgatcgttctgataaacctcgtggagatgatgttgagaaagcacgagacaaatccttggaacgtcatggtagagaacgctcagttgagaagggtctagataaaggaacaactaggagttatgatagaaacaaggatgaaagaaacaaagatgatagaagcaaactgcgtcatagtgaagcatcacttgagaaatctcatcctgatgaccattttcattctcaaggtttacccccacctccacctttacctcctaacatcattccacattctatggccgcaaaagaagacctcgaaagaagggctggcggtgcaaggcattctcagaggctttccccgaggcatgaagaaagagagaaacgacgctctgaagagaatttatcagtttctgtggatgatgcaaaacgtagaagagatgatgatattagggaccgaaagcgagatgaccgagaaacaatcactgtgaagggagaagaaagagaaagggaaagggaaagagagagggaaagagaaaaaagcctccctttgaaagaggattttgaagcctccaagagaaggaagcttaagagggagcaacaggtcccatctgcagagccaggagaatactctcctatgccacatcattcgtctttatcgaccagtatgggaccatcatcgtacgaaggcagagagcggaagagcagtagtatgattcaacacggaggttatcttgaagagccaagcatcagacttcttggaaaagaagcttccagcaaaatggctcgtcgtgatcctgacccaattgcaaaatccaaatccaagaatagcaatttccttgacattgctctagaatctatgaccgtgaatgggaagacgacaagaggagagcagagcggaagcggagagatcggaagtagagagtga

SEQ ID NO: 75118 - protein, 1705 aa, Arabidopsis thaliana
  peptide (1)..(1705): Ceres Seq. ID no. 6430155
MACGITDSPSKAFPRALRDVKDRSGQEEFLWEADMVKIKAQDLKGKEVRLNTRLLYQQTKFNLLREESEGYAKLATLLCRGSASSSHNASAATMGIIKSLIGHFDLDPNRVFDIVLDCFELEQDYDTFLNLIPIFPKSHASQILGFKFQYYQRLEVNSPVPVGLYKLTALLVKEEFINLESIYAHLLPKDEEVFEDYNVSSAKRFEEANKIGKINLAATGKDLMEDEKQGDVTVDLFAALDMESEAVTERLPELENNQTLGLLNGFLSVDDWYHANILFERLAPLNPVAHDQICSGLFRLIEKSITHSYRIARQTRFQSSSSASTVKLTPTANTTANRTYLDLPKEVFQMLVTVGPYLYRNTQLLQKICRVLRAYYLSALDLVRDGSNQEGSAYEVSRGHLKEVRLRVEEALGTCLLPSLQLVPANPAVGHEIWEVMSLLPYEARYRLYGEWEKDDEQNPLLLAARQVAKLDTRRILKRLAKENLKQLGRMVAKLAHANPMTVLRTIVNQIEAYRDMIAPVVDAFKYLTQLEYDILEYVVIERLAQSGRDKLKDDGINLSDWLQSLASFWGHLCKKYPSMELRGLFQYLVNQLKRGQGIELVLLQELVQQMANVQYTENLTEDQLDAMAGSETLRYHATSFGMMRNNKALIKSSNRLRDSLLPNDEPKLAIPLLLLIAQHRSLVVVNADAPYIKMVTEQFDRCHGILLQYVDFLSSAVSPTTAYARLVPSLDELVHTYHLEAEVAFLVFRPVMRLFKCRRNGDVSWPLDSGESMDADSEISESESSMILDVGTSEKAVTWSDVLDTVRTMLPSKAWNSLSPDLYATFWGLTLYDLHVPRNRYESEISKQHTALKTLEEVADNSSSAITKRKKEKERIQESLDRLTGELKKHEEHVASVRRRLSREKDTWLSSCPDTLKINMEFLQRCIFPRCTFSMADSVYCAMFVNMLHSLGTPFFNTVNHIDVLICKTLQPMICCCTEYEVGRLGRFLFETLKIAYHWKSKESVYEHECGNMPGFAVYYRYPNSQRVTFGQFVKYLAITCSASINGNKVLFLLCFMSVSSVDLKAKIKNDEREDLKVLATGVGAALSARKPHWVTDEEFSMGFLELKAPPVHTPKHASSQNGLLVGVSQGEPTGERATVNQQPESGGLGKDQMLKTKPLDGRTESIPSKSDQGHLKSKGGNPLDSQPSISKKSMEQKETDETPRISDENPVKPASKYSEAELKASSKRGASVNKSAKQDFGKDDGKSGKAIGRTSTADKDLNYLESRQSGLTKALSSTAANGSIATGSSKVKDDGAEALDAQKQSSRTVHSPRHEIVTSVRSSDRLQKRANAVEDSERISKRRKGDAEHKEHDSEPRSSDRDRSVEARLDLNKTVTDDQSTHRDQDRSKDKGYERQDRDHRERVDRSDKPRGDDVEKARDKSLERHGRERSVEKGLDKGTTRSYDRNKDERNKDDRSKLRHSEASLEKSHPDDHFHSQGLPPPPPLPPNIIPHSMAAKEDLERRAGGARHSQRLSPRHEEREKRRSEENLSVSVDDAKRRRDDDIRDRKRDDRETITVKGEEREREREREREREKSLPLKEDFEASKRRKLKREQQVPSAEPGEYSPMPHHSSLSTSMGPSSYEGRERKSSSMIQHGGYLEEPSIRLLGKEASSKMARRDPDPIAKSKSKNSNFLDIALESMTVNGKTTRGEQSGSGEIGSRE

SEQ ID NO: 75119 - protein, 1671 aa, Arabidopsis thaliana
  peptide (1)..(1671): Ceres Seq. ID no. 6430156
MVKIKAQDLKGKEVRLNTRLLYQQTKFNLLREESEGYAKLATLLCRGSASSSHNASAATMGIIKSLIGHFDLDPNRVFDIVLDCFELEQDYDTFLNLIPIFPKSHASQILGFKFQYYQRLEVNSPVPVGLYKLTALLVKEEFINLESIYAHLLPKDEEVFEDYNVSSAKRFEEANKIGKINLAATGKDLMEDEKQGDVTVDLFAALDMESEAVTERLPELENNQTLGLLNGFLSVDDWYHANILFERLAPLNPVAHDQICSGLFRLIEKSITHSYRIARQTRFQSSSSASTVKLTPTANTTANRTYLDLPKEVFQMLVTVGPYLYRNTQLLQKICRVLRAYYLSALDLVRDGSNQEGSAYEVSRGHLKEVRLRVEEALGTCLLPSLQLVPANPAVGHEIWEVMSLLPYEARYRLYGEWEKDDEQNPLLLAARQVAKLDTRRILKRLAKENLKQLGRMVAKLAHANPMTVLRTIVNQIEAYRDMIAPVVDAFKYLTQLEYDILEYVVIERLAQSGRDKLKDDGINLSDWLQSLASFWGHLCKKYPSMELRGLFQYLVNQLKRGQGIELVLLQELVQQMANVQYTENLTEDQLDAMAGSETLRYHATSFGMMRNNKALIKSSNRLRDSLLPNDEPKLAIPLLLLIAQHRSLVVVNADAPYIKMVTEQFDRCHGILLQYVDFLSSAVSPTTAYARLVPSLDELVHTYHLEAEVAFLVFRPVMRLFKCRRNGDVSWPLDSGESMDADSEISESESSMILDVGTSEKAVTWSDVLDTVRTMLPSKAWNSLSPDLYATFWGLTLYDLHVPRNRYESEISKQHTALKTLEEVADNSSSAITKRKKEKERIQESLDRLTGELKKHEEHVASVRRRLSREKDTWLSSCPDTLKINMEFLQRCIFPRCTFSMADSVYCAMFVNMLHSLGTPFFNTVNHIDVLICKTLQPMICCCTEYEVGRLGRFLFETLKIAYHWKSKESVYEHECGNMPGFAVYYRYPNSQRVTFGQFVKYLAITCSASINGNKVLFLLCFMSVSSVDLKAKIKNDEREDLKVLATGVGAALSARKPHWVTDEEFSMGFLELKAPPVHTPKHASSQNGLLVGVSQGEPTGERATVNQQPESGGLGKDQMLKTKPLDGRTESIPSKSDQGHLKSKGGNPLDSQPSISKKSMEQKETDETPRISDENPVKPASKYSEAELKASSKRGASVNKSAKQDFGKDDGKSGKAIGRTSTADKDLNYLESRQSGLTKALSSTAANGSIATGSSKVKDDGAEALDAQKQSSRTVHSPRHEIVTSVRSSDRLQKRANAVEDSERISKRRKGDAEHKEHDSEPRSSDRDRSVEARLDLNKTVTDDQSTHRDQDRSKDKGYERQDRDHRERVDRSDKPRGDDVEKARDKSLERHGRERSVEKGLDKGTTRSYDRNKDERNKDDRSKLRHSEASLEKSHPDDHFHSQGLPPPPPLPPNIIPHSMAAKEDLERRAGGARHSQRLSPRHEEREKRRSEENLSVSVDDAKRRRDDDIRDRKRDDRETITVKGEEREREREREREREKSLPLKEDFEASKRRKLKREQQVPSAEPGEYSPMPHHSSLSTSMGPSSYEGRERKSSSMIQHGGYLEEPSIRLLGKEASSKMARRDPDPIAKSKSKNSNFLDIALESMTVNGKTTRGEQSGSGEIGSRE

SEQ ID NO: 75120 - protein, 1612 aa, Arabidopsis thaliana
  peptide (1)..(1612): Ceres Seq. ID no. 6430157
MGIIKSLIGHFDLDPNRVFDIVLDCFELEQDYDTFLNLIPIFPKSHASQILGFKFQYYQRLEVNSPVPVGLYKLTALLVKEEFINLESIYAHLLPKDEEVFEDYNVSSAKRFEEANKIGKINLAATGKDLMEDEKQGDVTVDLFAALDMESEAVTERLPELENNQTLGLLNGFLSVDDWYHANILFERLAPLNPVAHDQICSGLFRLIEKSITHSYRIARQTRFQSSSSASTVKLTPTANTTANRTYLDLPKEVFQMLVTVGPYLYRNTQLLQKICRVLRAYYLSALDLVRDGSNQEGSAYEVSRGHLKEVRLRVEEALGTCLLPSLQLVPANPAVGHEIWEVMSLLPYEARYRLYGEWEKDDEQNPLLLAARQVAKLDTRRILKRLAKENLKQLGRMVAKLAHANPMTVLRTIVNQIEAYRDMIAPVVDAFKYLTQLEYDILEYVVIERLAQSGRDKLKDDGINLSDWLQSLASFWGHLCKKYPSMELRGLFQYLVNQLKRGQGIELVLLQELVQQMANVQYTENLTEDQLDAMAGSETLRYHATSFGMMRNNKALIKSSNRLRDSLLPNDEPKLAIPLLLLIAQHRSLVVVNADAPYIKMVTEQFDRCHGILLQYVDFLSSAVSPTTAYARLVPSLDELVHTYHLEAEVAFLVFRPVMRLFKCRRNGDVSWPLDSGESMDADSEISESESSMILDVGTSEKAVTWSDVLDTVRTMLPSKAWNSLSPDLYATFWGLTLYDLHVPRNRYESEISKQHTALKTLEEVADNSSSAITKRKKEKERIQESLDRLTGELKKHEEHVASVRRRLSREKDTWLSSCPDTLKINMEFLQRCIFPRCTFSMADSVYCAMFVNMLHSLGTPFFNTVNHIDVLICKTLQPMICCCTEYEVGRLGRFLFETLKIAYHWKSKESVYEHECGNMPGFAVYYRYPNSQRVTFGQFVKYLAITCSASINGNKVLFLLCFMSVSSVDLKAKIKNDEREDLKVLATGVGAALSARKPHWVTDEEFSMGFLELKAPPVHTPKHASSQNGLLVGVSQGEPTGERATVNQQPESGGLGKDQMLKTKPLDGRTESIPSKSDQGHLKSKGGNPLDSQPSISKKSMEQKETDETPRISDENPVKPASKYSEAELKASSKRGASVNKSAKQDFGKDDGKSGKAIGRTSTADKDLNYLESRQSGLTKALSSTAANGSIATGSSKVKDDGAEALDAQKQSSRTVHSPRHEIVTSVRSSDRLQKRANAVEDSERISKRRKGDAEHKEHDSEPRSSDRDRSVEARLDLNKTVTDDQSTHRDQDRSKDKGYERQDRDHRERVDRSDKPRGDDVEKARDKSLERHGRERSVEKGLDKGTTRSYDRNKDERNKDDRSKLRHSEASLEKSHPDDHFHSQGLPPPPPLPPNIIPHSMAAKEDLERRAGGARHSQRLSPRHEEREKRRSEENLSVSVDDAKRRRDDDIRDRKRDDRETITVKGEEREREREREREREKSLPLKEDFEASKRRKLKREQQVPSAEPGEYSPMPHHSSLSTSMGPSSYEGRERKSSSMIQHGGYLEEPSIRLLGKEASSKMARRDPDPIAKSKSKNSNFLDIALESMTVNGKTTRGEQSGSGEIGSRE

SEQ ID NO: 75121 - DNA, 2718 bp, Arabidopsis thaliana
  misc_feature (1)..(2718): Ceres Seq. ID no. 6430174
  misc_feature (1)..(2718): Ortholog of  Ceres SEQ ID NO 13663942 as cited in SEQ ID NO 67573
atgcgtctgcgtcaccaaggaggacaatacttggctcgcggtatggaacccgtgtactggtcaaacaaggtggattcaacccatgacttatatgacaactatactctcggatcctaccaaaataatagctacaatatattggcacacactggttttggctacgaccacgaattccaaatttatgaaattaactccaattcatggaggattattgatgccactttggacttcaaattagggtatattggtcgtggcgtgtctttgaagggaaagacttactggattgctagtggtgaagaagagaaacggcttggcaaattcttaatcagttttgattatacgacagaaagatttgaacgtctatgtcttccgaataagtatccttgttatgcaactctggctctatccgttgttagagaagagaaactttccatgttatcgcaacgcggaattaaatcaaaggcagaaatatgggtgacaaataagattggtgagacacaagtggtgtcgtggagcatggtcttagctttggatttgcagcctaaacgttgtattggggaaagcggaagtttcttggtcgacgagaagaagagagtggtcgtgtgttgtgataatattagagaccaaggaaaaaccacgtttgactcaaatctaccaaggtatcacaggcaaaagaaaaagggacgaatgatcatagtgtttgacgttgaatcaatgagactccccgtcaccgtcaaagccactaagccgtcgtttctcgtcatttggatccgatactcctccgccgcgtcgtcgccgacagtctccttgaatccaagtggacgattacagcaaactctcgcaggatctgtggaagtgaaaggaaaatctctgcactccggtaagttctcgacggtgaagctaaatccggagatcgccggagctggtaggttcttcgagtttcgatccagattcatccctgcgtcgattgaatttgctcaggaatcgcctctttgcacgacgctgttgaaagatgagctcaaaatccgaaccgttgagcatttgttatcagctcttgaggcgaagggagttgataattgcaggattcaaatcgagagcgaaagttccgatgatcgagaagtcgaggtccctatttttgatggatcagctaaagaatgggtcgatgcgatacaaggagttggcataaacgcggctcaaaaccatgatggtgaaagtgtagagaagatggtcgcacatgtgaacaagcctgtagactcggatcacttgtggtatcgacttcccacaggctgccaatggttttcttggagacctatccatgagtcttcttttgcaaaggatatcgcatcatcaagaaccttctgtgtctatgaagaggtggagcgtatgcgtgaagcagggctcattaaaggaggttctctggataacgccatagtttgtagcgctgagcatggatggatgaatcctcctctgcgaatgaggaggaggaggtgcgatcttcaaccgaagagaacgagaatgtgcgatcttcaaccgaagagaacgagtatgtgcgatcttccaccgaagctggtaggggagaagatcctcacgaggattccgataacatctctgagagcggtgcgatccacttgcaaattatggaacgctttaaccaaagatcgggttctggttagattccatctccgtcgcagcaaggaggaagaagaagacacgatggatctatctataaagcaggtagatttgcttaatcaagtcgagatatctagagtgtatcactgcgacggcttgttgttatgcgtggctaaggacaactcgagggtcgtggtttggaacccttatttggggcaaacaagatggatcagacccagaacagaatccaacataggagacagctatgctcttggatacgacatcaaccgtaaccacaaaatcttgaggatggtgcagacaagaaacgtttccgtttacaggtacgaaatctacgacttgcgctctaattcatggagggttctcgaggtcactcccaacggggaaatggaccctaatcatcccctctacggcgtttctgtgaagggaaatacctacttttttgcgcatgaggatagcagcagtggtgaaattgatgaagatggcgacataatcgatcttgaagatttcttactctgttttgattttacaacagagacatttggtctgcgtctgcctcttccgtttcactctactatcgatgcgactgtgaccctctcttgtgttagagaccagcagctcgcggtgctatatcataatgagggtcttcacagtgatgatcggtttaccacagttgagttttgggttactactagtattgagcccaactctgtgtcctggagcaagtttttgacagtggatatgagaccattggcactcactggtgttcggtttgacaatgatatgggtgccaccttcttcattgacgaggatgagaaagtcgctgtggttttcgatctagacggatacctaagcaccgagagcgctcgttaccacaccgcttttatcagtggaaaggatggattctttaaacctgtgactctaggagtagctcccaatgtcggggaaccttgtcccagaaccgggcatattccgactacatatcgtcccccgcttgtctgctcgtctacttaccttccgagtttagtgcaagtcaaccaacagcgcaaaaggaaagaaagacatgtttag

SEQ ID NO: 75122 - protein, 905 aa, Arabidopsis thaliana
  peptide (1)..(905): Ceres Seq. ID no. 6430175
MRLRHQGGQYLARGMEPVYWSNKVDSTHDLYDNYTLGSYQNNSYNILAHTGFGYDHEFQIYEINSNSWRIIDATLDFKLGYIGRGVSLKGKTYWIASGEEEKRLGKFLISFDYTTERFERLCLPNKYPCYATLALSVVREEKLSMLSQRGIKSKAEIWVTNKIGETQVVSWSMVLALDLQPKRCIGESGSFLVDEKKRVVVCCDNIRDQGKTTFDSNLPRYHRQKKKGRMIIVFDVESMRLPVTVKATKPSFLVIWIRYSSAASSPTVSLNPSGRLQQTLAGSVEVKGKSLHSGKFSTVKLNPEIAGAGRFFEFRSRFIPASIEFAQESPLCTTLLKDELKIRTVEHLLSALEAKGVDNCRIQIESESSDDREVEVPIFDGSAKEWVDAIQGVGINAAQNHDGESVEKMVAHVNKPVDSDHLWYRLPTGCQWFSWRPIHESSFAKDIASSRTFCVYEEVERMREAGLIKGGSLDNAIVCSAEHGWMNPPLRMRRRRCDLQPKRTRMCDLQPKRTSMCDLPPKLVGEKILTRIPITSLRAVRSTCKLWNALTKDRVLVRFHLRRSKEEEEDTMDLSIKQVDLLNQVEISRVYHCDGLLLCVAKDNSRVVVWNPYLGQTRWIRPRTESNIGDSYALGYDINRNHKILRMVQTRNVSVYRYEIYDLRSNSWRVLEVTPNGEMDPNHPLYGVSVKGNTYFFAHEDSSSGEIDEDGDIIDLEDFLLCFDFTTETFGLRLPLPFHSTIDATVTLSCVRDQQLAVLYHNEGLHSDDRFTTVEFWVTTSIEPNSVSWSKFLTVDMRPLALTGVRFDNDMGATFFIDEDEKVAVVFDLDGYLSTESARYHTAFISGKDGFFKPVTLGVAPNVGEPCPRTGHIPTTYRPPLVCSSTYLPSLVQVNQQRKRKERHV

SEQ ID NO: 75123 - protein, 891 aa, Arabidopsis thaliana
  peptide (1)..(891): Ceres Seq. ID no. 6430176
MEPVYWSNKVDSTHDLYDNYTLGSYQNNSYNILAHTGFGYDHEFQIYEINSNSWRIIDATLDFKLGYIGRGVSLKGKTYWIASGEEEKRLGKFLISFDYTTERFERLCLPNKYPCYATLALSVVREEKLSMLSQRGIKSKAEIWVTNKIGETQVVSWSMVLALDLQPKRCIGESGSFLVDEKKRVVVCCDNIRDQGKTTFDSNLPRYHRQKKKGRMIIVFDVESMRLPVTVKATKPSFLVIWIRYSSAASSPTVSLNPSGRLQQTLAGSVEVKGKSLHSGKFSTVKLNPEIAGAGRFFEFRSRFIPASIEFAQESPLCTTLLKDELKIRTVEHLLSALEAKGVDNCRIQIESESSDDREVEVPIFDGSAKEWVDAIQGVGINAAQNHDGESVEKMVAHVNKPVDSDHLWYRLPTGCQWFSWRPIHESSFAKDIASSRTFCVYEEVERMREAGLIKGGSLDNAIVCSAEHGWMNPPLRMRRRRCDLQPKRTRMCDLQPKRTSMCDLPPKLVGEKILTRIPITSLRAVRSTCKLWNALTKDRVLVRFHLRRSKEEEEDTMDLSIKQVDLLNQVEISRVYHCDGLLLCVAKDNSRVVVWNPYLGQTRWIRPRTESNIGDSYALGYDINRNHKILRMVQTRNVSVYRYEIYDLRSNSWRVLEVTPNGEMDPNHPLYGVSVKGNTYFFAHEDSSSGEIDEDGDIIDLEDFLLCFDFTTETFGLRLPLPFHSTIDATVTLSCVRDQQLAVLYHNEGLHSDDRFTTVEFWVTTSIEPNSVSWSKFLTVDMRPLALTGVRFDNDMGATFFIDEDEKVAVVFDLDGYLSTESARYHTAFISGKDGFFKPVTLGVAPNVGEPCPRTGHIPTTYRPPLVCSSTYLPSLVQVNQQRKRKERHV

SEQ ID NO: 75124 - protein, 761 aa, Arabidopsis thaliana
  peptide (1)..(761): Ceres Seq. ID no. 6430177
MLSQRGIKSKAEIWVTNKIGETQVVSWSMVLALDLQPKRCIGESGSFLVDEKKRVVVCCDNIRDQGKTTFDSNLPRYHRQKKKGRMIIVFDVESMRLPVTVKATKPSFLVIWIRYSSAASSPTVSLNPSGRLQQTLAGSVEVKGKSLHSGKFSTVKLNPEIAGAGRFFEFRSRFIPASIEFAQESPLCTTLLKDELKIRTVEHLLSALEAKGVDNCRIQIESESSDDREVEVPIFDGSAKEWVDAIQGVGINAAQNHDGESVEKMVAHVNKPVDSDHLWYRLPTGCQWFSWRPIHESSFAKDIASSRTFCVYEEVERMREAGLIKGGSLDNAIVCSAEHGWMNPPLRMRRRRCDLQPKRTRMCDLQPKRTSMCDLPPKLVGEKILTRIPITSLRAVRSTCKLWNALTKDRVLVRFHLRRSKEEEEDTMDLSIKQVDLLNQVEISRVYHCDGLLLCVAKDNSRVVVWNPYLGQTRWIRPRTESNIGDSYALGYDINRNHKILRMVQTRNVSVYRYEIYDLRSNSWRVLEVTPNGEMDPNHPLYGVSVKGNTYFFAHEDSSSGEIDEDGDIIDLEDFLLCFDFTTETFGLRLPLPFHSTIDATVTLSCVRDQQLAVLYHNEGLHSDDRFTTVEFWVTTSIEPNSVSWSKFLTVDMRPLALTGVRFDNDMGATFFIDEDEKVAVVFDLDGYLSTESARYHTAFISGKDGFFKPVTLGVAPNVGEPCPRTGHIPTTYRPPLVCSSTYLPSLVQVNQQRKRKERHV

SEQ ID NO: 75125 - DNA, 894 bp, Arabidopsis thaliana
  misc_feature (1)..(894): Ceres Seq. ID no. 6430194
  misc_feature (1)..(894): Ortholog of  Ceres SEQ ID NO 13654989 as cited in SEQ ID NO 63117
  misc_feature (1)..(894): Ortholog of  Ceres SEQ ID NO 13584744 as cited in SEQ ID NO 69137
atggtcgttgctgtcaaaaagcttaaagaagaagggtttcaaggacacaggcagtggttggcggaggttgattgtcttgggaggcttcaccatatgaatcttgtgaaactaattggatattgctcgaagggtgatcatattcggcttttggtgtatgagtacatgccaaagggaagcttggagaatcatctctttagacgtggggcagaaccgattccgtggagaacaaggattaaagtggctatcggtgcggcgagagggcttgctttccttcatgaagctcaagtcatatacagagacttcaaggcctccaatattctacttgattcggaattcaatgcaaagctttctgattttggattggcgaaagtaggaccaaccggagacagaacacacgtatcaacccaagtgatgggaactcaaggctatgcagcacctgaatacgttgccactggtcggataacagccaaaagtgacgtctacagcttcggtgtggtcttgctagagttactgtcgggacgtctgaccgtagacaaaacgaaagtaggagtggaacgaaatctggttgattgggcaataccttacttaggagacaaaaggaaagtgtttaggataatggacacaaagcttgggggacaatatcctcacaaaggagcttgtttgactgctaatactgcgttgcaatgtcttaatcaagaacctaagttgaggccaaagatgtctgatgtgttatctactcttgaagagttggagatgacgttgaagtcgggttctatttcaaactcggttatgaaattgacatcttcttcctcttctttcacggcgaaacagagagtaagaactccggttgctgatccggtgttgtctagtagacgatgtcgacgtgttcggtga

SEQ ID NO: 75126 - protein, 297 aa, Arabidopsis thaliana
  peptide (1)..(297): Ceres Seq. ID no. 6430195
MVVAVKKLKEEGFQGHRQWLAEVDCLGRLHHMNLVKLIGYCSKGDHIRLLVYEYMPKGSLENHLFRRGAEPIPWRTRIKVAIGAARGLAFLHEAQVIYRDFKASNILLDSEFNAKLSDFGLAKVGPTGDRTHVSTQVMGTQGYAAPEYVATGRITAKSDVYSFGVVLLELLSGRLTVDKTKVGVERNLVDWAIPYLGDKRKVFRIMDTKLGGQYPHKGACLTANTALQCLNQEPKLRPKMSDVLSTLEELEMTLKSGSISNSVMKLTSSSSSFTAKQRVRTPVADPVLSSRRCRRVR

SEQ ID NO: 75127 - protein, 266 aa, Arabidopsis thaliana
  peptide (1)..(266): Ceres Seq. ID no. 6430196
MNLVKLIGYCSKGDHIRLLVYEYMPKGSLENHLFRRGAEPIPWRTRIKVAIGAARGLAFLHEAQVIYRDFKASNILLDSEFNAKLSDFGLAKVGPTGDRTHVSTQVMGTQGYAAPEYVATGRITAKSDVYSFGVVLLELLSGRLTVDKTKVGVERNLVDWAIPYLGDKRKVFRIMDTKLGGQYPHKGACLTANTALQCLNQEPKLRPKMSDVLSTLEELEMTLKSGSISNSVMKLTSSSSSFTAKQRVRTPVADPVLSSRRCRRVR

SEQ ID NO: 75128 - protein, 243 aa, Arabidopsis thaliana
  peptide (1)..(243): Ceres Seq. ID no. 6430197
MPKGSLENHLFRRGAEPIPWRTRIKVAIGAARGLAFLHEAQVIYRDFKASNILLDSEFNAKLSDFGLAKVGPTGDRTHVSTQVMGTQGYAAPEYVATGRITAKSDVYSFGVVLLELLSGRLTVDKTKVGVERNLVDWAIPYLGDKRKVFRIMDTKLGGQYPHKGACLTANTALQCLNQEPKLRPKMSDVLSTLEELEMTLKSGSISNSVMKLTSSSSSFTAKQRVRTPVADPVLSSRRCRRVR

SEQ ID NO: 75129 - DNA, 1578 bp, Arabidopsis thaliana
  misc_feature (1)..(1578): Ceres Seq. ID no. 6430202
  misc_feature (1)..(1578): Ortholog of  Ceres SEQ ID NO 12613725 as cited in SEQ ID NO 68196
atggagccagtagaagcttttaacgtatactacttgtggatgggtctcactaactttgctccactcctcggcgcattaatctccgacgcctacattggccgtttcaagaccatcgcttacgcatccctcttctcaattctaggactaatgacggtgacactcaccgcctgcctgcctcaactccacccaccaccgtgcaacaaccctcatccagacgaatgcgacgatccgaacaagctccagctcgggattctattcctcggtctcggctttctctccatcggtagcggcggaatccggccttgcagcattccattcggagttgatcagtttgaccaacgaacagagcaaggccttaaaggagtggccagtttctttaattggtactacttgaccttaactatggttctcatcttttcgcataccgttgtggtctacttacagactgtcagttgggtcatcgggtttagcatcccgactagtttaatggcttgtgcagtggttctgttctttgtcggtatgcggttttacgtatatgtcaaaccggaaggtagtgtattctctggtattgctcgggtcatcgtggcagctcgtaagaaacgggacctcaaaatttcgcttgtggacgatgggactgaggagtattatgagccgccggtgaaacctggcgtgttatccaagttacctcttactgaccaattcaagtttctggacaaagctgcggtgatactagacggtgatcttacatctgaaggagttccggcaaataagtggcggctatgtagcatccaagaagttgaagaggtcaagtgcctgatcagagttgttccggtttggtctgctggaataatttcaatcgttgcaatgaccacgcaagcaactttcatggtctttcaagctacaaaaatggatcgacacatgggtccacactttgagatcccggccgcctccataaccgtcatttcttacatcactataggcatttgggtgcctatctacgaacacctcttagtcccgttcctttggcgaatgagaaagttcagggtcactctccttcaacggatggggatagggatcgtcttcgccattctctccatgttcactgcagggtttgtagagggagtgaggcggacacgggctactgaaatgactcaaatgtcggtgttttggctggctttgccactgattctgatggggctctgcgagtcatttaatttcattggactgatcgagttcttcaacagtcagtttccagagcacatgagaagcatagcgaattcgctatttccactctcatttgctgcagctaattatctgagcagtctgctggtgaccaccgtgcataaagtctcaggcacaaaagaccaccctgactggctgaacaaggaccttgatagagggaagttggactacttctactatctgattgccgttttgggtgtggttaaccttgtgtatttctggtactgtgcccatagataccagtataaagccggttcgcaaattgaagatttcaatgaggagaagtctcttctagacatcgaaccaaaccagagacacgatcaatctccaagttag

SEQ ID NO: 75130 - protein, 525 aa, Arabidopsis thaliana
  peptide (1)..(525): Ceres Seq. ID no. 6430203
MEPVEAFNVYYLWMGLTNFAPLLGALISDAYIGRFKTIAYASLFSILGLMTVTLTACLPQLHPPPCNNPHPDECDDPNKLQLGILFLGLGFLSIGSGGIRPCSIPFGVDQFDQRTEQGLKGVASFFNWYYLTLTMVLIFSHTVVVYLQTVSWVIGFSIPTSLMACAVVLFFVGMRFYVYVKPEGSVFSGIARVIVAARKKRDLKISLVDDGTEEYYEPPVKPGVLSKLPLTDQFKFLDKAAVILDGDLTSEGVPANKWRLCSIQEVEEVKCLIRVVPVWSAGIISIVAMTTQATFMVFQATKMDRHMGPHFEIPAASITVISYITIGIWVPIYEHLLVPFLWRMRKFRVTLLQRMGIGIVFAILSMFTAGFVEGVRRTRATEMTQMSVFWLALPLILMGLCESFNFIGLIEFFNSQFPEHMRSIANSLFPLSFAAANYLSSLLVTTVHKVSGTKDHPDWLNKDLDRGKLDYFYYLIAVLGVVNLVYFWYCAHRYQYKAGSQIEDFNEEKSLLDIEPNQRHDQSPS

SEQ ID NO: 75131 - protein, 512 aa, Arabidopsis thaliana
  peptide (1)..(512): Ceres Seq. ID no. 6430204
MGLTNFAPLLGALISDAYIGRFKTIAYASLFSILGLMTVTLTACLPQLHPPPCNNPHPDECDDPNKLQLGILFLGLGFLSIGSGGIRPCSIPFGVDQFDQRTEQGLKGVASFFNWYYLTLTMVLIFSHTVVVYLQTVSWVIGFSIPTSLMACAVVLFFVGMRFYVYVKPEGSVFSGIARVIVAARKKRDLKISLVDDGTEEYYEPPVKPGVLSKLPLTDQFKFLDKAAVILDGDLTSEGVPANKWRLCSIQEVEEVKCLIRVVPVWSAGIISIVAMTTQATFMVFQATKMDRHMGPHFEIPAASITVISYITIGIWVPIYEHLLVPFLWRMRKFRVTLLQRMGIGIVFAILSMFTAGFVEGVRRTRATEMTQMSVFWLALPLILMGLCESFNFIGLIEFFNSQFPEHMRSIANSLFPLSFAAANYLSSLLVTTVHKVSGTKDHPDWLNKDLDRGKLDYFYYLIAVLGVVNLVYFWYCAHRYQYKAGSQIEDFNEEKSLLDIEPNQRHDQSPS

SEQ ID NO: 75132 - protein, 476 aa, Arabidopsis thaliana
  peptide (1)..(476): Ceres Seq. ID no. 6430205
MTVTLTACLPQLHPPPCNNPHPDECDDPNKLQLGILFLGLGFLSIGSGGIRPCSIPFGVDQFDQRTEQGLKGVASFFNWYYLTLTMVLIFSHTVVVYLQTVSWVIGFSIPTSLMACAVVLFFVGMRFYVYVKPEGSVFSGIARVIVAARKKRDLKISLVDDGTEEYYEPPVKPGVLSKLPLTDQFKFLDKAAVILDGDLTSEGVPANKWRLCSIQEVEEVKCLIRVVPVWSAGIISIVAMTTQATFMVFQATKMDRHMGPHFEIPAASITVISYITIGIWVPIYEHLLVPFLWRMRKFRVTLLQRMGIGIVFAILSMFTAGFVEGVRRTRATEMTQMSVFWLALPLILMGLCESFNFIGLIEFFNSQFPEHMRSIANSLFPLSFAAANYLSSLLVTTVHKVSGTKDHPDWLNKDLDRGKLDYFYYLIAVLGVVNLVYFWYCAHRYQYKAGSQIEDFNEEKSLLDIEPNQRHDQSPS

SEQ ID NO: 75133 - DNA, 810 bp, Arabidopsis thaliana
  misc_feature (1)..(810): Ceres Seq. ID no. 6430344
  misc_feature (1)..(810): Ortholog of  Ceres SEQ ID NO 13594193 as cited in SEQ ID NO 58558
  misc_feature (1)..(810): Ortholog of  Ceres SEQ ID NO 15177545 as cited in SEQ ID NO 0
atgatatttgccggttgctcagccatcgtggtaaatgagacgtatggcaaaccggtgacacttcccggtatagctttggtatggggactagtcgtaacggttatgatctactcaattggtcatgtctctggtgcacatttcaaccctgctgtttctattgcctttgcctcttctaagaagttcccttttaatcaggttccggggtacattgccgctcaacttctcggatcgaccttagcggctgcagttctacggcttgtgttccatctagacgacgatgtttgtagcctcaaaggcgatgtttatgtgggaacatatccgtcaaactcaaatacgacctcgttcgtaatggagttcatcgctactttcaatctaatgtttgttatatctgctgtcgcaaccgataaacgggccaccgggtcattcgctggaatcgctattggcgcaaccatagtactcgacatccttttctccgggccaatttcgggagcatctatgaatccagcaagaagcttagggcctgcacttatatggggatgttataaggatttatggttatacatagtttcacccgtgatcggggcattatcaggtgcatggacttatggtttgttacgatcgacaaagaaatcatatagtgagattattcgtccaaattgcaataaagtatcttcgagagatcgccaagaagcttcccaagatgagatttgtgttctacgagtggttgatccggctaatcaaaactattttatatgttcatcacctactgatatcaatggcaaatgtaatgttacatgtaagttggcgtga

SEQ ID NO: 75134 - protein, 269 aa, Arabidopsis thaliana; identical to SEQ ID NO: 74230
  peptide (1)..(269): Ceres Seq. ID no. 6430345

SEQ ID NO: 75135 - protein, 235 aa, Arabidopsis thaliana; identical to SEQ ID NO: 74231
  peptide (1)..(235): Ceres Seq. ID no. 6430346

SEQ ID NO: 75136 - protein, 153 aa, Arabidopsis thaliana
  peptide (1)..(153): Ceres Seq. ID no. 6430347
MEFIATFNLMFVISAVATDKRATGSFAGIAIGATIVLDILFSGPISGASMNPARSLGPALIWGCYKDLWLYIVSPVIGALSGAWTYGLLRSTKKSYSEIIRPNCNKVSSRDRQEASQDEICVLRVVDPANQNYFICSSPTDINGKCNVTCKLA

SEQ ID NO: 75137 - DNA, 1107 bp, Arabidopsis thaliana
  misc_feature (1)..(1107): Ceres Seq. ID no. 6430362
  misc_feature (1)..(1107): Ortholog of  Ceres SEQ ID NO 13502874 as cited in SEQ ID NO 66298
atgacgtttactcagctgttctcaccgcagcgtatcgaggctactaaagctctgagaatgaagaaggtgcaagaacttgtcaactttttgagtgaaagcagtgagagaggagaagctgttgacatttctcgtgcatctttcgtcacagctctcaatatcatatcgaatattttgttttcagtcaatctcggtagctacgattcgaaaaattcaagtgcgtttcaggagatggtgattggttacatggaatctatcggaaatccagacgtttctaacttcttcccatttatgaggttacttgacttacaaggtaatagtaagaagatgaaagagtactcgggtaaattgcttcaggtatttagagagttttacgatgctaggattttggaaaactcatcgcgtatagatgagaaagatgtttcgagcagagacttcttggatgcactaatcgatctccaacaaggagatgaatctgaaatcaacattgacgagatcgaacacctacttctcgatatgtttctagcaggcacagatacaaactctagtaccgtggaatgggcaatgacagagttacttggaaaccctaaaacgatgacaaaagttcaagacgagatcaatcgtgtgataaggcaaaacggcgacgttcaagagtctcatatctcaaaactgccgtatttacaagcggtcataaaagaaactttccgattacacccggctgctccatttctcctcccaagaaaagcggaaagggacgtagatattcttggattccatgtgcctaaagactctcatgttcttgtgaacgtgtgggccataggacgagacccaaatgtatgggaaaatccgactcagtttgagccagagaggtttttagggaaagatattgatgtaaaaggtacaaattatgagcttacaccatttggggccgggcgtagaatttgtccgggactgcctttagctttgaaaacagtgcatctcatgcttgcttctcttctctatacctttgagtggaagcttccaaacggtgtcggttcagaggatttagacatgggagagacctttggtctcacagtgcacaagacaaacccgttacttgcgtgcctctga

SEQ ID NO: 75138 - protein, 368 aa, Arabidopsis thaliana
  peptide (1)..(368): Ceres Seq. ID no. 6430363
MTFTQLFSPQRIEATKALRMKKVQELVNFLSESSERGEAVDISRASFVTALNIISNILFSVNLGSYDSKNSSAFQEMVIGYMESIGNPDVSNFFPFMRLLDLQGNSKKMKEYSGKLLQVFREFYDARILENSSRIDEKDVSSRDFLDALIDLQQGDESEINIDEIEHLLLDMFLAGTDTNSSTVEWAMTELLGNPKTMTKVQDEINRVIRQNGDVQESHISKLPYLQAVIKETFRLHPAAPFLLPRKAERDVDILGFHVPKDSHVLVNVWAIGRDPNVWENPTQFEPERFLGKDIDVKGTNYELTPFGAGRRICPGLPLALKTVHLMLASLLYTFEWKLPNGVGSEDLDMGETFGLTVHKTNPLLACL

SEQ ID NO: 75139 - protein, 349 aa, Arabidopsis thaliana
  peptide (1)..(349): Ceres Seq. ID no. 6430364
MKKVQELVNFLSESSERGEAVDISRASFVTALNIISNILFSVNLGSYDSKNSSAFQEMVIGYMESIGNPDVSNFFPFMRLLDLQGNSKKMKEYSGKLLQVFREFYDARILENSSRIDEKDVSSRDFLDALIDLQQGDESEINIDEIEHLLLDMFLAGTDTNSSTVEWAMTELLGNPKTMTKVQDEINRVIRQNGDVQESHISKLPYLQAVIKETFRLHPAAPFLLPRKAERDVDILGFHVPKDSHVLVNVWAIGRDPNVWENPTQFEPERFLGKDIDVKGTNYELTPFGAGRRICPGLPLALKTVHLMLASLLYTFEWKLPNGVGSEDLDMGETFGLTVHKTNPLLACL

SEQ ID NO: 75140 - protein, 292 aa, Arabidopsis thaliana
  peptide (1)..(292): Ceres Seq. ID no. 6430365
MVIGYMESIGNPDVSNFFPFMRLLDLQGNSKKMKEYSGKLLQVFREFYDARILENSSRIDEKDVSSRDFLDALIDLQQGDESEINIDEIEHLLLDMFLAGTDTNSSTVEWAMTELLGNPKTMTKVQDEINRVIRQNGDVQESHISKLPYLQAVIKETFRLHPAAPFLLPRKAERDVDILGFHVPKDSHVLVNVWAIGRDPNVWENPTQFEPERFLGKDIDVKGTNYELTPFGAGRRICPGLPLALKTVHLMLASLLYTFEWKLPNGVGSEDLDMGETFGLTVHKTNPLLACL

SEQ ID NO: 75141 - DNA, 849 bp, Arabidopsis thaliana
  misc_feature (1)..(849): Ceres Seq. ID no. 6430370
  misc_feature (1)..(849): Ortholog of  Ceres SEQ ID NO 13594727 as cited in SEQ ID NO 52169
  misc_feature (1)..(849): Ortholog of  Ceres SEQ ID NO 13596474 as cited in SEQ ID NO 62169
  misc_feature (1)..(849): Ortholog of  Ceres SEQ ID NO 13596969 as cited in SEQ ID NO 63375
  misc_feature (1)..(849): Ortholog of  Ceres SEQ ID NO 13597519 as cited in SEQ ID NO 64759
  misc_feature (1)..(849): Ortholog of  Ceres SEQ ID NO 13597870 as cited in SEQ ID NO 64982
atgagggcaatcacagcttcgtttttcattttctgcttccttgttccctctgttttcgggaagctccgacgtgggttttatgacagttcatgccctctcgctgaatctaccgtgtctagagttgttgccaaacatcactcccttaaccaaaccgttactgcagcgttgcttcgtatgcagtttcatgattgctttgtcaacgttcgtaagcttctcctttgtgtgtttgtatatggttgtgatgcttccctcttgatcgactcaacgcccgaaaggccatctgagaaaagcgcggaggcaaacgtaagcgtgagaggcttcgagatcatcgatgaggttaagaaagagcttgagatagtttgcccaaaaacagtctcatgcgcagacattgtaactctagccacaaaagactcgattgcattagcgggtaaaggtttgaatgtcaccaacatggttgcacttattggtggtggtcacagcgtcggtgttgcacattgcagtctttttcaggataggcttaaggatcctaaaatggacagcaaactgaaagctaagttacagaacacatgtcgtggtccaaatgacccatcagtggtcttggaccaaatgacgccacttgaggtagacaatcaaatctataaacagataaaaagtcaaagaggaatccttagaattgatcaaaacttgggtctcgatgactcaaccagtaggatcgtatcaaattttgcattaaatgaaacattattcggagaaagatttgctgaagcaatgcagataatgggtgaaataaaagttcttacgggaaattctggagagatcaggacaaactgcatagtcgtcagccactga

SEQ ID NO: 75142 - protein, 282 aa, Arabidopsis thaliana
  peptide (1)..(282): Ceres Seq. ID no. 6430371
MRAITASFFIFCFLVPSVFGKLRRGFYDSSCPLAESTVSRVVAKHHSLNQTVTAALLRMQFHDCFVNVRKLLLCVFVYGCDASLLIDSTPERPSEKSAEANVSVRGFEIIDEVKKELEIVCPKTVSCADIVTLATKDSIALAGKGLNVTNMVALIGGGHSVGVAHCSLFQDRLKDPKMDSKLKAKLQNTCRGPNDPSVVLDQMTPLEVDNQIYKQIKSQRGILRIDQNLGLDDSTSRIVSNFALNETLFGERFAEAMQIMGEIKVLTGNSGEIRTNCIVVSH

SEQ ID NO: 75143 - protein, 224 aa, Arabidopsis thaliana
  peptide (1)..(224): Ceres Seq. ID no. 6430372
MQFHDCFVNVRKLLLCVFVYGCDASLLIDSTPERPSEKSAEANVSVRGFEIIDEVKKELEIVCPKTVSCADIVTLATKDSIALAGKGLNVTNMVALIGGGHSVGVAHCSLFQDRLKDPKMDSKLKAKLQNTCRGPNDPSVVLDQMTPLEVDNQIYKQIKSQRGILRIDQNLGLDDSTSRIVSNFALNETLFGERFAEAMQIMGEIKVLTGNSGEIRTNCIVVSH

SEQ ID NO: 75144 - DNA, 1635 bp, Arabidopsis thaliana
  misc_feature (1)..(1635): Ceres Seq. ID no. 6430420
  misc_feature (1)..(1635): Ortholog of  Ceres SEQ ID NO 12623695 as cited in SEQ ID NO 61286
atggaaggtgttggactaagagctgtaggatcacactgttctttatctgagatggatgatcttgatttgactcgagctttggataaaccaagattgaagatcgaaaggaagagatcgtttgatgaaagatcgatgagtgagctatcgactggttacagtagacatgacggtatacacgattcgccgcgaggtagatcggtgcttgatacgcctctttcttctgctagaaactcctttgagcctcatcctatgatggctgaagcttgggaggctttaagaaggtcaatggtcttcttccgtggtcaacctgttggtactcttgccgcggttgataatactaccgatgaagtcttgaactatgatcaggtgtttgtgagggattttgtaccgagtgcgttggcgtttctgatgaatggagaaccggatatagtgaagcattttttgcttaagacacttcagctgcaaggttgggagaaacgtgtggatcggtttaagttaggagaaggtgtgatgcctgcaagtttcaaggtgcttcatgatcctatccgtgaaacggataacattgttgcggatttcggtgagagtgctattggacgtgtggctcctgtagattcagggttctggtggattattcttcttcgtgcttataccaaatctactggagatttgactctctctgagacaccagagtgtcaaaagggaatgaaactgatcttgtctttgtgcttagctgaagggtttgacacgtttcctacactgctttgtgctgatggatgttccatgattgatcgaagaatgggtgtttatgggtatcccattgagatccaagcgttgttcttcatggctttgagatctgctttgtcgatgttaaagcccgatggagatggcagagaggtcattgagaggatcgttaagcgacttcatgccttgagcttccatatgcgcaattacttctggcttgatcatcagaacctcaatgacatttacaggttcaagactgaggaatactctcacacggcggtgaacaagttcaatgtgatgcctgattctatacccgagtgggttttcgacttcatgcctctccgtggaggctactttgtgggaaacgtaggacctgcccatatggatttccggtggttcgcactcggtaattgtgtctccatactttcttcattggccactccagatcaatccatggccattatggacctccttgagcaccggtgggcagagcttgtaggtgagatgcctctcaagatttgttatccatgcctcgagggccatgagtggcgcatcgttactggctgtgaccccaagaacacacggtggagctaccacaatggtggatcttggccagcagcgtgcattaagacagggagaccgcagatcgcaagacgcgcggttgacctcatagaatcgcgtcttcaccgagactgttggccagagtattacgacggtaagctcggaaggtacgttggaaaacaggcaaggaaataccagacttggtcaatcgcaggttacttagtggcgaaaatgttgctagaagatccttcacacattggtatgatctctcttgaagaagacaaactcatgaaaccagtcatcaagcgatctgcgtcttggccacaactctga

SEQ ID NO: 75145 - protein, 544 aa, Arabidopsis thaliana
  peptide (1)..(544): Ceres Seq. ID no. 6430421
MEGVGLRAVGSHCSLSEMDDLDLTRALDKPRLKIERKRSFDERSMSELSTGYSRHDGIHDSPRGRSVLDTPLSSARNSFEPHPMMAEAWEALRRSMVFFRGQPVGTLAAVDNTTDEVLNYDQVFVRDFVPSALAFLMNGEPDIVKHFLLKTLQLQGWEKRVDRFKLGEGVMPASFKVLHDPIRETDNIVADFGESAIGRVAPVDSGFWWIILLRAYTKSTGDLTLSETPECQKGMKLILSLCLAEGFDTFPTLLCADGCSMIDRRMGVYGYPIEIQALFFMALRSALSMLKPDGDGREVIERIVKRLHALSFHMRNYFWLDHQNLNDIYRFKTEEYSHTAVNKFNVMPDSIPEWVFDFMPLRGGYFVGNVGPAHMDFRWFALGNCVSILSSLATPDQSMAIMDLLEHRWAELVGEMPLKICYPCLEGHEWRIVTGCDPKNTRWSYHNGGSWPAACIKTGRPQIARRAVDLIESRLHRDCWPEYYDGKLGRYVGKQARKYQTWSIAGYLVAKMLLEDPSHIGMISLEEDKLMKPVIKRSASWPQL

SEQ ID NO: 75146 - protein, 527 aa, Arabidopsis thaliana
  peptide (1)..(527): Ceres Seq. ID no. 6430422
MDDLDLTRALDKPRLKIERKRSFDERSMSELSTGYSRHDGIHDSPRGRSVLDTPLSSARNSFEPHPMMAEAWEALRRSMVFFRGQPVGTLAAVDNTTDEVLNYDQVFVRDFVPSALAFLMNGEPDIVKHFLLKTLQLQGWEKRVDRFKLGEGVMPASFKVLHDPIRETDNIVADFGESAIGRVAPVDSGFWWIILLRAYTKSTGDLTLSETPECQKGMKLILSLCLAEGFDTFPTLLCADGCSMIDRRMGVYGYPIEIQALFFMALRSALSMLKPDGDGREVIERIVKRLHALSFHMRNYFWLDHQNLNDIYRFKTEEYSHTAVNKFNVMPDSIPEWVFDFMPLRGGYFVGNVGPAHMDFRWFALGNCVSILSSLATPDQSMAIMDLLEHRWAELVGEMPLKICYPCLEGHEWRIVTGCDPKNTRWSYHNGGSWPAACIKTGRPQIARRAVDLIESRLHRDCWPEYYDGKLGRYVGKQARKYQTWSIAGYLVAKMLLEDPSHIGMISLEEDKLMKPVIKRSASWPQL

SEQ ID NO: 75147 - protein, 500 aa, Arabidopsis thaliana
  peptide (1)..(500): Ceres Seq. ID no. 6430423
MSELSTGYSRHDGIHDSPRGRSVLDTPLSSARNSFEPHPMMAEAWEALRRSMVFFRGQPVGTLAAVDNTTDEVLNYDQVFVRDFVPSALAFLMNGEPDIVKHFLLKTLQLQGWEKRVDRFKLGEGVMPASFKVLHDPIRETDNIVADFGESAIGRVAPVDSGFWWIILLRAYTKSTGDLTLSETPECQKGMKLILSLCLAEGFDTFPTLLCADGCSMIDRRMGVYGYPIEIQALFFMALRSALSMLKPDGDGREVIERIVKRLHALSFHMRNYFWLDHQNLNDIYRFKTEEYSHTAVNKFNVMPDSIPEWVFDFMPLRGGYFVGNVGPAHMDFRWFALGNCVSILSSLATPDQSMAIMDLLEHRWAELVGEMPLKICYPCLEGHEWRIVTGCDPKNTRWSYHNGGSWPAACIKTGRPQIARRAVDLIESRLHRDCWPEYYDGKLGRYVGKQARKYQTWSIAGYLVAKMLLEDPSHIGMISLEEDKLMKPVIKRSASWPQL

SEQ ID NO: 75148 - DNA, 2532 bp, Arabidopsis thaliana
  misc_feature (1)..(2532): Ceres Seq. ID no. 6430672
  misc_feature (1)..(2532): Ortholog of  Ceres SEQ ID NO 13584744 as cited in SEQ ID NO 69137
atggagagacattttgtgtttattgccacctatttgctgatatttcatcttgttcaagctcaaaatcaaacaggattcattagtgtggattgtggtttatcccttcttgagtctccttacgatgcaccacaaacgggtttaacatatacatcagatgccgatttagtagctagtggcaaaaccggtagactcgccaaagaatttgaaccactcgttgataagccgactttgacactgagatactttccagagggagtacgaaactgctacaatctaaatgtcaccagcgacaccaactatttaatcaaggccacatttgtatatgggaattacgatggtcttaatgttgggccaaacttcaacctttatctcggtccgaatttgtggacaacggtgtgtcttgttaagacgggaataagtataccttttataaatatgttggagctacgaccgatgaagaaaaatatgtacgttactcaaagcggttcactgaagtatttattcagagggtatattagcaattcaagtactcgtataaggttcccggatgatgtctatgaccgtaaatggtacccgctcttcgacgactcatggacacaagtaactacaaatctcaaagtgaacacaagtattacttatgaactaccacaaagtgtaatggcaaaagccgcaacgccaattaaggctaacgacaccttgaacattacatggacggtagagccccctactacacagttttactcttacgtacacattgcagagattcaggctctaagggcaaacgagacaagggagttcaatgtgacactgaatggagaatatacttttggaccttttagtcctataccgctaaaaaccgcatccatagtcgacttaagcccagggcaatgcgatggagggagatgcattttgcaggttgtgaagacgctgaaatctacgcttcctcctttacttaatgctatcgaagctttcaccgtgattgatttcccgcaaatggagacaaatgaaaatgatgttgctgggatcaagaatgttcaaggtacttatggattgagtagaattagttggcaaggagatccatgtgtccccaaacagttattgtgggatggtctaaactgcaaaaactcggatatttctacgccaccgataatcacttccttagacttatcttcaagtggattaactgggatcatcacgcaagccattaagaatcttactcacctgcaaatattggacttgtcagataataatttgactggagaagtacctgagtttttagctgacataaaatcactcttggtcataaacttaagtggtaataatctaagtggctcagttcctccctcacttcttcagaagaaaggaatgaagttaaatgtcgaaggcaatcctcatattctttgcacaacgggttcttgtgtcaagaaaaaagaggatggacataagaaaaagagtgtcatagtgccagttgttgcatcaattgcttcaatagctgttcttataggtgcattggttctgtttctaattcttagaaagaaaaggtcaccaaaagttgaagggccaccaccatcttatatgcaagcatcagatggtagattgcctagatcatctgaaccggcaatcgtaacgaaaaatagaaggttttcttattcacaagttgtgataatgacaaataacttccaaagaatccttgggaaaggagggtttggaatggtttatcatggtttcgtgaacggtacagagcaagtagctgttaagatactctcccattcatcgtctcaaggatataaacaattcaaagctgaggtagaacttcttcttagagttcatcacaagaacttggttggtcttgttgggtactgcgacgaaggagataacttggctcttatctatgaatacatggccaatggagatctaaaagaacatatgtcaggactcgagtacttgcataatggttgcaaaccaccaatggtacatagggacgtcaaaactacaaatatattgttgaacgaacactttgaggccaaacttgcggattttgggctttcgagatcattcctgatcgaaggtgaaactcatgtatcaacagttgttgctggaactcctggatatctcgatcctgaataccatagaacaaattggttgacagaaaagagtgatgtttatagttttgggattctattgttggagattatcacaaaccgacatgtgatcgaccaaagccgtgaaaagccacacataggagaatgggtaggagtaatgcttacaaaaggagacatccaaagcattatggatccaagtctcaatgaagattatgattccggttctgtttggaaagctgttgaactagcaatgagttgtctaaatcattcttcagcgagaagaccgaccatgtcccaagttgttattgaattgaacgagtgtctggcttctgaaaatgcaaggggaggagcaagtcgggacatggaatcaaagagttctatagaagtgagcttgacgtttggtactgaagtgagcccaaacgctcgatag

SEQ ID NO: 75149 - protein, 843 aa, Arabidopsis thaliana
  peptide (1)..(843): Ceres Seq. ID no. 6430673
MERHFVFIATYLLIFHLVQAQNQTGFISVDCGLSLLESPYDAPQTGLTYTSDADLVASGKTGRLAKEFEPLVDKPTLTLRYFPEGVRNCYNLNVTSDTNYLIKATFVYGNYDGLNVGPNFNLYLGPNLWTTVCLVKTGISIPFINMLELRPMKKNMYVTQSGSLKYLFRGYISNSSTRIRFPDDVYDRKWYPLFDDSWTQVTTNLKVNTSITYELPQSVMAKAATPIKANDTLNITWTVEPPTTQFYSYVHIAEIQALRANETREFNVTLNGEYTFGPFSPIPLKTASIVDLSPGQCDGGRCILQVVKTLKSTLPPLLNAIEAFTVIDFPQMETNENDVAGIKNVQGTYGLSRISWQGDPCVPKQLLWDGLNCKNSDISTPPIITSLDLSSSGLTGIITQAIKNLTHLQILDLSDNNLTGEVPEFLADIKSLLVINLSGNNLSGSVPPSLLQKKGMKLNVEGNPHILCTTGSCVKKKEDGHKKKSVIVPVVASIASIAVLIGALVLFLILRKKRSPKVEGPPPSYMQASDGRLPRSSEPAIVTKNRRFSYSQVVIMTNNFQRILGKGGFGMVYHGFVNGTEQVAVKILSHSSSQGYKQFKAEVELLLRVHHKNLVGLVGYCDEGDNLALIYEYMANGDLKEHMSGLEYLHNGCKPPMVHRDVKTTNILLNEHFEAKLADFGLSRSFLIEGETHVSTVVAGTPGYLDPEYHRTNWLTEKSDVYSFGILLLEIITNRHVIDQSREKPHIGEWVGVMLTKGDIQSIMDPSLNEDYDSGSVWKAVELAMSCLNHSSARRPTMSQVVIELNECLASENARGGASRDMESKSSIEVSLTFGTEVSPNAR

SEQ ID NO: 75150 - protein, 698 aa, Arabidopsis thaliana
  peptide (1)..(698): Ceres Seq. ID no. 6430674
MLELRPMKKNMYVTQSGSLKYLFRGYISNSSTRIRFPDDVYDRKWYPLFDDSWTQVTTNLKVNTSITYELPQSVMAKAATPIKANDTLNITWTVEPPTTQFYSYVHIAEIQALRANETREFNVTLNGEYTFGPFSPIPLKTASIVDLSPGQCDGGRCILQVVKTLKSTLPPLLNAIEAFTVIDFPQMETNENDVAGIKNVQGTYGLSRISWQGDPCVPKQLLWDGLNCKNSDISTPPIITSLDLSSSGLTGIITQAIKNLTHLQILDLSDNNLTGEVPEFLADIKSLLVINLSGNNLSGSVPPSLLQKKGMKLNVEGNPHILCTTGSCVKKKEDGHKKKSVIVPVVASIASIAVLIGALVLFLILRKKRSPKVEGPPPSYMQASDGRLPRSSEPAIVTKNRRFSYSQVVIMTNNFQRILGKGGFGMVYHGFVNGTEQVAVKILSHSSSQGYKQFKAEVELLLRVHHKNLVGLVGYCDEGDNLALIYEYMANGDLKEHMSGLEYLHNGCKPPMVHRDVKTTNILLNEHFEAKLADFGLSRSFLIEGETHVSTVVAGTPGYLDPEYHRTNWLTEKSDVYSFGILLLEIITNRHVIDQSREKPHIGEWVGVMLTKGDIQSIMDPSLNEDYDSGSVWKAVELAMSCLNHSSARRPTMSQVVIELNECLASENARGGASRDMESKSSIEVSLTFGTEVSPNAR

SEQ ID NO: 75151 - protein, 692 aa, Arabidopsis thaliana
  peptide (1)..(692): Ceres Seq. ID no. 6430675
MKKNMYVTQSGSLKYLFRGYISNSSTRIRFPDDVYDRKWYPLFDDSWTQVTTNLKVNTSITYELPQSVMAKAATPIKANDTLNITWTVEPPTTQFYSYVHIAEIQALRANETREFNVTLNGEYTFGPFSPIPLKTASIVDLSPGQCDGGRCILQVVKTLKSTLPPLLNAIEAFTVIDFPQMETNENDVAGIKNVQGTYGLSRISWQGDPCVPKQLLWDGLNCKNSDISTPPIITSLDLSSSGLTGIITQAIKNLTHLQILDLSDNNLTGEVPEFLADIKSLLVINLSGNNLSGSVPPSLLQKKGMKLNVEGNPHILCTTGSCVKKKEDGHKKKSVIVPVVASIASIAVLIGALVLFLILRKKRSPKVEGPPPSYMQASDGRLPRSSEPAIVTKNRRFSYSQVVIMTNNFQRILGKGGFGMVYHGFVNGTEQVAVKILSHSSSQGYKQFKAEVELLLRVHHKNLVGLVGYCDEGDNLALIYEYMANGDLKEHMSGLEYLHNGCKPPMVHRDVKTTNILLNEHFEAKLADFGLSRSFLIEGETHVSTVVAGTPGYLDPEYHRTNWLTEKSDVYSFGILLLEIITNRHVIDQSREKPHIGEWVGVMLTKGDIQSIMDPSLNEDYDSGSVWKAVELAMSCLNHSSARRPTMSQVVIELNECLASENARGGASRDMESKSSIEVSLTFGTEVSPNAR

SEQ ID NO: 75152 - DNA, 2028 bp, Arabidopsis thaliana
  misc_feature (1)..(2028): Ceres Seq. ID no. 6430676
  misc_feature (1)..(2028): Ortholog of  Ceres SEQ ID NO 13654989 as cited in SEQ ID NO 63117
  misc_feature (1)..(2028): Ortholog of  Ceres SEQ ID NO 13584744 as cited in SEQ ID NO 69137
atgacagttttttttataaacgattgtgtcaggttcccggatgatgtgtatgaccgaaaatggtacccgatcttccagaactcatggacgcaagtaactacgaatctcaatgtaaatattagcactatttatgaactaccacaaagcgtaatgtcaacagccgcgacgccgctaaatgctaatgcgaccttgaacattacatggacaatagagcctcctactacaccattttactcctacattcactttgcagagcttcaatctctaagggccaatgatacaagagaattcaatgtgacgttgaatggggagtatacaattggaccttatagtcctaaaccgctaaaaaccgaaaccatacaagacttaagccccgagcaatgtaatggaggggcgtgtattttgcagcttgtggagacgctgaaatcaactcttccgcctttacttaatgctattgaggctttcactgtgattgatttcccgcaaatggagacaaatgaagatgatgttactggtatcaacgatgttcaaaacacttatggattgaatagaatcagttggcaaggagatccatgtgtccccaaacagtattcgtgggacggtctaaattgcaacaactcagatatctctataccaccaataatcatttccttagatttatcttcaagtggtttaaatggggtcattacacaaggcattcaaaatctaacccatcttcaatacttggacttgtcagataataatttaactggtgatatacctaaatttctagctgacatacaatcactcttggttataaacttaagtggtaataatctcactggatcggtgcctctctcacttcttcagaagaaaggattgaaattaaatgtcgaaggcaaccctcatcttctttgcacagatggtttatgtgttaacaaaggagatggacataagaaaaagagcatcatagcaccagtggtcgcatcaattgcttcaatagctattcttataggtgcattggttctgttttttgttcttaaaaagaaaacgcaatcaaaagaaccagcaatagtgacgaagaataaacggtttacttactctgaagttatgcaaatgacaaataacttccaaagagtgcttgggaaaggagggtttggaattgtttatcatggtttggtgaatggtactgaacaagtagctattaagatactctcccattcttcatctcaaggatataaacaattcaaagctgaggtagaacttcttcttagagttcatcacaagaatttggtaggccttgttggatactgtgacgaaggagagaacttggctcttatatatgaatacatggccaatggagatttaaaagaacacatgtcaggaacacgaaaccacttcattttaaattggggaactagactaaaaatagtcgttgaatctgcccaaggacttgagtatttgcacaatggatgcaaaccactaatggtgcatagagacatcaaaacaacaaatatattgttgaatgaacaatttgatgccaaacttgctgattttgggctctcgagatcattcccgattgaaggtgaaactcatgtttcaacagctgttgctggaactcctggatatctcgatcccgaatactacagaacaaattggttgactgaaaagagtgatgtttatagtttcggagtcgtattgttagagatcatcacaaaccaacccgtgatagacccaagacgtgaaaagccacatatagcagaatgggttggggaagtgcttacaaaaggagacataaaaaatataatggatccaagtctaaatggagattatgattccacttctgtttggaaagctgttgagctagcgatgtgttgtcttaatccttcatcagctagaagaccgaacatgtctcaagttgttattgaattaaacgagtgtttgacatctgaaaattcaaggggaggagcgattcgagacatggactcagaaggttctatagaagtaagcttgacctttggtaccgaagtgaccccattggctcggtag

SEQ ID NO: 75153 - protein, 675 aa, Arabidopsis thaliana
  peptide (1)..(675): Ceres Seq. ID no. 6430677
MTVFFINDCVRFPDDVYDRKWYPIFQNSWTQVTTNLNVNISTIYELPQSVMSTAATPLNANATLNITWTIEPPTTPFYSYIHFAELQSLRANDTREFNVTLNGEYTIGPYSPKPLKTETIQDLSPEQCNGGACILQLVETLKSTLPPLLNAIEAFTVIDFPQMETNEDDVTGINDVQNTYGLNRISWQGDPCVPKQYSWDGLNCNNSDISIPPIIISLDLSSSGLNGVITQGIQNLTHLQYLDLSDNNLTGDIPKFLADIQSLLVINLSGNNLTGSVPLSLLQKKGLKLNVEGNPHLLCTDGLCVNKGDGHKKKSIIAPVVASIASIAILIGALVLFFVLKKKTQSKEPAIVTKNKRFTYSEVMQMTNNFQRVLGKGGFGIVYHGLVNGTEQVAIKILSHSSSQGYKQFKAEVELLLRVHHKNLVGLVGYCDEGENLALIYEYMANGDLKEHMSGTRNHFILNWGTRLKIVVESAQGLEYLHNGCKPLMVHRDIKTTNILLNEQFDAKLADFGLSRSFPIEGETHVSTAVAGTPGYLDPEYYRTNWLTEKSDVYSFGVVLLEIITNQPVIDPRREKPHIAEWVGEVLTKGDIKNIMDPSLNGDYDSTSVWKAVELAMCCLNPSSARRPNMSQVVIELNECLTSENSRGGAIRDMDSEGSIEVSLTFGTEVTPLAR

SEQ ID NO: 75154 - protein, 625 aa, Arabidopsis thaliana
  peptide (1)..(625): Ceres Seq. ID no. 6430678
MSTAATPLNANATLNITWTIEPPTTPFYSYIHFAELQSLRANDTREFNVTLNGEYTIGPYSPKPLKTETIQDLSPEQCNGGACILQLVETLKSTLPPLLNAIEAFTVIDFPQMETNEDDVTGINDVQNTYGLNRISWQGDPCVPKQYSWDGLNCNNSDISIPPIIISLDLSSSGLNGVITQGIQNLTHLQYLDLSDNNLTGDIPKFLADIQSLLVINLSGNNLTGSVPLSLLQKKGLKLNVEGNPHLLCTDGLCVNKGDGHKKKSIIAPVVASIASIAILIGALVLFFVLKKKTQSKEPAIVTKNKRFTYSEVMQMTNNFQRVLGKGGFGIVYHGLVNGTEQVAIKILSHSSSQGYKQFKAEVELLLRVHHKNLVGLVGYCDEGENLALIYEYMANGDLKEHMSGTRNHFILNWGTRLKIVVESAQGLEYLHNGCKPLMVHRDIKTTNILLNEQFDAKLADFGLSRSFPIEGETHVSTAVAGTPGYLDPEYYRTNWLTEKSDVYSFGVVLLEIITNQPVIDPRREKPHIAEWVGEVLTKGDIKNIMDPSLNGDYDSTSVWKAVELAMCCLNPSSARRPNMSQVVIELNECLTSENSRGGAIRDMDSEGSIEVSLTFGTEVTPLAR

SEQ ID NO: 75155 - protein, 513 aa, Arabidopsis thaliana
  peptide (1)..(513): Ceres Seq. ID no. 6430679
METNEDDVTGINDVQNTYGLNRISWQGDPCVPKQYSWDGLNCNNSDISIPPIIISLDLSSSGLNGVITQGIQNLTHLQYLDLSDNNLTGDIPKFLADIQSLLVINLSGNNLTGSVPLSLLQKKGLKLNVEGNPHLLCTDGLCVNKGDGHKKKSIIAPVVASIASIAILIGALVLFFVLKKKTQSKEPAIVTKNKRFTYSEVMQMTNNFQRVLGKGGFGIVYHGLVNGTEQVAIKILSHSSSQGYKQFKAEVELLLRVHHKNLVGLVGYCDEGENLALIYEYMANGDLKEHMSGTRNHFILNWGTRLKIVVESAQGLEYLHNGCKPLMVHRDIKTTNILLNEQFDAKLADFGLSRSFPIEGETHVSTAVAGTPGYLDPEYYRTNWLTEKSDVYSFGVVLLEIITNQPVIDPRREKPHIAEWVGEVLTKGDIKNIMDPSLNGDYDSTSVWKAVELAMCCLNPSSARRPNMSQVVIELNECLTSENSRGGAIRDMDSEGSIEVSLTFGTEVTPLAR

SEQ ID NO: 75156 - DNA, 2673 bp, Arabidopsis thaliana
  misc_feature (1)..(2673): Ceres Seq. ID no. 6430683
  misc_feature (1)..(2673): Ortholog of  Ceres SEQ ID NO 13584744 as cited in SEQ ID NO 69137
atgaaatctcttcactggtttttgcatcttttgatcatagcttttaccgttttgagatcagtggaagctcaaaatcaagcaggatttattagtttggattgtgggttggtgcctaaggaaactacttatacagagaagtcgacgaatataacatacaaatcagacgtggattacatcgacagtggattggtcggaaagatcaatgatgcatacaaaactcagtttcagcaacaggtttgggccgtgagaagcttccctgtaggtcaaagaaactgttacaatgtcaacctcacggcaaacaacaaatatttgatcagaggaacctttgtgtatgggaattatgatggcctgaatcagttcccaagttttgatcttcatatcggtcctaacaaatggtcgtctgttaaaatactaggagtaacaaatacttctatgcatgagataatccatgtcgtaccacaagatagtcttgaagtttgtcttgttaagactggaccgacgacaccattcatttcgtcgctggaggttcgtccattgaacaatgaaagttatctcacgcaaagtggatcattgatgttgttcgccagagtatactttccatccagttcatcatctttcattaggtatgatgaggacatacatgaccgtgtttggaattcattcacagatgatgaaaccgtctggataagtacagacctcccgatcgatacaagtaactcctatgacatgcctcaatccgtgatgaagacagctgctgtccctaaaaatgctagtgagccatggctcttatggtggactcttgatgagaacaccgcacaatcatatgtatatatgcatttcgccgaagtccagaatcttacagcaaatgaaaccagagaattcaacattacttacaatggtggtctacgttggttcagctatttgaggcctcctaatctcagcatttcaacgatctttaatccaagggcagtgagttcttcaaatgggatatttaatttcacattcgcaatgacgggtaactcaactctgcctccccttctcaacgccctcgagatttatacagtcgtagacattctacagctagagacaaacaaagatgaagtttctgctatgatgaacatcaaagaaacatatggtttaagcaaaaagataagctggcaaggagatccgtgtgctcctcagctttatcggtgggaaggtttaaattgtagttatccggactccgagggatcaagaatcatatccttgaacttgaatgggagcgagttgacaggttctataacatctgacatatccaagctaacactgttgacagtattagatttatcaaataatgatttatcaggagatattccaacattttttgctgagatgaagtcgttgaaactcataaacttaagtggaaacccgaaccttaatctcacagcaattccagactctcttcagcaaagggtaaacagcaaatctttaacactaattttgggtgaaaacctgactctgactcccaaaaaagagagtaaaaaggttcccatggttgctatcgcagcgtcagtggctggcgtgttcgctctgctcgttatcttagccatattttttgtcattaaaaggaaaaatgtgaaagctcataagtctccaggaccacccccattagtcactcccggtatagttaaaagtgagacaagatcatccaatccatcaatcataacaagggaacgcaagatcacgtatccagaggtactgaagatgactaataacttcgagagagttcttggcaaaggaggctttggaacagtgtatcatggaaacttggatggtgctgaagtggcagtgaaaatgctttctcattcatcagctcaaggttataaagagttcaaagcagaggttgaacttcttttaagagttcaccatagacatttggtgggacttgtgggttactgtgatgatggagacaacttggctctgatttatgaatatatggcaaatggagacctgagggagaatatgtcaggaaaacgtggaggcaatgtccttacctgggaaaacaggatgcaaatagctgtagaggctgcacaagggctggagtatctgcacaatggatgtaggcctcctatggtacatagagatgttaaaactactaacattttattgaatgagcggtgtggagcaaaactagccgactttgggctctcgagatctttcccaatcgatggcgaatgtcatgtttcgacagtggttgcgggtacacctggttacctagacccggagtactacagaacaaactggctaagcgagaagagtgacgtgtacagcttcggtgtagtgctattagagatagtcacaaaccagcctgtgatagataaaacccgggagagacctcacatcaatgactgggttgggttcatgctcactaaaggagacatcaagagcatcgttgacccgaaactgatgggggactatgatacaaacggtgcatggaagattgtggagctagctctggcctgtgtgaacccatcttcgaaccggagaccaacaatggcacacgttgtgatggagctaaacgactgtgtggccttagaaaatgcaaggcggcaaggtagtgaagagatgtactcaatgggttctgttgactatagtctctcttctacttctgactttgctcctggagccagataa

SEQ ID NO: 75157 - protein, 890 aa, Arabidopsis thaliana
  peptide (1)..(890): Ceres Seq. ID no. 6430684
MKSLHWFLHLLIIAFTVLRSVEAQNQAGFISLDCGLVPKETTYTEKSTNITYKSDVDYIDSGLVGKINDAYKTQFQQQVWAVRSFPVGQRNCYNVNLTANNKYLIRGTFVYGNYDGLNQFPSFDLHIGPNKWSSVKILGVTNTSMHEIIHVVPQDSLEVCLVKTGPTTPFISSLEVRPLNNESYLTQSGSLMLFARVYFPSSSSSFIRYDEDIHDRVWNSFTDDETVWISTDLPIDTSNSYDMPQSVMKTAAVPKNASEPWLLWWTLDENTAQSYVYMHFAEVQNLTANETREFNITYNGGLRWFSYLRPPNLSISTIFNPRAVSSSNGIFNFTFAMTGNSTLPPLLNALEIYTVVDILQLETNKDEVSAMMNIKETYGLSKKISWQGDPCAPQLYRWEGLNCSYPDSEGSRIISLNLNGSELTGSITSDISKLTLLTVLDLSNNDLSGDIPTFFAEMKSLKLINLSGNPNLNLTAIPDSLQQRVNSKSLTLILGENLTLTPKKESKKVPMVAIAASVAGVFALLVILAIFFVIKRKNVKAHKSPGPPPLVTPGIVKSETRSSNPSIITRERKITYPEVLKMTNNFERVLGKGGFGTVYHGNLDGAEVAVKMLSHSSAQGYKEFKAEVELLLRVHHRHLVGLVGYCDDGDNLALIYEYMANGDLRENMSGKRGGNVLTWENRMQIAVEAAQGLEYLHNGCRPPMVHRDVKTTNILLNERCGAKLADFGLSRSFPIDGECHVSTVVAGTPGYLDPEYYRTNWLSEKSDVYSFGVVLLEIVTNQPVIDKTRERPHINDWVGFMLTKGDIKSIVDPKLMGDYDTNGAWKIVELALACVNPSSNRRPTMAHVVMELNDCVALENARRQGSEEMYSMGSVDYSLSSTSDFAPGAR

SEQ ID NO: 75158 - protein, 746 aa, Arabidopsis thaliana
  peptide (1)..(746): Ceres Seq. ID no. 6430685
MHEIIHVVPQDSLEVCLVKTGPTTPFISSLEVRPLNNESYLTQSGSLMLFARVYFPSSSSSFIRYDEDIHDRVWNSFTDDETVWISTDLPIDTSNSYDMPQSVMKTAAVPKNASEPWLLWWTLDENTAQSYVYMHFAEVQNLTANETREFNITYNGGLRWFSYLRPPNLSISTIFNPRAVSSSNGIFNFTFAMTGNSTLPPLLNALEIYTVVDILQLETNKDEVSAMMNIKETYGLSKKISWQGDPCAPQLYRWEGLNCSYPDSEGSRIISLNLNGSELTGSITSDISKLTLLTVLDLSNNDLSGDIPTFFAEMKSLKLINLSGNPNLNLTAIPDSLQQRVNSKSLTLILGENLTLTPKKESKKVPMVAIAASVAGVFALLVILAIFFVIKRKNVKAHKSPGPPPLVTPGIVKSETRSSNPSIITRERKITYPEVLKMTNNFERVLGKGGFGTVYHGNLDGAEVAVKMLSHSSAQGYKEFKAEVELLLRVHHRHLVGLVGYCDDGDNLALIYEYMANGDLRENMSGKRGGNVLTWENRMQIAVEAAQGLEYLHNGCRPPMVHRDVKTTNILLNERCGAKLADFGLSRSFPIDGECHVSTVVAGTPGYLDPEYYRTNWLSEKSDVYSFGVVLLEIVTNQPVIDKTRERPHINDWVGFMLTKGDIKSIVDPKLMGDYDTNGAWKIVELALACVNPSSNRRPTMAHVVMELNDCVALENARRQGSEEMYSMGSVDYSLSSTSDFAPGAR

SEQ ID NO: 75159 - protein, 699 aa, Arabidopsis thaliana
  peptide (1)..(699): Ceres Seq. ID no. 6430686
MLFARVYFPSSSSSFIRYDEDIHDRVWNSFTDDETVWISTDLPIDTSNSYDMPQSVMKTAAVPKNASEPWLLWWTLDENTAQSYVYMHFAEVQNLTANETREFNITYNGGLRWFSYLRPPNLSISTIFNPRAVSSSNGIFNFTFAMTGNSTLPPLLNALEIYTVVDILQLETNKDEVSAMMNIKETYGLSKKISWQGDPCAPQLYRWEGLNCSYPDSEGSRIISLNLNGSELTGSITSDISKLTLLTVLDLSNNDLSGDIPTFFAEMKSLKLINLSGNPNLNLTAIPDSLQQRVNSKSLTLILGENLTLTPKKESKKVPMVAIAASVAGVFALLVILAIFFVIKRKNVKAHKSPGPPPLVTPGIVKSETRSSNPSIITRERKITYPEVLKMTNNFERVLGKGGFGTVYHGNLDGAEVAVKMLSHSSAQGYKEFKAEVELLLRVHHRHLVGLVGYCDDGDNLALIYEYMANGDLRENMSGKRGGNVLTWENRMQIAVEAAQGLEYLHNGCRPPMVHRDVKTTNILLNERCGAKLADFGLSRSFPIDGECHVSTVVAGTPGYLDPEYYRTNWLSEKSDVYSFGVVLLEIVTNQPVIDKTRERPHINDWVGFMLTKGDIKSIVDPKLMGDYDTNGAWKIVELALACVNPSSNRRPTMAHVVMELNDCVALENARRQGSEEMYSMGSVDYSLSSTSDFAPGAR

SEQ ID NO: 75160 - DNA, 2316 bp, Arabidopsis thaliana
  misc_feature (1)..(2316): Ceres Seq. ID no. 6430699
  misc_feature (1)..(2316): Ortholog of  Ceres SEQ ID NO 13654989 as cited in SEQ ID NO 63117
  misc_feature (1)..(2316): Ortholog of  Ceres SEQ ID NO 13584744 as cited in SEQ ID NO 69137
atgaagactatgaatgggtttttgcttctctcgactatagcttttgccgtttttcacttagtccaagctcaatctcaatcaggttttatcagcttggattgtggactaattcctaaggacacaacctataccgagcagataacgaacataacatacatatcagacgcggattacatcgatagtggattaaccgaaaggatcagtgattcatacaagtcacagcttcagcaacagacttggaccttaagaagcttccctgaaggtcaaagaaattgttacaacttcaatctcaaagcgaatctcaaatatctgattagaggaacgtttgtgtatgggaattatgatggtttgaatcaaatgcctaagtttgatcttcatattggtcctaataaatggacttctgttatattggaaggagtagcaaatgctaccatcttcgagataattcatgtcttaacacaagaccgtctccaagtttgtcttgtcaaaacaggacaaacgacaccgtttatatcgtcgttggaacttcgtccgttgaacaatgatacttacgtcactcaaggtgggtcgttgatgtcctttgccagaatctactttccaaagactgcatacttcctcaggtattctgatgacttgtatgaccgagtttgggttccattcagccagaatgaaacagtgtcgttaagtaccaatctaccggttgatacaagtagcaattcctacaatgtgcctcaaaatgtggcgaattccgcaattattccggcggaagctactcatcctctcaacatatggtgggatctccaaaacatcaatgcaccgtcatatgtatacatgcattttgcagaaatccaaaatcttaaagctaatgacatcagagaattcaacattacatacaatggtggtcaggtttgggaaagttccattagacctcacaatctcagcatcactacaatctctagtccaacagctttaaattcttcagatgggtttttcaatttcacttttacaatgaccacaacctctactcttcctccacttatcaatgccctcgagattctgtcgatcgcctatcgcagaaacttaaaaggaaacccgaagctcaacctcacagttccagattctattaagcataggataaacaacaaatctttaaaactaattatagatgaaaaccagagtagtgaaaaacacggtataaagtttcctttggttgctatcttagcatcagtggctggtgtgatcgcattactagctatctttaccatatgtgtcatttttaaaagagaaaaacagggaagtggtgaagctccaactagggttaatactgagatcagatcatcctatcaatcaatcgaaacaaaggatcgaaaatttacgtattccgagatactaaagatgacgaataactttgagagagttcttggtaaaggaggatatggaagagtgtattatggaaaattggatgatactgaagtagctgtgaaaatgctctttcattcctcagctgaacaagattataaacatttcaaagcagaggttgaactacttttaagagtccaccatagacatttggtgggacttgttggttactgtgatgatggagataactttgccttgatttatgaatacatggcaaatggagacttgaaggagaatatgtctggaaaccgcagtggacatgttctaagttgggaaaacagaatgcaaatagctatggaggcagcacaaggattggagtatctacataatggaagtagaccacctatggtccatagagatgtgaaaactactaacattttattgaatgagctgtatcaagcgaaactagctgattttgggctctctagatcttccccggtggatggtgaatcttatgtatcaacaatcgttgccggaacacctggttacttagaccctgaaacaaacttgttaagcgagaagactgatgtgtacagctttggggtagttttattagaaatcatcacaaaccagcctgtgattgatacaacccgcgagaaagcgcatattacagattgggttggatttaagctcatggaaggagacattaggaatattattgacccgaaactgattaaggaatttgatacaaacggtgtgtggaaggctgtggagttggctttgtcttgtgtaaaccctacgtcaaaccatagaccgacgatgccacatgttgtgatggagctaaaagagtgtctggactctgagattgccaggaaacaaggtagtcaagacatgttttctagagattctattgaattaaccttctctcctactggattctcacctggaccgaggtga

SEQ ID NO: 75161 - protein, 771 aa, Arabidopsis thaliana
  peptide (1)..(771): Ceres Seq. ID no. 6430700
MKTMNGFLLLSTIAFAVFHLVQAQSQSGFISLDCGLIPKDTTYTEQITNITYISDADYIDSGLTERISDSYKSQLQQQTWTLRSFPEGQRNCYNFNLKANLKYLIRGTFVYGNYDGLNQMPKFDLHIGPNKWTSVILEGVANATIFEIIHVLTQDRLQVCLVKTGQTTPFISSLELRPLNNDTYVTQGGSLMSFARIYFPKTAYFLRYSDDLYDRVWVPFSQNETVSLSTNLPVDTSSNSYNVPQNVANSAIIPAEATHPLNIWWDLQNINAPSYVYMHFAEIQNLKANDIREFNITYNGGQVWESSIRPHNLSITTISSPTALNSSDGFFNFTFTMTTTSTLPPLINALEILSIAYRRNLKGNPKLNLTVPDSIKHRINNKSLKLIIDENQSSEKHGIKFPLVAILASVAGVIALLAIFTICVIFKREKQGSGEAPTRVNTEIRSSYQSIETKDRKFTYSEILKMTNNFERVLGKGGYGRVYYGKLDDTEVAVKMLFHSSAEQDYKHFKAEVELLLRVHHRHLVGLVGYCDDGDNFALIYEYMANGDLKENMSGNRSGHVLSWENRMQIAMEAAQGLEYLHNGSRPPMVHRDVKTTNILLNELYQAKLADFGLSRSSPVDGESYVSTIVAGTPGYLDPETNLLSEKTDVYSFGVVLLEIITNQPVIDTTREKAHITDWVGFKLMEGDIRNIIDPKLIKEFDTNGVWKAVELALSCVNPTSNHRPTMPHVVMELKECLDSEIARKQGSQDMFSRDSIELTFSPTGFSPGPR

SEQ ID NO: 75162 - protein, 768 aa, Arabidopsis thaliana
  peptide (1)..(768): Ceres Seq. ID no. 6430701
MNGFLLLSTIAFAVFHLVQAQSQSGFISLDCGLIPKDTTYTEQITNITYISDADYIDSGLTERISDSYKSQLQQQTWTLRSFPEGQRNCYNFNLKANLKYLIRGTFVYGNYDGLNQMPKFDLHIGPNKWTSVILEGVANATIFEIIHVLTQDRLQVCLVKTGQTTPFISSLELRPLNNDTYVTQGGSLMSFARIYFPKTAYFLRYSDDLYDRVWVPFSQNETVSLSTNLPVDTSSNSYNVPQNVANSAIIPAEATHPLNIWWDLQNINAPSYVYMHFAEIQNLKANDIREFNITYNGGQVWESSIRPHNLSITTISSPTALNSSDGFFNFTFTMTTTSTLPPLINALEILSIAYRRNLKGNPKLNLTVPDSIKHRINNKSLKLIIDENQSSEKHGIKFPLVAILASVAGVIALLAIFTICVIFKREKQGSGEAPTRVNTEIRSSYQSIETKDRKFTYSEILKMTNNFERVLGKGGYGRVYYGKLDDTEVAVKMLFHSSAEQDYKHFKAEVELLLRVHHRHLVGLVGYCDDGDNFALIYEYMANGDLKENMSGNRSGHVLSWENRMQIAMEAAQGLEYLHNGSRPPMVHRDVKTTNILLNELYQAKLADFGLSRSSPVDGESYVSTIVAGTPGYLDPETNLLSEKTDVYSFGVVLLEIITNQPVIDTTREKAHITDWVGFKLMEGDIRNIIDPKLIKEFDTNGVWKAVELALSCVNPTSNHRPTMPHVVMELKECLDSEIARKQGSQDMFSRDSIELTFSPTGFSPGPR

SEQ ID NO: 75163 - protein, 652 aa, Arabidopsis thaliana
  peptide (1)..(652): Ceres Seq. ID no. 6430702
MPKFDLHIGPNKWTSVILEGVANATIFEIIHVLTQDRLQVCLVKTGQTTPFISSLELRPLNNDTYVTQGGSLMSFARIYFPKTAYFLRYSDDLYDRVWVPFSQNETVSLSTNLPVDTSSNSYNVPQNVANSAIIPAEATHPLNIWWDLQNINAPSYVYMHFAEIQNLKANDIREFNITYNGGQVWESSIRPHNLSITTISSPTALNSSDGFFNFTFTMTTTSTLPPLINALEILSIAYRRNLKGNPKLNLTVPDSIKHRINNKSLKLIIDENQSSEKHGIKFPLVAILASVAGVIALLAIFTICVIFKREKQGSGEAPTRVNTEIRSSYQSIETKDRKFTYSEILKMTNNFERVLGKGGYGRVYYGKLDDTEVAVKMLFHSSAEQDYKHFKAEVELLLRVHHRHLVGLVGYCDDGDNFALIYEYMANGDLKENMSGNRSGHVLSWENRMQIAMEAAQGLEYLHNGSRPPMVHRDVKTTNILLNELYQAKLADFGLSRSSPVDGESYVSTIVAGTPGYLDPETNLLSEKTDVYSFGVVLLEIITNQPVIDTTREKAHITDWVGFKLMEGDIRNIIDPKLIKEFDTNGVWKAVELALSCVNPTSNHRPTMPHVVMELKECLDSEIARKQGSQDMFSRDSIELTFSPTGFSPGPR

SEQ ID NO: 75164 - DNA, 672 bp, Arabidopsis thaliana
  misc_feature (1)..(672): Ceres Seq. ID no. 6430707
  misc_feature (1)..(672): Ortholog of  Ceres SEQ ID NO 14311713 as cited in SEQ ID NO 51356
atgagttactctcatcaaagcatgggttctggtagtagaaatgcaaggggatatgaatttggaaggacttatgttgtgaggcctaaaggaaagcatcaagccactctagtctggcttcatggtcttggtgacaatggctctagttcatctcagctcatggacagcttgcatcttccaaatataaaatggatttgtccaaccgctccttcgcgtcctgttacaagtcttggtggatttacatgcactgcttggtttgacgttggggaaatttctgaagatggtcatgatgatttggaaggtttagatgcctcagcttcacatattgctaaccttttgtcctctgaaccagcagatgtaggcataggaggttttagcatgggagcagcaatatctctctactccgcgacttgttatgctcttggacgttatggaactggccatgcgtatcctataaacctacaagctgttgtaggactcagcggctggcttcctgccgatgatgtggttccttataggtttggagagaaatctgcgcagtctcttggcatggctggatttcgactagccatgtttaaaccatacgaaggacttggtcattataccgttcccagagaaatggatgaggtcgttcactggctcacaacgatgctcggacttgagggctcgcgctaa

SEQ ID NO: 75165 - protein, 223 aa, Arabidopsis thaliana
  peptide (1)..(223): Ceres Seq. ID no. 6430708
MSYSHQSMGSGSRNARGYEFGRTYVVRPKGKHQATLVWLHGLGDNGSSSSQLMDSLHLPNIKWICPTAPSRPVTSLGGFTCTAWFDVGEISEDGHDDLEGLDASASHIANLLSSEPADVGIGGFSMGAAISLYSATCYALGRYGTGHAYPINLQAVVGLSGWLPADDVVPYRFGEKSAQSLGMAGFRLAMFKPYEGLGHYTVPREMDEVVHWLTTMLGLEGSR

SEQ ID NO: 75166 - protein, 216 aa, Arabidopsis thaliana
  peptide (1)..(216): Ceres Seq. ID no. 6430709
MGSGSRNARGYEFGRTYVVRPKGKHQATLVWLHGLGDNGSSSSQLMDSLHLPNIKWICPTAPSRPVTSLGGFTCTAWFDVGEISEDGHDDLEGLDASASHIANLLSSEPADVGIGGFSMGAAISLYSATCYALGRYGTGHAYPINLQAVVGLSGWLPADDVVPYRFGEKSAQSLGMAGFRLAMFKPYEGLGHYTVPREMDEVVHWLTTMLGLEGSR

SEQ ID NO: 75167 - protein, 171 aa, Arabidopsis thaliana
  peptide (1)..(171): Ceres Seq. ID no. 6430710
MDSLHLPNIKWICPTAPSRPVTSLGGFTCTAWFDVGEISEDGHDDLEGLDASASHIANLLSSEPADVGIGGFSMGAAISLYSATCYALGRYGTGHAYPINLQAVVGLSGWLPADDVVPYRFGEKSAQSLGMAGFRLAMFKPYEGLGHYTVPREMDEVVHWLTTMLGLEGSR

SEQ ID NO: 75168 - DNA, 1146 bp, Arabidopsis thaliana
  misc_feature (1)..(1146): Ceres Seq. ID no. 6430712
  misc_feature (1)..(1146): Ortholog of  Ceres SEQ ID NO 14301420 as cited in SEQ ID NO 56580
atggagaagaagaaggtgacgattccacaagtgtgtcatggccattcaagacctgttgttgatttgttctacagtccaattactcctgacggtttcttcctcatcagcgctagcaaagaatactcatgtcttgatggtttagattcgcatccaatgttgagaaatggggaaactggagactggattggtacatttgaagggcataaaggtgcagtttggagttcttgtctggataacaatgcattacgtgctgcatctgcttctgccgatttttcagccaaactttgggatgcgttaacaggggatgtgctgcattcttttgagcacaagcatattgtccgagcatgcgccttctcagaggatacaaaatcgttgctcacaggagggtttgagaaaattcttcgtgtttttgacatgaatcggttggatgcacctcctacagaagttgataaatctcctggttctatcagaaccctcacatggcttcacagtgatcaaacaatattaagttcatgtactgatattggcggtgtaaggttatgggatgtgaggagtgggaaaattgtgcaaacgttagaaactaagtctcctgtcaccagtgctgaagtgagccaagatggacggtatataacaactgctgatgggtcaactgttaaattctgggacgctaaccattttggactagtgaagagttacgacatgccctgcaatattgaatctgcatcgttggagccaaagtctggtgaaaaatttgttgctggtggagaggatatgtgggtccgagtgtttgatttctacactggcgaagagattgttaaattccagatagcttcaagcttaattggagtttctgactctgttataaactccatgagtgaagagcttaatagatctttgaagcatggatgcaacaagggacatcacggtccagtacactgcgttaggtttactcccactggtttatcctatgcctcgggatctgaagacgggacaatcagaatctggcaaacaacaccagcaaatcccgaagagaacgaaactagctcgaggagagtgaagcatagcgtggatgaagtttcaaagaagattgaaggctttcacatcaacaaagaaggaaaaaccgcagagaaaccatctgatacttaa

SEQ ID NO: 75169 - protein, 381 aa, Arabidopsis thaliana
  peptide (1)..(381): Ceres Seq. ID no. 6430713
MEKKKVTIPQVCHGHSRPVVDLFYSPITPDGFFLISASKEYSCLDGLDSHPMLRNGETGDWIGTFEGHKGAVWSSCLDNNALRAASASADFSAKLWDALTGDVLHSFEHKHIVRACAFSEDTKSLLTGGFEKILRVFDMNRLDAPPTEVDKSPGSIRTLTWLHSDQTILSSCTDIGGVRLWDVRSGKIVQTLETKSPVTSAEVSQDGRYITTADGSTVKFWDANHFGLVKSYDMPCNIESASLEPKSGEKFVAGGEDMWVRVFDFYTGEEIVKFQIASSLIGVSDSVINSMSEELNRSLKHGCNKGHHGPVHCVRFTPTGLSYASGSEDGTIRIWQTTPANPEENETSSRRVKHSVDEVSKKIEGFHINKEGKTAEKPSDT

SEQ ID NO: 75170 - protein, 330 aa, Arabidopsis thaliana
  peptide (1)..(330): Ceres Seq. ID no. 6430714
MLRNGETGDWIGTFEGHKGAVWSSCLDNNALRAASASADFSAKLWDALTGDVLHSFEHKHIVRACAFSEDTKSLLTGGFEKILRVFDMNRLDAPPTEVDKSPGSIRTLTWLHSDQTILSSCTDIGGVRLWDVRSGKIVQTLETKSPVTSAEVSQDGRYITTADGSTVKFWDANHFGLVKSYDMPCNIESASLEPKSGEKFVAGGEDMWVRVFDFYTGEEIVKFQIASSLIGVSDSVINSMSEELNRSLKHGCNKGHHGPVHCVRFTPTGLSYASGSEDGTIRIWQTTPANPEENETSSRRVKHSVDEVSKKIEGFHINKEGKTAEKPSDT

SEQ ID NO: 75171 - protein, 243 aa, Arabidopsis thaliana
  peptide (1)..(243): Ceres Seq. ID no. 6430715
MNRLDAPPTEVDKSPGSIRTLTWLHSDQTILSSCTDIGGVRLWDVRSGKIVQTLETKSPVTSAEVSQDGRYITTADGSTVKFWDANHFGLVKSYDMPCNIESASLEPKSGEKFVAGGEDMWVRVFDFYTGEEIVKFQIASSLIGVSDSVINSMSEELNRSLKHGCNKGHHGPVHCVRFTPTGLSYASGSEDGTIRIWQTTPANPEENETSSRRVKHSVDEVSKKIEGFHINKEGKTAEKPSDT

SEQ ID NO: 75172 - DNA, 1041 bp, Arabidopsis thaliana
  misc_feature (1)..(1041): Ceres Seq. ID no. 6430731
  misc_feature (1)..(1041): Ortholog of  Ceres SEQ ID NO 13654989 as cited in SEQ ID NO 63117
  misc_feature (1)..(1041): Ortholog of  Ceres SEQ ID NO 13584744 as cited in SEQ ID NO 69137
atgaacaatggtggagcttccaccaactacagctacacttctagccctgccgaaggagtagaagtgtacacatacaaggaattagagattgcaacaaataatttcagcgaggagaagaaaatcggaaatggagatgtgtacaaaggagtactaagtgatggaactgttgcggccattaaaaagcttcatatgtttaatgataatgctagtaaccaaaagcatgaagaacggtcctttaggcttgaggttgatcttcttagtcgattacaatgcccatatttggtggaattacttggatattgtgcagatcaaaaccataggatcctgatatatgaatttatgcctaatggtactgtggaacatcatctccacgatcataattttaagaatctaaaggatcgacctcaaccattagattggggagctcggcttaggatcgcccttgattgcgccagagccctagagtttcttcatgagaatacaatctctactgttatccaccggaacttcaagtgtaccaacattttgttggatcaaaataatcgagctaaagtttcagatttcggattagccaaaaccggatccgataaactaaacggtgagatttcaacaagggttattggcaccacaggatatcttgctccagagtatgcctctactggaaagcttactacaaaatcagatgtttatagttatggtattgtgttactacaactcttaacgggtcgcacaccgatcgattcaagacgtccacggggacaagatgtccttgtctcttgggctcttccaagactaaccaatagagagaaaattagtgaaatggtggatccaaccatgaaaggtcaatactcacaaaaagatcttattcaggtagcagccatagcagcagtgtgtgtgcaaccagaagcaagttatagaccgttgatgacggatgttgttcactcgctcattccccttgttaaagctttcaacaaaagtactgattcttctcggtttcctagccgtagagaaagcttgtcatttgatgatattatgccatga

SEQ ID NO: 75173 - protein, 346 aa, Arabidopsis thaliana
  peptide (1)..(346): Ceres Seq. ID no. 6430732
MNNGGASTNYSYTSSPAEGVEVYTYKELEIATNNFSEEKKIGNGDVYKGVLSDGTVAAIKKLHMFNDNASNQKHEERSFRLEVDLLSRLQCPYLVELLGYCADQNHRILIYEFMPNGTVEHHLHDHNFKNLKDRPQPLDWGARLRIALDCARALEFLHENTISTVIHRNFKCTNILLDQNNRAKVSDFGLAKTGSDKLNGEISTRVIGTTGYLAPEYASTGKLTTKSDVYSYGIVLLQLLTGRTPIDSRRPRGQDVLVSWALPRLTNREKISEMVDPTMKGQYSQKDLIQVAAIAAVCVQPEASYRPLMTDVVHSLIPLVKAFNKSTDSSRFPSRRESLSFDDIMP

SEQ ID NO: 75174 - protein, 283 aa, Arabidopsis thaliana; identical to SEQ ID NO: 70097
  peptide (1)..(283): Ceres Seq. ID no. 6430733

SEQ ID NO: 75175 - protein, 233 aa, Arabidopsis thaliana
  peptide (1)..(233): Ceres Seq. ID no. 6430734
MPNGTVEHHLHDHNFKNLKDRPQPLDWGARLRIALDCARALEFLHENTISTVIHRNFKCTNILLDQNNRAKVSDFGLAKTGSDKLNGEISTRVIGTTGYLAPEYASTGKLTTKSDVYSYGIVLLQLLTGRTPIDSRRPRGQDVLVSWALPRLTNREKISEMVDPTMKGQYSQKDLIQVAAIAAVCVQPEASYRPLMTDVVHSLIPLVKAFNKSTDSSRFPSRRESLSFDDIMP

SEQ ID NO: 75176 - DNA, 2481 bp, Arabidopsis thaliana
  misc_feature (1)..(2481): Ceres Seq. ID no. 6430791
  misc_feature (1)..(2481): Ortholog of  Ceres SEQ ID NO 15177963 as cited in SEQ ID NO 59105
  misc_feature (1)..(2481): Ortholog of  Ceres SEQ ID NO 14302746 as cited in SEQ ID NO 66646
atggagtcttccgacgattgcttcattcagcttgaagttagtgtaaggctcggtgtgaacgatttgttatcctttgaaaattatagaacctccttcccctgggactcttattcaggccttgacggattttttcatcttggtgcagtggatgatgaaggtaacttgactgagataggccagttgatgaatctcgagattagaggagatgatgatgatgatgatataagcgatgataatatcaaagtcgacccgagtctcaagttcgaaaacccaagtcttcgacaagcctacattgctcttcaatcatggaaacaagctattttctctgatccttttaacttcactgctaattggaatggctctgatgtttgttcctacaacggtatcttttgtgctccttctccttctagtccgaaaactcgagttgttgcgggtattgaccttaaccatgcggacatggctggttatttacctcgtgagcttggtcttctcactgatcttgctctctttcatctcaactcaaaccgcttttgtggagaagtacctctcacgtttaaacacatgaagcttctcttcgagcttgacttaagtaacaaccgttttgttgggaagttccctaatgttgtcttgtctttaccttccctcaagttcttggatcttcggtacaacgagtttgaaggtagtatcccttcgaagctattcgataaagagctcgacgcgatattcttaaaccataaccggtttatgtttgggatacccgaaaacatgggaaactctccggtgtctgctctagttcttgcggataatgatcttggaggttgcataccgggaagtatcggtttaatgggaaagactctcaacgagatcatcctctctaacgataacttaaccggttgcttaccaccacagattgggaatctcaagaatgtgacggttttcgatatcagtttcaaccgtttaagcggtccattgccatcaagcattggaaacatgaagagtttggaacagctcaatgttgctaacaatagattcacaggagttataccaagcagcatttgtcagctctctaaccttgagaacttcacttattcttccaacttcttcaccggtgatgccccgagatgtgtggctcttttgggagacaatgtggtggttaatggctcgatgaattgtattgatggtaaagaagatcaaagatcgtctaaagagtgttcttctccagcctcacgctctgttgattgtagtaagtttgggtgtaacaactttttctctcctccaccaccgtcttttaagatgtcacccaccgttcgagtacttcctccaccgcctccgtcttccaagatgtcgcctacatttagagcaactccgccaccgccgtcttctaagatgtcaccatcttttagagcaactccgccaccgccttcttctaaaatgtcgccttcttttagagcaactccgccaccaccttcttctaagatgtcgccttccgtcaaggcgtatcctcctcctccaccaccgccagagtatgagccatctccgcctcctccttcttccgaaatgtcaccttccgttagggcataccctccaccaccaccactatcaccaccaccaccatctcctcctccaccatacatctactcatctcctccaccaccgtcaccatctcctcctccgccatacatttactcatctcctccgcccgtagttaactgtccacccacaacacaaagtcccccacctccgaaatatgagcaaactccttcaccaagggaatactatccatcaccttcaccaccttactaccaatacacgtcttctccgccaccgcctacttactacgccactcaatctccaccgccaccaccaccgcctacttactacgctgttcaatctcccccgccaccaccaccggtatactacccacctgtaacagcaagtcctcctccaccaccggtctactatacaccggttatacaatctcctcctcctccaccggtttactattcacctgttacccaaagtcctccaccaccaccaccggtttactatcccccggtaacacaaagtccaccaccatcaccggtctactatccgccagttacccaaagtccacctcccccaccagtttattatcttccagtaactcaaagccctccaccgccatcaccagtctactatccaccggtagcaaaaagccctccaccaccatcaccagtctactatccaccggtaacacaaagcccacctccaccgtcaacaccagttgagtaccatccaccggcaagcccaaaccagtctccaccaccggagtatcaatcaccaccaccaaagggatgcaacgacagtccaagtaacgaccatcactaccaaacaccaacaccaccttctctgccgcctccatattacgaagacacacctcttccgcctatccgcggtgtctcttatgcgtctcctcctccaccatcaatcccatactactaa

SEQ ID NO: 75177 - protein, 826 aa, Arabidopsis thaliana
  peptide (1)..(826): Ceres Seq. ID no. 6430792
MESSDDCFIQLEVSVRLGVNDLLSFENYRTSFPWDSYSGLDGFFHLGAVDDEGNLTEIGQLMNLEIRGDDDDDDISDDNIKVDPSLKFENPSLRQAYIALQSWKQAIFSDPFNFTANWNGSDVCSYNGIFCAPSPSSPKTRVVAGIDLNHADMAGYLPRELGLLTDLALFHLNSNRFCGEVPLTFKHMKLLFELDLSNNRFVGKFPNVVLSLPSLKFLDLRYNEFEGSIPSKLFDKELDAIFLNHNRFMFGIPENMGNSPVSALVLADNDLGGCIPGSIGLMGKTLNEIILSNDNLTGCLPPQIGNLKNVTVFDISFNRLSGPLPSSIGNMKSLEQLNVANNRFTGVIPSSICQLSNLENFTYSSNFFTGDAPRCVALLGDNVVVNGSMNCIDGKEDQRSSKECSSPASRSVDCSKFGCNNFFSPPPPSFKMSPTVRVLPPPPPSSKMSPTFRATPPPPSSKMSPSFRATPPPPSSKMSPSFRATPPPPSSKMSPSVKAYPPPPPPPEYEPSPPPPSSEMSPSVRAYPPPPPLSPPPPSPPPPYIYSSPPPPSPSPPPPYIYSSPPPVVNCPPTTQSPPPPKYEQTPSPREYYPSPSPPYYQYTSSPPPPTYYATQSPPPPPPPTYYAVQSPPPPPPVYYPPVTASPPPPPVYYTPVIQSPPPPPVYYSPVTQSPPPPPPVYYPPVTQSPPPSPVYYPPVTQSPPPPPVYYLPVTQSPPPPSPVYYPPVAKSPPPPSPVYYPPVTQSPPPPSTPVEYHPPASPNQSPPPEYQSPPPKGCNDSPSNDHHYQTPTPPSLPPPYYEDTPLPPIRGVSYASPPPPSIPYY

SEQ ID NO: 75178 - protein, 765 aa, Arabidopsis thaliana
  peptide (1)..(765): Ceres Seq. ID no. 6430793
MNLEIRGDDDDDDISDDNIKVDPSLKFENPSLRQAYIALQSWKQAIFSDPFNFTANWNGSDVCSYNGIFCAPSPSSPKTRVVAGIDLNHADMAGYLPRELGLLTDLALFHLNSNRFCGEVPLTFKHMKLLFELDLSNNRFVGKFPNVVLSLPSLKFLDLRYNEFEGSIPSKLFDKELDAIFLNHNRFMFGIPENMGNSPVSALVLADNDLGGCIPGSIGLMGKTLNEIILSNDNLTGCLPPQIGNLKNVTVFDISFNRLSGPLPSSIGNMKSLEQLNVANNRFTGVIPSSICQLSNLENFTYSSNFFTGDAPRCVALLGDNVVVNGSMNCIDGKEDQRSSKECSSPASRSVDCSKFGCNNFFSPPPPSFKMSPTVRVLPPPPPSSKMSPTFRATPPPPSSKMSPSFRATPPPPSSKMSPSFRATPPPPSSKMSPSVKAYPPPPPPPEYEPSPPPPSSEMSPSVRAYPPPPPLSPPPPSPPPPYIYSSPPPPSPSPPPPYIYSSPPPVVNCPPTTQSPPPPKYEQTPSPREYYPSPSPPYYQYTSSPPPPTYYATQSPPPPPPPTYYAVQSPPPPPPVYYPPVTASPPPPPVYYTPVIQSPPPPPVYYSPVTQSPPPPPPVYYPPVTQSPPPSPVYYPPVTQSPPPPPVYYLPVTQSPPPPSPVYYPPVAKSPPPPSPVYYPPVTQSPPPPSTPVEYHPPASPNQSPPPEYQSPPPKGCNDSPSNDHHYQTPTPPSLPPPYYEDTPLPPIRGVSYASPPPPSIPYY

SEQ ID NO: 75179 - protein, 674 aa, Arabidopsis thaliana; identical to SEQ ID NO: 69824
  peptide (1)..(674): Ceres Seq. ID no. 6430794

SEQ ID NO: 75180 - DNA, 2232 bp, Arabidopsis thaliana
  misc_feature (1)..(2232): Ceres Seq. ID no. 6430861
  misc_feature (1)..(2232): Ortholog of  Ceres SEQ ID NO 13584744 as cited in SEQ ID NO 69137
atgtgttcaaatggcatctttgtctctcttcttactttatctctcttgttaggaaaatcatgcagtgaaacagatacgctacatcagggtcagttcttgaaagatgggcaagagctcgtttctgcttttaaaatcttcaaactcaagtttttcaactttaagaattcagaaaacttgtatcttggaatttggttcaacaatctttatcttaatactgatagccaggacagacctgtctggattgctaaccgtaacaatccaatctcagaccgctctggaagcctcacagtggattctcttggcagattgaagattttaagaggagcatcaaccatgcttgagctaagctctatagaaaccacaagaaacacaacccttcagcttttggattctggaaatcttcagctccaagagatggatgctgatggatcgatgaagcgggttttgtggcaaagtttcgattatccaacagatactcttcttcctgggatgaaactaggtttcgatggcaagaccaggaagagatgggaacttacatcatggttaggtgatactttacctgcttctggatcttttgtctttgggatggatactaatatcacaaacgtattgaccatcttgtggcgtggaaacatgtattggagtagcgggctttggaataaaggtcggttctccgaagaggagttaaacgaatgcggtttcctcttttccttcgtttcaaccaagagtggacaatattttatgtattcaggtgatcaggacgatgccagaacattttttccaaccataatgatagacgaacaaggcattttgcgtagagagcaaatgcatcggcaacgtaacaggcaaaattataggaaccggaattgtttggctgcaggttacgtagtccgggatgagccatatgggttcacttctttcagagtgacagtatcttcttccgcaagcaatggttttgtacttagtggaacgtttagttcagttgattgcagtgctatatgtttgcaaaactcttcttgtcttgcctatgcttcaaccgagccggatggtacgggttgcgaaatctggaatacttatcctaccaacaaagggtcggcttctcatagtcctagaactatatatatccgtggaaatgaccaagaaatgctactacgtgaattgggaattgataggagctgcatacacaagagaaatgaaaggaagagtaataacgagcttcagatttttagctttgaaagtgtagtatcggcaacagatgacttctccgatgaaaacaagctcggtgaaggaggttttggtcctgtatataagggaaagttattaaatggggaagaagtggctatcaagagactatctttagcatctggccaaggattagtggagtttaaaaacgaagctatacttattgcaaagcttcagcatacaaatcttgttcaggttttaggatgttgcatcgaaaaagatgagaaaatgctgatttatgaatacatgcagaacaagagccttgactacttcctctttgatcccttgaggaaaaacgttttggattggacgttgcggttcaggatcatggaaggaatcattcaagggcttttgtaccttcacaagtactcaagattgaaagtgatacatagagacatcaaagctagtaatattttgctagacgaggatatgaatccgaaaatatcggattttggattggctcggatatttggagcggaagaaacaagagccaacaccaaaagagttgctggcacatttggctatatgtcgccggagtattttagagaaggactattctcggcgaaatcagatgtgttcagctttggggttctaatgctcgaaatcatttgtgggaggaagaacaatagctttcaccatgacttagaaggacctttgaatctcatagttcatgtgtggaatctgtttaaagagaacaaaattcgtgaggtgatagatctgtctttgagagattctgcgcttgattaccctcaagtgttgagatgcgttcaagttgctctattgtgtgtacaagaaaacgcggaagatagaccaagtatgttagacgttgtgtccatgatatatggcgaaggaaataatgctctttctttgcctaaagagcctgctttctatgatggtccccggagaagctttccagaaatgaaggttgagccacaggagccggaaaatgtatcggcgagtattaccatcacggtgctggaggcaaggtga

SEQ ID NO: 75181 - protein, 743 aa, Arabidopsis thaliana
  peptide (1)..(743): Ceres Seq. ID no. 6430862
MCSNGIFVSLLTLSLLLGKSCSETDTLHQGQFLKDGQELVSAFKIFKLKFFNFKNSENLYLGIWFNNLYLNTDSQDRPVWIANRNNPISDRSGSLTVDSLGRLKILRGASTMLELSSIETTRNTTLQLLDSGNLQLQEMDADGSMKRVLWQSFDYPTDTLLPGMKLGFDGKTRKRWELTSWLGDTLPASGSFVFGMDTNITNVLTILWRGNMYWSSGLWNKGRFSEEELNECGFLFSFVSTKSGQYFMYSGDQDDARTFFPTIMIDEQGILRREQMHRQRNRQNYRNRNCLAAGYVVRDEPYGFTSFRVTVSSSASNGFVLSGTFSSVDCSAICLQNSSCLAYASTEPDGTGCEIWNTYPTNKGSASHSPRTIYIRGNDQEMLLRELGIDRSCIHKRNERKSNNELQIFSFESVVSATDDFSDENKLGEGGFGPVYKGKLLNGEEVAIKRLSLASGQGLVEFKNEAILIAKLQHTNLVQVLGCCIEKDEKMLIYEYMQNKSLDYFLFDPLRKNVLDWTLRFRIMEGIIQGLLYLHKYSRLKVIHRDIKASNILLDEDMNPKISDFGLARIFGAEETRANTKRVAGTFGYMSPEYFREGLFSAKSDVFSFGVLMLEIICGRKNNSFHHDLEGPLNLIVHVWNLFKENKIREVIDLSLRDSALDYPQVLRCVQVALLCVQENAEDRPSMLDVVSMIYGEGNNALSLPKEPAFYDGPRRSFPEMKVEPQEPENVSASITITVLEAR

SEQ ID NO: 75182 - protein, 632 aa, Arabidopsis thaliana
  peptide (1)..(632): Ceres Seq. ID no. 6430863
MLELSSIETTRNTTLQLLDSGNLQLQEMDADGSMKRVLWQSFDYPTDTLLPGMKLGFDGKTRKRWELTSWLGDTLPASGSFVFGMDTNITNVLTILWRGNMYWSSGLWNKGRFSEEELNECGFLFSFVSTKSGQYFMYSGDQDDARTFFPTIMIDEQGILRREQMHRQRNRQNYRNRNCLAAGYVVRDEPYGFTSFRVTVSSSASNGFVLSGTFSSVDCSAICLQNSSCLAYASTEPDGTGCEIWNTYPTNKGSASHSPRTIYIRGNDQEMLLRELGIDRSCIHKRNERKSNNELQIFSFESVVSATDDFSDENKLGEGGFGPVYKGKLLNGEEVAIKRLSLASGQGLVEFKNEAILIAKLQHTNLVQVLGCCIEKDEKMLIYEYMQNKSLDYFLFDPLRKNVLDWTLRFRIMEGIIQGLLYLHKYSRLKVIHRDIKASNILLDEDMNPKISDFGLARIFGAEETRANTKRVAGTFGYMSPEYFREGLFSAKSDVFSFGVLMLEIICGRKNNSFHHDLEGPLNLIVHVWNLFKENKIREVIDLSLRDSALDYPQVLRCVQVALLCVQENAEDRPSMLDVVSMIYGEGNNALSLPKEPAFYDGPRRSFPEMKVEPQEPENVSASITITVLEAR

SEQ ID NO: 75183 - protein, 605 aa, Arabidopsis thaliana
  peptide (1)..(605): Ceres Seq. ID no. 6430864
MDADGSMKRVLWQSFDYPTDTLLPGMKLGFDGKTRKRWELTSWLGDTLPASGSFVFGMDTNITNVLTILWRGNMYWSSGLWNKGRFSEEELNECGFLFSFVSTKSGQYFMYSGDQDDARTFFPTIMIDEQGILRREQMHRQRNRQNYRNRNCLAAGYVVRDEPYGFTSFRVTVSSSASNGFVLSGTFSSVDCSAICLQNSSCLAYASTEPDGTGCEIWNTYPTNKGSASHSPRTIYIRGNDQEMLLRELGIDRSCIHKRNERKSNNELQIFSFESVVSATDDFSDENKLGEGGFGPVYKGKLLNGEEVAIKRLSLASGQGLVEFKNEAILIAKLQHTNLVQVLGCCIEKDEKMLIYEYMQNKSLDYFLFDPLRKNVLDWTLRFRIMEGIIQGLLYLHKYSRLKVIHRDIKASNILLDEDMNPKISDFGLARIFGAEETRANTKRVAGTFGYMSPEYFREGLFSAKSDVFSFGVLMLEIICGRKNNSFHHDLEGPLNLIVHVWNLFKENKIREVIDLSLRDSALDYPQVLRCVQVALLCVQENAEDRPSMLDVVSMIYGEGNNALSLPKEPAFYDGPRRSFPEMKVEPQEPENVSASITITVLEAR

SEQ ID NO: 75184 - DNA, 1242 bp, Arabidopsis thaliana
  misc_feature (1)..(1242): Ceres Seq. ID no. 6430939
  misc_feature (1)..(1242): Ortholog of  Ceres SEQ ID NO 13659033 as cited in SEQ ID NO 66372
  misc_feature (1)..(1242): Ortholog of  Ceres SEQ ID NO 13655724 as cited in SEQ ID NO 68973
  misc_feature (1)..(1242): Ortholog of  Ceres SEQ ID NO 12625899 as cited in SEQ ID NO 69079
atgattcaatccatcttccaagttgtgcttgttagtcttctagttctaggatccgtgagatggatacttgatgaactcaagagcaaagaaagtcgaatatccaaactatatggtttcagacagaaagaggcagtgtttgtcactaaagaggatcagcttgatgagagctgcaatgtctttgaaggacaatgggtttgggacaatgtctcttatcctctttatacagagaagagctgtccttatttagtcaaacaaacaacatgtcaacgaaatggacggcctgattcttattaccagaactggagatggaaaccgagctcatgcgacttgccaaggttcaatgctctgaaactgttggacgtgttgagaaacaaaagactaatgttcataggagactcagtgcagagaagcacgttcgagtcaatggtctgtatggtgcaatcagtaattcctgagaagaagaagtccttccataggattcctcctatgaagatcttcaaagctgaggaatacaatgcatccatcgagtattactgggcacctttcatcgtggaatcgatttcagatcatgcaactaatcatacagtacacaaaaggttggttaagctcgacgccattgaaaaacatagcaagagctgggaaggggttgatgttctagtctttgagagctatgtatggtggatgcatcaacctaagatcaatgcaaccttagaaggaaaacttatacgcatatgcaggtatggagataccagtgaagtccgagagtataatgtgacgactgcttataaaatggcgttagaaacatgggccaagtggtttaagacgaagatcaattccgagaagcaaaaagttttcttcacgagtatgtctccgactcatctatggagctgggagtggaatccagggagcgatggaacctgttatgatgagttatatccaatagacaaaagatcatattggggtacaggatcaaatcaagaaatcatgaagattgttggtgatgttctaagcagagttggagaaaatgtcacgttcctgaacattacgcaactgtcggaatacaggaaagatggacatacgactgtgtatggagaacggagagggaagctcttgacaaaggaacagagagctgatccgaaaaactatggagattgcatccactggtgtttgccaggagttcctgatacatggaatgagattctctatgcatatttgcttcgcagtcaccgcaatttcttctga

SEQ ID NO: 75185 - protein, 413 aa, Arabidopsis thaliana
  peptide (1)..(413): Ceres Seq. ID no. 6430940
MIQSIFQVVLVSLLVLGSVRWILDELKSKESRISKLYGFRQKEAVFVTKEDQLDESCNVFEGQWVWDNVSYPLYTEKSCPYLVKQTTCQRNGRPDSYYQNWRWKPSSCDLPRFNALKLLDVLRNKRLMFIGDSVQRSTFESMVCMVQSVIPEKKKSFHRIPPMKIFKAEEYNASIEYYWAPFIVESISDHATNHTVHKRLVKLDAIEKHSKSWEGVDVLVFESYVWWMHQPKINATLEGKLIRICRYGDTSEVREYNVTTAYKMALETWAKWFKTKINSEKQKVFFTSMSPTHLWSWEWNPGSDGTCYDELYPIDKRSYWGTGSNQEIMKIVGDVLSRVGENVTFLNITQLSEYRKDGHTTVYGERRGKLLTKEQRADPKNYGDCIHWCLPGVPDTWNEILYAYLLRSHRNFF

SEQ ID NO: 75186 - protein, 286 aa, Arabidopsis thaliana
  peptide (1)..(286): Ceres Seq. ID no. 6430941
MFIGDSVQRSTFESMVCMVQSVIPEKKKSFHRIPPMKIFKAEEYNASIEYYWAPFIVESISDHATNHTVHKRLVKLDAIEKHSKSWEGVDVLVFESYVWWMHQPKINATLEGKLIRICRYGDTSEVREYNVTTAYKMALETWAKWFKTKINSEKQKVFFTSMSPTHLWSWEWNPGSDGTCYDELYPIDKRSYWGTGSNQEIMKIVGDVLSRVGENVTFLNITQLSEYRKDGHTTVYGERRGKLLTKEQRADPKNYGDCIHWCLPGVPDTWNEILYAYLLRSHRNFF

SEQ ID NO: 75187 - protein, 272 aa, Arabidopsis thaliana
  peptide (1)..(272): Ceres Seq. ID no. 6430942
MVCMVQSVIPEKKKSFHRIPPMKIFKAEEYNASIEYYWAPFIVESISDHATNHTVHKRLVKLDAIEKHSKSWEGVDVLVFESYVWWMHQPKINATLEGKLIRICRYGDTSEVREYNVTTAYKMALETWAKWFKTKINSEKQKVFFTSMSPTHLWSWEWNPGSDGTCYDELYPIDKRSYWGTGSNQEIMKIVGDVLSRVGENVTFLNITQLSEYRKDGHTTVYGERRGKLLTKEQRADPKNYGDCIHWCLPGVPDTWNEILYAYLLRSHRNFF

SEQ ID NO: 75188 - DNA, 423 bp, Arabidopsis thaliana
  misc_feature (1)..(423): Ceres Seq. ID no. 6431161
  misc_feature (1)..(423): Ortholog of  Ceres SEQ ID NO 14307424 as cited in SEQ ID NO 54228
  misc_feature (1)..(423): Ortholog of  Ceres SEQ ID NO 13664279 as cited in SEQ ID NO 61603
  misc_feature (1)..(423): Ortholog of  Ceres SEQ ID NO 13584254 as cited in SEQ ID NO 63465
atggcttttgctgaatatagaagtttcagcaacgcgtctgtgccaacttccgctcaagctaccttgccatatgcttttgctgtcagcaagttcctgcaggcgggtgcttttgattttgttggcaccatcatctatgagatagatggtaagccataccaaagcatcttttataatggaactattgaagttgttgaagatggtcctctcttcagaatggagtcagtcttccttagtggtcttttaatctttgttatcgcttttctcgccatctatatccaaaatgttttgaagcatatgaccaagaaaacaaagagagcaccaaaagttgaagttggaaccgcaactaaagatgcttcgcatgatgaatggcttgagggtacttcgtacactcaatcttcgagtaagtcaaagaagaagaagtag

SEQ ID NO: 75189 - protein, 140 aa, Arabidopsis thaliana
  peptide (1)..(140): Ceres Seq. ID no. 6431162
MAFAEYRSFSNASVPTSAQATLPYAFAVSKFLQAGAFDFVGTIIYEIDGKPYQSIFYNGTIEVVEDGPLFRMESVFLSGLLIFVIAFLAIYIQNVLKHMTKKTKRAPKVEVGTATKDASHDEWLEGTSYTQSSSKSKKKK

SEQ ID NO: 75190 - DNA, 807 bp, Arabidopsis thaliana
  misc_feature (1)..(807): Ceres Seq. ID no. 6431169
  misc_feature (1)..(807): Ortholog of  Ceres SEQ ID NO 13502983 as cited in SEQ ID NO 68464
atgggagacggaagagaaggagactgggaatgtttaggatgcagaaacaggaattatgcgtttagatcattctgtaacagatgcaagcagcctcgtcttatcatggataataatacttctccaaactctaagtggcttcctcgtatcggcgattggatctgcactggttgtactaacaacaattatgcatcacgagaaaagtgcaagaaatgtgggcaatctaaggaagtagcagcattgtcagcacttgctatccctggagcttctcttcaaactcatctccattacttcacccgtggacctgagtcacatgatcaacctggttctttactcgcattctctaacgctacaaatcaagcttcggttcataaagaatggaggagtggtgactggatttgcagatgtggttttcacaattattcctctcgtatacagtgcaaaaagtgcaatgaaatagctccactagcccttggtacaaagagattagcatcagaagctttggctcatgaatgggatagcaaaagactgaatcaaggatatacaagcatgcaaacacagtcagcgatatatgcatcttttcctggtatgagcctaggaagggtctcaaattggcaacttcctctcccgtttctacaacaacactcaacacctgctttacttggaatgggagtgaaacaatggcgtgatggcgactggatgtgtacaaattgcaagaatcacaattatgcatcacgagcagagtgcaataggtgcaagactacacgagatatccttgatcaggacataactccaacagaacaatcttga

SEQ ID NO: 75191 - protein, 268 aa, Arabidopsis thaliana
  peptide (1)..(268): Ceres Seq. ID no. 6431170
MGDGREGDWECLGCRNRNYAFRSFCNRCKQPRLIMDNNTSPNSKWLPRIGDWICTGCTNNNYASREKCKKCGQSKEVAALSALAIPGASLQTHLHYFTRGPESHDQPGSLLAFSNATNQASVHKEWRSGDWICRCGFHNYSSRIQCKKCNEIAPLALGTKRLASEALAHEWDSKRLNQGYTSMQTQSAIYASFPGMSLGRVSNWQLPLPFLQQHSTPALLGMGVKQWRDGDWMCTNCKNHNYASRAECNRCKTTRDILDQDITPTEQS

SEQ ID NO: 75192 - protein, 234 aa, Arabidopsis thaliana
  peptide (1)..(234): Ceres Seq. ID no. 6431171
MDNNTSPNSKWLPRIGDWICTGCTNNNYASREKCKKCGQSKEVAALSALAIPGASLQTHLHYFTRGPESHDQPGSLLAFSNATNQASVHKEWRSGDWICRCGFHNYSSRIQCKKCNEIAPLALGTKRLASEALAHEWDSKRLNQGYTSMQTQSAIYASFPGMSLGRVSNWQLPLPFLQQHSTPALLGMGVKQWRDGDWMCTNCKNHNYASRAECNRCKTTRDILDQDITPTEQS

SEQ ID NO: 75193 - DNA, 1467 bp, Arabidopsis thaliana
  misc_feature (1)..(1467): Ceres Seq. ID no. 6431377
  misc_feature (1)..(1467): Ortholog of  Ceres SEQ ID NO 15226659 as cited in SEQ ID NO 60052
  misc_feature (1)..(1467): Ortholog of  Ceres SEQ ID NO 14301518 as cited in SEQ ID NO 69156
atggagtcgacgaatttgaagaatgctaaacacgaggctctggtgatggatccgatcagttttcaatccaaggctcaagaggtttcacgattctccgagaattctaaccctaacttcgtctcacactcgactccactcgagaaaccgagtaaatcttctgcgcagaagaatccgaaatggaagcctaatcctgttccggcggttttctcaccacggaatcggatcagagagaggaggttcgtggtggtgaagaagaattcaaggaaggagaagaatgattccgcgtctgtggattgcaaatgtggagctaagaccatttccaatatgaagaaatgtgtctgtatagcatacgaaactctacgggcgtcacaggaagagttcttcaacaatcgaagagaatccgtatcagaaattggagaatccagccagaatttggaggatggaaatgaacaagtcgaatttggagattctgatgaaactagggtttctttgatgaagaggagaagagaaaaagtattggaagaagcgagaatgagtatacctgaatttggtaaagtgatgcatctagttaaagcttttgagaagcttacttgcttcccactttcgaaggtaacttctaaggaagaagaagatcagattaagcaacctttgaaatgggaattgcctggaatgagccagcctaagtgttcagaatctgagacagatcaattcacttggagttcttcattctatccatcatctggtttgatcttaacagctacgaatctaggactagaacaacctcatgcctcagtttcttcatcatgggacaatagtgtttcaagtctcaactcaaatggtggccggaggggcagaagaaatagcttcgaatcctctgcttcaatgggaagtagaagatcaacgaagaagcagatcaaagtcacttctctgaagccatttaaactcagaactgaggaacggggacgaatgaaagaagaagagtttgcaaagaagctacacgagatgacgttggagaaagcaaaaaagagaatccccatagctcaaggtcttccctggacaactgatgaacctgagaatctggttaagcctcatgtgaaagatatcacgataccagtagacttaaagctccattccgacattcgagcagtagaacgtgcagaatttgattaccaggttactgagaaaataaacctagtcgagcaatacaaaacagaaagagaacgccaacaaaagctagcagaagaagaagagatacgaaggctgaggaaagagttggtccctaaggcacaaccaatgccatactttgatcgaccattcattcccaaaaggtcgaacaagcacccgacggtacctcgagatcccaagtttaatataccgcaacacaagaagataagatgctgcagtacatcgtcttggagtgacactggatcttacatgagcgacctcttataccaacaagacctctaa

SEQ ID NO: 75194 - protein, 488 aa, Arabidopsis thaliana
  peptide (1)..(488): Ceres Seq. ID no. 6431378
MESTNLKNAKHEALVMDPISFQSKAQEVSRFSENSNPNFVSHSTPLEKPSKSSAQKNPKWKPNPVPAVFSPRNRIRERRFVVVKKNSRKEKNDSASVDCKCGAKTISNMKKCVCIAYETLRASQEEFFNNRRESVSEIGESSQNLEDGNEQVEFGDSDETRVSLMKRRREKVLEEARMSIPEFGKVMHLVKAFEKLTCFPLSKVTSKEEEDQIKQPLKWELPGMSQPKCSESETDQFTWSSSFYPSSGLILTATNLGLEQPHASVSSSWDNSVSSLNSNGGRRGRRNSFESSASMGSRRSTKKQIKVTSLKPFKLRTEERGRMKEEEFAKKLHEMTLEKAKKRIPIAQGLPWTTDEPENLVKPHVKDITIPVDLKLHSDIRAVERAEFDYQVTEKINLVEQYKTERERQQKLAEEEEIRRLRKELVPKAQPMPYFDRPFIPKRSNKHPTVPRDPKFNIPQHKKIRCCSTSSWSDTGSYMSDLLYQQDL

SEQ ID NO: 75195 - protein, 473 aa, Arabidopsis thaliana
  peptide (1)..(473): Ceres Seq. ID no. 6431379
MDPISFQSKAQEVSRFSENSNPNFVSHSTPLEKPSKSSAQKNPKWKPNPVPAVFSPRNRIRERRFVVVKKNSRKEKNDSASVDCKCGAKTISNMKKCVCIAYETLRASQEEFFNNRRESVSEIGESSQNLEDGNEQVEFGDSDETRVSLMKRRREKVLEEARMSIPEFGKVMHLVKAFEKLTCFPLSKVTSKEEEDQIKQPLKWELPGMSQPKCSESETDQFTWSSSFYPSSGLILTATNLGLEQPHASVSSSWDNSVSSLNSNGGRRGRRNSFESSASMGSRRSTKKQIKVTSLKPFKLRTEERGRMKEEEFAKKLHEMTLEKAKKRIPIAQGLPWTTDEPENLVKPHVKDITIPVDLKLHSDIRAVERAEFDYQVTEKINLVEQYKTERERQQKLAEEEEIRRLRKELVPKAQPMPYFDRPFIPKRSNKHPTVPRDPKFNIPQHKKIRCCSTSSWSDTGSYMSDLLYQQDL

SEQ ID NO: 75196 - protein, 380 aa, Arabidopsis thaliana
  peptide (1)..(380): Ceres Seq. ID no. 6431380
MKKCVCIAYETLRASQEEFFNNRRESVSEIGESSQNLEDGNEQVEFGDSDETRVSLMKRRREKVLEEARMSIPEFGKVMHLVKAFEKLTCFPLSKVTSKEEEDQIKQPLKWELPGMSQPKCSESETDQFTWSSSFYPSSGLILTATNLGLEQPHASVSSSWDNSVSSLNSNGGRRGRRNSFESSASMGSRRSTKKQIKVTSLKPFKLRTEERGRMKEEEFAKKLHEMTLEKAKKRIPIAQGLPWTTDEPENLVKPHVKDITIPVDLKLHSDIRAVERAEFDYQVTEKINLVEQYKTERERQQKLAEEEEIRRLRKELVPKAQPMPYFDRPFIPKRSNKHPTVPRDPKFNIPQHKKIRCCSTSSWSDTGSYMSDLLYQQDL

SEQ ID NO: 75197 - DNA, 735 bp, Arabidopsis thaliana
  misc_feature (1)..(735): Ceres Seq. ID no. 6431397
  misc_feature (1)..(735): Ortholog of  Ceres SEQ ID NO 15176514 as cited in SEQ ID NO 1114
  misc_feature (1)..(735): Ortholog of  Ceres SEQ ID NO 15173688 as cited in SEQ ID NO 61918
  misc_feature (1)..(735): Ortholog of  Ceres SEQ ID NO 12778345 as cited in SEQ ID NO 62792
  misc_feature (1)..(735): Ortholog of  Ceres SEQ ID NO 13662513 as cited in SEQ ID NO 63303
  misc_feature (1)..(735): Ortholog of  Ceres SEQ ID NO 12616929 as cited in SEQ ID NO 63962
  misc_feature (1)..(735): Ortholog of  Ceres SEQ ID NO 15225803 as cited in SEQ ID NO 67623
  misc_feature (1)..(735): Ortholog of  Ceres SEQ ID NO 15174088 as cited in SEQ ID NO 0
atggctcttatcagcacacggcgaacattatcgacactcctaaacaaaaccctctcttcctctacttcatattcttcttcatttcctacgctctcttctcgttctcgattcgccatgcctctaattgaaaaggtttcctcttcccgaaccagcctgggcccgtgttacatctcgacccgacccaagacatccgggtccggatactcgccgctgaatgatccttcgccgaattggagcaaccgtccgccgaaggagacgattcttcttgatgggtgcgattatgagcactggctcatcgtcatggagttcactgatcctaaacctactgaagaagagatgatcaattcttatgtcaaaaccttaacttccgtccttggctggcaagaagaggccaagaagaagatttactctgtttgtacttcgacctacactggctttggtgctttgatctctgaagagctctcttgcaaagtcaaagcattgcctggtgttctctgggtgctgccggattcctatctcgatgtaccaaacaaagactacggaggtgacttgtacgttgaaggaaaggtcatacccagaccacagtacaggttcacggaacagcgtcatactagaccccgtcctaggccaaggtatgataggcgccgtgagacaatgcaggttgagaggagagagccatccatgggtcttcattctccagtaaatccgggagagttcaacaagcccagtgcttaa

SEQ ID NO: 75198 - protein, 244 aa, Arabidopsis thaliana
  peptide (1)..(244): Ceres Seq. ID no. 6431398
MALISTRRTLSTLLNKTLSSSTSYSSSFPTLSSRSRFAMPLIEKVSSSRTSLGPCYISTRPKTSGSGYSPLNDPSPNWSNRPPKETILLDGCDYEHWLIVMEFTDPKPTEEEMINSYVKTLTSVLGWQEEAKKKIYSVCTSTYTGFGALISEELSCKVKALPGVLWVLPDSYLDVPNKDYGGDLYVEGKVIPRPQYRFTEQRHTRPRPRPRYDRRRETMQVERREPSMGLHSPVNPGEFNKPSA

SEQ ID NO: 75199 - protein, 206 aa, Arabidopsis thaliana
  peptide (1)..(206): Ceres Seq. ID no. 6431399
MPLIEKVSSSRTSLGPCYISTRPKTSGSGYSPLNDPSPNWSNRPPKETILLDGCDYEHWLIVMEFTDPKPTEEEMINSYVKTLTSVLGWQEEAKKKIYSVCTSTYTGFGALISEELSCKVKALPGVLWVLPDSYLDVPNKDYGGDLYVEGKVIPRPQYRFTEQRHTRPRPRPRYDRRRETMQVERREPSMGLHSPVNPGEFNKPSA

SEQ ID NO: 75200 - protein, 144 aa, Arabidopsis thaliana
  peptide (1)..(144): Ceres Seq. ID no. 6431400
MEFTDPKPTEEEMINSYVKTLTSVLGWQEEAKKKIYSVCTSTYTGFGALISEELSCKVKALPGVLWVLPDSYLDVPNKDYGGDLYVEGKVIPRPQYRFTEQRHTRPRPRPRYDRRRETMQVERREPSMGLHSPVNPGEFNKPSA

SEQ ID NO: 75201 - DNA, 1545 bp, Arabidopsis thaliana
  misc_feature (1)..(1545): Ceres Seq. ID no. 6431419
  misc_feature (1)..(1545): Ortholog of  Ceres SEQ ID NO 14311183 as cited in SEQ ID NO 58495
  misc_feature (1)..(1545): Ortholog of  Ceres SEQ ID NO 13502874 as cited in SEQ ID NO 66298
  misc_feature (1)..(1545): Ortholog of  Ceres SEQ ID NO 12614124 as cited in SEQ ID NO 68392
atgtcattcttatcattttctcctatttctctggacttattatctagtaatgtcttcttaaccattctagcgattatcatatccggtttacttaaaaccattacgtaccggaaacacaattcgaaccatttaaatctcccgcccggcccaccaggatggccggtgatcggaaacttatttcagttcacgcgctccgggaaacagtttttcgagtacgtcgaggatctcgtaaagatctacggtccgattcttactctcaggcttggtactcgaacaatgatcatcatctccgacgccagtctcgcccacgaagcgttaatcgaacgtggagcacaattcgcgacccgacccgttgaaactccgacccggaaaatcttcagctccagtgaaatcacagttcattccgctatgtatggacctgtgtggaggtcattgagacggaacatggttcagaacatgcttagctcgaatcggctcaaggagtttggttctgttagaaaatccgccatggataaactcatcgagagaatcaaatctgaagctagagacaacgatggactcgtctgggttctgcaaaacagcagatacgctgcgttttgtgttttattagatatctgttttggagttgagatggaagaggaatcaattgagaagatggatcagttgatgacggcgatattaaacgccgttgatccaaaactccacgattaccttccgatcttaacgccgtttaactacaatgagagaaatcgtgctcttaagcttcgtcgggaacttgtagatttcgtcgtcggattcatcgagaaacgacggaaggcgattcggaccgcaacggtatcgtctttctcgtatcttgatacactctttgatcttagaatcatcgaaggaagtgaaacgacgccgtctgatgaagatcttgtaacgctctgttcggagtttctcaatgccggtacggacacgactggggcggcgatcgagtggggaatcgcagagttgatagcgaatcccgagattcaatctcgactgtacgatgagattaaatcaacggttggagatcgtgcggtcgatgaaagagacgtggacaaaatggtcttgttacaagctgtagtcaaagagattctccggcgacatccaccgacttactttacattaagtcacggtgtaacggaaccaacgactctctctggctataacatccctgtcggggtcaacattgagttttatcttcccggaattagtgaagacccgaagatctggtcagagccaaaaaagttcgaccctgaccggttcttatcagggcgggaagacgccgatataacaggagttgctggagtgaagatgatgccttttggtgttggccgtaggatctgtccggggatgggaatggcgacggtacatgtgcatttgatgatagcgaggatggttcaagagttcgagtggttagcctatccaccgcagagcgagatggattttgccgggaagttggtgtttgcggttgtgatgaagaagccgttgagggccatggtgagacctagggtacaatga

SEQ ID NO: 75202 - protein, 514 aa, Arabidopsis thaliana
  peptide (1)..(514): Ceres Seq. ID no. 6431420
MSFLSFSPISLDLLSSNVFLTILAIIISGLLKTITYRKHNSNHLNLPPGPPGWPVIGNLFQFTRSGKQFFEYVEDLVKIYGPILTLRLGTRTMIIISDASLAHEALIERGAQFATRPVETPTRKIFSSSEITVHSAMYGPVWRSLRRNMVQNMLSSNRLKEFGSVRKSAMDKLIERIKSEARDNDGLVWVLQNSRYAAFCVLLDICFGVEMEEESIEKMDQLMTAILNAVDPKLHDYLPILTPFNYNERNRALKLRRELVDFVVGFIEKRRKAIRTATVSSFSYLDTLFDLRIIEGSETTPSDEDLVTLCSEFLNAGTDTTGAAIEWGIAELIANPEIQSRLYDEIKSTVGDRAVDERDVDKMVLLQAVVKEILRRHPPTYFTLSHGVTEPTTLSGYNIPVGVNIEFYLPGISEDPKIWSEPKKFDPDRFLSGREDADITGVAGVKMMPFGVGRRICPGMGMATVHVHLMIARMVQEFEWLAYPPQSEMDFAGKLVFAVVMKKPLRAMVRPRVQ

SEQ ID NO: 75203 - protein, 422 aa, Arabidopsis thaliana
  peptide (1)..(422): Ceres Seq. ID no. 6431421
MIIISDASLAHEALIERGAQFATRPVETPTRKIFSSSEITVHSAMYGPVWRSLRRNMVQNMLSSNRLKEFGSVRKSAMDKLIERIKSEARDNDGLVWVLQNSRYAAFCVLLDICFGVEMEEESIEKMDQLMTAILNAVDPKLHDYLPILTPFNYNERNRALKLRRELVDFVVGFIEKRRKAIRTATVSSFSYLDTLFDLRIIEGSETTPSDEDLVTLCSEFLNAGTDTTGAAIEWGIAELIANPEIQSRLYDEIKSTVGDRAVDERDVDKMVLLQAVVKEILRRHPPTYFTLSHGVTEPTTLSGYNIPVGVNIEFYLPGISEDPKIWSEPKKFDPDRFLSGREDADITGVAGVKMMPFGVGRRICPGMGMATVHVHLMIARMVQEFEWLAYPPQSEMDFAGKLVFAVVMKKPLRAMVRPRVQ

SEQ ID NO: 75204 - protein, 378 aa, Arabidopsis thaliana
  peptide (1)..(378): Ceres Seq. ID no. 6431422
MYGPVWRSLRRNMVQNMLSSNRLKEFGSVRKSAMDKLIERIKSEARDNDGLVWVLQNSRYAAFCVLLDICFGVEMEEESIEKMDQLMTAILNAVDPKLHDYLPILTPFNYNERNRALKLRRELVDFVVGFIEKRRKAIRTATVSSFSYLDTLFDLRIIEGSETTPSDEDLVTLCSEFLNAGTDTTGAAIEWGIAELIANPEIQSRLYDEIKSTVGDRAVDERDVDKMVLLQAVVKEILRRHPPTYFTLSHGVTEPTTLSGYNIPVGVNIEFYLPGISEDPKIWSEPKKFDPDRFLSGREDADITGVAGVKMMPFGVGRRICPGMGMATVHVHLMIARMVQEFEWLAYPPQSEMDFAGKLVFAVVMKKPLRAMVRPRVQ

SEQ ID NO: 75205 - DNA, 2592 bp, Arabidopsis thaliana
  misc_feature (1)..(2592): Ceres Seq. ID no. 6431451
  misc_feature (1)..(2592): Ortholog of  Ceres SEQ ID NO 13659131 as cited in SEQ ID NO 66756
atggggaagagaaaagagcgtcgttacgccgccatgaatagcaccggccgtcgtgtcaagcttgatctctttgcggaaccctctggtcagaaaacagaaaatcctttgcttttacttgggcagtatagtgatgatgaggtggaagaagattcggataagaaggcagatgatacctctgcagatagtttcttagccaataaaaatgagcaggttgatggattaattcaaggaggacacaaagatacgaatatcaaatcaggtgcagtcaccaccactatgcagatggctgatcaacagcagacaggggagaattcttctgctcttgattctagagctgaagtagaaactggttataccacagtgagtaactcaacaacattggatggactaaacaagcagacagttccctcagttcaagcatctggcagtgtgtctttggagcaccaggctcccacagatgttacgtcgcagtggaagatgattctgcatgaggagagcaatcagtattattactggaatacagaaactggagaaacttcgtgggaattgcctacagttttgactcaaactacctttgcatatgggactgggtacaatgagtctgggcccatggttacagatgcttccaccttgatttcaagtgttgaaccaagctatttcgtacccgtgcaaaatagtttcacaggaactgactattctacttttccaactgttgagctggatgggagaaacaaaagtgaagatctatatgtcaaaagtttaggaactgatggtcatcaagttgaatgtcggatagactctgttgttagttgtcaggaggacctttcaaggccaggaaattcagatcatgtgcatacttattttgatgcaggagctgctactgacctcccatctcgcttgttgagtcaaatcgaaagcttactggagaagctgaggtctctgaagaggtcgcatgggaactttcacagcaatgagcagataacaaagtacattctggaggttgaagtcagacattctgatgtaaaggcgctcatattggacacctcacctttactttctttttggcttcacactgagaaacaacttaagcggctggaagatagtgttaacgatgagatttaccagcttgcaaaatctgcagtaatggatgaaccagaaactaacaaaagccctcccaaagaaaagttggtggcagatgctaatacagagagtgagtccgaggacagtgagagagatggagagttagctcaatctggaaaatctcttcattcagatgaatcagctgatgggagcggcgatggatctcctaaacactccccaaatcatccagctgggcagtctgatattattccttcaactgagatgcttcagaaggccggctccccagatgtggaagatgttgacatggatgtggatatggaagttgaagaatcagttccagtgtcttctgttcaagtgatagacgcttctgatggtaagatgttcagtcaaacagagccatccaaccttcatacagatgttccaccacctccgggtgaggaatggattccaccaccgccgtctgagagtgaagatgttcctccaccgccaccagacagttatagcgaaccaattcctccaccacctgacaatggccatgtcgcttcatctttgtccagtgactctctcggagttccctataccgtacctcaatcatatatgcatcaatctgctgattatgcgacacaatacaacttatcctatccagagtccaattatcaatataccaatgctgttactctagctcctaatactcagttctatggccatgtggatggatctcaagtttctcttccccaatccacattttattatgaaactgttcctggtacaactgaagttgttcctgcagcagccagtgctggtgaagcttattacgatttcaatggtgcagctccactgtttcctgtcattagctcgggtgagtcatctctacatcacagtggagttggttctgctaatcaccacatcccaaacaactcttctacagctgcagtgcctagttcgagatccaatgactctactgaggttggatcttcagcaactgcttctaaatccacagatgttacaagtggatcgtctctattagcaaaaggtcaaactaaagtgaaacggacaaaaaagaaaacagtagctgctacatctacattgaggtcaaataaaaaggtttccagtttggttgacaagtggaaagctgcgaaagaggagctaaacgatagcgaagaagaagaagatgattccgaaatcctagatagaaaaagaaaacgagaaatcgaagaatggaaatctcgacaaatcgcaagtggagaggctaaagacaacgcaaatttccaacccctgggtggtgactggcgtgagaaagtgaaacggaagagagaacgagctgagaagtctcagaagaaagaccccgaaaagcagcaaaaacctgatctaacaaaactctcagcaaatctcccgtcggaatggcaggcatattgggacgaatctaccaaaaaagtttactatgggaatacgagtacatctcaaaccagttggacacgacccactacctga

SEQ ID NO: 75206 - protein, 863 aa, Arabidopsis thaliana
  peptide (1)..(863): Ceres Seq. ID no. 6431452
MGKRKERRYAAMNSTGRRVKLDLFAEPSGQKTENPLLLLGQYSDDEVEEDSDKKADDTSADSFLANKNEQVDGLIQGGHKDTNIKSGAVTTTMQMADQQQTGENSSALDSRAEVETGYTTVSNSTTLDGLNKQTVPSVQASGSVSLEHQAPTDVTSQWKMILHEESNQYYYWNTETGETSWELPTVLTQTTFAYGTGYNESGPMVTDASTLISSVEPSYFVPVQNSFTGTDYSTFPTVELDGRNKSEDLYVKSLGTDGHQVECRIDSVVSCQEDLSRPGNSDHVHTYFDAGAATDLPSRLLSQIESLLEKLRSLKRSHGNFHSNEQITKYILEVEVRHSDVKALILDTSPLLSFWLHTEKQLKRLEDSVNDEIYQLAKSAVMDEPETNKSPPKEKLVADANTESESEDSERDGELAQSGKSLHSDESADGSGDGSPKHSPNHPAGQSDIIPSTEMLQKAGSPDVEDVDMDVDMEVEESVPVSSVQVIDASDGKMFSQTEPSNLHTDVPPPPGEEWIPPPPSESEDVPPPPPDSYSEPIPPPPDNGHVASSLSSDSLGVPYTVPQSYMHQSADYATQYNLSYPESNYQYTNAVTLAPNTQFYGHVDGSQVSLPQSTFYYETVPGTTEVVPAAASAGEAYYDFNGAAPLFPVISSGESSLHHSGVGSANHHIPNNSSTAAVPSSRSNDSTEVGSSATASKSTDVTSGSSLLAKGQTKVKRTKKKTVAATSTLRSNKKVSSLVDKWKAAKEELNDSEEEEDDSEILDRKRKREIEEWKSRQIASGEAKDNANFQPLGGDWREKVKRKRERAEKSQKKDPEKQQKPDLTKLSANLPSEWQAYWDESTKKVYYGNTSTSQTSWTRPTT

SEQ ID NO: 75207 - protein, 852 aa, Arabidopsis thaliana
  peptide (1)..(852): Ceres Seq. ID no. 6431453
MNSTGRRVKLDLFAEPSGQKTENPLLLLGQYSDDEVEEDSDKKADDTSADSFLANKNEQVDGLIQGGHKDTNIKSGAVTTTMQMADQQQTGENSSALDSRAEVETGYTTVSNSTTLDGLNKQTVPSVQASGSVSLEHQAPTDVTSQWKMILHEESNQYYYWNTETGETSWELPTVLTQTTFAYGTGYNESGPMVTDASTLISSVEPSYFVPVQNSFTGTDYSTFPTVELDGRNKSEDLYVKSLGTDGHQVECRIDSVVSCQEDLSRPGNSDHVHTYFDAGAATDLPSRLLSQIESLLEKLRSLKRSHGNFHSNEQITKYILEVEVRHSDVKALILDTSPLLSFWLHTEKQLKRLEDSVNDEIYQLAKSAVMDEPETNKSPPKEKLVADANTESESEDSERDGELAQSGKSLHSDESADGSGDGSPKHSPNHPAGQSDIIPSTEMLQKAGSPDVEDVDMDVDMEVEESVPVSSVQVIDASDGKMFSQTEPSNLHTDVPPPPGEEWIPPPPSESEDVPPPPPDSYSEPIPPPPDNGHVASSLSSDSLGVPYTVPQSYMHQSADYATQYNLSYPESNYQYTNAVTLAPNTQFYGHVDGSQVSLPQSTFYYETVPGTTEVVPAAASAGEAYYDFNGAAPLFPVISSGESSLHHSGVGSANHHIPNNSSTAAVPSSRSNDSTEVGSSATASKSTDVTSGSSLLAKGQTKVKRTKKKTVAATSTLRSNKKVSSLVDKWKAAKEELNDSEEEEDDSEILDRKRKREIEEWKSRQIASGEAKDNANFQPLGGDWREKVKRKRERAEKSQKKDPEKQQKPDLTKLSANLPSEWQAYWDESTKKVYYGNTSTSQTSWTRPTT

SEQ ID NO: 75208 - protein, 771 aa, Arabidopsis thaliana
  peptide (1)..(771): Ceres Seq. ID no. 6431454
MQMADQQQTGENSSALDSRAEVETGYTTVSNSTTLDGLNKQTVPSVQASGSVSLEHQAPTDVTSQWKMILHEESNQYYYWNTETGETSWELPTVLTQTTFAYGTGYNESGPMVTDASTLISSVEPSYFVPVQNSFTGTDYSTFPTVELDGRNKSEDLYVKSLGTDGHQVECRIDSVVSCQEDLSRPGNSDHVHTYFDAGAATDLPSRLLSQIESLLEKLRSLKRSHGNFHSNEQITKYILEVEVRHSDVKALILDTSPLLSFWLHTEKQLKRLEDSVNDEIYQLAKSAVMDEPETNKSPPKEKLVADANTESESEDSERDGELAQSGKSLHSDESADGSGDGSPKHSPNHPAGQSDIIPSTEMLQKAGSPDVEDVDMDVDMEVEESVPVSSVQVIDASDGKMFSQTEPSNLHTDVPPPPGEEWIPPPPSESEDVPPPPPDSYSEPIPPPPDNGHVASSLSSDSLGVPYTVPQSYMHQSADYATQYNLSYPESNYQYTNAVTLAPNTQFYGHVDGSQVSLPQSTFYYETVPGTTEVVPAAASAGEAYYDFNGAAPLFPVISSGESSLHHSGVGSANHHIPNNSSTAAVPSSRSNDSTEVGSSATASKSTDVTSGSSLLAKGQTKVKRTKKKTVAATSTLRSNKKVSSLVDKWKAAKEELNDSEEEEDDSEILDRKRKREIEEWKSRQIASGEAKDNANFQPLGGDWREKVKRKRERAEKSQKKDPEKQQKPDLTKLSANLPSEWQAYWDESTKKVYYGNTSTSQTSWTRPTT

SEQ ID NO: 75209 - DNA, 2595 bp, Arabidopsis thaliana
  misc_feature (1)..(2595): Ceres Seq. ID no. 6431509
  misc_feature (1)..(2595): Ortholog of  Ceres SEQ ID NO 15176051 as cited in SEQ ID NO 53434
  misc_feature (1)..(2595): Ortholog of  Ceres SEQ ID NO 15170306 as cited in SEQ ID NO 58219
  misc_feature (1)..(2595): Ortholog of  Ceres SEQ ID NO 12465091 as cited in SEQ ID NO 65947
atggaggaagatgtcaagaagacgacgacgatgaagatagaaggagaagttgttgtgatgaagaagaatctccttgatttcaaagacgttatggcttctcttcttgatcgtgtcaatgagcttcttggtcgtcgtgtctctctccacctcatcagctctcaccaacccgacccggccaatgagaagagaggaagacttggaaaagcagcacatctggaaaaatgggtaacaaaaataaaaacgtcagtaaccgctgaggaaactgcgtttggagtaacgtttgattgggacgagtcaatgggaccaccggctgcatttgtgatcaagaaccaccaccatagtcaattctaccttaagtccctcaccctccgcggcttccctgatggcgaaggtggtgccactgcgatacatttcatctgcaattcttggatttacccgaatcatcgataccgctccgaccgcgttttcttctctaacaaggcatatcttccaagtgaaacaccggagctaatcaaagagctaagagaagaagagctaaagaatctaagaggcaatgagaaaggaggagaattcaaagaatgggacagagtttacgactacgcttattacaacgacttgggtgctcctgacaagggtcctgactcagttcgtccggttcttggcggttcacctgagctgccttatcctcgccgtggcaaaaccggccgtaaatccaccaaatcagaccctaagtctgaaagcaggctggctttactaaacctaaacatatacgtgccaagggacgagcgatttagccatgtgaagttttcagacttcctcgcttatgcactcaagtccgtgactcaagtgcttgtccctgagatcgcctctgtttgcgacaagaccatcaacgagtttgactccttcgaagatgtttttcacctctatgacggtagtattaagctcgccaatggtcacaccatttctaagctccgtgatgttatcccgtgggagatgtttagagagctagttcgcaacgacggagaacggttcttgaagtatcccttgcctgacatcctcaaagagagcagatcggcttggaggactgacgaagagtttgctcgagaaatgctggccggtcttaatccggtggtgattagccgtcttcaggaatttccaccaaagagctgtctggactctgcaaagtatggaaaccaacactcttccatacgaacagagcacatagaatcaaacatgaacggcctcaatgtccaagaagctttggaacagaataagctatacatattggatcatcacgacgcattgatgccttacctgacacggataaactcaacaaacactaaaacctatgcgacccgaaccctgctgttgcttcaagcagacggaacactgaagcctctcgccatagagctgagtcttccacacgcacaaggcgaatcatatggatcggtcagcaaagttttcacaccagcagagaaaggtgtcgagggatcggtttggcaacttgctaaggcttatgctgcggtcaatgactctggttatcatcagcttataagccattggttgcaaacgcatgcggtgattgaaccgttcataatcgcgtccaataggcagctcagcgtggtccatccgatccataaacttctacatcctcatttccgtgacactatgaacatcaacgcattagcgcgtcatgtactcataaactcagacggagttcttgagagaacagtcttccctagtcgatacgccatggaaatgtcttcttcaatttacaagaattgggttttcaccgagcaggctctcccaaaagacctcctcaaacgaggagttgctgttgaagatccaaacagtgacaacggcgttaagcttctgatcgaagattacccgtttgcggtcgacggtttagagatttggtcagcgatcaaaacatgggtcacagagtactgcacattctactacaataatgacaaaaccgtccaaacggatacagagatccaatcatggtggaccgagctccgaaccaaaggccacggcgacaaacgacacgagtcatggtggccttcgatgcaaacccgcgacgacctaatcgaaacctgcacgatcatcatctggatcgcctctgctcttcacgcagcagtaaatttcggacagtacccttacgccggttttctccctaaccgtcctaccgtcagccgccggtttatgcctgaaccaggtacggatgagtatgctgagctggaggaagatgctgacgtagcgttcttgaagacgatcacgccgcagttacagactctacttggtatctccatcatagagatattgtctatgcattcaacggacgagatctacttagggcaaagagattcaccgaattggacggcggatgatgagcctttggaggcgtttaagcggtttgggaaagaacttgagctgatagagaacaatattatacgaagaaacaatgacaagaggttcaagaacagaaccggaccggttaacataccgtacacattgttgtacccgaatactacggattatacgagagaaggtgggattactgggaaagggatcccgaacagtgtctcaatctaa

SEQ ID NO: 75210 - protein, 864 aa, Arabidopsis thaliana; identical to SEQ ID NO: 45070
  peptide (1)..(864): Ceres Seq. ID no. 6431510

SEQ ID NO: 75211 - protein, 854 aa, Arabidopsis thaliana; identical to SEQ ID NO: 45071
  peptide (1)..(854): Ceres Seq. ID no. 6431511

SEQ ID NO: 75212 - protein, 845 aa, Arabidopsis thaliana
  peptide (1)..(845): Ceres Seq. ID no. 6431512
MKKNLLDFKDVMASLLDRVNELLGRRVSLHLISSHQPDPANEKRGRLGKAAHLEKWVTKIKTSVTAEETAFGVTFDWDESMGPPAAFVIKNHHHSQFYLKSLTLRGFPDGEGGATAIHFICNSWIYPNHRYRSDRVFFSNKAYLPSETPELIKELREEELKNLRGNEKGGEFKEWDRVYDYAYYNDLGAPDKGPDSVRPVLGGSPELPYPRRGKTGRKSTKSDPKSESRLALLNLNIYVPRDERFSHVKFSDFLAYALKSVTQVLVPEIASVCDKTINEFDSFEDVFHLYDGSIKLANGHTISKLRDVIPWEMFRELVRNDGERFLKYPLPDILKESRSAWRTDEEFAREMLAGLNPVVISRLQEFPPKSCLDSAKYGNQHSSIRTEHIESNMNGLNVQEALEQNKLYILDHHDALMPYLTRINSTNTKTYATRTLLLLQADGTLKPLAIELSLPHAQGESYGSVSKVFTPAEKGVEGSVWQLAKAYAAVNDSGYHQLISHWLQTHAVIEPFIIASNRQLSVVHPIHKLLHPHFRDTMNINALARHVLINSDGVLERTVFPSRYAMEMSSSIYKNWVFTEQALPKDLLKRGVAVEDPNSDNGVKLLIEDYPFAVDGLEIWSAIKTWVTEYCTFYYNNDKTVQTDTEIQSWWTELRTKGHGDKRHESWWPSMQTRDDLIETCTIIIWIASALHAAVNFGQYPYAGFLPNRPTVSRRFMPEPGTDEYAELEEDADVAFLKTITPQLQTLLGISIIEILSMHSTDEIYLGQRDSPNWTADDEPLEAFKRFGKELELIENNIIRRNNDKRFKNRTGPVNIPYTLLYPNTTDYTREGGITGKGIPNSVSI

SEQ ID NO: 75213 - DNA, 1509 bp, Arabidopsis thaliana
  misc_feature (1)..(1509): Ceres Seq. ID no. 6431670
  misc_feature (1)..(1509): Ortholog of  Ceres SEQ ID NO 14301587 as cited in SEQ ID NO 66080
atggggaagaagaagtttattgataagaaaaaggcggcgactttcgagttgtgtcctcgtgatacgtcagacccaagatacagtgatgcaccaggtggtgataagatcttcttacgagttgatcaaaaccctgttaacatcaatggtttcattgaagaagatgaagaagaagaaggagacagctcacggtttgatgatgctcctgaagagatggattatggttactctagttttggggattcgagtagttctttacctgctcatgtgaggaaggagattttagagttagggtatcctgatgatggttataattacttggagcatttgagagagattaagaatactggtggtggttctaatttctatgtgaatcctaagtatgaggttgctcagttacctcgtgatgttaaggcttatgatgcgtctcgtgtgaagatctctggtatggtgaatgaagaaggtaatgataataagttgatgtatagtgttgcgtccaagactgttaacgtcaaggtgcagaaagctattgatcctgaagttgctgcgttgcttgaaaacagtgatgggtctgagtttggttctgatgttgaggatttggaagaagattttgttgttcaagctaatcttactcaaaagggtgaatcttctggtgtgagcaatggagagctcgagttttctgtaagacgtgaggttagagaaagagaaagtgatgaacctgtggctgaaaacccgagagttcctcgtcaaattgatgagctatttgatcagctcgaactcaatgaatatggaagtgatagtgacggtgatggttacatagctgaagatggagaagaagaagaagaagaagacttcatggctcaagaagttcagaatcttattcatgggaaggcaaaagattatgagcttgaagaaaaatatatgaaccctgcggatatactgaagaacagtgactctgtcagagataaagaggaagtggacactgctgctcatgttatccgccgaactgtagaatatggtgaaaattttgataacgggaatgaagatgaatttgtagagctgactgaagaaagcagcgatgaaagcgagaagcatgattgtgaaaccatagtctcaacatactcgaatctcgataacctccctggtaaaatccttgctgcagagtcagctaggcagaagaagctgagtgaaacattagctaacgcattgagttcaaatggaagaatcattaatctccaagggagagagaggattcctgtcgagtttttacctggtaggagagctgaacaaaccgatgtcaaagcggaaatcccaaaagctgaaccgatcaagaggaagactcatggtcaagagtcgaaagaagagaagaaagagcggaaaaatgctgtaaaagccgaaaagcgagaagcaaggataattaagaaacagacaaagatgctgtattgcggtgaaacgcagcgtgctcaaagagctgttgctacctctggtccatcgtcgagacctctaaaataa

SEQ ID NO: 75214 - protein, 502 aa, Arabidopsis thaliana; identical to SEQ ID NO: 41992
  peptide (1)..(502): Ceres Seq. ID no. 6431671

SEQ ID NO: 75215 - protein, 432 aa, Arabidopsis thaliana; identical to SEQ ID NO: 41993
  peptide (1)..(432): Ceres Seq. ID no. 6431672

SEQ ID NO: 75216 - protein, 354 aa, Arabidopsis thaliana; identical to SEQ ID NO: 41994
  peptide (1)..(354): Ceres Seq. ID no. 6431673

SEQ ID NO: 75217 - DNA, 1053 bp, Arabidopsis thaliana
  misc_feature (1)..(1053): Ceres Seq. ID no. 6431698
  misc_feature (1)..(1053): Ortholog of  Ceres SEQ ID NO 13585342 as cited in SEQ ID NO 63601
atgaagaaatggttaataacaggagcagtggtaatagtgttgattggattaggggcatgggctattgtttccattacacctccacctcctaagagatgcggaaccccaggtggaccgcctattaccgcccctaggatacgtctcagcgatggccgttatttagcctatgaagaacatggagttagtagacaaaatgccactttcaagatcgtctttatccatgcattctcgacatttaggcgtgacgctgttatcgccaaccgtgttcgccctggctttctcgagaaaaatggcatctacgtggtttcatatgatcgacctggttatggagagagcgatcctcactcgagtcgcaatgaaaagactttagctcatgacgttgaacaacttgctgaccaactacaacttggttccaaattttacgtggttggatactcaatgggaggtcaagccgtttggggtgttctcaaatacattcctcacaggctcgcaggagcgacactgctttgtcctgtgaccaactcatggtggccgagtttcccagatagtttgacatgggagctatggaacaaacaatcaaaatccgaaaggttttcgatgctcattactcatcacactccatggctactctactggtggaacaatcaaaagctattttcaacaacagctgtgatgcaatcaagccccaatatgttctctcctcaagatcttgcactactgcccaaactcgccgcaagggtgtcttacaagaaccaaacaacacaacaagggacacacgaatcacttgaccgagacctgattgttggatttgggaaatggagttttgaccctatgaagatcgagaatccgttccctaagggtgaaggttcggtacatatgtggcaaggggatgatgatcggctcgtcccgatacaactacaaaggatcattgctcagaaactaacttggatcaagtatcatgagattccaggtgctggtcatatttttccgatggctgatgggatggcagaaactatcttaaaagaactcttgcctattcctcaatcatcttaa

SEQ ID NO: 75218 - protein, 350 aa, Arabidopsis thaliana
  peptide (1)..(350): Ceres Seq. ID no. 6431699
MKKWLITGAVVIVLIGLGAWAIVSITPPPPKRCGTPGGPPITAPRIRLSDGRYLAYEEHGVSRQNATFKIVFIHAFSTFRRDAVIANRVRPGFLEKNGIYVVSYDRPGYGESDPHSSRNEKTLAHDVEQLADQLQLGSKFYVVGYSMGGQAVWGVLKYIPHRLAGATLLCPVTNSWWPSFPDSLTWELWNKQSKSERFSMLITHHTPWLLYWWNNQKLFSTTAVMQSSPNMFSPQDLALLPKLAARVSYKNQTTQQGTHESLDRDLIVGFGKWSFDPMKIENPFPKGEGSVHMWQGDDDRLVPIQLQRIIAQKLTWIKYHEIPGAGHIFPMADGMAETILKELLPIPQSS

SEQ ID NO: 75219 - protein, 204 aa, Arabidopsis thaliana
  peptide (1)..(204): Ceres Seq. ID no. 6431700
MGGQAVWGVLKYIPHRLAGATLLCPVTNSWWPSFPDSLTWELWNKQSKSERFSMLITHHTPWLLYWWNNQKLFSTTAVMQSSPNMFSPQDLALLPKLAARVSYKNQTTQQGTHESLDRDLIVGFGKWSFDPMKIENPFPKGEGSVHMWQGDDDRLVPIQLQRIIAQKLTWIKYHEIPGAGHIFPMADGMAETILKELLPIPQSS

SEQ ID NO: 75220 - DNA, 2796 bp, Arabidopsis thaliana
  misc_feature (1)..(2796): Ceres Seq. ID no. 6431750
  misc_feature (1)..(2796): Ortholog of  Ceres SEQ ID NO 13655640 as cited in SEQ ID NO 63844
atgatgctcaatactttatttttaccaatcttcttgtttttcctcataacctttgattatgtttctacacaaacctgcttcaatggatactttaaaccaaatggtacttacgacttaaaccgtcgtcggatcctctcttctcttgcttccaaagtcacagctcacaacggcttctacagctccaccatcggccaaaatcctaaccaaatgttcatcattagcatgtgcatccctggaactaaaccagagagatgttcagattgcatcaaaggctcaacagacggcttgttacgaagctgtcctaaccaaacagttggttatgtatggccagattgttgtatggtacgttattccaacatttccttctctggatcactcattatggaaccgtctcaaccagtgtctgatcccgcacctatcggtgttgatttgacattgtttgatagaatatgggacgagttaatgtctcgtacgataactacagcttcgaggactcatggatcattatcatttgggcataagtactatgcagctgatgttgcttcattgacaactttccaaactatatacaccatggtacaatgtacaccggatgtttcttcaggggattgtgagttttgtttgaagagaactgttcttgattacaagaaatgttgtcgcggtcacattggcggtgcttttgtaagaccattttgttttatccggtgggatttgtatccttttgctggagcttttgaaaatattacgttgccatcgcctccaccaccgctttctttgactcctccccatgaagctaaagatttcgtttttaccaacttcttgatttttctcataagcttagattctgttactgctcaagaaatctgtttcagtggattctttaaacccaatagtacatacgatttaaaccgtcgtcaaatcctctctactctttcttctaatgtcacaagtcacaacggctttttcaactccaagtttggtcaagctcccaatagagtcttcatcaatggcatgtgcatccctgggactaaaccagagacttgttcagattgtattaaaggtgcatcagacaagatatcagagagttgtcctaacaaaacagatgcttatacatggcctgattgttgtatggtacgttattccaacgtttctttctctggttcactcgttatggaaccttctgaaactctctatcatacgggagatatcgaagatacaggcactaatttaacagtgtttgatagaatttgggaagagttaatgctccgtacaataactgcagcttcattgagtagtagtaatggatcatcatttggacaaaagtactttgcagctgaggttgcttcattgactactttccaaaccatgtatgcgatgatgcaatgtacgccggatgtttcttcgaaagattgtgagttttgtttgaagacaagtgttggtgattatgagtcatgttgccgtggtaaacaaggtggtgcggtgataagaccaagttgctttgtccggtgggatttgtatccttatgctggagcttttgaaaatgttacatttccaccgcctccaccgcagtctttacctcagccaccggtttctttgattcctcctccagttagcgatagggcaaatacaaccatcaaagggattattgtggctattgttgttcctatcattgttatcttggtttcacttgttgtactactcgtggtttgcagaagaaagaagtcatataaaacaactgaggttcaagctactgatgagatcacaacaacacactcactgcagtttagttttaagacaattgaagctgcaactgacaagttttcggacagtaacatgatcgggcgaggtggatttggtgaagtttacaggggaaagctttcaagtggacctgaagtagcagtgaagagactgtcgaaaacatcaggacaaggcgcggaagagttcaagaatgaggctgttcttgtgtcgaagcttcaacataagaatctggtcaggcttcttggattttgtttggaaggagaagaaaagatactcgtctatgagtttgtacccaacaaaagccttgactattttctctttgaccctgcaaaacaaggtgaactagattggacaagacggtacaatatcattggggggattgctcgaggaattctatatcttcatcaagattcacggcttacaatcatacaccgtgatctcaaagcgagtaacattctcttagatgctgatatgaaccccaaaattgcagattttggcatggcgaggatttttggagttgatcaaagtcaagccaacacaagaagaatcgccggaacatttggttatatgtctccagaatatgcaatgcgtggccatttctccatgaagtctgatgtctatagctttggagtattggtactagagattataagtggcaaaaagaatagcagtttctacaacattgatgattctggtagcaatttggtaacacacgcttggagactttggagaaatgggtcaccgttagaactggtggatccaaccataggagaaagttatcagagtagcgaggctactagatgcatccatatcgcactattatgtgttcaagaagatcctgcagatcgtccattgttaccagcgatcatcatgatgcttactagtagcacaaccactttacatgtgcctcgagcgcccggattttgcctaagcgggcgtgatctggaacaggatggtgtagagtataccgaatccacaagcaggtctattcctggttctatcaatgatgcatcgattacagagttctatcctcgttga

SEQ ID NO: 75221 - protein, 931 aa, Arabidopsis thaliana
  peptide (1)..(931): Ceres Seq. ID no. 6431751
MMLNTLFLPIFLFFLITFDYVSTQTCFNGYFKPNGTYDLNRRRILSSLASKVTAHNGFYSSTIGQNPNQMFIISMCIPGTKPERCSDCIKGSTDGLLRSCPNQTVGYVWPDCCMVRYSNISFSGSLIMEPSQPVSDPAPIGVDLTLFDRIWDELMSRTITTASRTHGSLSFGHKYYAADVASLTTFQTIYTMVQCTPDVSSGDCEFCLKRTVLDYKKCCRGHIGGAFVRPFCFIRWDLYPFAGAFENITLPSPPPPLSLTPPHEAKDFVFTNFLIFLISLDSVTAQEICFSGFFKPNSTYDLNRRQILSTLSSNVTSHNGFFNSKFGQAPNRVFINGMCIPGTKPETCSDCIKGASDKISESCPNKTDAYTWPDCCMVRYSNVSFSGSLVMEPSETLYHTGDIEDTGTNLTVFDRIWEELMLRTITAASLSSSNGSSFGQKYFAAEVASLTTFQTMYAMMQCTPDVSSKDCEFCLKTSVGDYESCCRGKQGGAVIRPSCFVRWDLYPYAGAFENVTFPPPPPQSLPQPPVSLIPPPVSDRANTTIKGIIVAIVVPIIVILVSLVVLLVVCRRKKSYKTTEVQATDEITTTHSLQFSFKTIEAATDKFSDSNMIGRGGFGEVYRGKLSSGPEVAVKRLSKTSGQGAEEFKNEAVLVSKLQHKNLVRLLGFCLEGEEKILVYEFVPNKSLDYFLFDPAKQGELDWTRRYNIIGGIARGILYLHQDSRLTIIHRDLKASNILLDADMNPKIADFGMARIFGVDQSQANTRRIAGTFGYMSPEYAMRGHFSMKSDVYSFGVLVLEIISGKKNSSFYNIDDSGSNLVTHAWRLWRNGSPLELVDPTIGESYQSSEATRCIHIALLCVQEDPADRPLLPAIIMMLTSSTTTLHVPRAPGFCLSGRDLEQDGVEYTESTSRSIPGSINDASITEFYPR

SEQ ID NO: 75222 - protein, 930 aa, Arabidopsis thaliana
  peptide (1)..(930): Ceres Seq. ID no. 6431752
MLNTLFLPIFLFFLITFDYVSTQTCFNGYFKPNGTYDLNRRRILSSLASKVTAHNGFYSSTIGQNPNQMFIISMCIPGTKPERCSDCIKGSTDGLLRSCPNQTVGYVWPDCCMVRYSNISFSGSLIMEPSQPVSDPAPIGVDLTLFDRIWDELMSRTITTASRTHGSLSFGHKYYAADVASLTTFQTIYTMVQCTPDVSSGDCEFCLKRTVLDYKKCCRGHIGGAFVRPFCFIRWDLYPFAGAFENITLPSPPPPLSLTPPHEAKDFVFTNFLIFLISLDSVTAQEICFSGFFKPNSTYDLNRRQILSTLSSNVTSHNGFFNSKFGQAPNRVFINGMCIPGTKPETCSDCIKGASDKISESCPNKTDAYTWPDCCMVRYSNVSFSGSLVMEPSETLYHTGDIEDTGTNLTVFDRIWEELMLRTITAASLSSSNGSSFGQKYFAAEVASLTTFQTMYAMMQCTPDVSSKDCEFCLKTSVGDYESCCRGKQGGAVIRPSCFVRWDLYPYAGAFENVTFPPPPPQSLPQPPVSLIPPPVSDRANTTIKGIIVAIVVPIIVILVSLVVLLVVCRRKKSYKTTEVQATDEITTTHSLQFSFKTIEAATDKFSDSNMIGRGGFGEVYRGKLSSGPEVAVKRLSKTSGQGAEEFKNEAVLVSKLQHKNLVRLLGFCLEGEEKILVYEFVPNKSLDYFLFDPAKQGELDWTRRYNIIGGIARGILYLHQDSRLTIIHRDLKASNILLDADMNPKIADFGMARIFGVDQSQANTRRIAGTFGYMSPEYAMRGHFSMKSDVYSFGVLVLEIISGKKNSSFYNIDDSGSNLVTHAWRLWRNGSPLELVDPTIGESYQSSEATRCIHIALLCVQEDPADRPLLPAIIMMLTSSTTTLHVPRAPGFCLSGRDLEQDGVEYTESTSRSIPGSINDASITEFYPR

SEQ ID NO: 75223 - protein, 862 aa, Arabidopsis thaliana
  peptide (1)..(862): Ceres Seq. ID no. 6431753
MFIISMCIPGTKPERCSDCIKGSTDGLLRSCPNQTVGYVWPDCCMVRYSNISFSGSLIMEPSQPVSDPAPIGVDLTLFDRIWDELMSRTITTASRTHGSLSFGHKYYAADVASLTTFQTIYTMVQCTPDVSSGDCEFCLKRTVLDYKKCCRGHIGGAFVRPFCFIRWDLYPFAGAFENITLPSPPPPLSLTPPHEAKDFVFTNFLIFLISLDSVTAQEICFSGFFKPNSTYDLNRRQILSTLSSNVTSHNGFFNSKFGQAPNRVFINGMCIPGTKPETCSDCIKGASDKISESCPNKTDAYTWPDCCMVRYSNVSFSGSLVMEPSETLYHTGDIEDTGTNLTVFDRIWEELMLRTITAASLSSSNGSSFGQKYFAAEVASLTTFQTMYAMMQCTPDVSSKDCEFCLKTSVGDYESCCRGKQGGAVIRPSCFVRWDLYPYAGAFENVTFPPPPPQSLPQPPVSLIPPPVSDRANTTIKGIIVAIVVPIIVILVSLVVLLVVCRRKKSYKTTEVQATDEITTTHSLQFSFKTIEAATDKFSDSNMIGRGGFGEVYRGKLSSGPEVAVKRLSKTSGQGAEEFKNEAVLVSKLQHKNLVRLLGFCLEGEEKILVYEFVPNKSLDYFLFDPAKQGELDWTRRYNIIGGIARGILYLHQDSRLTIIHRDLKASNILLDADMNPKIADFGMARIFGVDQSQANTRRIAGTFGYMSPEYAMRGHFSMKSDVYSFGVLVLEIISGKKNSSFYNIDDSGSNLVTHAWRLWRNGSPLELVDPTIGESYQSSEATRCIHIALLCVQEDPADRPLLPAIIMMLTSSTTTLHVPRAPGFCLSGRDLEQDGVEYTESTSRSIPGSINDASITEFYPR

SEQ ID NO: 75224 - DNA, 2523 bp, Arabidopsis thaliana
  misc_feature (1)..(2523): Ceres Seq. ID no. 6431801
  misc_feature (1)..(2523): Ortholog of  Ceres SEQ ID NO 15176941 as cited in SEQ ID NO 55559
  misc_feature (1)..(2523): Ortholog of  Ceres SEQ ID NO 13595658 as cited in SEQ ID NO 59888
  misc_feature (1)..(2523): Ortholog of  Ceres SEQ ID NO 13662324 as cited in SEQ ID NO 62162
atgttgctcgcaggagtgttgtccatgagtatccttaccatagagaacaagtgcaatcacacagtttggccagttatcttctcatggaacgttgactcacaagtctccccaacaggctttgctctcagaagaggggaggctcgagccctacaggcgccatcttcatggtacggtcttatctcggctaggacgctatgctccatcgactcaacaggaacattctcttgcgccacaggagactgcgaatcgggtacgatcgagtgtcctggcaattacggttgggctccggtgacttatgtctactttagaatgaacagctacaccatcagtgttgagtacggttacaaccttccactaatggtggtcccttcacagcgtagccggacatgtatcagcgctggttgcgttgttgaactgaaaaagacttgtccaaaagatcttatgaaaatgtccagagaaaatctagtcgcctgtagtagcacgtgcatggagtttgatactccggaggcttgttgcacccgagacttcaagtcaaagcaaaactgcaagccgacagtgtacacgcagaactttgagcgagcttgcccactcgctcatatctacgcctatgatgataacaatagcaccgttacatgcctaaactctactgactacgtcatcactatcataaccatagaaaacaaatgcaacaacacaatttggccagtcatcttctcatggcggtcacaagtttccaccaccggcttcactctcaagaccggagaggaacgtgccataaacgcaccatcttcatggtacggtcttatctcagctaggactctttgctccaatgactcaacaggaaacttctcatgcgccacgggagactgtgaatccggcgagatcgagtgtcccggcacctacaaatggtctcctgtaacttacgtcatatttagaatcgatgacggacaaatcaacagctatatcatcagcctcgagttcggttacaaccttccactaacggttgttccgtcaaacccggcatgtatcagctcaggttgtatggttgacttgaacaagacatgtccaaatgatcttaaggaattctccaggagaggtttagtcgcctgcaaaagtgcgtgtcgacaatccgcatccgatgagaattgttgcactaattacttcaagtataagcaaacttgtaagccgacaccgtacgtacagaacttcgaccgtgcttgcccatccgcttatagctaccccttcagcggtaataacagtaccttcacatgcacaaattcaactgattacgtgatcacgttttgtccctcctccattcccaacaccacaagttttgcttcttttttttctcttccaggaggctcagcagctttaattgtgttgatcagtattgttgtgattgcgctagtagtgagagcgaggcatgcgaaaagaaagagtgaattgaacgacgagaacattgaagcggttgtgatgttgaaacgttatagctttgaaaaagtcaagaagatgacaaactcgtttgatcatgttattgggaaaggaggatttggaactgtctataaaggaaaactacccgatgccagcggccgagatattgctctgaagatcttgaaagagtcaaaagggaatggagaagagttcatcaatgaactagttagcatgagtagagcttctcatgttaacatcgtttctctttttggattttgctatgaagggagccagagagctattatctacgagttcatgccgaatggatcccttgacaagtttatatccgagaatatgtcaacaaagatagagtggaaaacattatacaacatcgcggtaggtgttgctcgtgggctcgagtacttgcacaatagttgtgtatccaagattgtgcatttcgatataaagccacagaatatactcatagacgaagacttatgcccgaagatttcggatttcggtcttgctaagctatgcaaaaagaaagaaagtatcatatcaatgttagacgcgagagggacagtagggtacattgctcctgaaatgttttccaagaactatggaggagtttcgcataagtcagatgtgtatagttatggaatggtggttcttgagatgattggggcaacgaaaagagaagaagttgaaacttctgcgaccgataaaagttcaatgtactttcctgattgggtctatgaggatcttgagaggaaagaaaccatgagactattagaagatcatataatcgaagaagaagaagaagagaagatagtgaagagaatgacattagtgggtttgtggtgtatacaaaccaatccatctgatcgtccaccaatgagaaaagttgttgaaatgttagagggcagtcgtctagaagctctacaggttccacctaagcctctcttgaatttacacgtagtaacggattgggaaacttctgaagatagtcaacagacttctagactctcgacacaaagcttgttagagagaaaaactcgttcgaattaccaatatactgtggaagcggtttaa

SEQ ID NO: 75225 - protein, 840 aa, Arabidopsis thaliana
  peptide (1)..(840): Ceres Seq. ID no. 6431802
MLLAGVLSMSILTIENKCNHTVWPVIFSWNVDSQVSPTGFALRRGEARALQAPSSWYGLISARTLCSIDSTGTFSCATGDCESGTIECPGNYGWAPVTYVYFRMNSYTISVEYGYNLPLMVVPSQRSRTCISAGCVVELKKTCPKDLMKMSRENLVACSSTCMEFDTPEACCTRDFKSKQNCKPTVYTQNFERACPLAHIYAYDDNNSTVTCLNSTDYVITIITIENKCNNTIWPVIFSWRSQVSTTGFTLKTGEERAINAPSSWYGLISARTLCSNDSTGNFSCATGDCESGEIECPGTYKWSPVTYVIFRIDDGQINSYIISLEFGYNLPLTVVPSNPACISSGCMVDLNKTCPNDLKEFSRRGLVACKSACRQSASDENCCTNYFKYKQTCKPTPYVQNFDRACPSAYSYPFSGNNSTFTCTNSTDYVITFCPSSIPNTTSFASFFSLPGGSAALIVLISIVVIALVVRARHAKRKSELNDENIEAVVMLKRYSFEKVKKMTNSFDHVIGKGGFGTVYKGKLPDASGRDIALKILKESKGNGEEFINELVSMSRASHVNIVSLFGFCYEGSQRAIIYEFMPNGSLDKFISENMSTKIEWKTLYNIAVGVARGLEYLHNSCVSKIVHFDIKPQNILIDEDLCPKISDFGLAKLCKKKESIISMLDARGTVGYIAPEMFSKNYGGVSHKSDVYSYGMVVLEMIGATKREEVETSATDKSSMYFPDWVYEDLERKETMRLLEDHIIEEEEEEKIVKRMTLVGLWCIQTNPSDRPPMRKVVEMLEGSRLEALQVPPKPLLNLHVVTDWETSEDSQQTSRLSTQSLLERKTRSNYQYTVEAV

SEQ ID NO: 75226 - protein, 832 aa, Arabidopsis thaliana
  peptide (1)..(832): Ceres Seq. ID no. 6431803
MSILTIENKCNHTVWPVIFSWNVDSQVSPTGFALRRGEARALQAPSSWYGLISARTLCSIDSTGTFSCATGDCESGTIECPGNYGWAPVTYVYFRMNSYTISVEYGYNLPLMVVPSQRSRTCISAGCVVELKKTCPKDLMKMSRENLVACSSTCMEFDTPEACCTRDFKSKQNCKPTVYTQNFERACPLAHIYAYDDNNSTVTCLNSTDYVITIITIENKCNNTIWPVIFSWRSQVSTTGFTLKTGEERAINAPSSWYGLISARTLCSNDSTGNFSCATGDCESGEIECPGTYKWSPVTYVIFRIDDGQINSYIISLEFGYNLPLTVVPSNPACISSGCMVDLNKTCPNDLKEFSRRGLVACKSACRQSASDENCCTNYFKYKQTCKPTPYVQNFDRACPSAYSYPFSGNNSTFTCTNSTDYVITFCPSSIPNTTSFASFFSLPGGSAALIVLISIVVIALVVRARHAKRKSELNDENIEAVVMLKRYSFEKVKKMTNSFDHVIGKGGFGTVYKGKLPDASGRDIALKILKESKGNGEEFINELVSMSRASHVNIVSLFGFCYEGSQRAIIYEFMPNGSLDKFISENMSTKIEWKTLYNIAVGVARGLEYLHNSCVSKIVHFDIKPQNILIDEDLCPKISDFGLAKLCKKKESIISMLDARGTVGYIAPEMFSKNYGGVSHKSDVYSYGMVVLEMIGATKREEVETSATDKSSMYFPDWVYEDLERKETMRLLEDHIIEEEEEEKIVKRMTLVGLWCIQTNPSDRPPMRKVVEMLEGSRLEALQVPPKPLLNLHVVTDWETSEDSQQTSRLSTQSLLERKTRSNYQYTVEAV

SEQ ID NO: 75227 - protein, 737 aa, Arabidopsis thaliana
  peptide (1)..(737): Ceres Seq. ID no. 6431804
MNSYTISVEYGYNLPLMVVPSQRSRTCISAGCVVELKKTCPKDLMKMSRENLVACSSTCMEFDTPEACCTRDFKSKQNCKPTVYTQNFERACPLAHIYAYDDNNSTVTCLNSTDYVITIITIENKCNNTIWPVIFSWRSQVSTTGFTLKTGEERAINAPSSWYGLISARTLCSNDSTGNFSCATGDCESGEIECPGTYKWSPVTYVIFRIDDGQINSYIISLEFGYNLPLTVVPSNPACISSGCMVDLNKTCPNDLKEFSRRGLVACKSACRQSASDENCCTNYFKYKQTCKPTPYVQNFDRACPSAYSYPFSGNNSTFTCTNSTDYVITFCPSSIPNTTSFASFFSLPGGSAALIVLISIVVIALVVRARHAKRKSELNDENIEAVVMLKRYSFEKVKKMTNSFDHVIGKGGFGTVYKGKLPDASGRDIALKILKESKGNGEEFINELVSMSRASHVNIVSLFGFCYEGSQRAIIYEFMPNGSLDKFISENMSTKIEWKTLYNIAVGVARGLEYLHNSCVSKIVHFDIKPQNILIDEDLCPKISDFGLAKLCKKKESIISMLDARGTVGYIAPEMFSKNYGGVSHKSDVYSYGMVVLEMIGATKREEVETSATDKSSMYFPDWVYEDLERKETMRLLEDHIIEEEEEEKIVKRMTLVGLWCIQTNPSDRPPMRKVVEMLEGSRLEALQVPPKPLLNLHVVTDWETSEDSQQTSRLSTQSLLERKTRSNYQYTVEAV

SEQ ID NO: 75228 - DNA, 771 bp, Arabidopsis thaliana
  misc_feature (1)..(771): Ceres Seq. ID no. 6431901
  misc_feature (1)..(771): Ortholog of  Ceres SEQ ID NO 14307583 as cited in SEQ ID NO 163
  misc_feature (1)..(771): Ortholog of  Ceres SEQ ID NO 15224302 as cited in SEQ ID NO 53942
  misc_feature (1)..(771): Ortholog of  Ceres SEQ ID NO 14306297 as cited in SEQ ID NO 56907
atgacaactggccgaccaaataatattttagcattgaaaatttctactagatcaagctctctcactgtcggagagcaattctgcgccgtctttatacctttctttgccattatcgatgtcctagtttcctccgtcggacaatgcttcgattgccgcagcacatcgcctcggacatgtcagcacgcggatctggaacgtcttgctcgtgaatctcaattttcagtcaatgaagttgaagctttgtatgagctattcaagaaattgagctgttcaattattgatgacggcttgattcacaaggaagagcttagactggcgctgttccaagctccatatggtgagaacctctttcttgatagggtttttgatttgttcgatgaaaagaagaatggggttattgagtttgaggaattcatccatgcactcagtgtctttcatccctatgcatcaatccaggagaagaccgattttgcatttaggctctatgatctaagacaaactggattcattgagcgagaagaggtgcaacaaatggtttctgctattctcttggaatctgatatgatgctatccgatgaacttctgaccatgattattgataaaacatttgctgatgcagattctgacaaagacggtaaaattagtaaggatgaatggaatgtctatgtgcataaacatcctagcttgttgaagaatatgactcttccttacctaaaggatgtgacgacagcattcccaagttttatattcaacactgaggttgaagactga

SEQ ID NO: 75229 - protein, 256 aa, Arabidopsis thaliana
  peptide (1)..(256): Ceres Seq. ID no. 6431902
MTTGRPNNILALKISTRSSSLTVGEQFCAVFIPFFAIIDVLVSSVGQCFDCRSTSPRTCQHADLERLARESQFSVNEVEALYELFKKLSCSIIDDGLIHKEELRLALFQAPYGENLFLDRVFDLFDEKKNGVIEFEEFIHALSVFHPYASIQEKTDFAFRLYDLRQTGFIEREEVQQMVSAILLESDMMLSDELLTMIIDKTFADADSDKDGKISKDEWNVYVHKHPSLLKNMTLPYLKDVTTAFPSFIFNTEVED

SEQ ID NO: 75230 - DNA, 1137 bp, Arabidopsis thaliana
  misc_feature (1)..(1137): Ceres Seq. ID no. 6431907
  misc_feature (1)..(1137): Ortholog of  Ceres SEQ ID NO 12617887 as cited in SEQ ID NO 65526
atgggaagcttgagtacgattttgagacatccggatgagttatatccgctcttgaagttgaaacttgcgattacgaaagctcagaagcagattccacttgagccacacttagctttctgttattcaattcttcacaaagtttctaaaagcttttctcttgttattcaacaacttggcaccgagcttcgtaacgccgtgtgtgtgttctacttgattctccgagctcttgatactgttgaggatgacacaagcgtaccagtggagatcaaagttccaattctgatagctttccaccgtcatatatacgatggtgactggcatttttcatgtggtacaaaagagtataaacttctaatggaccaatttcaccatgtttctgcagcttttctgaaacttgaaaaagggtatcaagaggctattgaagatataactaaaagaatgggtgcaggaatggccaagttcatttgcaaggaggtagaaacaattgatgactatgatgaatactgccattatgctgcaggacttgttggtttaggtttgtcaaaaatcttcattgcttcggaattagaaatactgactccagattggaagcagatttcaaattctacaggtttatttctgcagaaaacaaacattatcaaagattatcttgaagacattaatgagagaccaaagtcgcgcatgttttggcctcgtgagatttggggaaaatatgttgacaaacttgaggacttcaaaaatgaggagaaagctacaaaagcagtgcagtgtttgaatgaaatggtcactaatgcattgaatcatgttgaagattgtttgaaatccttggcttcactgcgtgatcctgcaatatttcagtcttgcgccatccctcagatcgtggcgattggaacacttgcgttatgctataacaatgtacaagtgtttagaggtgtcgtgagattgagacgaggtctaatagctaaagtcattgatcgcacaaagacaatggatgatgtctacggtgcgttctatgatttttcttgcatgctacaaacaaaggttgacaataacgatccaaatgctatgaaaacattaaaccgactcgaaaccatcaagaaattttgcaaagaaaatggaggacttcacaaaaggtag

SEQ ID NO: 75231 - protein, 378 aa, Arabidopsis thaliana
  peptide (1)..(378): Ceres Seq. ID no. 6431908
MGSLSTILRHPDELYPLLKLKLAITKAQKQIPLEPHLAFCYSILHKVSKSFSLVIQQLGTELRNAVCVFYLILRALDTVEDDTSVPVEIKVPILIAFHRHIYDGDWHFSCGTKEYKLLMDQFHHVSAAFLKLEKGYQEAIEDITKRMGAGMAKFICKEVETIDDYDEYCHYAAGLVGLGLSKIFIASELEILTPDWKQISNSTGLFLQKTNIIKDYLEDINERPKSRMFWPREIWGKYVDKLEDFKNEEKATKAVQCLNEMVTNALNHVEDCLKSLASLRDPAIFQSCAIPQIVAIGTLALCYNNVQVFRGVVRLRRGLIAKVIDRTKTMDDVYGAFYDFSCMLQTKVDNNDPNAMKTLNRLETIKKFCKENGGLHKR

SEQ ID NO: 75232 - protein, 260 aa, Arabidopsis thaliana
  peptide (1)..(260): Ceres Seq. ID no. 6431909
MDQFHHVSAAFLKLEKGYQEAIEDITKRMGAGMAKFICKEVETIDDYDEYCHYAAGLVGLGLSKIFIASELEILTPDWKQISNSTGLFLQKTNIIKDYLEDINERPKSRMFWPREIWGKYVDKLEDFKNEEKATKAVQCLNEMVTNALNHVEDCLKSLASLRDPAIFQSCAIPQIVAIGTLALCYNNVQVFRGVVRLRRGLIAKVIDRTKTMDDVYGAFYDFSCMLQTKVDNNDPNAMKTLNRLETIKKFCKENGGLHKR

SEQ ID NO: 75233 - protein, 232 aa, Arabidopsis thaliana
  peptide (1)..(232): Ceres Seq. ID no. 6431910
MGAGMAKFICKEVETIDDYDEYCHYAAGLVGLGLSKIFIASELEILTPDWKQISNSTGLFLQKTNIIKDYLEDINERPKSRMFWPREIWGKYVDKLEDFKNEEKATKAVQCLNEMVTNALNHVEDCLKSLASLRDPAIFQSCAIPQIVAIGTLALCYNNVQVFRGVVRLRRGLIAKVIDRTKTMDDVYGAFYDFSCMLQTKVDNNDPNAMKTLNRLETIKKFCKENGGLHKR

SEQ ID NO: 75234 - DNA, 1326 bp, Arabidopsis thaliana
  misc_feature (1)..(1326): Ceres Seq. ID no. 6432053
  misc_feature (1)..(1326): Ortholog of  Ceres SEQ ID NO 13597532 as cited in SEQ ID NO 64873
atgaatcgatcaacgatgatgattatgaggattgaagagtcggcgattgttttgtctctgctcaaatcggatctccggccgatggaagacgttttatcggaattcgactctaagttcgaaagcgctcgttacctcagtgtctgcaattctctttccatgatgttgcaggatcagcagatgtttaagaatactgaacgtctaattgcatttggtatcatataccagtgttattcttcacagaagccatctttcaacccgtttttatctgaaatgataagtgctgcttgtaatgaacagctggaaaagtctgaaagggcatttcttctccacctgttacaatggaatagttacaacaacgtgaaagagattctcaaactctcagctgttgattatatcagatcgtttgatccttcaactcatgattttccggaactaggagagctgcaacgagagtatggcgacaaagccgatcctggaccatctagtcacatttttgcagactattccctgaaaaagctattgcatgatcctgatgttcctcgtgggtgtgatcctaactctccagagtttgatgtgcaagctggagtgaatcccagaattggatctggtgatagggatgaggcactatctggattcttaggaaatttgacaatggggggattaggtcctaggtggatccgtccatgtccaccaaggtacccagttcatcagagcgagttgctttggattgaccctgataacaagcatgagcttgtttgggacgataaaatgtgtgctgatactagcagtggtgcaacagttagagacttgcttgttaagggtttaaaggtgacactttcacctacggagcaagaggacatcattacagaattggcaaatgacccaaagcttgtctttcactgcggaataactccacggaagctgccgcaattagtagagcacaatcctcagatagcagttgaaattctcaccaagttgaataactccacagagattaatgactattatgaagctctaggaaatatggacatgagcctgcactcaatggaagttgtgaataggctcacaactgcagttgaacttcccaaggacttcatacggatgtacatcactaattgcatatcgtcttgtgagaacgctaagcaagacaaatacatgcagaataggcttgtacggcttgtttgcgtcttcttgcaaagcttaattcgtaacaagatcatcaacgtgaaggatctattcatagaagttcaagctttctgcattgagttttctcgggttcgagaagcagctggtctcttcaggcttttgaaacaattggatgaataa

SEQ ID NO: 75235 - protein, 441 aa, Arabidopsis thaliana
  peptide (1)..(441): Ceres Seq. ID no. 6432054
MNRSTMMIMRIEESAIVLSLLKSDLRPMEDVLSEFDSKFESARYLSVCNSLSMMLQDQQMFKNTERLIAFGIIYQCYSSQKPSFNPFLSEMISAACNEQLEKSERAFLLHLLQWNSYNNVKEILKLSAVDYIRSFDPSTHDFPELGELQREYGDKADPGPSSHIFADYSLKKLLHDPDVPRGCDPNSPEFDVQAGVNPRIGSGDRDEALSGFLGNLTMGGLGPRWIRPCPPRYPVHQSELLWIDPDNKHELVWDDKMCADTSSGATVRDLLVKGLKVTLSPTEQEDIITELANDPKLVFHCGITPRKLPQLVEHNPQIAVEILTKLNNSTEINDYYEALGNMDMSLHSMEVVNRLTTAVELPKDFIRMYITNCISSCENAKQDKYMQNRLVRLVCVFLQSLIRNKIINVKDLFIEVQAFCIEFSRVREAAGLFRLLKQLDE

SEQ ID NO: 75236 - protein, 436 aa, Arabidopsis thaliana
  peptide (1)..(436): Ceres Seq. ID no. 6432055
MMIMRIEESAIVLSLLKSDLRPMEDVLSEFDSKFESARYLSVCNSLSMMLQDQQMFKNTERLIAFGIIYQCYSSQKPSFNPFLSEMISAACNEQLEKSERAFLLHLLQWNSYNNVKEILKLSAVDYIRSFDPSTHDFPELGELQREYGDKADPGPSSHIFADYSLKKLLHDPDVPRGCDPNSPEFDVQAGVNPRIGSGDRDEALSGFLGNLTMGGLGPRWIRPCPPRYPVHQSELLWIDPDNKHELVWDDKMCADTSSGATVRDLLVKGLKVTLSPTEQEDIITELANDPKLVFHCGITPRKLPQLVEHNPQIAVEILTKLNNSTEINDYYEALGNMDMSLHSMEVVNRLTTAVELPKDFIRMYITNCISSCENAKQDKYMQNRLVRLVCVFLQSLIRNKIINVKDLFIEVQAFCIEFSRVREAAGLFRLLKQLDE

SEQ ID NO: 75237 - protein, 435 aa, Arabidopsis thaliana
  peptide (1)..(435): Ceres Seq. ID no. 6432056
MIMRIEESAIVLSLLKSDLRPMEDVLSEFDSKFESARYLSVCNSLSMMLQDQQMFKNTERLIAFGIIYQCYSSQKPSFNPFLSEMISAACNEQLEKSERAFLLHLLQWNSYNNVKEILKLSAVDYIRSFDPSTHDFPELGELQREYGDKADPGPSSHIFADYSLKKLLHDPDVPRGCDPNSPEFDVQAGVNPRIGSGDRDEALSGFLGNLTMGGLGPRWIRPCPPRYPVHQSELLWIDPDNKHELVWDDKMCADTSSGATVRDLLVKGLKVTLSPTEQEDIITELANDPKLVFHCGITPRKLPQLVEHNPQIAVEILTKLNNSTEINDYYEALGNMDMSLHSMEVVNRLTTAVELPKDFIRMYITNCISSCENAKQDKYMQNRLVRLVCVFLQSLIRNKIINVKDLFIEVQAFCIEFSRVREAAGLFRLLKQLDE

SEQ ID NO: 75238 - DNA, 2769 bp, Arabidopsis thaliana
  misc_feature (1)..(2769): Ceres Seq. ID no. 6432089
  misc_feature (1)..(2769): Ortholog of  Ceres SEQ ID NO 14315338 as cited in SEQ ID NO 60283
atgaccaccaagcgagcctataagcttcaggaatttgtggcacattctgctgctgtcaattgtcttaagatcggaaggaagtcttctagggttctggtaacaggtggtgaagatcacaaggtcaatctttgggctattggtaagcccaatgccattctgagcttgtatgggcactcaagtggaattgattcagtgacgtttgatgcttcggaggtcttagttgcagcaggagctgctagtggtactatcaaactttgggatttagaggaggcaaagattgtcaggactctcactggtcacaggtccaattgcatctcagtggatttccacccttttggtgagttttttgcgtcaggctcactagacacaaatcttaagatatgggatatacgaaaaaagggctgcatccatacttacaagggtcacacgcgaggagtcaatgtactcagattcaccccagatggtcgctgggttgtatctggaggagaggacaacattgttaaggtttgggatttaacagctggaaaactgctgaccgagtttaagagtcatgaagggcaaattcaaagcctagattttcatcctcatgaattcctactggcaacaggttcagctgatagaactgtaaaattctgggatctggaaacattcgagctgattggttctggtggacctgagactgccggggtccgttgcctgagtttcaatccagatggaaagactgtgctttgtggattgcaagaaagtctcaagattttctcatgggagccaattagatgtcatgatggagtggatgttggatggtcaagattgtcagatatgaatgttcacgagggaaagcttcttggttgctcatacaatcagagttgtgtaggcgtgtgggttgtagatctctcggtattcctctctccctacatatctttttctttttgtttaattgtagctggtagtaatctttacgaaccaactcattttcaaatgcatggtcagcgtactgagccatgtatggctggagacactgcgcaatcaaatggtcatccagagaaacgatcttgctcaggaagagatccagtagttctcaatgataataactcaaagacagttctcgggaagctgtccgtttcccaaaatgtagatcctttattgaaggaaacaaagtctctaggaagattatctgtttctcagaactctgatccttcgacaaaagaaacaaagtccattggaaggtcatcaacatcacaaaattcagagtcctcgatgaaggaatcaaagcctctcgggaggttgtcagtttctcaaaattcagacgtttctaaagagtcaaggacgttttcatccacaggaagtttaccaggcactcctcatagggtcagttcgaccaatgtatcaaaagccacttcgggtgtttcaacagccgtctctaatgctgcaacgtcaaggaggaattttacaaaagctaacccaaaggcgaatcctgtcaataaggcagcagattttgctccggtgattgtccccagagcagaccctagaatagagcaggctactgaatccagagcagaacttgacataattgcaagaaccatgccgtattcattgcaggcggctgattcccgaaggtcacctagcagcagaaataaccctgatctgccagacgcttcggttcttgaaatgtctgagtctcagccagttgaaccaaataatataccagatgggggtacacttcctggtggaaaggttggcatgcggggtgcaactgagcgaagcattaatgattttagatacaagagatatggcaggagtaattcaaggtcacggatggggtcacctccacgaaaccacgatgaaaactatgacttggtaagccacagatcaaatagagacccaagccccactgaaagtcagaaaggaggtgattcttcagcccagctttcatcttttcttttgcaaatgaagcgaatctcattcatgtgtcttatcatatcaggaagattccagtcactcgtcataaatagggagaggagaggaagattttcaaacttcgagggtcctgtttcaaatttttcaagtggaaatatgcctgctccaaacatccgcccttcaaatatgttcaagcagagagggaaccatatgccagttgaacaagggatcgattctccttctgaagaaaatattgttgaagacataatgggaaagcacaatcaatttgtcagctctatgcagtctcgtttggctaagttacaggtagttcgtagatattgggaaaggaatgatgtaaaaaattcgataggctcgatagagaagatggctgataatgctgttactgcggacgtactgggtataataaccgagagaaatgagattttgacactggataattgtacctcccttcttccccttctaacagctcttttagggagcggcatggatcagcatttgagcgtttccctggatttgctgctgaagcttgtcagactgtatgggtcaccaatttactcatcactgtcagctccagcatctgttggtgtagatatcgaggctgagcaaaggatcgagcgctacagccgttgctttgtagagctagagaaagtcaaagcatgccttccctctctagcaagcatttcaggaagtttcatcataataactatgagtcttacaaccctggacaaaaacgcagagcaaaagcccgtcttcctcgtggaagaacctgcatcatcccaagtccccaaccatctgctttttgatgtggatttggttccaaagggagtctaa

SEQ ID NO: 75239 - protein, 922 aa, Arabidopsis thaliana
  peptide (1)..(922): Ceres Seq. ID no. 6432090
MTTKRAYKLQEFVAHSAAVNCLKIGRKSSRVLVTGGEDHKVNLWAIGKPNAILSLYGHSSGIDSVTFDASEVLVAAGAASGTIKLWDLEEAKIVRTLTGHRSNCISVDFHPFGEFFASGSLDTNLKIWDIRKKGCIHTYKGHTRGVNVLRFTPDGRWVVSGGEDNIVKVWDLTAGKLLTEFKSHEGQIQSLDFHPHEFLLATGSADRTVKFWDLETFELIGSGGPETAGVRCLSFNPDGKTVLCGLQESLKIFSWEPIRCHDGVDVGWSRLSDMNVHEGKLLGCSYNQSCVGVWVVDLSVFLSPYISFSFCLIVAGSNLYEPTHFQMHGQRTEPCMAGDTAQSNGHPEKRSCSGRDPVVLNDNNSKTVLGKLSVSQNVDPLLKETKSLGRLSVSQNSDPSTKETKSIGRSSTSQNSESSMKESKPLGRLSVSQNSDVSKESRTFSSTGSLPGTPHRVSSTNVSKATSGVSTAVSNAATSRRNFTKANPKANPVNKAADFAPVIVPRADPRIEQATESRAELDIIARTMPYSLQAADSRRSPSSRNNPDLPDASVLEMSESQPVEPNNIPDGGTLPGGKVGMRGATERSINDFRYKRYGRSNSRSRMGSPPRNHDENYDLVSHRSNRDPSPTESQKGGDSSAQLSSFLLQMKRISFMCLIISGRFQSLVINRERRGRFSNFEGPVSNFSSGNMPAPNIRPSNMFKQRGNHMPVEQGIDSPSEENIVEDIMGKHNQFVSSMQSRLAKLQVVRRYWERNDVKNSIGSIEKMADNAVTADVLGIITERNEILTLDNCTSLLPLLTALLGSGMDQHLSVSLDLLLKLVRLYGSPIYSSLSAPASVGVDIEAEQRIERYSRCFVELEKVKACLPSLASISGSFIIITMSLTTLDKNAEQKPVFLVEEPASSQVPNHLLFDVDLVPKGV

SEQ ID NO: 75240 - protein, 649 aa, Arabidopsis thaliana
  peptide (1)..(649): Ceres Seq. ID no. 6432091
MNVHEGKLLGCSYNQSCVGVWVVDLSVFLSPYISFSFCLIVAGSNLYEPTHFQMHGQRTEPCMAGDTAQSNGHPEKRSCSGRDPVVLNDNNSKTVLGKLSVSQNVDPLLKETKSLGRLSVSQNSDPSTKETKSIGRSSTSQNSESSMKESKPLGRLSVSQNSDVSKESRTFSSTGSLPGTPHRVSSTNVSKATSGVSTAVSNAATSRRNFTKANPKANPVNKAADFAPVIVPRADPRIEQATESRAELDIIARTMPYSLQAADSRRSPSSRNNPDLPDASVLEMSESQPVEPNNIPDGGTLPGGKVGMRGATERSINDFRYKRYGRSNSRSRMGSPPRNHDENYDLVSHRSNRDPSPTESQKGGDSSAQLSSFLLQMKRISFMCLIISGRFQSLVINRERRGRFSNFEGPVSNFSSGNMPAPNIRPSNMFKQRGNHMPVEQGIDSPSEENIVEDIMGKHNQFVSSMQSRLAKLQVVRRYWERNDVKNSIGSIEKMADNAVTADVLGIITERNEILTLDNCTSLLPLLTALLGSGMDQHLSVSLDLLLKLVRLYGSPIYSSLSAPASVGVDIEAEQRIERYSRCFVELEKVKACLPSLASISGSFIIITMSLTTLDKNAEQKPVFLVEEPASSQVPNHLLFDVDLVPKGV

SEQ ID NO: 75241 - protein, 596 aa, Arabidopsis thaliana
  peptide (1)..(596): Ceres Seq. ID no. 6432092
MHGQRTEPCMAGDTAQSNGHPEKRSCSGRDPVVLNDNNSKTVLGKLSVSQNVDPLLKETKSLGRLSVSQNSDPSTKETKSIGRSSTSQNSESSMKESKPLGRLSVSQNSDVSKESRTFSSTGSLPGTPHRVSSTNVSKATSGVSTAVSNAATSRRNFTKANPKANPVNKAADFAPVIVPRADPRIEQATESRAELDIIARTMPYSLQAADSRRSPSSRNNPDLPDASVLEMSESQPVEPNNIPDGGTLPGGKVGMRGATERSINDFRYKRYGRSNSRSRMGSPPRNHDENYDLVSHRSNRDPSPTESQKGGDSSAQLSSFLLQMKRISFMCLIISGRFQSLVINRERRGRFSNFEGPVSNFSSGNMPAPNIRPSNMFKQRGNHMPVEQGIDSPSEENIVEDIMGKHNQFVSSMQSRLAKLQVVRRYWERNDVKNSIGSIEKMADNAVTADVLGIITERNEILTLDNCTSLLPLLTALLGSGMDQHLSVSLDLLLKLVRLYGSPIYSSLSAPASVGVDIEAEQRIERYSRCFVELEKVKACLPSLASISGSFIIITMSLTTLDKNAEQKPVFLVEEPASSQVPNHLLFDVDLVPKGV

SEQ ID NO: 75242 - DNA, 1374 bp, Arabidopsis thaliana
  misc_feature (1)..(1374): Ceres Seq. ID no. 6432147
  misc_feature (1)..(1374): Ortholog of  Ceres SEQ ID NO 13594213 as cited in SEQ ID NO 57038
  misc_feature (1)..(1374): Ortholog of  Ceres SEQ ID NO 13654989 as cited in SEQ ID NO 63117
  misc_feature (1)..(1374): Ortholog of  Ceres SEQ ID NO 13584744 as cited in SEQ ID NO 69137
atggcggtgaagaagaaatcatcttggagatcattgatggttttgtgtttccaagatccagacaacatatattctcccaagaagacaaagaaagatgatggtgaacgtgtgattaccaaacagaaatcgtttcttggattgtcgattctagacataagtaatccaagttccactaccttgtccgaagatctctcaatctccctcgccggctcggatctccacgtgttcacacaagcagagcttagagtcataacacaaagcttctcttctagcaactttcttggtgaaggagggtttggtccggttcataaagggttcatcgatgacaagctccgtcctggtcttaaggctcagcccgttgccgttaaacttcttgatcttgatggtcttcaaggtcaccgtgagtttatgacggaggttatgtgtttgggaaaactaaagcatccgaatctggtgaagctgatcggatattgctgcgaggaagcacatagacttcttgtttatgagttcatgcctcgtggaagtttggagtctcaactcttcagaaggtgctccctaccgctgccatggacaacgaggttgaacatcgcttatgaagctgcaaagggtctacagtttctacatgaagccgagaagcccatcatctatcgcgatttcaaggcctctaatatcttgttagattctgattatacagcgaaactctcggacttcgggctagcaaaagacggaccacaaggcgatgatacacatgtgtcgactcgcgtgatgggcacacaagggtacgcggcgccagagtacataatgacaggtcatttaacggctaagagtgatgtgtacagctttggagtggtgttgcttgagctgttgacaggtcggaaatcggtggacatagcgagatcatcaagaaaagaaaccctcgttgagtgggctcgtccaatgctcaacgacgcacgtaaactcgggagaataatggacccgaggcttgaagatcagtactcagagaccggagcacgaaaggcagcaactctagcttatcaatgcctaaggtaccgaccaaagacaaggccagacattagcactgttgtctccgttctccaagacatcaaagattacaaagatgatattcccattgggatattcacttacaccgttcctaccaagccacgccgggaagttaaagagacaagtcttcaaaactttgacaagccacgccagacaagtcttcaaaacttcgacaagcctcgcaacgtttccacgactgataaccatcaaaagttccggtcgcccgcacacacggcaagaaaccaccggataactttgagaaacggatataattcaccaatgcgtaacgaggccggaggggaacggtactga

SEQ ID NO: 75243 - protein, 457 aa, Arabidopsis thaliana
  peptide (1)..(457): Ceres Seq. ID no. 6432148
MAVKKKSSWRSLMVLCFQDPDNIYSPKKTKKDDGERVITKQKSFLGLSILDISNPSSTTLSEDLSISLAGSDLHVFTQAELRVITQSFSSSNFLGEGGFGPVHKGFIDDKLRPGLKAQPVAVKLLDLDGLQGHREFMTEVMCLGKLKHPNLVKLIGYCCEEAHRLLVYEFMPRGSLESQLFRRCSLPLPWTTRLNIAYEAAKGLQFLHEAEKPIIYRDFKASNILLDSDYTAKLSDFGLAKDGPQGDDTHVSTRVMGTQGYAAPEYIMTGHLTAKSDVYSFGVVLLELLTGRKSVDIARSSRKETLVEWARPMLNDARKLGRIMDPRLEDQYSETGARKAATLAYQCLRYRPKTRPDISTVVSVLQDIKDYKDDIPIGIFTYTVPTKPRREVKETSLQNFDKPRQTSLQNFDKPRNVSTTDNHQKFRSPAHTARNHRITLRNGYNSPMRNEAGGERY

SEQ ID NO: 75244 - protein, 445 aa, Arabidopsis thaliana
  peptide (1)..(445): Ceres Seq. ID no. 6432149
MVLCFQDPDNIYSPKKTKKDDGERVITKQKSFLGLSILDISNPSSTTLSEDLSISLAGSDLHVFTQAELRVITQSFSSSNFLGEGGFGPVHKGFIDDKLRPGLKAQPVAVKLLDLDGLQGHREFMTEVMCLGKLKHPNLVKLIGYCCEEAHRLLVYEFMPRGSLESQLFRRCSLPLPWTTRLNIAYEAAKGLQFLHEAEKPIIYRDFKASNILLDSDYTAKLSDFGLAKDGPQGDDTHVSTRVMGTQGYAAPEYIMTGHLTAKSDVYSFGVVLLELLTGRKSVDIARSSRKETLVEWARPMLNDARKLGRIMDPRLEDQYSETGARKAATLAYQCLRYRPKTRPDISTVVSVLQDIKDYKDDIPIGIFTYTVPTKPRREVKETSLQNFDKPRQTSLQNFDKPRNVSTTDNHQKFRSPAHTARNHRITLRNGYNSPMRNEAGGERY

SEQ ID NO: 75245 - protein, 321 aa, Arabidopsis thaliana
  peptide (1)..(321): Ceres Seq. ID no. 6432150
MTEVMCLGKLKHPNLVKLIGYCCEEAHRLLVYEFMPRGSLESQLFRRCSLPLPWTTRLNIAYEAAKGLQFLHEAEKPIIYRDFKASNILLDSDYTAKLSDFGLAKDGPQGDDTHVSTRVMGTQGYAAPEYIMTGHLTAKSDVYSFGVVLLELLTGRKSVDIARSSRKETLVEWARPMLNDARKLGRIMDPRLEDQYSETGARKAATLAYQCLRYRPKTRPDISTVVSVLQDIKDYKDDIPIGIFTYTVPTKPRREVKETSLQNFDKPRQTSLQNFDKPRNVSTTDNHQKFRSPAHTARNHRITLRNGYNSPMRNEAGGERY

SEQ ID NO: 75246 - DNA, 1854 bp, Arabidopsis thaliana
  misc_feature (1)..(1854): Ceres Seq. ID no. 6432178
  misc_feature (1)..(1854): Ortholog of  Ceres SEQ ID NO 14303201 as cited in SEQ ID NO 67304
atggagcctccaacgggaatcttggcttctctgtggcaatttatactcttcattccttatttcactggtttactgcttctcggtgtcattaaaggtatcgttttatgcccgcttatatgccttactgtggctattggaaactctgcaatcatcttaggccttttaccagtacacgcgatttggactctatattcgatagcgaggtacttacttctttctgaaacaatctctgccctctataataataccattgttatctctttcgatgttgttgaagtgtttttgtttgaaatcagtgctaaacagttaggaccaatcctgaagatctttctgtgtttatgcgttcctcttggtgtcattctctggcttgtggttagtatcttaggaagtgttcttggaggagctatttatggatttctttctccaatatttgctactttcgatgctgttggtgaagggaagtctaatccgtttttccattgcttttatgatggaacttggagcactgttcaaggcagtttcaccgttgtttgtgattttaaagatgtttgctttcactcctacttttcttttatggatgatcttcgaacatctactgcgaaccgtcactattatgaaataaggttacttcaaattccaggtgctgtgattgttgcggttctcggaattcttgttgatttcccagtgatttcactcttagcattgtgtaaaagcccgtacatgttgttcaaagggtggcaccgtttgtttcatgatctcattggacgtgaaggtcctttcttggaaacaatgtgtgtcccaatcgctggccttgtgatcttactctggcctttagctgttgttggagcagttttaggatccgtggtctctagtgtcttccttggtgcttatggcggtgtagtctcatatcaggagtcatcgttcttcttcggtctctgctatgttgttgcttctgtttctatttacgatgagtatagcaacgatgttcttgatatgcctgaaggttcttgctttcccaggccaatatatcgaagaaacgaagagggcgctagtacggcattttctggtggtctttcaagaccgaactccttcaagacaactccatcaagaggaggatcaaacaaaggcccaatgattgacctgaaaccgcttgatcttttggaggctctatttgtggaatgtaggcggcacggagagattatggtaacgaaagggattataaattcaaaagacattgaagaagctaaatctagcaaaggcagtcaagtgatcagctttggcttacctgcttattctcttcttcacgagcttttacgctctatcaaatctaactccaccggtttattactcggtgacggtgtaacggagataactaccagaaaccgcccaaaagatgcgttttttgattggtttctgaatccgtttttgatccttaaagaccagatcgaagctgcaaacctatccgaggaagaagaagagtatcttggtaaattggtattactctttggagattcagagagacttaaaagctccattgttgaatctgaatctcctcctctaactgaactcagaaaagccgaacttgatgcctttgctcgcaggcttcaaggattaaccaaatcagtatcaagatatccaacattcagaagacattttgtggaactagtcaagaaactatcaaatgatctagacaataaacataaccgttttgaaggcggttcgagatcagttccacgtcccgggaaaacggtgtctcggattttcagccaaaaatcgttcaagaaaaagacaagtagcaatgggtcagatcaagattcaccaaacagagggttaagagacattgatattgtgtaa

SEQ ID NO: 75247 - protein, 617 aa, Arabidopsis thaliana
  peptide (1)..(617): Ceres Seq. ID no. 6432179
MEPPTGILASLWQFILFIPYFTGLLLLGVIKGIVLCPLICLTVAIGNSAIILGLLPVHAIWTLYSIARYLLLSETISALYNNTIVISFDVVEVFLFEISAKQLGPILKIFLCLCVPLGVILWLVVSILGSVLGGAIYGFLSPIFATFDAVGEGKSNPFFHCFYDGTWSTVQGSFTVVCDFKDVCFHSYFSFMDDLRTSTANRHYYEIRLLQIPGAVIVAVLGILVDFPVISLLALCKSPYMLFKGWHRLFHDLIGREGPFLETMCVPIAGLVILLWPLAVVGAVLGSVVSSVFLGAYGGVVSYQESSFFFGLCYVVASVSIYDEYSNDVLDMPEGSCFPRPIYRRNEEGASTAFSGGLSRPNSFKTTPSRGGSNKGPMIDLKPLDLLEALFVECRRHGEIMVTKGIINSKDIEEAKSSKGSQVISFGLPAYSLLHELLRSIKSNSTGLLLGDGVTEITTRNRPKDAFFDWFLNPFLILKDQIEAANLSEEEEEYLGKLVLLFGDSERLKSSIVESESPPLTELRKAELDAFARRLQGLTKSVSRYPTFRRHFVELVKKLSNDLDNKHNRFEGGSRSVPRPGKTVSRIFSQKSFKKKTSSNGSDQDSPNRGLRDIDIV

SEQ ID NO: 75248 - protein, 426 aa, Arabidopsis thaliana
  peptide (1)..(426): Ceres Seq. ID no. 6432180
MDDLRTSTANRHYYEIRLLQIPGAVIVAVLGILVDFPVISLLALCKSPYMLFKGWHRLFHDLIGREGPFLETMCVPIAGLVILLWPLAVVGAVLGSVVSSVFLGAYGGVVSYQESSFFFGLCYVVASVSIYDEYSNDVLDMPEGSCFPRPIYRRNEEGASTAFSGGLSRPNSFKTTPSRGGSNKGPMIDLKPLDLLEALFVECRRHGEIMVTKGIINSKDIEEAKSSKGSQVISFGLPAYSLLHELLRSIKSNSTGLLLGDGVTEITTRNRPKDAFFDWFLNPFLILKDQIEAANLSEEEEEYLGKLVLLFGDSERLKSSIVESESPPLTELRKAELDAFARRLQGLTKSVSRYPTFRRHFVELVKKLSNDLDNKHNRFEGGSRSVPRPGKTVSRIFSQKSFKKKTSSNGSDQDSPNRGLRDIDIV

SEQ ID NO: 75249 - protein, 377 aa, Arabidopsis thaliana
  peptide (1)..(377): Ceres Seq. ID no. 6432181
MLFKGWHRLFHDLIGREGPFLETMCVPIAGLVILLWPLAVVGAVLGSVVSSVFLGAYGGVVSYQESSFFFGLCYVVASVSIYDEYSNDVLDMPEGSCFPRPIYRRNEEGASTAFSGGLSRPNSFKTTPSRGGSNKGPMIDLKPLDLLEALFVECRRHGEIMVTKGIINSKDIEEAKSSKGSQVISFGLPAYSLLHELLRSIKSNSTGLLLGDGVTEITTRNRPKDAFFDWFLNPFLILKDQIEAANLSEEEEEYLGKLVLLFGDSERLKSSIVESESPPLTELRKAELDAFARRLQGLTKSVSRYPTFRRHFVELVKKLSNDLDNKHNRFEGGSRSVPRPGKTVSRIFSQKSFKKKTSSNGSDQDSPNRGLRDIDIV

SEQ ID NO: 75250 - DNA, 3135 bp, Arabidopsis thaliana
  misc_feature (1)..(3135): Ceres Seq. ID no. 6432206
  misc_feature (1)..(3135): Ortholog of  Ceres SEQ ID NO 14313220 as cited in SEQ ID NO 66007
  misc_feature (1)..(3135): Ortholog of  Ceres SEQ ID NO 13658778 as cited in SEQ ID NO 66511
atgtacatttcgtggatgcagcatcgtcattcctcattctcggctaagatttgcaaagtctgtggcgatgaggtcaaagacgatgacaatggtcagacttttgtggcgtgtcacgtgtgcgtttacccggtttgcaaaccttgctatgaatatgagcgtagcaacggtaacaaatgttgccctcaatgcaacactctttacaaacgccacaaaggctctccaaaaatcgccggagatgaagaaaacaatggtcctgatgattcagatgatgagttgaatatcaaatatcgccaggatggttcctccattcaccagaattttgcctatggatcggaaaatggagactacaacagtaagcagcaatggcgtccaaatggtcgagccttttcttccaccggaagtgtgttggggaaagactttgaagctgagagagatggctacacagatgcggagtggaaagaacgtgtagataaatggaaagcgaggcaagagaagagaggtttagtgactaaaggagaacaaacaaacgaagacaaagaagatgatgaagaagaatacctagatgctgaagcaagacaacctctctggagaaaagtcccaatctcttcgagcaaaatcagtccttaccgcatcgtgatcgttcttcgccttgtgatcttagttttcttcttccgtttccgtatcttgacaccagccaaagacgcataccctctctggcttatctcagtcatctgcgagatctggttcgctctctcttggatccttgatcagttcccgaaatggtttccgattaaccgagaaacctaccttgaccgtctctctatgagatttgaacgggatggggaaaagaacaagcttgcaccggttgatgtgtttgtcagtacagtggatccgctcaaggaacctcccataatcacagccaacacaattctttcgatcttagccgttgattacccagtgaataaggtgagctgctatgtgtctgatgacggtgcatcaatgctcctgttcgatacattgtccgaaacttccgagtttgcaaggagatgggttccgttttgcaagaagtacaatgttgagccaagagctccagagttttacttctcagagaagattgattacctaaaggataaagtccaaactacattcgtcaaagatcgcagagcaatgaagagagaatatgaagaattcaaagtgaggatcaatgctttagtagctaaagctcaaaagaagcctgaagaaggttgggttatgcaagatggtacaccatggcctgggaataacactcgtgatcatcccgggatgattcaggtgtatctcggcaaagaaggagcattcgacattgatggtaacgaattgccacgtctcgtgtatgtatcaagagagaagcgtcctggttacgcacaccacaagaaagctggagccatgaatgcaatggttcgagtctctgcagtactcactaatgctccattcatgcttaatctcgactgtgaccattacatcaacaacagtaaagccataagagaatcaatgtgctttctaatggatccacagcttggtaaaaagctctgttatgtccaattcccacaaagattcgacggaatcgatcttaacgatcgatacgccaacagaaacatcgtcttcttcgatataaacatgagaggcttagatggaatccaaggaccagtctatgtaggaacaggatgtgtattcaatagaccagcattatacggatacgaacctccggtatcggaaaaacgaaagaaaatgacatgtgattgttggccgtcgtggatctgctgttgttgcggcggaggtaaccgtaatcacaaatcagattcgtcaaagaagaaatcaggaatcaagagcttgttctcgaaactaaagaagaagactaagaagaagagtgatgataaaacgatgagcagctatagtagaaaacgatcatcgacggaggcgatttttgatttggaagatattgaggaagggcttgaaggatatgatgagcttgagaaatcttcgttaatgtcgcagaagaattttgagaagagatttggaatgtctcctgtgtttattgcgtcgacgttgatggagaacggaggattgccggaggcgacgaacacgagctcgttgatcaaagaagctattcatgttattagctgtggttatgaagagaagactgaatggggcaaagagattggatggatttatggatcagtaacagaagatatcctcactggatttagaatgcattgtagaggttggaaatcagtttactgtatgcctaaaagaccagctttcaaaggatcagctccgatcaatttatctgatcggttgcaccaagttcttagatgggctcttggttccgtcgaaatcttctttagtcgtcattgtcctttgtggtatgcttggggaggcaagcttaagattctagaacgtcttgcttacatcaacacaattgtttatcctttcacttctattcctctacttgcctattgtactattccggccgtttgtcttctcaccggcaagttcatcattcctacgatcaacaatttcgcaagcatatggttcttagctctgttcctatcaatcattgcaacggctatcttagaactccggtggagtggtgtaagcatcaatgacctctggcgtaacgagcaattctgggtgattggcggtgtctcagctcatctcttcgctgtctttcaaggtcttcttaaagttctctttggtgttgacactaacttcaccgtcacgtcaaaaggagccagtgacgaagccgatgagtttggagatctttacctctttaaatggacaacccttctcatccctccgacaactctcattattctcaacatggtcggtgttgttgccggagtttctgacgctattaacaatggatatggttcttggggaccgctttttgggaaactgtttttcgcgttttgggtcattgttcatctttatcctttcctcaaaggtttgatgggtagacaaaaccgaacaccgacgattgttgttctttggtctatccttctcgcttcgatcttctctttggtttgggttcggattgatccgttcttgccgaaacagactggtccgttactgaagcaatgtggcgtcgactgttaa

SEQ ID NO: 75251 - protein, 1044 aa, Arabidopsis thaliana
  peptide (1)..(1044): Ceres Seq. ID no. 6432207
MYISWMQHRHSSFSAKICKVCGDEVKDDDNGQTFVACHVCVYPVCKPCYEYERSNGNKCCPQCNTLYKRHKGSPKIAGDEENNGPDDSDDELNIKYRQDGSSIHQNFAYGSENGDYNSKQQWRPNGRAFSSTGSVLGKDFEAERDGYTDAEWKERVDKWKARQEKRGLVTKGEQTNEDKEDDEEEYLDAEARQPLWRKVPISSSKISPYRIVIVLRLVILVFFFRFRILTPAKDAYPLWLISVICEIWFALSWILDQFPKWFPINRETYLDRLSMRFERDGEKNKLAPVDVFVSTVDPLKEPPIITANTILSILAVDYPVNKVSCYVSDDGASMLLFDTLSETSEFARRWVPFCKKYNVEPRAPEFYFSEKIDYLKDKVQTTFVKDRRAMKREYEEFKVRINALVAKAQKKPEEGWVMQDGTPWPGNNTRDHPGMIQVYLGKEGAFDIDGNELPRLVYVSREKRPGYAHHKKAGAMNAMVRVSAVLTNAPFMLNLDCDHYINNSKAIRESMCFLMDPQLGKKLCYVQFPQRFDGIDLNDRYANRNIVFFDINMRGLDGIQGPVYVGTGCVFNRPALYGYEPPVSEKRKKMTCDCWPSWICCCCGGGNRNHKSDSSKKKSGIKSLFSKLKKKTKKKSDDKTMSSYSRKRSSTEAIFDLEDIEEGLEGYDELEKSSLMSQKNFEKRFGMSPVFIASTLMENGGLPEATNTSSLIKEAIHVISCGYEEKTEWGKEIGWIYGSVTEDILTGFRMHCRGWKSVYCMPKRPAFKGSAPINLSDRLHQVLRWALGSVEIFFSRHCPLWYAWGGKLKILERLAYINTIVYPFTSIPLLAYCTIPAVCLLTGKFIIPTINNFASIWFLALFLSIIATAILELRWSGVSINDLWRNEQFWVIGGVSAHLFAVFQGLLKVLFGVDTNFTVTSKGASDEADEFGDLYLFKWTTLLIPPTTLIILNMVGVVAGVSDAINNGYGSWGPLFGKLFFAFWVIVHLYPFLKGLMGRQNRTPTIVVLWSILLASIFSLVWVRIDPFLPKQTGPLLKQCGVDC

SEQ ID NO: 75252 - protein, 1039 aa, Arabidopsis thaliana
  peptide (1)..(1039): Ceres Seq. ID no. 6432208
MQHRHSSFSAKICKVCGDEVKDDDNGQTFVACHVCVYPVCKPCYEYERSNGNKCCPQCNTLYKRHKGSPKIAGDEENNGPDDSDDELNIKYRQDGSSIHQNFAYGSENGDYNSKQQWRPNGRAFSSTGSVLGKDFEAERDGYTDAEWKERVDKWKARQEKRGLVTKGEQTNEDKEDDEEEYLDAEARQPLWRKVPISSSKISPYRIVIVLRLVILVFFFRFRILTPAKDAYPLWLISVICEIWFALSWILDQFPKWFPINRETYLDRLSMRFERDGEKNKLAPVDVFVSTVDPLKEPPIITANTILSILAVDYPVNKVSCYVSDDGASMLLFDTLSETSEFARRWVPFCKKYNVEPRAPEFYFSEKIDYLKDKVQTTFVKDRRAMKREYEEFKVRINALVAKAQKKPEEGWVMQDGTPWPGNNTRDHPGMIQVYLGKEGAFDIDGNELPRLVYVSREKRPGYAHHKKAGAMNAMVRVSAVLTNAPFMLNLDCDHYINNSKAIRESMCFLMDPQLGKKLCYVQFPQRFDGIDLNDRYANRNIVFFDINMRGLDGIQGPVYVGTGCVFNRPALYGYEPPVSEKRKKMTCDCWPSWICCCCGGGNRNHKSDSSKKKSGIKSLFSKLKKKTKKKSDDKTMSSYSRKRSSTEAIFDLEDIEEGLEGYDELEKSSLMSQKNFEKRFGMSPVFIASTLMENGGLPEATNTSSLIKEAIHVISCGYEEKTEWGKEIGWIYGSVTEDILTGFRMHCRGWKSVYCMPKRPAFKGSAPINLSDRLHQVLRWALGSVEIFFSRHCPLWYAWGGKLKILERLAYINTIVYPFTSIPLLAYCTIPAVCLLTGKFIIPTINNFASIWFLALFLSIIATAILELRWSGVSINDLWRNEQFWVIGGVSAHLFAVFQGLLKVLFGVDTNFTVTSKGASDEADEFGDLYLFKWTTLLIPPTTLIILNMVGVVAGVSDAINNGYGSWGPLFGKLFFAFWVIVHLYPFLKGLMGRQNRTPTIVVLWSILLASIFSLVWVRIDPFLPKQTGPLLKQCGVDC

SEQ ID NO: 75253 - protein, 770 aa, Arabidopsis thaliana
  peptide (1)..(770): Ceres Seq. ID no. 6432209
MRFERDGEKNKLAPVDVFVSTVDPLKEPPIITANTILSILAVDYPVNKVSCYVSDDGASMLLFDTLSETSEFARRWVPFCKKYNVEPRAPEFYFSEKIDYLKDKVQTTFVKDRRAMKREYEEFKVRINALVAKAQKKPEEGWVMQDGTPWPGNNTRDHPGMIQVYLGKEGAFDIDGNELPRLVYVSREKRPGYAHHKKAGAMNAMVRVSAVLTNAPFMLNLDCDHYINNSKAIRESMCFLMDPQLGKKLCYVQFPQRFDGIDLNDRYANRNIVFFDINMRGLDGIQGPVYVGTGCVFNRPALYGYEPPVSEKRKKMTCDCWPSWICCCCGGGNRNHKSDSSKKKSGIKSLFSKLKKKTKKKSDDKTMSSYSRKRSSTEAIFDLEDIEEGLEGYDELEKSSLMSQKNFEKRFGMSPVFIASTLMENGGLPEATNTSSLIKEAIHVISCGYEEKTEWGKEIGWIYGSVTEDILTGFRMHCRGWKSVYCMPKRPAFKGSAPINLSDRLHQVLRWALGSVEIFFSRHCPLWYAWGGKLKILERLAYINTIVYPFTSIPLLAYCTIPAVCLLTGKFIIPTINNFASIWFLALFLSIIATAILELRWSGVSINDLWRNEQFWVIGGVSAHLFAVFQGLLKVLFGVDTNFTVTSKGASDEADEFGDLYLFKWTTLLIPPTTLIILNMVGVVAGVSDAINNGYGSWGPLFGKLFFAFWVIVHLYPFLKGLMGRQNRTPTIVVLWSILLASIFSLVWVRIDPFLPKQTGPLLKQCGVDC

SEQ ID NO: 75254 - DNA, 4752 bp, Arabidopsis thaliana
  misc_feature (1)..(4752): Ceres Seq. ID no. 6432263
  misc_feature (1)..(4752): Ortholog of  Ceres SEQ ID NO 15170434 as cited in SEQ ID NO 52810
  misc_feature (1)..(4752): Ortholog of  Ceres SEQ ID NO 14307069 as cited in SEQ ID NO 54322
atggctcttaggaaaaatactccaaaaggcgattcagtttcactacctatgaagcctttgaatttctccagaaaattgccaggaaatgtgcagattccagaccctgatattgttcaaagtgttgcgcctaacattgatctagacctccgggaagtttactttttgatgctccacttactttcatctgggccgtgccagaaaacttatgcactgttgcggcatgaacttcttgaacatgagcttcttcctagaagatatcatgcttggtactcgaggagtggattgcctagtggggatgagaatgatgatggcaattcctttcctttgaactatactgagttggctaagaggtattctcatgtaaaaaaagatcacctggtggagcttctaaagcaattggtctttgtttcaaataggcctaatccctcacgagggatcggtgatggaaataaaatgattggagctggggttccaacacttttaggcactggctcgttctcccttttgagctctgacaaggaaatagttggaagtgatctcaaaccaccacctattggcatgcgttggcctcatatgcatgctgatcaggttcgtggtattagtttgagggaaattggtggtggttttgccagacatcatcgtgccccatcaattcgagcagcatgttacgtcattgcaaaaccatcgtcaatggtacaaaagatgcagaacatcaagaggctacgtggacacagaaatgctgtgtactgtgctatattagatcgctcaggaaggtatgtaatcactggttcagatgaccgccttgtaaaagtatggtcgatggatactgcatactgcctggccagctgtcgagggcatgaaggtgacataactgatcttgctgtgagttcgaacaacattttcatagcatccgcatcaaatgattgtgtgatccgcgtttggcgattgccagatggcttaccagtttctgttctccgtggacatactggagctgttactgctattgcctttagtcccagacctggatccccgtaccagcttctctcatcgtctgatgatggtacatgtaggatatgggatgcccggggagcccaatttgctccccggatatatgtccctaggcctcctagtcctgatggtgattgctttacgttcatagttaaattattttgcgttgacttattggaagctgtttggagtgctaataagaccaatactgatgatccagagcagccaaatcatgagatggatgttctggctggacatgagaatgatgttaattatgttcagttcagtggttgtgctgcggggtctaaattttctgtaactgactactcaaaagacgagaatgttccaaaatttaagaattcctgggaaaaagctgccgatggacacgagcatatcatctcaaggttccacctccgcccatgccccctcaacctcctagaggggggccacgtcaaaggatcctacctacaccccacatatgttatggacgtccatccattcaatcctcgtatagctatgagtgctggctatgatggaaaaacaatagtgtgggatatatgggaaggcatacctatacaaatatacgacatttcacactacaagttggttgatgggaagttttcaccggatggaacttcaattatactttcagatgatgtgggccaattgtacatattaagtactggccaaggggattctcaaaaagacgctaaatatgatcagttcttcctgggggattatcgtccattaattcaggacacatatggtaatgtccttgaccaggaatctcagcttcaaccttatcgccgaaatatggaggatcctctttgtgattcagggatgattccatatgaagagccatatcagaccacgtttcagaaacggcgactcggcgccttaggcaaagaatggcgaccatcttctttgaagcttgctgtcgggccagatatcactttagatcgagattaccaaatgccacctctggcagatctagacttagccgaaccgttgccagagtttatagatgtaatggagtgggaaccagaagttgatatcttaagtgatgaaaacgactctgaatacaatgtgccagaggagtattcgtctggaaaagagcaagaatgtttaaattcttcaacctctggtgagtcaggttccagttctggtgaaagctatgaggatgatgatcatcagaatagccttagaagatccaaaaggaaaaaacataagaaagaagctgggatcatgacttcttcgggtaggcgtgtcaaaaagaggaactttgatgagcttgagggagctccaagcaacaaaaaacgtaccagaaaatctaggagtggtcgtaaagaatcgaagaggaaatcttcaaaatctaaatcgtctagacctaggcgagcagctgcacgaaatgctctctcttggttttctaagattacaggtacatctaaagatgcagaagaggaggaagtctctgaattgagtgattcatcagaaagtgaatcgacaacacaagactcaggtactggggatagtgaacttgaagtagctttgttaaatgggcatgggaagcaatcgaaggggaaaactatcctcgtatgtgattctgatgatggggctcaacaatgtgatatcagagaaactcatactgctgaaaggaggagattggttcttagatttcctgttaggaattcagataagcttaccttactggagaacctacctggatcatcttgtgatgttccaagtccaactttagggaacggctgtactgaagactcgaggattcctgggaaccaatttgaagggctagatgtaagtaaagtcaaatggggaatggttaaggctcgtacaacaaagcgaataagaggtgaagcaatatcatcgcatgaacttatgggctctgacccggagggaaaggaaaataatgttaaggaagactcaaatcaccgtggaaatggtgttacagcacctagttgtttggaattgaaaacagatatagatgacatggcagttgacactgacacggtgatctctaatggtttgccaaatggtgggaagcgatatccagaactggatgggtcaccaagtcgagtggctgatgacaaggcctctaatagttctcaaaatgtaacccaccggcacgatctaatagatagccttccaccaatctcaacgacattgaagatacgctccaagagagtttcaagggctccggatacatctttgaggcaagaaggaaaatccttatcaatagatcaagagactggtggctctgatgcattaaatgatggttttgaagatgctaaatgtgatttgacattggactgtcaaaaggatggtgtggttgggacagagatatctctgcgaaatgattgtgttctggaattaaatcctcagatctgtgatgcgctctcaattgctaatgatgttcctgtgtcacactcacatcctaaacggatgtttgattttgtctatagacgaaagtcacggaagcataagaacaacttagacagggatgctgctcttactaaagaagtcagtccaggttcttgtagtcaggatcatggtagtggctctaagtcccatgaaggtgcctctaatgggttccatgggactgagttgaatggattagagaagtcggaaggcagtttgacccacatccaagataaaataagtgattcacgtggaaaccaaaactctcaggaagaattgagatccgcttctggagcaacacttcggttgagatccacaagaaatagaaagtctacttatccctttagtgaaactaaacctattgaaacaaagaagcctcagcagttaatagaaaatgtatcctggttgacattatcgatacatgaagagggttctcgttatattccacaaatgggggatgaagttgcgtatttgcgacaggggcatcaagaatacttaaactttagctccctgagggaagtggctccttggacatcaataaaaggaggaaatataaaggctgtagaaatttgtaaagtggaaagtcttgaatatgcaactctgcctggttctggggatagctgctgcaaaatgatacttaaggtcatcgatccaaactccgaagtgttcaacaaagctttcaaacttacgttgcctgaagtggtgacgtttccagattttcttgtggaaagaagtcggtatgaagcagcaatacagaggaactggacttgcagggacaagtgtaaagtttggtggagagacgaaggcgaagaagatggtagttggtgggaaggacggattctagctgtgaaacccaaatcacctgattttcctgatagtccgtgggagaggtacacagttaagtacaagagtgaccctgccgagacacatcttcacagtccctgggagctttttgatgcagataccaagtgggagcagcctcacattgatgatgagcaacgaaaccgtttgctctcggccttaacaaagttagagacttcagacaagagaacccaggattcttttggcctccgaaaactgaaccagaccgtgggaaattccagctactccaacaggttcccagttcctttgtctcttgaagtaatcagatcaaggcttgagaacaactattaccgaagtgtggaagcattacgacacgacgtatcagttatgttgtccaatgcagagactttctttggtcgaaataaaagtgtagcagccaaaatctcaaatctctctaactggttcgaccggacgctaccttcttcgtag

SEQ ID NO: 75255 - protein, 1583 aa, Arabidopsis thaliana
  peptide (1)..(1583): Ceres Seq. ID no. 6432264
MALRKNTPKGDSVSLPMKPLNFSRKLPGNVQIPDPDIVQSVAPNIDLDLREVYFLMLHLLSSGPCQKTYALLRHELLEHELLPRRYHAWYSRSGLPSGDENDDGNSFPLNYTELAKRYSHVKKDHLVELLKQLVFVSNRPNPSRGIGDGNKMIGAGVPTLLGTGSFSLLSSDKEIVGSDLKPPPIGMRWPHMHADQVRGISLREIGGGFARHHRAPSIRAACYVIAKPSSMVQKMQNIKRLRGHRNAVYCAILDRSGRYVITGSDDRLVKVWSMDTAYCLASCRGHEGDITDLAVSSNNIFIASASNDCVIRVWRLPDGLPVSVLRGHTGAVTAIAFSPRPGSPYQLLSSSDDGTCRIWDARGAQFAPRIYVPRPPSPDGDCFTFIVKLFCVDLLEAVWSANKTNTDDPEQPNHEMDVLAGHENDVNYVQFSGCAAGSKFSVTDYSKDENVPKFKNSWEKAADGHEHIISRFHLRPCPLNLLEGGHVKGSYLHPTYVMDVHPFNPRIAMSAGYDGKTIVWDIWEGIPIQIYDISHYKLVDGKFSPDGTSIILSDDVGQLYILSTGQGDSQKDAKYDQFFLGDYRPLIQDTYGNVLDQESQLQPYRRNMEDPLCDSGMIPYEEPYQTTFQKRRLGALGKEWRPSSLKLAVGPDITLDRDYQMPPLADLDLAEPLPEFIDVMEWEPEVDILSDENDSEYNVPEEYSSGKEQECLNSSTSGESGSSSGESYEDDDHQNSLRRSKRKKHKKEAGIMTSSGRRVKKRNFDELEGAPSNKKRTRKSRSGRKESKRKSSKSKSSRPRRAAARNALSWFSKITGTSKDAEEEEVSELSDSSESESTTQDSGTGDSELEVALLNGHGKQSKGKTILVCDSDDGAQQCDIRETHTAERRRLVLRFPVRNSDKLTLLENLPGSSCDVPSPTLGNGCTEDSRIPGNQFEGLDVSKVKWGMVKARTTKRIRGEAISSHELMGSDPEGKENNVKEDSNHRGNGVTAPSCLELKTDIDDMAVDTDTVISNGLPNGGKRYPELDGSPSRVADDKASNSSQNVTHRHDLIDSLPPISTTLKIRSKRVSRAPDTSLRQEGKSLSIDQETGGSDALNDGFEDAKCDLTLDCQKDGVVGTEISLRNDCVLELNPQICDALSIANDVPVSHSHPKRMFDFVYRRKSRKHKNNLDRDAALTKEVSPGSCSQDHGSGSKSHEGASNGFHGTELNGLEKSEGSLTHIQDKISDSRGNQNSQEELRSASGATLRLRSTRNRKSTYPFSETKPIETKKPQQLIENVSWLTLSIHEEGSRYIPQMGDEVAYLRQGHQEYLNFSSLREVAPWTSIKGGNIKAVEICKVESLEYATLPGSGDSCCKMILKVIDPNSEVFNKAFKLTLPEVVTFPDFLVERSRYEAAIQRNWTCRDKCKVWWRDEGEEDGSWWEGRILAVKPKSPDFPDSPWERYTVKYKSDPAETHLHSPWELFDADTKWEQPHIDDEQRNRLLSALTKLETSDKRTQDSFGLRKLNQTVGNSSYSNRFPVPLSLEVIRSRLENNYYRSVEALRHDVSVMLSNAETFFGRNKSVAAKISNLSNWFDRTLPSS

SEQ ID NO: 75256 - protein, 1567 aa, Arabidopsis thaliana
  peptide (1)..(1567): Ceres Seq. ID no. 6432265
MKPLNFSRKLPGNVQIPDPDIVQSVAPNIDLDLREVYFLMLHLLSSGPCQKTYALLRHELLEHELLPRRYHAWYSRSGLPSGDENDDGNSFPLNYTELAKRYSHVKKDHLVELLKQLVFVSNRPNPSRGIGDGNKMIGAGVPTLLGTGSFSLLSSDKEIVGSDLKPPPIGMRWPHMHADQVRGISLREIGGGFARHHRAPSIRAACYVIAKPSSMVQKMQNIKRLRGHRNAVYCAILDRSGRYVITGSDDRLVKVWSMDTAYCLASCRGHEGDITDLAVSSNNIFIASASNDCVIRVWRLPDGLPVSVLRGHTGAVTAIAFSPRPGSPYQLLSSSDDGTCRIWDARGAQFAPRIYVPRPPSPDGDCFTFIVKLFCVDLLEAVWSANKTNTDDPEQPNHEMDVLAGHENDVNYVQFSGCAAGSKFSVTDYSKDENVPKFKNSWEKAADGHEHIISRFHLRPCPLNLLEGGHVKGSYLHPTYVMDVHPFNPRIAMSAGYDGKTIVWDIWEGIPIQIYDISHYKLVDGKFSPDGTSIILSDDVGQLYILSTGQGDSQKDAKYDQFFLGDYRPLIQDTYGNVLDQESQLQPYRRNMEDPLCDSGMIPYEEPYQTTFQKRRLGALGKEWRPSSLKLAVGPDITLDRDYQMPPLADLDLAEPLPEFIDVMEWEPEVDILSDENDSEYNVPEEYSSGKEQECLNSSTSGESGSSSGESYEDDDHQNSLRRSKRKKHKKEAGIMTSSGRRVKKRNFDELEGAPSNKKRTRKSRSGRKESKRKSSKSKSSRPRRAAARNALSWFSKITGTSKDAEEEEVSELSDSSESESTTQDSGTGDSELEVALLNGHGKQSKGKTILVCDSDDGAQQCDIRETHTAERRRLVLRFPVRNSDKLTLLENLPGSSCDVPSPTLGNGCTEDSRIPGNQFEGLDVSKVKWGMVKARTTKRIRGEAISSHELMGSDPEGKENNVKEDSNHRGNGVTAPSCLELKTDIDDMAVDTDTVISNGLPNGGKRYPELDGSPSRVADDKASNSSQNVTHRHDLIDSLPPISTTLKIRSKRVSRAPDTSLRQEGKSLSIDQETGGSDALNDGFEDAKCDLTLDCQKDGVVGTEISLRNDCVLELNPQICDALSIANDVPVSHSHPKRMFDFVYRRKSRKHKNNLDRDAALTKEVSPGSCSQDHGSGSKSHEGASNGFHGTELNGLEKSEGSLTHIQDKISDSRGNQNSQEELRSASGATLRLRSTRNRKSTYPFSETKPIETKKPQQLIENVSWLTLSIHEEGSRYIPQMGDEVAYLRQGHQEYLNFSSLREVAPWTSIKGGNIKAVEICKVESLEYATLPGSGDSCCKMILKVIDPNSEVFNKAFKLTLPEVVTFPDFLVERSRYEAAIQRNWTCRDKCKVWWRDEGEEDGSWWEGRILAVKPKSPDFPDSPWERYTVKYKSDPAETHLHSPWELFDADTKWEQPHIDDEQRNRLLSALTKLETSDKRTQDSFGLRKLNQTVGNSSYSNRFPVPLSLEVIRSRLENNYYRSVEALRHDVSVMLSNAETFFGRNKSVAAKISNLSNWFDRTLPSS

SEQ ID NO: 75257 - protein, 1528 aa, Arabidopsis thaliana
  peptide (1)..(1528): Ceres Seq. ID no. 6432266
MLHLLSSGPCQKTYALLRHELLEHELLPRRYHAWYSRSGLPSGDENDDGNSFPLNYTELAKRYSHVKKDHLVELLKQLVFVSNRPNPSRGIGDGNKMIGAGVPTLLGTGSFSLLSSDKEIVGSDLKPPPIGMRWPHMHADQVRGISLREIGGGFARHHRAPSIRAACYVIAKPSSMVQKMQNIKRLRGHRNAVYCAILDRSGRYVITGSDDRLVKVWSMDTAYCLASCRGHEGDITDLAVSSNNIFIASASNDCVIRVWRLPDGLPVSVLRGHTGAVTAIAFSPRPGSPYQLLSSSDDGTCRIWDARGAQFAPRIYVPRPPSPDGDCFTFIVKLFCVDLLEAVWSANKTNTDDPEQPNHEMDVLAGHENDVNYVQFSGCAAGSKFSVTDYSKDENVPKFKNSWEKAADGHEHIISRFHLRPCPLNLLEGGHVKGSYLHPTYVMDVHPFNPRIAMSAGYDGKTIVWDIWEGIPIQIYDISHYKLVDGKFSPDGTSIILSDDVGQLYILSTGQGDSQKDAKYDQFFLGDYRPLIQDTYGNVLDQESQLQPYRRNMEDPLCDSGMIPYEEPYQTTFQKRRLGALGKEWRPSSLKLAVGPDITLDRDYQMPPLADLDLAEPLPEFIDVMEWEPEVDILSDENDSEYNVPEEYSSGKEQECLNSSTSGESGSSSGESYEDDDHQNSLRRSKRKKHKKEAGIMTSSGRRVKKRNFDELEGAPSNKKRTRKSRSGRKESKRKSSKSKSSRPRRAAARNALSWFSKITGTSKDAEEEEVSELSDSSESESTTQDSGTGDSELEVALLNGHGKQSKGKTILVCDSDDGAQQCDIRETHTAERRRLVLRFPVRNSDKLTLLENLPGSSCDVPSPTLGNGCTEDSRIPGNQFEGLDVSKVKWGMVKARTTKRIRGEAISSHELMGSDPEGKENNVKEDSNHRGNGVTAPSCLELKTDIDDMAVDTDTVISNGLPNGGKRYPELDGSPSRVADDKASNSSQNVTHRHDLIDSLPPISTTLKIRSKRVSRAPDTSLRQEGKSLSIDQETGGSDALNDGFEDAKCDLTLDCQKDGVVGTEISLRNDCVLELNPQICDALSIANDVPVSHSHPKRMFDFVYRRKSRKHKNNLDRDAALTKEVSPGSCSQDHGSGSKSHEGASNGFHGTELNGLEKSEGSLTHIQDKISDSRGNQNSQEELRSASGATLRLRSTRNRKSTYPFSETKPIETKKPQQLIENVSWLTLSIHEEGSRYIPQMGDEVAYLRQGHQEYLNFSSLREVAPWTSIKGGNIKAVEICKVESLEYATLPGSGDSCCKMILKVIDPNSEVFNKAFKLTLPEVVTFPDFLVERSRYEAAIQRNWTCRDKCKVWWRDEGEEDGSWWEGRILAVKPKSPDFPDSPWERYTVKYKSDPAETHLHSPWELFDADTKWEQPHIDDEQRNRLLSALTKLETSDKRTQDSFGLRKLNQTVGNSSYSNRFPVPLSLEVIRSRLENNYYRSVEALRHDVSVMLSNAETFFGRNKSVAAKISNLSNWFDRTLPSS

SEQ ID NO: 75258 - DNA, 1749 bp, Arabidopsis thaliana
  misc_feature (1)..(1749): Ceres Seq. ID no. 6432286
  misc_feature (1)..(1749): Ortholog of  Ceres SEQ ID NO 14312408 as cited in SEQ ID NO 55042
atgactatcatctcttgtataactattcacatttttcgtaatattttattcgcaattttaatcttctatggctcttgttattgcgacaaaggtacaatactaatttcttataaatacaatttaattctagtatacatttcaattttttttttttttttggtgaagctggagactacatttatgaaagatgcaacattggcaccaaagaatgctagtttcgactacataatcatcggaggaggaaccgcaggttgtgcattagccgcaacgctctctcaaaacgccagcgttttggttcttgaacgcggcgggtcgccatatgagaaccccacggccactgatatgggcaactccgtcaacacactcttaaacaacacaccaaactcatggtcgcagcttttcatctccgaagacggcgtttacaacacgcggccacgtgtcctcggtggagggtcggtgataaacggaggattctactcgcgtgcgggcaatgattacgtggaggaagctgagtgggagatggaagaagtggaagctgcttacgagtgggtcgagaagaaacttgtgttcgagccacaagtaatagaatggcaaaaggcgtttaaagatgggcttctggaggctggagagtctccggacaacggtttcacgtacgatcatatctacggcactaagatcggtggtacaatctttgaccgtgctggtcatagacataccgcggcgaatctgttagagtatgctaatcccaaccggattgttgtttacttgcatgcttctgttcacaaagtcctcttcaccaccgaagcgtatgaagtgctatttgaggatgcaaatggagtgttccacaaggcaaatctagcaaataaggcaacgaacgaagtgatcttgtcagctggagccctgggtagcccacaactattaatgttgagtggagtaggtcctgccgtccatcttgaggctcacggcgtgaacccactcgtcctagatcagcccatggttgggcaggggatggctgataatcccatgaactttgtagccattccttctcctcaaccagtagaactatccctcatacaagctgttgggatcacaaagtttgatagttacattgaaggtctaagtggcttgagtctctcttttgatataactcgtaggtttttcgatggtgttttgaatcttttaaacgagacaagtcatactacatctaggaaaatcctgacccaatccattgcagtccttttaaaatcttttgatgttaaattggaagtgaggatgaatgggggtttgatctttcaaaaagtcgatggaccggcctcaaaaggacatatgaagctacggaacacgaacccaagggataatccttcagtgacattcaactactatcaagaaccagaggatttgaacaagtgtgttaaagggcttaacaccattattagaatgataaattccaaagctttctccaagtacaagtatccgggtgtgacggcacgtgaactgctcaatctcatgttggcccttcccatcaatttgaggccaaggcacgtgacctcagcgttcaacttgaagcagttttgcatcgacaccgtgacgagtgtttggcattaccatggaggttgccaagttggaaaagtggttgacaagaattacaaagtcttaggcatagatggcttaagggtcatcgatggatccacatttctcaagtctcccgggactaatcctcaagccacggtcatgatgcttggaaggtaa

SEQ ID NO: 75259 - protein, 582 aa, Arabidopsis thaliana
  peptide (1)..(582): Ceres Seq. ID no. 6432287
MTIISCITIHIFRNILFAILIFYGSCYCDKGTILISYKYNLILVYISIFFFFLVKLETTFMKDATLAPKNASFDYIIIGGGTAGCALAATLSQNASVLVLERGGSPYENPTATDMGNSVNTLLNNTPNSWSQLFISEDGVYNTRPRVLGGGSVINGGFYSRAGNDYVEEAEWEMEEVEAAYEWVEKKLVFEPQVIEWQKAFKDGLLEAGESPDNGFTYDHIYGTKIGGTIFDRAGHRHTAANLLEYANPNRIVVYLHASVHKVLFTTEAYEVLFEDANGVFHKANLANKATNEVILSAGALGSPQLLMLSGVGPAVHLEAHGVNPLVLDQPMVGQGMADNPMNFVAIPSPQPVELSLIQAVGITKFDSYIEGLSGLSLSFDITRRFFDGVLNLLNETSHTTSRKILTQSIAVLLKSFDVKLEVRMNGGLIFQKVDGPASKGHMKLRNTNPRDNPSVTFNYYQEPEDLNKCVKGLNTIIRMINSKAFSKYKYPGVTARELLNLMLALPINLRPRHVTSAFNLKQFCIDTVTSVWHYHGGCQVGKVVDKNYKVLGIDGLRVIDGSTFLKSPGTNPQATVMMLGR

SEQ ID NO: 75260 - protein, 522 aa, Arabidopsis thaliana
  peptide (1)..(522): Ceres Seq. ID no. 6432288
MKDATLAPKNASFDYIIIGGGTAGCALAATLSQNASVLVLERGGSPYENPTATDMGNSVNTLLNNTPNSWSQLFISEDGVYNTRPRVLGGGSVINGGFYSRAGNDYVEEAEWEMEEVEAAYEWVEKKLVFEPQVIEWQKAFKDGLLEAGESPDNGFTYDHIYGTKIGGTIFDRAGHRHTAANLLEYANPNRIVVYLHASVHKVLFTTEAYEVLFEDANGVFHKANLANKATNEVILSAGALGSPQLLMLSGVGPAVHLEAHGVNPLVLDQPMVGQGMADNPMNFVAIPSPQPVELSLIQAVGITKFDSYIEGLSGLSLSFDITRRFFDGVLNLLNETSHTTSRKILTQSIAVLLKSFDVKLEVRMNGGLIFQKVDGPASKGHMKLRNTNPRDNPSVTFNYYQEPEDLNKCVKGLNTIIRMINSKAFSKYKYPGVTARELLNLMLALPINLRPRHVTSAFNLKQFCIDTVTSVWHYHGGCQVGKVVDKNYKVLGIDGLRVIDGSTFLKSPGTNPQATVMMLGR

SEQ ID NO: 75261 - protein, 468 aa, Arabidopsis thaliana
  peptide (1)..(468): Ceres Seq. ID no. 6432289
MGNSVNTLLNNTPNSWSQLFISEDGVYNTRPRVLGGGSVINGGFYSRAGNDYVEEAEWEMEEVEAAYEWVEKKLVFEPQVIEWQKAFKDGLLEAGESPDNGFTYDHIYGTKIGGTIFDRAGHRHTAANLLEYANPNRIVVYLHASVHKVLFTTEAYEVLFEDANGVFHKANLANKATNEVILSAGALGSPQLLMLSGVGPAVHLEAHGVNPLVLDQPMVGQGMADNPMNFVAIPSPQPVELSLIQAVGITKFDSYIEGLSGLSLSFDITRRFFDGVLNLLNETSHTTSRKILTQSIAVLLKSFDVKLEVRMNGGLIFQKVDGPASKGHMKLRNTNPRDNPSVTFNYYQEPEDLNKCVKGLNTIIRMINSKAFSKYKYPGVTARELLNLMLALPINLRPRHVTSAFNLKQFCIDTVTSVWHYHGGCQVGKVVDKNYKVLGIDGLRVIDGSTFLKSPGTNPQATVMMLGR

SEQ ID NO: 75262 - DNA, 814 bp, Arabidopsis thaliana
  misc_feature (1)..(814): Ceres Seq. ID no. 6432414
  misc_feature (1)..(814): Ortholog of  Ceres SEQ ID NO 13595187 as cited in SEQ ID NO 56052
  misc_feature (1)..(814): Ortholog of  Ceres SEQ ID NO 14313718 as cited in SEQ ID NO 59559
  misc_feature (1)..(814): Ortholog of  Ceres SEQ ID NO 15169505 as cited in SEQ ID NO 61011
  misc_feature (1)..(814): Ortholog of  Ceres SEQ ID NO 13662053 as cited in SEQ ID NO 61547
  misc_feature (1)..(814): Ortholog of  Ceres SEQ ID NO 13624283 as cited in SEQ ID NO 0
aactactaaacactaaattatcaatccgctctcttctcaaaaaaaaaaatcgactctaaaatcaaactctctcaaagctccccaaaaaaaccctagttctgaatggaatcggcggattccggacgatccgatccggtaaaaggagacgacccgggtccatctttcgtctcttcaccaccagctacacctagcaggtatgagtcacagaagcgacgcgactggaacacgttcttgcagtacctcaagaaccacaagccgcctctcgcgttgtcacggtgtagcggagcgcatgtgatcgagtttctcaagtacctcgaccagttcggtaagaccaaagtccacgtggcggcttgtccttacttcggccatcagcaacctccgtctccttgctcatgccctctcaagcaagcttggggatctctcgatgctttgatcggacggttgagagctgcctacgaggagaacggtggacggccggattctaacccgttcgccgcacgtgcggttcggatttacttgagggaagtcagagagagtcaggcaaaggctcgtgggattccttacgagaaaaagaaacggaaacggccgccaactgtcaccaccgttagagttgacgtcgcttcttcgagacaaagtgacggagacccttgtaacgtcggtgctccatctgttgccgaggccgtaccgccttagatcgaattatatataatattatagttttcttgattaatgatatatatatacttatctctatgtatgtatggaactcacttcatcttttgttccttagtacctaattattaaattttgttcc

SEQ ID NO: 75263 - protein, 196 aa, Arabidopsis thaliana; identical to SEQ ID NO: 21135
  peptide (1)..(196): Ceres Seq. ID no. 6432415

SEQ ID NO: 75264 - DNA, 1017 bp, Arabidopsis thaliana
  misc_feature (1)..(1017): Ceres Seq. ID no. 6432419
  misc_feature (1)..(1017): Ortholog of  Ceres SEQ ID NO 13638835 as cited in SEQ ID NO 52005
  misc_feature (1)..(1017): Ortholog of  Ceres SEQ ID NO 12614289 as cited in SEQ ID NO 68735
  misc_feature (1)..(1017): Ortholog of  Ceres SEQ ID NO 14309007 as cited in SEQ ID NO 0
gaccatcgaccatcgtcgtcttcgcggagctcagttgaaagatgttaacggctgatataccaccaaatcagtcaatctacataaaacatatcaatgagaagatcaagaaagaagagctgaagaggtctctttactgtttgttctctcagtttggaagattacttgatgtggttgcgttaaagactcctaagctccggggacaagcatgggttgtttttactgaagtcaccgctgctagcaacgctgtccgtcagatgcagaactttcctttctatgataagcctatgcggatacaatatgcaaaatcaaagtcagattatgttactaaagccgaagggtcttttgttccaaaagaaaagaagatgaagcaagaagagaaagttgaaaggaagcgacatgctgaagaaactcaacaaccaagcatgcctaatggcgcaactactcagaacggaatgcctgtggcaatttctctttctcgcatcattccaacaatacaatattatcttctgacagacgtcattatcgcaacttagtctgtaaatccttgtttcctaatacccgtctctgtaatttcacagcctcctttccagccgagtgggcaagacacgatgccaccaaacaacatactcttcattcataatcttcccattgagacgaatagtatgatgcttcagctgctctttgagcaatacccaggattcaaagagataagaatgatcgaagcaaaacccggaattgcgtttgtggagtatgaagacgatgttcagtcttccatggccatgcaggctcttcagggtttcaagatcactccgcagaatccaatggtcgtctcttttgccaagaagtgaaaaccagagttttgttatgcggatgaatggtaatgatatactaattagtagctgtttaaaagcaaactgtcttattttatttggttcgtttccgattagtggtgtgaatgaccccgaagctttagaccagaatgtaatgagatcgaagaattgagagtgatttggttgg

SEQ ID NO: 75265 - protein, 163 aa, Arabidopsis thaliana; identical to SEQ ID NO: 28800
  peptide (1)..(163): Ceres Seq. ID no. 6432420

SEQ ID NO: 75266 - protein, 92 aa, Arabidopsis thaliana; identical to SEQ ID NO: 28801
  peptide (1)..(92): Ceres Seq. ID no. 6432421

SEQ ID NO: 75267 - protein, 83 aa, Arabidopsis thaliana; identical to SEQ ID NO: 28802
  peptide (1)..(83): Ceres Seq. ID no. 6432422

SEQ ID NO: 75268 - DNA, 1200 bp, Arabidopsis thaliana
  misc_feature (1)..(1200): Ceres Seq. ID no. 6432423
  misc_feature (1)..(1200): Ortholog of  Ceres SEQ ID NO 12633896 as cited in SEQ ID NO 0
atttattgaatgttctttgaagaagaagaaggcgacgacacaaaaaccttgcatttgcatccatggcgtcgatgccgagcaaacttcttccagtcctagtctgctacgtttttcttttcccctttgcatcatcatctgattattctggggtatctcttccatcttcgtcgcctaaagtctcggtgggcctgtactacgagtctctctgtccctactgctcttccttcattgttaaccacctcgcgaagctcttcgaagacgatctcatatcaatcgtcgatctccatctctctccgtggggcaataccaagctccgttccgataacgtcactgccgtttgccaggtactccttcgttttcttcaatttacgaattcgatgtttccgattcgattgaattaagcttcaattttgagaaaatcaccctttccttaactgaaatttgatgttgtttgcatctgagattgacaaattggtcttctctcatttgcataaatcttgttgcttttgtgttgcagcatggggcatttgaatgcttcttggataccgtagaagcttgtgcaattgatgcttggcctaaagtaagcgatcatttcccgttcatatactgtgtcgagaagttggtgactgaacataagtatgacaagtgggagacgtgttatgagaagctcaatctcaactcgaaacctgttgcagattgtctcagcagtggacatgggaatgagcttgctttgcactatgctgcagaaacgaatgcgcttcagcctcctcacaagtatgtgccctgggtagtcgtggatggtcagccactttatgaggactatgaaaacttcataagctacatctgcaaggcttacaaaggtaataaagtacctggcgcatgtaccaaatatgcaaccggcaacttcattcgtagtgtcaaattgaaacgctcccctctggtgtcctggaaaggcgtgaataagatgtgggatgtgttggaacgtatcacaacctctttatcgtcatacatcgacatcaccggcctgctatgaacacttcctgtatctttttcccatgtaacaaaccaccccaaaaagctatctagattctgatatttaatgaatgtgtgtaatctttatgtttcatcaaaatgtatgtttgttgggttgtgagaggcctttcaagaatcacatgttgggtaaaaaacctatttcggttt

SEQ ID NO: 75269 - protein, 112 aa, Arabidopsis thaliana; identical to SEQ ID NO: 24338
  peptide (1)..(112): Ceres Seq. ID no. 6432424

SEQ ID NO: 75270 - protein, 109 aa, Arabidopsis thaliana; identical to SEQ ID NO: 24339
  peptide (1)..(109): Ceres Seq. ID no. 6432425

SEQ ID NO: 75271 - DNA, 1324 bp, Arabidopsis thaliana
  misc_feature (1)..(1324): Ceres Seq. ID no. 6432456
  misc_feature (1)..(1324): Ortholog of  Ceres SEQ ID NO 14315874 as cited in SEQ ID NO 59983
  misc_feature (1)..(1324): Ortholog of  Ceres SEQ ID NO 13589000 as cited in SEQ ID NO 60876
  misc_feature (1)..(1324): Ortholog of  Ceres SEQ ID NO 14302787 as cited in SEQ ID NO 65398
aacattgttgcgaagaccagactctcagactcagactcgggagatggcagtccactactggacagccctgtttctattgttgccatgccttttctgtatttcaaatgctagtgctggcgatgctgatccagattacaggacatgtgtttcagaatgtgagataagcggttgtgttggacaactttgctttcctcagtgcaattcttcatccgatggtggtccatggtacatccaagaacctttgtatttacaatggaaaaaatggggttgtcaaggtgattgccgttatcaatgtatggttaatagagagactgaacgggaaactctcggtcaagccccagtcaagtaccatggtaaatggcccttcaagcgtgtacttgggattcaggagcctgcttctgttgctttctctgtactcaacctagcaatgcatttccatggttggctttcctttttcatcatgatctactataagttgcctctgaaacaagataggacagcgtactatgaatacgttggtttgtggcatatctacggtctcctgtccatgaactcttggttctggagtgctgttttccacagccgggatgttgaccttacagagaggttggactactcatccgcagtagcgattctcggattctcactcatcttagccattttacgaacatttgatattcgggttgaggctgcaagggtcatggtatccgctccaatactagcttttgtaaccacccacatactctacataaacttctacaaactcgactatggctggaacatgattgtgtgtgtggcaatgggagtctcacagcttttcctatgggcaagatgggccgctgtctcaagccacccttctaattggaaactttgggtggttgtgatagctggaggattagccatgcttctagagatatatgattttcctccatatgaaggctacttcgatgctcactcgatctggcacgctgccacaattcccttaaccattctctggtggagcttcattagagacgatgctgagttcagaacttccagcctcctcaagaaaactaagacgaaggcaaagtgagtctctttgctaagttttacaaggatttttatccgaccatacgagtatgcagacacgagggaaaaacaaaagatggaaatggatttaaacatcacgaagaaggcagagtcttttgtttaaagctagctggtttatggattcacaggtttcttcagttttttttattttatattgttacattaactgttgaatttgctttgagcctttcagtgtttttctttggccttacttttggttaagaaagattttgat

SEQ ID NO: 75272 - protein, 356 aa, Arabidopsis thaliana
  peptide (1)..(356): Ceres Seq. ID no. 6432457
TLLRRPDSQTQTREMAVHYWTALFLLLPCLFCISNASAGDADPDYRTCVSECEISGCVGQLCFPQCNSSSDGGPWYIQEPLYLQWKKWGCQGDCRYQCMVNRETERETLGQAPVKYHGKWPFKRVLGIQEPASVAFSVLNLAMHFHGWLSFFIMIYYKLPLKQDRTAYYEYVGLWHIYGLLSMNSWFWSAVFHSRDVDLTERLDYSSAVAILGFSLILAILRTFDIRVEAARVMVSAPILAFVTTHILYINFYKLDYGWNMIVCVAMGVSQLFLWARWAAVSSHPSNWKLWVVVIAGGLAMLLEIYDFPPYEGYFDAHSIWHAATIPLTILWWSFIRDDAEFRTSSLLKKTKTKAK

SEQ ID NO: 75273 - protein, 342 aa, Arabidopsis thaliana; identical to SEQ ID NO: 72599
  peptide (1)..(342): Ceres Seq. ID no. 6432458

SEQ ID NO: 75274 - protein, 258 aa, Arabidopsis thaliana; identical to SEQ ID NO: 72600
  peptide (1)..(258): Ceres Seq. ID no. 6432459

SEQ ID NO: 75275 - DNA, 1041 bp, Arabidopsis thaliana
  misc_feature (1)..(1041): Ceres Seq. ID no. 6432581
  misc_feature (1)..(1041): Ortholog of  Ceres SEQ ID NO 13595072 as cited in SEQ ID NO 55971
gaaccagttttaatcactctcactcacaagttagtcataaaaaaaaaaaaaacacaaaaaagtttcaatggccgcctcaacaatggctctctcctcccctgctttcgccggaaaggctgtgaacctttcccctgcggcatcagaagtccttggaagcggccgtgtgacaatgaggaagactgttgccaagccaaagggtccatcaggcagcccatggtacggatccgaccgagtcaagtacttgggtccattctctggcgagtcacccagctaccttaccggagagttccctggagactacggatgggacacagctggtctatccgctgaccccgagacattcgcaaggaaccgtgagctagaagttatccacagcaggtgggccatgctcggagccctaggctgcgtcttccctgagcttttggccaggaacggagtcaagtttggagaggcagtttggttcaaggctggttcacagatcttcagcgatggagggctcgattacttgggaaaccctagcttggttcacgctcagagcattttggccatttgggccacacaagttattttgatgggagccgttgaaggttacagagtcgcaggaaatgggccattgggagaggccgaggacttgctttaccccggtggcagtttcgacccattgggtttggctaccgacccagaggccttcgctgagttgaaggtaaaggagctcaagaacggaagattggctatgttctctatgtttggattcttcgttcaagccatcgtcactggtaagggaccgatagagaaccttgctgaccatttggccgatccagtcaacaacaacgcttgggcctttgccaccaactttgttcccggaaagtgagccaagttctatctgtttgtaatttacttttctttcaatcttttgaattcgagtgagagacaggaggagaaagagtaggtttgtgtttgtggtggatggtagagactttcagatgtaaatttgcaaagactttgtatgatttgtcattaatcaaataactcattgttctc

SEQ ID NO: 75276 - protein, 267 aa, Arabidopsis thaliana; identical to SEQ ID NO: 21212
  peptide (1)..(267): Ceres Seq. ID no. 6432582

SEQ ID NO: 75277 - protein, 262 aa, Arabidopsis thaliana; identical to SEQ ID NO: 21213
  peptide (1)..(262): Ceres Seq. ID no. 6432583

SEQ ID NO: 75278 - protein, 233 aa, Arabidopsis thaliana; identical to SEQ ID NO: 21214
  peptide (1)..(233): Ceres Seq. ID no. 6432584

SEQ ID NO: 75279 - DNA, 861 bp, Arabidopsis thaliana
  misc_feature (1)..(861): Ceres Seq. ID no. 6432640
  misc_feature (1)..(861): Ortholog of  Ceres SEQ ID NO 15177475 as cited in SEQ ID NO 0
acaaaaaaccctaacaaaaatggaatcgaaagcaatttgcttagggtttcttcctccaagacttcgattttcatctccacgtttactctctcttcctccttctcctcctgtaagtgaaatttaaccatcaaaatttcatttttttccatttcgattcttccaaaaccttatcctaaaatttgtcaatatctcctgattctataggcttcttccacatttgcgacgcgtcacaaacttgattccagacaaaccctcctttggaacaaaccgcaattgagccgagttcgtgtagcgtgttcttcttctcaatctgactcaagacctgagaagaagcaatcggataagagtaactatgctcgagctgagctgttccgtgggaaatcaggttctgtttctttcaatggtctgactcatcagctggttgaagaaagtaaactggtttcagctccgtttcaagaagagaaaggttctttcttgtgggttttggctcctgttgttttgatttcttcgttgattcttcctcagttctttctaagtggtatcattgaagctaccttcaaaaacgacactgttgctgaaattgttacttctttttgctttgagacggtgttttatgctggtcttgcgatattcctgtctgtgactgaccgagtgcagaggccgtacttagacttcagctccaagagatggggtctgatcactggactgaggggataccttacgtctgcattcctcacgatgggtttaaaagttgtagttcccgtatttgctgtttacatgacttggccagctcttggaatagatgctttgattgcagtgcttcctttcttggttggctgtgcagttcaaagagttttcgag

SEQ ID NO: 75280 - protein, 58 aa, Arabidopsis thaliana
  peptide (1)..(58): Ceres Seq. ID no. 6432641
MGSDHWTEGIPYVCIPHDGFKSCSSRICCLHDLASSWNRCFDCSASFLGWLCSSKSFR

SEQ ID NO: 75281 - protein, 40 aa, Arabidopsis thaliana
  peptide (1)..(40): Ceres Seq. ID no. 6432642
QKTLTKMESKAICLGFLPPRLRFSSPRLLSLPPSPPVSEI

SEQ ID NO: 75282 - protein, 41 aa, Arabidopsis thaliana
  peptide (1)..(41): Ceres Seq. ID no. 6432643
MGLKVVVPVFAVYMTWPALGIDALIAVLPFLVGCAVQRVFE

SEQ ID NO: 75283 - DNA, 1078 bp, Arabidopsis thaliana
  misc_feature (1)..(1078): Ceres Seq. ID no. 6432664
  misc_feature (1)..(1078): Ortholog of  Ceres SEQ ID NO 15168314 as cited in SEQ ID NO 60142
atttctaatttcatgcttattagatcgttaattgaatctgcatcccgcagtgatcattctttgatttacgaatttgtttttttgttgtgattgataatcttgttgtcgatttttgtcaattttatggtttaatttacaaagtgtatattgtgattgaatcgactgggagggtattgagagttgtttgtttgaatctaacaaattcaagtgcaaatctattttatagccacttatcttctgctagtagatctacttgagttttaagagatgtgacttctttaataccattgtgaatttcatggctaactgataaaaaggtctcagctctgatcttttgattcaacggctcccggagacgacggaagcaatgcagttcttcggtggatctgagattagtccgtcgccgccagttccgacggcgagtggaaacaacgcgcacatgatgtacgttttcaatcgtaacggtgtatgtcttctctacaaagaatggaatcggcctcttcatacacttaatcctcagcaagatcacaagctcatgtttggtcttctcttctctctcaaatctctcaccgctaagatggatccagtcaatgcggataaaggaaatcttggggttccacagttgccaggacaaggttgctctttccatagtttccgtacgaatacttacaagctaagtttcatggagactccctctggtattaagattatcttagtaactcatccaaagaccggagatttacgcgaatccttgaagtacatctacagtttatacgttgaatatgtcgtaaaaaatcctatatacagcccaggatctccaatcaagtcggagttgttcaacactgcacttgaccagtacgtaaggagcatctcttagtgtgtgcattacagatttgtccattggaacttctctccttcaacagaactatcgtctgaacaatctctgaaaagaagagagaattgtagtagagagatttatcttgagttcgactgttttctctgcaaatctatgtttcgtttaccctttttattaactccactgtattggcttgctatcaatgatgttcatggtttactc

SEQ ID NO: 75284 - protein, 169 aa, Arabidopsis thaliana; identical to SEQ ID NO: 24678
  peptide (1)..(169): Ceres Seq. ID no. 6432665

SEQ ID NO: 75285 - protein, 145 aa, Arabidopsis thaliana; identical to SEQ ID NO: 24679
  peptide (1)..(145): Ceres Seq. ID no. 6432666

SEQ ID NO: 75286 - protein, 144 aa, Arabidopsis thaliana; identical to SEQ ID NO: 24680
  peptide (1)..(144): Ceres Seq. ID no. 6432667

SEQ ID NO: 75287 - DNA, 924 bp, Arabidopsis thaliana
  misc_feature (1)..(924): Ceres Seq. ID no. 6432744
  misc_feature (1)..(924): Ortholog of  Ceres SEQ ID NO 12473977 as cited in SEQ ID NO 133
  misc_feature (1)..(924): Ortholog of  Ceres SEQ ID NO 12585294 as cited in SEQ ID NO 63023
ctcgtttggttaaaaaattaaccagaaaacgagatctgacttctaacttctacttctacttagatctcctcaaaattcaaatcggaaaaaagtttgagaaaaatctcgatgaagaagaagatgattccgacgacgatcttactctcagctctcattttctctctatcaccgatctgtgaagctgtgtggcttactgtacctcacaccggatcaaagtgcgtctccgaagaaatccaaagcaacgtcatcgttttagctgattaccttgttatctccgaggaacattctatcttccctactgtctccgttaaggttacagcaccttatggcaccgtgttacaccacagggaaaatacaacaaacggtcagtttgcattcacaacccaagaatcaggaacttacttggcgtgttttgaggccgatgctaaaagtcatggtaacaaagattttagcatcaacatcgactggaaaactggaatcgcagctaaagattgggactccattgctagaaaagaaaagatcgagggtgtagagctggagtttaagaaacttgaaggtgcagttgaagcaatccatgaaaatctgatttacctcagaaacagagaagcagagatgaggattgtgagtgaaaaaacaaactcgagagtcgcatggtacagtataatgtcgctggggatttgcattgtggtctctggtttacagattttgtacttgaagcaatactttgaaaagaagaagcttatttagatcatggatagtttcttgttgaagattactagaaccaacagtttgctctgctttctttctcttgatcttctctttggaactgttagtgtaaaattttgttcactcatttaacttgtaatttgtctcctattattacatataacatataactagactctaattataggaattgcaact

SEQ ID NO: 75288 - protein, 212 aa, Arabidopsis thaliana; identical to SEQ ID NO: 30371
  peptide (1)..(212): Ceres Seq. ID no. 6432745

SEQ ID NO: 75289 - protein, 208 aa, Arabidopsis thaliana; identical to SEQ ID NO: 30372
  peptide (1)..(208): Ceres Seq. ID no. 6432746

SEQ ID NO: 75290 - DNA, 800 bp, Arabidopsis thaliana
  misc_feature (1)..(800): Ceres Seq. ID no. 6432747
  misc_feature (1)..(800): Ortholog of  Ceres SEQ ID NO 13599545 as cited in SEQ ID NO 0
attacaagaatcattcgattctcttctatcatcatcttcttcttctccatcaaaattcaccaaaacatggaagctctaattcaccacttcactctcctctccgatcaagctcttgtcgacaaaacattcgacccttcaagaatcgaggacctcatgcgtctctttgaagtcgattcatacaaagcttgggcagctctcgaatccgaacagcaacaagaactcgaagaagctgaagaatctctccgtgaagctgaacttgaacttgatcggtaacattttcgtcttttcttgtatggaattttcatagatctggagagatctgatttttatggtttcttcagggatatggagtgggggatggaggagtataggcggacgttggaggagatggagaggatggaggcggcggagctgaaagagcttgaggagaaagcggagactgctcggagaacggggaatttaatggagaaagcggcgacagttgccgcgaaacgacatattgcggcggcgatgggatcagccgccgcgtctatgagatcagcttggaagactgcagctggaaataaggttcatccatcttgatcgatgatgatgatgatgaatatgataagatgacgatgattgtcaaagtattggtccccatgttataggattagtaggtcaagaacattttaatgaataattatttcctttgataaacatatgggttactacttactattgccgaagaattatgaattataggtagtttctagtttatgtatctgtaatttgtaatcaatatatatttatgggattat

SEQ ID NO: 75291 - protein, 90 aa, Arabidopsis thaliana; identical to SEQ ID NO: 37534
  peptide (1)..(90): Ceres Seq. ID no. 6432748

SEQ ID NO: 75292 - protein, 78 aa, Arabidopsis thaliana
  peptide (1)..(78): Ceres Seq. ID no. 6432749
MEWGMEEYRRTLEEMERMEAAELKELEEKAETARRTGNLMEKAATVAAKRHIAAAMGSAAASMRSAWKTAAGNKVHPS

SEQ ID NO: 75293 - protein, 74 aa, Arabidopsis thaliana
  peptide (1)..(74): Ceres Seq. ID no. 6432750
MEEYRRTLEEMERMEAAELKELEEKAETARRTGNLMEKAATVAAKRHIAAAMGSAAASMRSAWKTAAGNKVHPS

SEQ ID NO: 75294 - protein, 68 aa, Arabidopsis thaliana; identical to SEQ ID NO: 37535
  peptide (1)..(68): Ceres Seq. ID no. 6432751

SEQ ID NO: 75295 - DNA, 973 bp, Arabidopsis thaliana
  misc_feature (1)..(973): Ceres Seq. ID no. 6432799
  misc_feature (1)..(973): Ortholog of  Ceres SEQ ID NO 15173284 as cited in SEQ ID NO 61828
  misc_feature (1)..(973): Ortholog of  Ceres SEQ ID NO 15178906 as cited in SEQ ID NO 0
attaaataaaagctgttgtttgttgccgaagaaaaagcgagaaaactaggaaaataaaatttgaggaagaagaagccattagaggagtctcaaggtaaagatttctacacgcaactttatgtcttctctgtatgttctttatcctgtagaagagctatcagacgattaaagccctacgatacgagatcaatcgatcaccatcattcaatggaggaatcggtggcttcatcttcctcgcactatatctcaattttcacaaattaccctctgatttccgccgttttagctttcaccatcgcacaattcatcaaattcttcacctcctggtataaagaaaggagatgggatttgaaacggcttgttgggtctggaggtatgccttcatcacattcagcaacggttacagctttagctttagctgttggtttacaagaaggttttggtggttcacatttcgctatcgctttggttctcactaccattgttatgtatgatgcaactggtgtaaggttacatgctggacgccaagctgaggttctaaatcagattgtgtatgaacttcctgcagagcatcctctggctgaaaccagacctttgcgtgaacttctaggtcatactcctccccaggttattgctggtggaatgcttggaatatctacagcagttgttgggtacttagtcatcttgttagccaagtagcttaagctgggaacagcaaaatctcgccttttctgctccattgtgtgtcaaggcgctgctaggtagtttaaagatagccatgacatgcaaatagaatttggaaattgagcttaatttctctgttttttttgctgctctgttcttgtcattgacaatatattttagttaggtttgctctagtaaaggaaacttgaaacgtcattacacagatctgtaaagtggtaaaatgggagcttgtgcattgaactacaacgaacatgatctgtttagattc

SEQ ID NO: 75296 - protein, 163 aa, Arabidopsis thaliana; identical to SEQ ID NO: 21011
  peptide (1)..(163): Ceres Seq. ID no. 6432800

SEQ ID NO: 75297 - protein, 107 aa, Arabidopsis thaliana; identical to SEQ ID NO: 21012
  peptide (1)..(107): Ceres Seq. ID no. 6432801

SEQ ID NO: 75298 - DNA, 721 bp, Arabidopsis thaliana
  misc_feature (1)..(721): Ceres Seq. ID no. 6432812
  misc_feature (1)..(721): Ortholog of  Ceres SEQ ID NO 13585373 as cited in SEQ ID NO 63789
acgtcatcattctgacttttctcaaagaagagaaatcaaatcaccaagtcatcggagcgatcacagagaagaagaaaaccatggcggaagaagagaaaagcgtgatgaagcaagtgatggtggcgattgatgaaagcgaatgtagtaaacgcgctcttcaatggacgctcgtgtatctcaaagatagcctcgccgattccgacatcatcctcttcactgctcaacctcatcttgatctcagctgcgtctatgcttcctcttatggcgccgctccgattgagcttataaactcattgcaagagagtcataagaacgctggattgaatcgtcttgatgaaggaaccaaaatttgtgctgagactggggttactccaagaaaggtgttggaatttggaaatcctaaagaagcgatatgtgaagctgctgagaagcttggtgttgatatgcttgtggttggaagccatggtaaaggagcattacaaaggactttccttggaagtgttagcaattactgtgttaacaatgctaagtgcccagttcttgtggtgagaacaaaagcttgaagacctcttctcatgaaagagttcgagaaccctggcttgatgtgtgtgtgttgtaaacatattgataataatgctctgcttggttactattgtttgaagaaactttgtgagtaaacataatttattttgtttgataatgaaagagcattgccgtgttc

SEQ ID NO: 75299 - protein, 186 aa, Arabidopsis thaliana
  peptide (1)..(186): Ceres Seq. ID no. 6432813
VIILTFLKEEKSNHQVIGAITEKKKTMAEEEKSVMKQVMVAIDESECSKRALQWTLVYLKDSLADSDIILFTAQPHLDLSCVYASSYGAAPIELINSLQESHKNAGLNRLDEGTKICAETGVTPRKVLEFGNPKEAICEAAEKLGVDMLVVGSHGKGALQRTFLGSVSNYCVNNAKCPVLVVRTKA

SEQ ID NO: 75300 - protein, 160 aa, Arabidopsis thaliana; identical to SEQ ID NO: 36288
  peptide (1)..(160): Ceres Seq. ID no. 6432814

SEQ ID NO: 75301 - protein, 152 aa, Arabidopsis thaliana; identical to SEQ ID NO: 36289
  peptide (1)..(152): Ceres Seq. ID no. 6432815

SEQ ID NO: 75302 - DNA, 770 bp, Arabidopsis thaliana
  misc_feature (1)..(770): Ceres Seq. ID no. 6432835
  misc_feature (1)..(770): Ortholog of  Ceres SEQ ID NO 15175178 as cited in SEQ ID NO 0
atttctgataatttcacctttactaaaaagagaactcacatcaaaaaaacagtccatcattcacatgatccagatgagcatcattattaattatcttgtcacgaatgatcactaatgtttttgactattctttgcagctctagtggcactcctaccacaggaacaccaactactgggacaccaaccagtgggaccccgactaccggaactccgaccaccggaacccccaccactggaactccaaccagtgggactccaactagtggcttcccaaataccgggactccaaacacagggactaacactgggatgccaaattccaacgggatgccaacttcatcgtcatcttcggtgttcccggggactactcttggcccgactgggagcgggggactaggcgatccaaatgctggagagaagctgtctgttcgaactaacacagtggtcttcttattaaccggtgtagcagcaatgcttgtcatatgagggcttagaagtcacacgcggttatggttgtaattgagttgctgagagatcagatcttgccaacggctcatggttgatagagtcatcttttttttcactcgtctttctaggatttggacttaggttggccgagagacgtaatgctggtagtagctagtattttgggttatgtacaactttaactaagagctttacttttgtaaatccggaggatgagatgctcttttgtttcttatattctttttaatccgtttacttggatctttcatcttttaatacgtacc

SEQ ID NO: 75303 - protein, 123 aa, Arabidopsis thaliana
  peptide (1)..(123): Ceres Seq. ID no. 6432836
MFLTILCSSSGTPTTGTPTTGTPTSGTPTTGTPTTGTPTTGTPTSGTPTSGFPNTGTPNTGTNTGMPNSNGMPTSSSSSVFPGTTLGPTGSGGLGDPNAGEKLSVRTNTVVFLLTGVAAMLVI

SEQ ID NO: 75304 - DNA, 1483 bp, Arabidopsis thaliana
  misc_feature (1)..(1483): Ceres Seq. ID no. 6432942
  misc_feature (1)..(1483): Ortholog of  Ceres SEQ ID NO 13595916 as cited in SEQ ID NO 69273
tctgttttaggtttttgtcaacgatcccttttgcattaggttcaggtctcgatcgaattgatttgaaatgggttcgtttgggatgctttcgaggagaacgttgggcactgatatgcccgtcatggctcagattcggagtttgatggcggaattgacgaaccccatgtctctcgcccagggagtggtgcattggcagcctcctcaaaaggccttagagaaggtcaaggagcttgtctgggatcctatcattagttcttatggccccgatgaaggtcttcccgagttgagacaggctcttctcaaaaagctgcgtgaagaaaacaagctaaccaattcacaagtgatggttactgcaggtgccaatcaggcgtttgtgaaccttgttattacattatgtgatgctggtgattcggttgtcatgtttgagccatactacttcaactcctacatggcctttcagatgacaggagtcaccaacataattgttggtcctggccagtcagacactctctatcctgacgctgactggttagagaggacactgtctgagtctaaaccgactccgaaagttgtaactgttgtgaatcctggtaacccaagtggcacctatgtccctgaaccgctgcttaagaggattgctcaaatatgcaaagatgcagggtgctggctgattgtagataacacatacgagtatttcatgtatgacggtttaaaacattgttgcgttgagggagaccacattgttaatgtcttctctttctctaaaacctatggcatgatgggttggaggcttggatatatagcttactcagagagattagatgggtttgcaacagagcttgtgaaaattcaggacaacatcccaatctgtgctgccataatctcgcagcgactggctgtatacgcattagaggaaggttctgggtggataacggaacgggtaaagagtctagtgaagaacagggatattgtgaaagaggcgcttgagccgctggggaaggagaacgttaagggaggagaaggagcgatatacctgtgggcaaaactgccagagggacacagagatgatttcaaggtggtgcggtggctggctcaccgccatggtgtggtggtgatcccggggtgtgcaagtggtagccccgggtatctccgggtttcctttggagggttgcaggaggttgaaatgagagctgcagcggcgaggctgaggaaaggaatagaggagctgcttcaccatggaatggtggagtgagacgttgtttaaagaagggtcaaaagatggttactttgcgtttggttgaagctatatagttgttttaaaaagaaataaaagagtgtttgtttattcaataatcaatatagctgattcttctttacaaagtcattgtatttgggatgttgttaccaatggttgaatccttaacccctttggtgtatgtatatactctttacttattcaaatgaataatccagcaatgaatgc

SEQ ID NO: 75305 - protein, 394 aa, Arabidopsis thaliana
  peptide (1)..(394): Ceres Seq. ID no. 6432943
MGSFGMLSRRTLGTDMPVMAQIRSLMAELTNPMSLAQGVVHWQPPQKALEKVKELVWDPIISSYGPDEGLPELRQALLKKLREENKLTNSQVMVTAGANQAFVNLVITLCDAGDSVVMFEPYYFNSYMAFQMTGVTNIIVGPGQSDTLYPDADWLERTLSESKPTPKVVTVVNPGNPSGTYVPEPLLKRIAQICKDAGCWLIVDNTYEYFMYDGLKHCCVEGDHIVNVFSFSKTYGMMGWRLGYIAYSERLDGFATELVKIQDNIPICAAIISQRLAVYALEEGSGWITERVKSLVKNRDIVKEALEPLGKENVKGGEGAIYLWAKLPEGHRDDFKVVRWLAHRHGVVVIPGCASGSPGYLRVSFGGLQEVEMRAAAARLRKGIEELLHHGMVE

SEQ ID NO: 75306 - protein, 389 aa, Arabidopsis thaliana
  peptide (1)..(389): Ceres Seq. ID no. 6432944
MLSRRTLGTDMPVMAQIRSLMAELTNPMSLAQGVVHWQPPQKALEKVKELVWDPIISSYGPDEGLPELRQALLKKLREENKLTNSQVMVTAGANQAFVNLVITLCDAGDSVVMFEPYYFNSYMAFQMTGVTNIIVGPGQSDTLYPDADWLERTLSESKPTPKVVTVVNPGNPSGTYVPEPLLKRIAQICKDAGCWLIVDNTYEYFMYDGLKHCCVEGDHIVNVFSFSKTYGMMGWRLGYIAYSERLDGFATELVKIQDNIPICAAIISQRLAVYALEEGSGWITERVKSLVKNRDIVKEALEPLGKENVKGGEGAIYLWAKLPEGHRDDFKVVRWLAHRHGVVVIPGCASGSPGYLRVSFGGLQEVEMRAAAARLRKGIEELLHHGMVE

SEQ ID NO: 75307 - protein, 379 aa, Arabidopsis thaliana
  peptide (1)..(379): Ceres Seq. ID no. 6432945
MPVMAQIRSLMAELTNPMSLAQGVVHWQPPQKALEKVKELVWDPIISSYGPDEGLPELRQALLKKLREENKLTNSQVMVTAGANQAFVNLVITLCDAGDSVVMFEPYYFNSYMAFQMTGVTNIIVGPGQSDTLYPDADWLERTLSESKPTPKVVTVVNPGNPSGTYVPEPLLKRIAQICKDAGCWLIVDNTYEYFMYDGLKHCCVEGDHIVNVFSFSKTYGMMGWRLGYIAYSERLDGFATELVKIQDNIPICAAIISQRLAVYALEEGSGWITERVKSLVKNRDIVKEALEPLGKENVKGGEGAIYLWAKLPEGHRDDFKVVRWLAHRHGVVVIPGCASGSPGYLRVSFGGLQEVEMRAAAARLRKGIEELLHHGMVE

SEQ ID NO: 75308 - DNA, 495 bp, Arabidopsis thaliana
  misc_feature (1)..(495): Ceres Seq. ID no. 6433016
  misc_feature (1)..(495): Ortholog of  Ceres SEQ ID NO 15224680 as cited in SEQ ID NO 59829
  misc_feature (1)..(495): Ortholog of  Ceres SEQ ID NO 13594273 as cited in SEQ ID NO 60013
atgttcgatttcctgtcggtaactttgcacacgaacctgggtgacatcaagtgcgaaatcttctgtgacgaggttcccaagagtgctgagaactttttggcgttgtgtgctagtggctactacgatggtactatctttcatagaaatatcaaagggttcatgattcaaggaggagaccccaaggggaccggaaaaggaggaactagcatctggggcaagaaattcaatgatgagatccgagactcccttaagcacaatgcaagagggatgctgtcaatggcaaacagcggtccaaacaccaacggaagccagttcttcataacctatgcaaaacaaccacatctcaatggattatacaccatctttggcaaagtcattcatggcttcgaagtgcttgacattatggaaaagactcaaacaggaccaggagataggccgcttgctgagataaggctaaaccgtgtgacgatccacgccaatccacttgctggttaa

SEQ ID NO: 75309 - protein, 164 aa, Arabidopsis thaliana
  peptide (1)..(164): Ceres Seq. ID no. 6433017
MFDFLSVTLHTNLGDIKCEIFCDEVPKSAENFLALCASGYYDGTIFHRNIKGFMIQGGDPKGTGKGGTSIWGKKFNDEIRDSLKHNARGMLSMANSGPNTNGSQFFITYAKQPHLNGLYTIFGKVIHGFEVLDIMEKTQTGPGDRPLAEIRLNRVTIHANPLAG

SEQ ID NO: 75310 - protein, 111 aa, Arabidopsis thaliana; identical to SEQ ID NO: 20914
  peptide (1)..(111): Ceres Seq. ID no. 6433018

SEQ ID NO: 75311 - DNA, 666 bp, Arabidopsis thaliana
  misc_feature (1)..(666): Ceres Seq. ID no. 6433068
  misc_feature (1)..(666): Ortholog of  Ceres SEQ ID NO 13594918 as cited in SEQ ID NO 55747
  misc_feature (1)..(666): Ortholog of  Ceres SEQ ID NO 12587066 as cited in SEQ ID NO 63204
atgggagatgtagttttgttcatagatgaaacatatttgaaatcgagttttaatcgctgtagaatctgtcacgaagaagaagctgagagctactttgaagctccttgttcttgttcaggaaccatcaagttcgctcacagagattgcatacaacgatggtgtgatgagaaaggaaacacaatttgtgaaatttgtctccaggagtataaacctggatacaccacaacttcaaaaccatctcgatttattgaaacagcagtcacaatcagagataatttacacataatgagaagagaaaatggaagaagaagaagaaatagaagattagtgaatagagaagaatcagattttcaagaatgcaactctggtgttgatagaggcgcctcttgttgtagatacttggctctcattttttcggttattttgttgataaagcatgcatttgatgcggtttatggaactgaagagtatccctatacaatattcacggtcttaacattgaaggctataggcatactattaccaatgctcgttatcattcgaaccatcacagctattcaaaggagtctccgatatcaaattctcgaatcagaagaagatacattgagctctgaagaagaagatcatggtttggaggaggaagagcaacaacaacatatagcttga

SEQ ID NO: 75312 - protein, 221 aa, Arabidopsis thaliana
  peptide (1)..(221): Ceres Seq. ID no. 6433069
MGDVVLFIDETYLKSSFNRCRICHEEEAESYFEAPCSCSGTIKFAHRDCIQRWCDEKGNTICEICLQEYKPGYTTTSKPSRFIETAVTIRDNLHIMRRENGRRRRNRRLVNREESDFQECNSGVDRGASCCRYLALIFSVILLIKHAFDAVYGTEEYPYTIFTVLTLKAIGILLPMLVIIRTITAIQRSLRYQILESEEDTLSSEEEDHGLEEEEQQQHIA

SEQ ID NO: 75313 - protein, 126 aa, Arabidopsis thaliana
  peptide (1)..(126): Ceres Seq. ID no. 6433070
MRRENGRRRRNRRLVNREESDFQECNSGVDRGASCCRYLALIFSVILLIKHAFDAVYGTEEYPYTIFTVLTLKAIGILLPMLVIIRTITAIQRSLRYQILESEEDTLSSEEEDHGLEEEEQQQHIA

SEQ ID NO: 75314 - DNA, 2277 bp, Arabidopsis thaliana
  misc_feature (1)..(2277): Ceres Seq. ID no. 6433176
  misc_feature (1)..(2277): Ortholog of  Ceres SEQ ID NO 14310097 as cited in SEQ ID NO 20591
atggaagcaacggcggaggaatcagttagtactcttgttacgacgatggttgatgagacgtatgagttcttagcgcctcgatggtttgatttcgttaatggagagactgaagatgagtctcgccgagcagaactctggtttcaatcggccttaagctgcgctccttctccttcggttcctagaatcaaagcaaggagatcgttcaaggtagaggccatgtgcaacttcaatgaagctgaagaagagacgctcaaggataaagagccgttagaaccagtagttccaattgtttctttacaatcgcagccttctcaggccaagaaagcagaagttgctccttctaaagcaagcactgttaagccgtctcgcatcagttccaaggacgcagaggtcaacaacaagaccgtagatgccagcgatccgacgactgagccaatagaagacaaggagaacattgctcctgcttgcacacccaaaccaccaatgcagttttctctaggggcaaagtcggtggatcttaagaagcagcaaactgctagaaagatagctagtctgctgaagaatccatctacactaaggcctaaaaaccagtctcaagccaaaggcagtcatcagaaaagtgtgaaaggggaaacgaatcttaacaacatagctagcactaccaatctgattcaagaaaatcaagccatcaaaaggcaaaagctagatgatggaaaatcaagacagattctcaatccaaaaccagcaactctgctccacaagacaagaaatggtcttgttaacactggtttcaacttatgcccttcagtcactaagcacactccgaaggaaaacagaaaggtttatgttcgtgagcaaattgcaccttttgtttcaactgctgaattgatgaagaagttccaaacaagcacgcgagacctattcgtccagaatcgacctaagctgacactgacaagaccaaaggaacccgaatttgtgacgtcccaacgagctcgtcctttgagagttaagagcagtgcagaacttgaggaagagatgttggcaaagattcccaagtttaaagctcgacctgtgaacaagaagattttggcagctccagctttgcctgcacctcaaagaagtacaccacatctgccagaatttcaggaatttcatcttcaaacaatggcaagggctaaccagcatgcagagacatcttcaatagcttcaacagaagtgtctaagcagcataatgatcagaagcatcaccttactgaaccaaagagccctgtgctccaaacaatgctaagagctcgtcctactatagcaaaaactactgcagaacttgagcaagaggaactggagaaggcaccaaagttcaaagcaaaacctttgaacaaaaagatatttgaaagtaaaggagaaatgggtatcttttgcaacaccaagaagcacataacgatacctcaagagtttcactttgcgacagatgagaggatatcacgaccagaatctgtcttagatatattcgacaagctctcactgaactccgaatcttgccatgaaaaacctctaccaaggaacactgctccaaaccccttcaatcttaagacagaagaaagaggcgctgagaaagagaagaaattttatatggaactcatgtataagaaattaggagatgtaaaggcaagagttccaaaggcaaatccatatccttacacgacggactatccagtggtaccaccaaaaccagaacctaagcaatgcacacaaccagaaccgttccagttagagagtctagtaaggcacgaagaggaaatgcgaagagaaagggaagagaggaggagaatggagacagaagaagcccagaagaggctcttcaaagcacaaccagttataaaagaggacccaatccctgttccagagaaagtacgaatgcccctcacagaaattcaggagttcaatcttcatgtagagcatcgagctgttgaacgagcagattttgatcacaaaatcaaagagaaggagaaccagtacaaaagataccgtgaagagagtgaagctgcaaaaatggtggaggaagagagagctctgaagcaaatgagaaagacaatggttcctcatgccagacctgtgcctaacttcaacaaacccttcttacctcagaagtccaacaaggggaccacaaaagcaaaatcacccaatcttagagtgattaaaagaaccgagagaagaaccatgatggctcgaccaaccatctctgcagctactagcgcctctgctggtcagatgagatag

SEQ ID NO: 75315 - protein, 758 aa, Arabidopsis thaliana
  peptide (1)..(758): Ceres Seq. ID no. 6433177
MEATAEESVSTLVTTMVDETYEFLAPRWFDFVNGETEDESRRAELWFQSALSCAPSPSVPRIKARRSFKVEAMCNFNEAEEETLKDKEPLEPVVPIVSLQSQPSQAKKAEVAPSKASTVKPSRISSKDAEVNNKTVDASDPTTEPIEDKENIAPACTPKPPMQFSLGAKSVDLKKQQTARKIASLLKNPSTLRPKNQSQAKGSHQKSVKGETNLNNIASTTNLIQENQAIKRQKLDDGKSRQILNPKPATLLHKTRNGLVNTGFNLCPSVTKHTPKENRKVYVREQIAPFVSTAELMKKFQTSTRDLFVQNRPKLTLTRPKEPEFVTSQRARPLRVKSSAELEEEMLAKIPKFKARPVNKKILAAPALPAPQRSTPHLPEFQEFHLQTMARANQHAETSSIASTEVSKQHNDQKHHLTEPKSPVLQTMLRARPTIAKTTAELEQEELEKAPKFKAKPLNKKIFESKGEMGIFCNTKKHITIPQEFHFATDERISRPESVLDIFDKLSLNSESCHEKPLPRNTAPNPFNLKTEERGAEKEKKFYMELMYKKLGDVKARVPKANPYPYTTDYPVVPPKPEPKQCTQPEPFQLESLVRHEEEMRREREERRRMETEEAQKRLFKAQPVIKEDPIPVPEKVRMPLTEIQEFNLHVEHRAVERADFDHKIKEKENQYKRYREESEAAKMVEEERALKQMRKTMVPHARPVPNFNKPFLPQKSNKGTTKAKSPNLRVIKRTERRTMMARPTISAATSASAGQMR

SEQ ID NO: 75316 - protein, 743 aa, Arabidopsis thaliana
  peptide (1)..(743): Ceres Seq. ID no. 6433178
MVDETYEFLAPRWFDFVNGETEDESRRAELWFQSALSCAPSPSVPRIKARRSFKVEAMCNFNEAEEETLKDKEPLEPVVPIVSLQSQPSQAKKAEVAPSKASTVKPSRISSKDAEVNNKTVDASDPTTEPIEDKENIAPACTPKPPMQFSLGAKSVDLKKQQTARKIASLLKNPSTLRPKNQSQAKGSHQKSVKGETNLNNIASTTNLIQENQAIKRQKLDDGKSRQILNPKPATLLHKTRNGLVNTGFNLCPSVTKHTPKENRKVYVREQIAPFVSTAELMKKFQTSTRDLFVQNRPKLTLTRPKEPEFVTSQRARPLRVKSSAELEEEMLAKIPKFKARPVNKKILAAPALPAPQRSTPHLPEFQEFHLQTMARANQHAETSSIASTEVSKQHNDQKHHLTEPKSPVLQTMLRARPTIAKTTAELEQEELEKAPKFKAKPLNKKIFESKGEMGIFCNTKKHITIPQEFHFATDERISRPESVLDIFDKLSLNSESCHEKPLPRNTAPNPFNLKTEERGAEKEKKFYMELMYKKLGDVKARVPKANPYPYTTDYPVVPPKPEPKQCTQPEPFQLESLVRHEEEMRREREERRRMETEEAQKRLFKAQPVIKEDPIPVPEKVRMPLTEIQEFNLHVEHRAVERADFDHKIKEKENQYKRYREESEAAKMVEEERALKQMRKTMVPHARPVPNFNKPFLPQKSNKGTTKAKSPNLRVIKRTERRTMMARPTISAATSASAGQMR

SEQ ID NO: 75317 - protein, 686 aa, Arabidopsis thaliana
  peptide (1)..(686): Ceres Seq. ID no. 6433179
MCNFNEAEEETLKDKEPLEPVVPIVSLQSQPSQAKKAEVAPSKASTVKPSRISSKDAEVNNKTVDASDPTTEPIEDKENIAPACTPKPPMQFSLGAKSVDLKKQQTARKIASLLKNPSTLRPKNQSQAKGSHQKSVKGETNLNNIASTTNLIQENQAIKRQKLDDGKSRQILNPKPATLLHKTRNGLVNTGFNLCPSVTKHTPKENRKVYVREQIAPFVSTAELMKKFQTSTRDLFVQNRPKLTLTRPKEPEFVTSQRARPLRVKSSAELEEEMLAKIPKFKARPVNKKILAAPALPAPQRSTPHLPEFQEFHLQTMARANQHAETSSIASTEVSKQHNDQKHHLTEPKSPVLQTMLRARPTIAKTTAELEQEELEKAPKFKAKPLNKKIFESKGEMGIFCNTKKHITIPQEFHFATDERISRPESVLDIFDKLSLNSESCHEKPLPRNTAPNPFNLKTEERGAEKEKKFYMELMYKKLGDVKARVPKANPYPYTTDYPVVPPKPEPKQCTQPEPFQLESLVRHEEEMRREREERRRMETEEAQKRLFKAQPVIKEDPIPVPEKVRMPLTEIQEFNLHVEHRAVERADFDHKIKEKENQYKRYREESEAAKMVEEERALKQMRKTMVPHARPVPNFNKPFLPQKSNKGTTKAKSPNLRVIKRTERRTMMARPTISAATSASAGQMR

SEQ ID NO: 75318 - DNA, 1575 bp, Arabidopsis thaliana
  misc_feature (1)..(1575): Ceres Seq. ID no. 6433287
  misc_feature (1)..(1575): Ortholog of  Ceres SEQ ID NO 13597407 as cited in SEQ ID NO 64106
atgtgggtgacgaataccgtacttctatatcgacccaattctatgaaccgattaaccttttcttacccgacccgactcgcccactctcgtaaagcctcttccttttcccgtttctttcggtcttcaaagaggaagaagcgggttacgacattgtcgacgaagaaaccagatgacgatcacgagatatcgccagttccgccggagaaattctccgctgatttgggatggttatcggcttttcctcatgtatcagttgcttctatggccaattttctctttggttatcacattggagtgatgaatggccccatcgtgtctattgcgcgtgaacttgggtttgaaggcaattctattcttgagggtcttgttgtgagcatatttattgccggtgcatttattggtagcatagtcgccggtccactagttgacaagtttggctaccgacgcacctttcagattttcacgatacccctcattcttggtgcccttgtgagtgcacaagctcactccttggatgagatcttatgtggaagatttcttgttggtcttggtattggcgtcaacacagttcttgttccaatatatatatccgaggttgctccgacgaaatacagaggttcccttggaactttatgtcaaattggcacttgtctcgggataatcttttctcttctcttagggattcctgcagaagatgaccctcattggtggaggacaatgctctatgtagcgagtatgcctggttttcttcttgcacttggtatgcaatttgcagtagaaagtccccgttggctctgtaaggttggacgacttgatgatgccaaagtagtgataagaaacatctggggaggatctgaagtcgagaaagctgtagaagattttcagtcggttatgaagaatagtggctccaacttaaatagcagatggctggaactccttgataaaccacattcacgagttgcattcattgggggctccctttttgtcctacagcaattcgcgggcataaatggcgttctttatttctcatctttaacattccaaaatgttggaatcacgagtggtgctcaagcaagtctatatgttggagtcacaaattttgcaggtgctctgtgtgcgtcttatttgattgataagcaaggaagaaagaagcttcttatcggtagctacttgggaatggcagtctctatgtttcttattgtttatgctgttggtttccccttggatgaagatctgagccagagtttgtcaatacttggaacactcatgtatatattcagttttgcaattggagctggtcctgtaacaggtctcatcatccctgagctaagcagcaacagaacgcgtggaaaaatcatgggtttcagcttctctgtacattgggtctccaacttcttggttggtttgttcttcctggatctggtggagaaatacggggttggaacggtctatgccagctttggctcagtatcattgttggcagcggcattctcacacctcttcacggtggaaacaaagggtcgatcactagaagagatcgaactgtctttgaactccagagacgacctgagttaa

SEQ ID NO: 75319 - protein, 524 aa, Arabidopsis thaliana
  peptide (1)..(524): Ceres Seq. ID no. 6433288
MWVTNTVLLYRPNSMNRLTFSYPTRLAHSRKASSFSRFFRSSKRKKRVTTLSTKKPDDDHEISPVPPEKFSADLGWLSAFPHVSVASMANFLFGYHIGVMNGPIVSIARELGFEGNSILEGLVVSIFIAGAFIGSIVAGPLVDKFGYRRTFQIFTIPLILGALVSAQAHSLDEILCGRFLVGLGIGVNTVLVPIYISEVAPTKYRGSLGTLCQIGTCLGIIFSLLLGIPAEDDPHWWRTMLYVASMPGFLLALGMQFAVESPRWLCKVGRLDDAKVVIRNIWGGSEVEKAVEDFQSVMKNSGSNLNSRWLELLDKPHSRVAFIGGSLFVLQQFAGINGVLYFSSLTFQNVGITSGAQASLYVGVTNFAGALCASYLIDKQGRKKLLIGSYLGMAVSMFLIVYAVGFPLDEDLSQSLSILGTLMYIFSFAIGAGPVTGLIIPELSSNRTRGKIMGFSFSVHWVSNFLVGLFFLDLVEKYGVGTVYASFGSVSLLAAAFSHLFTVETKGRSLEEIELSLNSRDDLS

SEQ ID NO: 75320 - protein, 510 aa, Arabidopsis thaliana
  peptide (1)..(510): Ceres Seq. ID no. 6433289
MNRLTFSYPTRLAHSRKASSFSRFFRSSKRKKRVTTLSTKKPDDDHEISPVPPEKFSADLGWLSAFPHVSVASMANFLFGYHIGVMNGPIVSIARELGFEGNSILEGLVVSIFIAGAFIGSIVAGPLVDKFGYRRTFQIFTIPLILGALVSAQAHSLDEILCGRFLVGLGIGVNTVLVPIYISEVAPTKYRGSLGTLCQIGTCLGIIFSLLLGIPAEDDPHWWRTMLYVASMPGFLLALGMQFAVESPRWLCKVGRLDDAKVVIRNIWGGSEVEKAVEDFQSVMKNSGSNLNSRWLELLDKPHSRVAFIGGSLFVLQQFAGINGVLYFSSLTFQNVGITSGAQASLYVGVTNFAGALCASYLIDKQGRKKLLIGSYLGMAVSMFLIVYAVGFPLDEDLSQSLSILGTLMYIFSFAIGAGPVTGLIIPELSSNRTRGKIMGFSFSVHWVSNFLVGLFFLDLVEKYGVGTVYASFGSVSLLAAAFSHLFTVETKGRSLEEIELSLNSRDDLS

SEQ ID NO: 75321 - protein, 437 aa, Arabidopsis thaliana
  peptide (1)..(437): Ceres Seq. ID no. 6433290
MANFLFGYHIGVMNGPIVSIARELGFEGNSILEGLVVSIFIAGAFIGSIVAGPLVDKFGYRRTFQIFTIPLILGALVSAQAHSLDEILCGRFLVGLGIGVNTVLVPIYISEVAPTKYRGSLGTLCQIGTCLGIIFSLLLGIPAEDDPHWWRTMLYVASMPGFLLALGMQFAVESPRWLCKVGRLDDAKVVIRNIWGGSEVEKAVEDFQSVMKNSGSNLNSRWLELLDKPHSRVAFIGGSLFVLQQFAGINGVLYFSSLTFQNVGITSGAQASLYVGVTNFAGALCASYLIDKQGRKKLLIGSYLGMAVSMFLIVYAVGFPLDEDLSQSLSILGTLMYIFSFAIGAGPVTGLIIPELSSNRTRGKIMGFSFSVHWVSNFLVGLFFLDLVEKYGVGTVYASFGSVSLLAAAFSHLFTVETKGRSLEEIELSLNSRDDLS

SEQ ID NO: 75322 - DNA, 1476 bp, Arabidopsis thaliana
  misc_feature (1)..(1476): Ceres Seq. ID no. 6433291
  misc_feature (1)..(1476): Ortholog of  Ceres SEQ ID NO 13504578 as cited in SEQ ID NO 59850
atgtgtcttccatttcgacccgtctcgaaaacatattattcgtcttcttcttcgactatcgtgacgcgtatggtaaactgcatactactttttgtattcattttgttggtctacctcctcatctcggcctcaagacttcaatctaaaaactctattcatgcatacttctcatcttctgatcaagatcaatctcagagcccgacaaaaatcgagcacatcgtctttgggataggctcaagcgcgatctcgtggcgtgcacgtagagaatacgttaagctttggtgggatgctcagaaaatgagaggctgcgtctttgttgagcgtcccttgccgtcttctcaaaaccacacagattcatatctccttcctccggtttgtgtttcccaagatacttcccggttcaggtacacttggagaggcggtgacagaaacgcgatccgaatcgcgcggtgcgttctagaaactgtcaggctattcaacacctcctcagaagaagtaagatggtacgtatttggagacgacgacacgattttcattcctgaaaacctcgctcgaactctctccaaatacgaccacacatcatggtattacataggatcaacctcggagatttatcaccagaactctatgttcggacacgacatggcgttcgggggtggtgggtacgctttaagcagctcattggctaatgttttagctagaaatttcgattcttgtatcgaacgatatccacatttgtacggaggagactctagggtttatgcttgtgtgcttgagcttggggttggattgtctaaagagcctggcttccatcagtttgatgtgagaggaaatgcattgggaatattgacatcacattcaacgagaccgttggtgtcactacaccacatggctcacattgacccaatctttccaaactcaaccactttctccgcggtccgccaccttttctccgccgtacaactcgaccctctccgtatttttcaactatccgtttgctacgaccgttggtactcttggaccatctccgtctcttggggatatactgttcagattgatggcaggcatttgtttctacgggatgttttgcgggcacaagagacgttccgaccatggcaaaaatcaggcggattagcaagtgtttacacattcaacacaagagagattcatcgtgatccttgccaacgacctgtcactttctacatgcaacatgtttcttctagtagccatgatggaaccattaaaagtgtttataagcaagcttacgagaattgcacctacgatcctgttacatcgcctcgcaaaattcatgagattagagtgttttcaagaagactcgatcccaatatcagacaattgaaggctcccagaaggcagtgttgtgatatattaccaacttcttcaactggtggcaacataatggaaattggactgcgagagtgcaaagaggatgagctcatctatattcatccctaa

SEQ ID NO: 75323 - protein, 491 aa, Arabidopsis thaliana
  peptide (1)..(491): Ceres Seq. ID no. 6433292
MCLPFRPVSKTYYSSSSSTIVTRMVNCILLFVFILLVYLLISASRLQSKNSIHAYFSSSDQDQSQSPTKIEHIVFGIGSSAISWRARREYVKLWWDAQKMRGCVFVERPLPSSQNHTDSYLLPPVCVSQDTSRFRYTWRGGDRNAIRIARCVLETVRLFNTSSEEVRWYVFGDDDTIFIPENLARTLSKYDHTSWYYIGSTSEIYHQNSMFGHDMAFGGGGYALSSSLANVLARNFDSCIERYPHLYGGDSRVYACVLELGVGLSKEPGFHQFDVRGNALGILTSHSTRPLVSLHHMAHIDPIFPNSTTFSAVRHLFSAVQLDPLRIFQLSVCYDRWYSWTISVSWGYTVQIDGRHLFLRDVLRAQETFRPWQKSGGLASVYTFNTREIHRDPCQRPVTFYMQHVSSSSHDGTIKSVYKQAYENCTYDPVTSPRKIHEIRVFSRRLDPNIRQLKAPRRQCCDILPTSSTGGNIMEIGLRECKEDELIYIHP

SEQ ID NO: 75324 - protein, 468 aa, Arabidopsis thaliana
  peptide (1)..(468): Ceres Seq. ID no. 6433293
MVNCILLFVFILLVYLLISASRLQSKNSIHAYFSSSDQDQSQSPTKIEHIVFGIGSSAISWRARREYVKLWWDAQKMRGCVFVERPLPSSQNHTDSYLLPPVCVSQDTSRFRYTWRGGDRNAIRIARCVLETVRLFNTSSEEVRWYVFGDDDTIFIPENLARTLSKYDHTSWYYIGSTSEIYHQNSMFGHDMAFGGGGYALSSSLANVLARNFDSCIERYPHLYGGDSRVYACVLELGVGLSKEPGFHQFDVRGNALGILTSHSTRPLVSLHHMAHIDPIFPNSTTFSAVRHLFSAVQLDPLRIFQLSVCYDRWYSWTISVSWGYTVQIDGRHLFLRDVLRAQETFRPWQKSGGLASVYTFNTREIHRDPCQRPVTFYMQHVSSSSHDGTIKSVYKQAYENCTYDPVTSPRKIHEIRVFSRRLDPNIRQLKAPRRQCCDILPTSSTGGNIMEIGLRECKEDELIYIHP

SEQ ID NO: 75325 - protein, 392 aa, Arabidopsis thaliana
  peptide (1)..(392): Ceres Seq. ID no. 6433294
MRGCVFVERPLPSSQNHTDSYLLPPVCVSQDTSRFRYTWRGGDRNAIRIARCVLETVRLFNTSSEEVRWYVFGDDDTIFIPENLARTLSKYDHTSWYYIGSTSEIYHQNSMFGHDMAFGGGGYALSSSLANVLARNFDSCIERYPHLYGGDSRVYACVLELGVGLSKEPGFHQFDVRGNALGILTSHSTRPLVSLHHMAHIDPIFPNSTTFSAVRHLFSAVQLDPLRIFQLSVCYDRWYSWTISVSWGYTVQIDGRHLFLRDVLRAQETFRPWQKSGGLASVYTFNTREIHRDPCQRPVTFYMQHVSSSSHDGTIKSVYKQAYENCTYDPVTSPRKIHEIRVFSRRLDPNIRQLKAPRRQCCDILPTSSTGGNIMEIGLRECKEDELIYIHP

SEQ ID NO: 75326 - DNA, 1440 bp, Arabidopsis thaliana
  misc_feature (1)..(1440): Ceres Seq. ID no. 6433615
  misc_feature (1)..(1440): Ortholog of  Ceres SEQ ID NO 15175949 as cited in SEQ ID NO 58819
  misc_feature (1)..(1440): Ortholog of  Ceres SEQ ID NO 13596660 as cited in SEQ ID NO 63180
atggatgcaagattcttgtaccccttggagagctgtaaaatcattcacttgttgcgacatggacaagcgttgcacaatgtagaagctgagaaagatagaaatgcgttgttgtctcctcatctttttgatgctccgcttaccgatcatggtcaccaacaggttgagaatctccgcgaacgagttgtttcaagcgggctactaaagagggttgagctagttgtaacttctccgttgtttagaactatgcaaaccgcagttggtgtttttggaaatgaatacaaacaatcgagtatgacaagtagccctcccattttggcacttgaggttgctcgagaccgtaatggagtccgtcctcctgacatgagaagaaacattgaaagtgaagaggacaacctatggagaccggatgttagggagtccgaagaggagattttggcgagagggttagagttcatgaaatggttatggaagaggccagagaaggaggtcgcagttgttagccatggaatagttttgcagcatatgttgtatgtgtttgcaaacgattgtgacctgtcaattagacatgaactttgcaagaggtttgccaattgcgaaattcgtactgtcgtgattgtagacaaaggacttccaagttccttccaagtaaccaacctatctattccaaaagtcggtagtttaaggacgtcactacctacatacatggatttatgtggaactcagatgctgcgcctctcatcgcctcatttcaaaacccttcatttggtgaggcatgcacaaggagtccacaatatagcattagaagagaagggagagaaacctgaatcagaaaagctttttgacgcccacctttctccaaagggtttgcaacaggtttcggaaaggcgcaaccaaatccttgaatcaggattacttaacactgtcgagttagtgataacctctccgctgtgcagcacgaatagtaacactgttccatttaatttcagagcaatggaaacttcaataggaatatttaggggacaaggatatgtaaatatatccgaagactttgcaaaagctaacaacttccctccaattgtagcacttgagatctgtagagaacgcatgggactctatccatgtgatcgtagagcaagtataagtactcgccgcactttttttcctgagatcgactttacaatggtgatagagagtgatgaagacgctctatggcaagacaaggaaagggaaaaattagaagatgttgctactagaggtcttcactttgttaaatggttatgggagagaccagaaaaagagatagcaattgtaagccacgggattttcttgcaacaaacactttgtgcgctgcatggaaaagttggcatacctcttgaagatagtctccttacaaggtttgccaattgtgaactccggtcgattcggatagagaagaggtaa

SEQ ID NO: 75327 - protein, 479 aa, Arabidopsis thaliana
  peptide (1)..(479): Ceres Seq. ID no. 6433616
MDARFLYPLESCKIIHLLRHGQALHNVEAEKDRNALLSPHLFDAPLTDHGHQQVENLRERVVSSGLLKRVELVVTSPLFRTMQTAVGVFGNEYKQSSMTSSPPILALEVARDRNGVRPPDMRRNIESEEDNLWRPDVRESEEEILARGLEFMKWLWKRPEKEVAVVSHGIVLQHMLYVFANDCDLSIRHELCKRFANCEIRTVVIVDKGLPSSFQVTNLSIPKVGSLRTSLPTYMDLCGTQMLRLSSPHFKTLHLVRHAQGVHNIALEEKGEKPESEKLFDAHLSPKGLQQVSERRNQILESGLLNTVELVITSPLCSTNSNTVPFNFRAMETSIGIFRGQGYVNISEDFAKANNFPPIVALEICRERMGLYPCDRRASISTRRTFFPEIDFTMVIESDEDALWQDKEREKLEDVATRGLHFVKWLWERPEKEIAIVSHGIFLQQTLCALHGKVGIPLEDSLLTRFANCELRSIRIEKR

SEQ ID NO: 75328 - protein, 398 aa, Arabidopsis thaliana
  peptide (1)..(398): Ceres Seq. ID no. 6433617
MQTAVGVFGNEYKQSSMTSSPPILALEVARDRNGVRPPDMRRNIESEEDNLWRPDVRESEEEILARGLEFMKWLWKRPEKEVAVVSHGIVLQHMLYVFANDCDLSIRHELCKRFANCEIRTVVIVDKGLPSSFQVTNLSIPKVGSLRTSLPTYMDLCGTQMLRLSSPHFKTLHLVRHAQGVHNIALEEKGEKPESEKLFDAHLSPKGLQQVSERRNQILESGLLNTVELVITSPLCSTNSNTVPFNFRAMETSIGIFRGQGYVNISEDFAKANNFPPIVALEICRERMGLYPCDRRASISTRRTFFPEIDFTMVIESDEDALWQDKEREKLEDVATRGLHFVKWLWERPEKEIAIVSHGIFLQQTLCALHGKVGIPLEDSLLTRFANCELRSIRIEKR

SEQ ID NO: 75329 - protein, 382 aa, Arabidopsis thaliana
  peptide (1)..(382): Ceres Seq. ID no. 6433618
MTSSPPILALEVARDRNGVRPPDMRRNIESEEDNLWRPDVRESEEEILARGLEFMKWLWKRPEKEVAVVSHGIVLQHMLYVFANDCDLSIRHELCKRFANCEIRTVVIVDKGLPSSFQVTNLSIPKVGSLRTSLPTYMDLCGTQMLRLSSPHFKTLHLVRHAQGVHNIALEEKGEKPESEKLFDAHLSPKGLQQVSERRNQILESGLLNTVELVITSPLCSTNSNTVPFNFRAMETSIGIFRGQGYVNISEDFAKANNFPPIVALEICRERMGLYPCDRRASISTRRTFFPEIDFTMVIESDEDALWQDKEREKLEDVATRGLHFVKWLWERPEKEIAIVSHGIFLQQTLCALHGKVGIPLEDSLLTRFANCELRSIRIEKR

SEQ ID NO: 75330 - DNA, 660 bp, Arabidopsis thaliana
  misc_feature (1)..(660): Ceres Seq. ID no. 6433630
  misc_feature (1)..(660): Ortholog of  Ceres SEQ ID NO 12611884 as cited in SEQ ID NO 51018
  misc_feature (1)..(660): Ortholog of  Ceres SEQ ID NO 15177083 as cited in SEQ ID NO 51917
  misc_feature (1)..(660): Ortholog of  Ceres SEQ ID NO 12609093 as cited in SEQ ID NO 52008
  misc_feature (1)..(660): Ortholog of  Ceres SEQ ID NO 12609839 as cited in SEQ ID NO 52022
  misc_feature (1)..(660): Ortholog of  Ceres SEQ ID NO 13638931 as cited in SEQ ID NO 52200
  misc_feature (1)..(660): Ortholog of  Ceres SEQ ID NO 13638885 as cited in SEQ ID NO 55803
  misc_feature (1)..(660): Ortholog of  Ceres SEQ ID NO 14301452 as cited in SEQ ID NO 60984
  misc_feature (1)..(660): Ortholog of  Ceres SEQ ID NO 12587429 as cited in SEQ ID NO 63113
  misc_feature (1)..(660): Ortholog of  Ceres SEQ ID NO 12615635 as cited in SEQ ID NO 63133
  misc_feature (1)..(660): Ortholog of  Ceres SEQ ID NO 12586351 as cited in SEQ ID NO 64028
  misc_feature (1)..(660): Ortholog of  Ceres SEQ ID NO 15173174 as cited in SEQ ID NO 64046
  misc_feature (1)..(660): Ortholog of  Ceres SEQ ID NO 13654441 as cited in SEQ ID NO 67814
  misc_feature (1)..(660): Ortholog of  Ceres SEQ ID NO 14309027 as cited in SEQ ID NO 0
atggcaagcagcgacgtgaagctgatcggtgcatgggcgagtccctttgtgatgaggccgaggattgctctaaacctcaagtctgtcccctacgagttcctccaagagacgtttgggtctaagagcgagttgcttcttaaatcaaacccggttcacaagaagatcccggttctgcttcatgctgataaaccggtgagtgagtccaacatcatcgttgagtatatcgatgacacttggagctcatctggaccgtccattctcccttccgatccttacgatcgggccatggctcggttctgggctgcttacatcgacgaaaagtggtttgtcgctctaagaggtttcctaaaagccggaggagaagaagagaagaaagctgtgatagctcaactagaagaagggaatgcgtttctggagaaggcgttcattgattgcagcaaaggaaaaccgttcttcaacggtgacaacatcggttactcgacattgctctcgggtgcttcttggcttgtcagctataaaattcttgatgaggccaagacaccttctttgtccaaatgggctgagaatttctgtaatgatcccgctgtaaaacctgtcatgcccgagactgcaaagcttgctgaattcgcaaagaagatctttcctaagccgcaggcctaa

SEQ ID NO: 75331 - protein, 219 aa, Arabidopsis thaliana
  peptide (1)..(219): Ceres Seq. ID no. 6433631
MASSDVKLIGAWASPFVMRPRIALNLKSVPYEFLQETFGSKSELLLKSNPVHKKIPVLLHADKPVSESNIIVEYIDDTWSSSGPSILPSDPYDRAMARFWAAYIDEKWFVALRGFLKAGGEEEKKAVIAQLEEGNAFLEKAFIDCSKGKPFFNGDNIGYSTLLSGASWLVSYKILDEAKTPSLSKWAENFCNDPAVKPVMPETAKLAEFAKKIFPKPQA

SEQ ID NO: 75332 - protein, 202 aa, Arabidopsis thaliana
  peptide (1)..(202): Ceres Seq. ID no. 6433632
MRPRIALNLKSVPYEFLQETFGSKSELLLKSNPVHKKIPVLLHADKPVSESNIIVEYIDDTWSSSGPSILPSDPYDRAMARFWAAYIDEKWFVALRGFLKAGGEEEKKAVIAQLEEGNAFLEKAFIDCSKGKPFFNGDNIGYSTLLSGASWLVSYKILDEAKTPSLSKWAENFCNDPAVKPVMPETAKLAEFAKKIFPKPQA

SEQ ID NO: 75333 - protein, 124 aa, Arabidopsis thaliana
  peptide (1)..(124): Ceres Seq. ID no. 6433633
MARFWAAYIDEKWFVALRGFLKAGGEEEKKAVIAQLEEGNAFLEKAFIDCSKGKPFFNGDNIGYSTLLSGASWLVSYKILDEAKTPSLSKWAENFCNDPAVKPVMPETAKLAEFAKKIFPKPQA

SEQ ID NO: 75334 - DNA, 558 bp, Arabidopsis thaliana
  misc_feature (1)..(558): Ceres Seq. ID no. 6433640
  misc_feature (1)..(558): Ortholog of  Ceres SEQ ID NO 13589868 as cited in SEQ ID NO 55521
  misc_feature (1)..(558): Ortholog of  Ceres SEQ ID NO 15173326 as cited in SEQ ID NO 63793
  misc_feature (1)..(558): Ortholog of  Ceres SEQ ID NO 12617659 as cited in SEQ ID NO 65286
atggggctttcatttgcaaagctttttagccggctttttgccaagaaggagatgcgaatccttatggttggtcttgatgctgctggtaagaccaccattttgtacaagctcaagcttggtgagattgtcaccaccattcccaccatcgggtttaatgtggagacggttgagtacaagaacatcagcttcacggtttgggatgtcgggggtcaggacaagatccgtcccttgtggagacactacttccaaaacactcaaggtctgatatttgttgttgatagcaatgacagagaccgtgttgttgaagccagagatgaacttcacaggatgttgaatgaagatgagcttcgggatgcagtattgcttgtgtttgccaacaagcaggatcttccaaacgctatgaatgctgctgagattactgataagcttggccttcactcactccggcaacgccactggtacatccaaagcacatgcgcaactagcggtgaagggctctatgaaggtctggattggctttccaacaacattgctagcaaagttatgaacatatattga

SEQ ID NO: 75335 - protein, 185 aa, Arabidopsis thaliana
  peptide (1)..(185): Ceres Seq. ID no. 6433641
MGLSFAKLFSRLFAKKEMRILMVGLDAAGKTTILYKLKLGEIVTTIPTIGFNVETVEYKNISFTVWDVGGQDKIRPLWRHYFQNTQGLIFVVDSNDRDRVVEARDELHRMLNEDELRDAVLLVFANKQDLPNAMNAAEITDKLGLHSLRQRHWYIQSTCATSGEGLYEGLDWLSNNIASKVMNIY

SEQ ID NO: 75336 - protein, 168 aa, Arabidopsis thaliana
  peptide (1)..(168): Ceres Seq. ID no. 6433642
MRILMVGLDAAGKTTILYKLKLGEIVTTIPTIGFNVETVEYKNISFTVWDVGGQDKIRPLWRHYFQNTQGLIFVVDSNDRDRVVEARDELHRMLNEDELRDAVLLVFANKQDLPNAMNAAEITDKLGLHSLRQRHWYIQSTCATSGEGLYEGLDWLSNNIASKVMNIY

SEQ ID NO: 75337 - protein, 164 aa, Arabidopsis thaliana
  peptide (1)..(164): Ceres Seq. ID no. 6433643
MVGLDAAGKTTILYKLKLGEIVTTIPTIGFNVETVEYKNISFTVWDVGGQDKIRPLWRHYFQNTQGLIFVVDSNDRDRVVEARDELHRMLNEDELRDAVLLVFANKQDLPNAMNAAEITDKLGLHSLRQRHWYIQSTCATSGEGLYEGLDWLSNNIASKVMNIY

SEQ ID NO: 75338 - DNA, 2529 bp, Arabidopsis thaliana
  misc_feature (1)..(2529): Ceres Seq. ID no. 6433699
  misc_feature (1)..(2529): Ortholog of  Ceres SEQ ID NO 13582534 as cited in SEQ ID NO 57409
  misc_feature (1)..(2529): Ortholog of  Ceres SEQ ID NO 13597268 as cited in SEQ ID NO 63929
  misc_feature (1)..(2529): Ortholog of  Ceres SEQ ID NO 14302384 as cited in SEQ ID NO 67177
  misc_feature (1)..(2529): Ortholog of  Ceres SEQ ID NO 13584744 as cited in SEQ ID NO 69137
atggtggtttcagtgaccatacgtcgtcgttttgttcttcttctacttgcatgcacttgtttgttgtctcggagactctgttttggtgaggacagaatcactttctcaagtcctatcaaagactcagagtcagagacccttctatgcaaaagtggtattttcaggtttggtttcttcactcctgttaattccactactcggttacgttatgttgggatttggtacgaaaagattccaatccaaactgtggtttgggttgctaacaaagactctcccatcaacgacacttccggtgttatctcgatctatcaagatggaaatctcgcggttaccgatggtcgaaatcgccttgtatggtcgacgaatgtctcagtaccagtagctccaaatgctacttgggttcagcttatggattctgggaatcttatgttacaagacaacagaaacaatggtgagattctttgggagagtttcaagcatccttatgattctttcatgccaagaatgactcttggcaccgacggtagaactggaggtaacctaaagcttacttcttggacaagccacgatgatccttcaacaggaaactacacagctggtattgctcctttcacgtttcctgagcttcttatctggaagaacaatgtcccaacgtggcgtagcggaccgtggaacggtcaggttttcatcggtttaccgaatatggattcacttctgtttcttgatgggtttaatcttaacagtgataatcaaggaacgatctcaatgtcttatgctaatgattcgttcatgtatcactttaacttggatcctgaaggaattatttatcagaaagattggagtacttctatgagaacttggaggataggtgtaaagtttccatacacagactgtgatgcatacggtagatgtggtcgattcgggagctgccatgccggggaaaacccgccttgtaaatgtgttaaagggtttgttccaaagaataacacagagtggaatggtggtaattggagtaatggatgtatgagaaaagctccattgcagtgtgaaagacagagaaatgtaagtaatggtggtggtggaggaaaagcagatggttttttgaaactgcagaagatgaaagtaccaatctctgcggaacggtctgaagctagtgaacaagtttgtcctaaagtatgcttagataactgttcttgcacagcttatgcatatgatagaggaattggatgcatgctttggagtggtgatttagttgatatgcaatcatttttgggaagtggcattgatctttttattcgtgttgctcattcagaactcaaaacacatagcaatctagcagttatgatcgcagcacctgtgataggcgttatgttaattgctgcggtctgcgttcttttagcatgccggaaatacaaaaagcgtccagctccagcgaaagatagaagtgcagagctaatgtttaagagaatggaagcacttacaagtgataatgagtctgcttctaaccaaatcaagctcaaggagcttccactctttgagtttcaagtgttagctacatcaactgatagcttctctctaagaaacaagctcgggcaaggcgggtttggtcctgtttacaagggaaaattacctgaaggacaagaaattgcagtgaagaggctctcacggaaatcaggtcaaggactagaggaacttatgaacgaagtggttgtgatatctaagttgcaacatcggaatctagtgaagttacttggatgttgtattgaaggtgaagaaagaatgttagtatatgaatatatgccaaagaaaagcttggatgcatatctttttgacccaatgaagcaaaagattcttgattggaagactcggttcaacataatggaaggaatttgcagaggtcttttgtaccttcacagagattcaagactaaagatcatacacagagatttaaaagccagcaacattttgttagatgagaatctaaaccccaagatatctgattttggacttgcaagaattttccgagcgaatgaagatgaagctaacacaagaagggttgttggaacatacggctatatgtcaccggagtatgcaatggaaggtttcttttcagaaaaatcagatgttttcagcttgggggttatatttctcgagatcataagtgggagaagaaactctagttctcacaaggaagagaataatctcaaccttttggcttatgcttggaagctgtggaacgacggtgaggctgcttctctagcagatccagccgtctttgataagtgtttcgagaaagagatagagaaatgtgttcatattggactgttatgtgtgcaagaagttgcaaacgatagaccaaatgtttcaaacgtgatatggatgctaactaccgagaacatgagcctcgccgatccgaagcagccagcgtttatagtaagaagaggagcttctgaggctgaatcttctgaccagagtagtcaaaaggtatctatcaatgatgtgagcctcacagctgtaacaggacgttaa

SEQ ID NO: 75339 - protein, 842 aa, Arabidopsis thaliana
  peptide (1)..(842): Ceres Seq. ID no. 6433700
MVVSVTIRRRFVLLLLACTCLLSRRLCFGEDRITFSSPIKDSESETLLCKSGIFRFGFFTPVNSTTRLRYVGIWYEKIPIQTVVWVANKDSPINDTSGVISIYQDGNLAVTDGRNRLVWSTNVSVPVAPNATWVQLMDSGNLMLQDNRNNGEILWESFKHPYDSFMPRMTLGTDGRTGGNLKLTSWTSHDDPSTGNYTAGIAPFTFPELLIWKNNVPTWRSGPWNGQVFIGLPNMDSLLFLDGFNLNSDNQGTISMSYANDSFMYHFNLDPEGIIYQKDWSTSMRTWRIGVKFPYTDCDAYGRCGRFGSCHAGENPPCKCVKGFVPKNNTEWNGGNWSNGCMRKAPLQCERQRNVSNGGGGGKADGFLKLQKMKVPISAERSEASEQVCPKVCLDNCSCTAYAYDRGIGCMLWSGDLVDMQSFLGSGIDLFIRVAHSELKTHSNLAVMIAAPVIGVMLIAAVCVLLACRKYKKRPAPAKDRSAELMFKRMEALTSDNESASNQIKLKELPLFEFQVLATSTDSFSLRNKLGQGGFGPVYKGKLPEGQEIAVKRLSRKSGQGLEELMNEVVVISKLQHRNLVKLLGCCIEGEERMLVYEYMPKKSLDAYLFDPMKQKILDWKTRFNIMEGICRGLLYLHRDSRLKIIHRDLKASNILLDENLNPKISDFGLARIFRANEDEANTRRVVGTYGYMSPEYAMEGFFSEKSDVFSLGVIFLEIISGRRNSSSHKEENNLNLLAYAWKLWNDGEAASLADPAVFDKCFEKEIEKCVHIGLLCVQEVANDRPNVSNVIWMLTTENMSLADPKQPAFIVRRGASEAESSDQSSQKVSINDVSLTAVTGR

SEQ ID NO: 75340 - protein, 706 aa, Arabidopsis thaliana
  peptide (1)..(706): Ceres Seq. ID no. 6433701
MDSGNLMLQDNRNNGEILWESFKHPYDSFMPRMTLGTDGRTGGNLKLTSWTSHDDPSTGNYTAGIAPFTFPELLIWKNNVPTWRSGPWNGQVFIGLPNMDSLLFLDGFNLNSDNQGTISMSYANDSFMYHFNLDPEGIIYQKDWSTSMRTWRIGVKFPYTDCDAYGRCGRFGSCHAGENPPCKCVKGFVPKNNTEWNGGNWSNGCMRKAPLQCERQRNVSNGGGGGKADGFLKLQKMKVPISAERSEASEQVCPKVCLDNCSCTAYAYDRGIGCMLWSGDLVDMQSFLGSGIDLFIRVAHSELKTHSNLAVMIAAPVIGVMLIAAVCVLLACRKYKKRPAPAKDRSAELMFKRMEALTSDNESASNQIKLKELPLFEFQVLATSTDSFSLRNKLGQGGFGPVYKGKLPEGQEIAVKRLSRKSGQGLEELMNEVVVISKLQHRNLVKLLGCCIEGEERMLVYEYMPKKSLDAYLFDPMKQKILDWKTRFNIMEGICRGLLYLHRDSRLKIIHRDLKASNILLDENLNPKISDFGLARIFRANEDEANTRRVVGTYGYMSPEYAMEGFFSEKSDVFSLGVIFLEIISGRRNSSSHKEENNLNLLAYAWKLWNDGEAASLADPAVFDKCFEKEIEKCVHIGLLCVQEVANDRPNVSNVIWMLTTENMSLADPKQPAFIVRRGASEAESSDQSSQKVSINDVSLTAVTGR

SEQ ID NO: 75341 - protein, 700 aa, Arabidopsis thaliana
  peptide (1)..(700): Ceres Seq. ID no. 6433702
MLQDNRNNGEILWESFKHPYDSFMPRMTLGTDGRTGGNLKLTSWTSHDDPSTGNYTAGIAPFTFPELLIWKNNVPTWRSGPWNGQVFIGLPNMDSLLFLDGFNLNSDNQGTISMSYANDSFMYHFNLDPEGIIYQKDWSTSMRTWRIGVKFPYTDCDAYGRCGRFGSCHAGENPPCKCVKGFVPKNNTEWNGGNWSNGCMRKAPLQCERQRNVSNGGGGGKADGFLKLQKMKVPISAERSEASEQVCPKVCLDNCSCTAYAYDRGIGCMLWSGDLVDMQSFLGSGIDLFIRVAHSELKTHSNLAVMIAAPVIGVMLIAAVCVLLACRKYKKRPAPAKDRSAELMFKRMEALTSDNESASNQIKLKELPLFEFQVLATSTDSFSLRNKLGQGGFGPVYKGKLPEGQEIAVKRLSRKSGQGLEELMNEVVVISKLQHRNLVKLLGCCIEGEERMLVYEYMPKKSLDAYLFDPMKQKILDWKTRFNIMEGICRGLLYLHRDSRLKIIHRDLKASNILLDENLNPKISDFGLARIFRANEDEANTRRVVGTYGYMSPEYAMEGFFSEKSDVFSLGVIFLEIISGRRNSSSHKEENNLNLLAYAWKLWNDGEAASLADPAVFDKCFEKEIEKCVHIGLLCVQEVANDRPNVSNVIWMLTTENMSLADPKQPAFIVRRGASEAESSDQSSQKVSINDVSLTAVTGR

SEQ ID NO: 75342 - DNA, 474 bp, Arabidopsis thaliana
  misc_feature (1)..(474): Ceres Seq. ID no. 6433872
  misc_feature (1)..(474): Ortholog of  Ceres SEQ ID NO 13655108 as cited in SEQ ID NO 62996
atggaagctcaacaccttcatgccaagcctcatgctgaaggagaatggtccacaggcttctgtgattgcttttctgactgcaaaaattgttgtatcacattctggtgtccatgtatcacctttggccaagtcgccgagattgtagatcgaggatccacatcgtgtggtactgctggagctctatacgcgttgatagccgtagtaactggttgtgcatgtatatactcatgtttctatcgtggaaagatgagagctcaatataatattaaaggagatgattgtactgattgccttaaacatttctgctgtgagctttgttctttgacccaacaataccgtgaactcaagcaccgcggttacgatatgagtcttggtaatttatttcttcgttatactgatgggcggggaacgtggagagacaacagaatcaaggaggtgtggccatgggtgctccggtcttccaaggcggcatga

SEQ ID NO: 75343 - protein, 157 aa, Arabidopsis thaliana
  peptide (1)..(157): Ceres Seq. ID no. 6433873
MEAQHLHAKPHAEGEWSTGFCDCFSDCKNCCITFWCPCITFGQVAEIVDRGSTSCGTAGALYALIAVVTGCACIYSCFYRGKMRAQYNIKGDDCTDCLKHFCCELCSLTQQYRELKHRGYDMSLGNLFLRYTDGRGTWRDNRIKEVWPWVLRSSKAA

SEQ ID NO: 75344 - DNA, 2865 bp, Arabidopsis thaliana
  misc_feature (1)..(2865): Ceres Seq. ID no. 6434183
  misc_feature (1)..(2865): Ortholog of  Ceres SEQ ID NO 14309727 as cited in SEQ ID NO 1030
  misc_feature (1)..(2865): Ortholog of  Ceres SEQ ID NO 13581686 as cited in SEQ ID NO 57695
atgaagttatcgcctctgagtttctctacgagttcgagtttcagtcacgccgatggaatcgacgacggtgttgagttaatatcatctccatttgccggcggcgcaatgctgccggtttttctcaacgatttgagtcgtaacagtggagaatccggaagcggtagtagctgggaaagagagctcgtggaggttacgttagagctcgacgtcggcgatgactccatactcgtctgcggaatgtctgaggcggcgtctgttgattctcgggcgagatcggtggatttggtaaccgcgaggttatcgaggaatttatcgaatgcgtctacgagaatccgccagaaactagggaagttactgaggtcggaatcgtggaaaacgacgacgtcttctaccgccggcgagagagatagagatcttgaacgtcagacggcggtgactttggggattctgacggcgagggataaacggaaagaagacgcgaaactacagcgatcaacgtcgagtgcgcaaagagcgttaaaaggattacagtttataaataaaaccacgagaggaaatagctgcgtctgcgattgggattgcgattgcgatcagatgtggaaaaaagttgaaaagcgattcgaatcgctttctaaaaatggattactcgcccgagacgattttggcgagtgcgttgggatggtggattcgaaggactttgcggtgagtgtattcgacgcgttggctaggagaagaagacagaaactggagaagataacgaaagatgaacttcatgatttctggttacagatttctgaccaaagcttcgacgcacgtcttcaaattttcttcgacatgtacgtggctgatagtaacgaagacgggaagatcactagagaagaaatcaaagaacttctaatgctaagtgcatcagcaaacaagttagcaaaactcaaggaacaagctgaagagtacgcatctctgatcatggaagagcttgatcctgagaattttggatacattgagttatggcaactcgagacactcttacttcagagagacgcatacatgaattacagtagaccacttagcacaacaagcggtggagtaagtacaccaagacggaatctaataagacctcgtcatgtggttcaaaagtgtagaaaaaaacttcaatgtctgattctagataactggcaaagaagctgggttcttttagtgtgggtcatgcttatggccatcctctttgtctggaagtttctagagtacagagaaaaagctgcgtttaaggtcatggggtattgtttaaccactgctaaaggagctgcagagactcttaagctcaacatggctctggttttattacctgtctgtagaaacacattgacttggctaagatctacacgcgctcgagcttgtgttccttttgatgacaacatcaatttccataagattattgcttgtgccatagcgattgggatacttgttcatgctggtactcatttggcgtgtgatttcccccggattataaactcgagtccagaacaatttgtcttgatcgcttctgccttcaatggtactaagcctacattcaaagacctgatgacaggtgcagaaggaatcaccgggatctcgatggtgatcttgacaaccattgcattcacattagcatcaactcatttcaggagaaaccgtgtgaggcttccggcaccacttgatcggttgactggctttaacgcattctggtacactcatcaccttctagtggttgtctacatcatgctcattgtccacgggaccttcctgttctttgctgataagtggtatcagaaaacgacttggatgtacatctcggttcctttggtgctctacgtggcagaacgaagtctgcgagcttgtaggtcaaagcattactctgtcaaaatcctcaaggtttccatgctacctggagaagtactcagcttaatcatgtcaaagcctcctggattcaagtacaagagcggtcagtacatattcttgcagtgtccaactatctctcgatttgaatggcacccattttctattacctctgcaccaggagatgaccaacttagtgttcacatccgaacactcggagactggacagaggagctacgacgagttctaactgtgggcaaagatctttcaacatgcgtgattgggcgttcaaaattctctgcctattgcaatattgatatgataaaccgaccaaaattactagtagacggtccatatggagctccagcacaggactacagaagctatgatgtcttgctcctcattggactgggaataggagctactcctttcataagcatcctgaaggatctgctgaacaattcaagagacgaacaaacagacaatgaattcagcagatcggatttcagctggaatagctgtacatcttcatataccacagcaaccccaacttcaacacatggagggaaaaagaaagcagtgaaggctcacttttactgggtcacaagggagccaggatccgttgaatggtttagaggagtaatggaggaaatatcagacatggactgcagaggccagattgagttgcacaactaccttacaagcgtatatgatgaaggtgatgcaagatcaaccctgataaaaatggtccaggctttgaaccatgccaaacatggagttgatattctatccggaacacgggtgagaacacattttgcaaggcccaactggaaggaagtcttcagtagcatagcaagaaagcatccaaattcgacagtcggagtgttttactgcggcatacaaaccgtggcaaaggagttgaagaagcaagcacaagacatgagtcaaaaaacaaccacacggttcgagttccataaggagcatttctaa

SEQ ID NO: 75345 - protein, 954 aa, Arabidopsis thaliana
  peptide (1)..(954): Ceres Seq. ID no. 6434184
MKLSPLSFSTSSSFSHADGIDDGVELISSPFAGGAMLPVFLNDLSRNSGESGSGSSWERELVEVTLELDVGDDSILVCGMSEAASVDSRARSVDLVTARLSRNLSNASTRIRQKLGKLLRSESWKTTTSSTAGERDRDLERQTAVTLGILTARDKRKEDAKLQRSTSSAQRALKGLQFINKTTRGNSCVCDWDCDCDQMWKKVEKRFESLSKNGLLARDDFGECVGMVDSKDFAVSVFDALARRRRQKLEKITKDELHDFWLQISDQSFDARLQIFFDMYVADSNEDGKITREEIKELLMLSASANKLAKLKEQAEEYASLIMEELDPENFGYIELWQLETLLLQRDAYMNYSRPLSTTSGGVSTPRRNLIRPRHVVQKCRKKLQCLILDNWQRSWVLLVWVMLMAILFVWKFLEYREKAAFKVMGYCLTTAKGAAETLKLNMALVLLPVCRNTLTWLRSTRARACVPFDDNINFHKIIACAIAIGILVHAGTHLACDFPRIINSSPEQFVLIASAFNGTKPTFKDLMTGAEGITGISMVILTTIAFTLASTHFRRNRVRLPAPLDRLTGFNAFWYTHHLLVVVYIMLIVHGTFLFFADKWYQKTTWMYISVPLVLYVAERSLRACRSKHYSVKILKVSMLPGEVLSLIMSKPPGFKYKSGQYIFLQCPTISRFEWHPFSITSAPGDDQLSVHIRTLGDWTEELRRVLTVGKDLSTCVIGRSKFSAYCNIDMINRPKLLVDGPYGAPAQDYRSYDVLLLIGLGIGATPFISILKDLLNNSRDEQTDNEFSRSDFSWNSCTSSYTTATPTSTHGGKKKAVKAHFYWVTREPGSVEWFRGVMEEISDMDCRGQIELHNYLTSVYDEGDARSTLIKMVQALNHAKHGVDILSGTRVRTHFARPNWKEVFSSIARKHPNSTVGVFYCGIQTVAKELKKQAQDMSQKTTTRFEFHKEHF

SEQ ID NO: 75346 - protein, 919 aa, Arabidopsis thaliana
  peptide (1)..(919): Ceres Seq. ID no. 6434185
MLPVFLNDLSRNSGESGSGSSWERELVEVTLELDVGDDSILVCGMSEAASVDSRARSVDLVTARLSRNLSNASTRIRQKLGKLLRSESWKTTTSSTAGERDRDLERQTAVTLGILTARDKRKEDAKLQRSTSSAQRALKGLQFINKTTRGNSCVCDWDCDCDQMWKKVEKRFESLSKNGLLARDDFGECVGMVDSKDFAVSVFDALARRRRQKLEKITKDELHDFWLQISDQSFDARLQIFFDMYVADSNEDGKITREEIKELLMLSASANKLAKLKEQAEEYASLIMEELDPENFGYIELWQLETLLLQRDAYMNYSRPLSTTSGGVSTPRRNLIRPRHVVQKCRKKLQCLILDNWQRSWVLLVWVMLMAILFVWKFLEYREKAAFKVMGYCLTTAKGAAETLKLNMALVLLPVCRNTLTWLRSTRARACVPFDDNINFHKIIACAIAIGILVHAGTHLACDFPRIINSSPEQFVLIASAFNGTKPTFKDLMTGAEGITGISMVILTTIAFTLASTHFRRNRVRLPAPLDRLTGFNAFWYTHHLLVVVYIMLIVHGTFLFFADKWYQKTTWMYISVPLVLYVAERSLRACRSKHYSVKILKVSMLPGEVLSLIMSKPPGFKYKSGQYIFLQCPTISRFEWHPFSITSAPGDDQLSVHIRTLGDWTEELRRVLTVGKDLSTCVIGRSKFSAYCNIDMINRPKLLVDGPYGAPAQDYRSYDVLLLIGLGIGATPFISILKDLLNNSRDEQTDNEFSRSDFSWNSCTSSYTTATPTSTHGGKKKAVKAHFYWVTREPGSVEWFRGVMEEISDMDCRGQIELHNYLTSVYDEGDARSTLIKMVQALNHAKHGVDILSGTRVRTHFARPNWKEVFSSIARKHPNSTVGVFYCGIQTVAKELKKQAQDMSQKTTTRFEFHKEHF

SEQ ID NO: 75347 - protein, 875 aa, Arabidopsis thaliana
  peptide (1)..(875): Ceres Seq. ID no. 6434186
MSEAASVDSRARSVDLVTARLSRNLSNASTRIRQKLGKLLRSESWKTTTSSTAGERDRDLERQTAVTLGILTARDKRKEDAKLQRSTSSAQRALKGLQFINKTTRGNSCVCDWDCDCDQMWKKVEKRFESLSKNGLLARDDFGECVGMVDSKDFAVSVFDALARRRRQKLEKITKDELHDFWLQISDQSFDARLQIFFDMYVADSNEDGKITREEIKELLMLSASANKLAKLKEQAEEYASLIMEELDPENFGYIELWQLETLLLQRDAYMNYSRPLSTTSGGVSTPRRNLIRPRHVVQKCRKKLQCLILDNWQRSWVLLVWVMLMAILFVWKFLEYREKAAFKVMGYCLTTAKGAAETLKLNMALVLLPVCRNTLTWLRSTRARACVPFDDNINFHKIIACAIAIGILVHAGTHLACDFPRIINSSPEQFVLIASAFNGTKPTFKDLMTGAEGITGISMVILTTIAFTLASTHFRRNRVRLPAPLDRLTGFNAFWYTHHLLVVVYIMLIVHGTFLFFADKWYQKTTWMYISVPLVLYVAERSLRACRSKHYSVKILKVSMLPGEVLSLIMSKPPGFKYKSGQYIFLQCPTISRFEWHPFSITSAPGDDQLSVHIRTLGDWTEELRRVLTVGKDLSTCVIGRSKFSAYCNIDMINRPKLLVDGPYGAPAQDYRSYDVLLLIGLGIGATPFISILKDLLNNSRDEQTDNEFSRSDFSWNSCTSSYTTATPTSTHGGKKKAVKAHFYWVTREPGSVEWFRGVMEEISDMDCRGQIELHNYLTSVYDEGDARSTLIKMVQALNHAKHGVDILSGTRVRTHFARPNWKEVFSSIARKHPNSTVGVFYCGIQTVAKELKKQAQDMSQKTTTRFEFHKEHF

SEQ ID NO: 75348 - DNA, 1467 bp, Arabidopsis thaliana
  misc_feature (1)..(1467): Ceres Seq. ID no. 6434198
  misc_feature (1)..(1467): Ortholog of  Ceres SEQ ID NO 13646221 as cited in SEQ ID NO 20310
  misc_feature (1)..(1467): Ortholog of  Ceres SEQ ID NO 14311423 as cited in SEQ ID NO 53911
  misc_feature (1)..(1467): Ortholog of  Ceres SEQ ID NO 14315261 as cited in SEQ ID NO 58451
atgggttggtttaacaagatctttaaaggctctaaccaaaggctccgggttgggaataataagcacaatcacaatgtttattacgataattatccgactgcttcacatgatgatgagcctagtgcggcggatacagatgctgataatgatgaacctcatcatactcaggaaccatctacatctgaggataatacatcgaatgaccaggaaaatgaagacatagaccgtgcaattgcattgtcgcttttagaagagaatcaagaacagacaagtataagcgggaaatactcgatgccggtggatgaagatgagcaacttgctagagccctacaagaaagtatgcagccaaataacttgtcaacaacttgtctgcataggatttgtgctggctgtaatatggagattggccatggaagatttctgaattgccttaattcactatggcatccagaatgttttcgatgttatggctgcagtcagccgatttctgagtacgagttttcaacatcagggaactacccttttcacaaggcttgttacagggagagatatcatcctaaatgtgatgtctgcagccactttataccaacaaatcatgctggtcttattgaatatagggcacatcctttttgggttcagaagtattgtccttctcacgaacacgatgctaccccgagatgttgcagttgtgaaagaatggagccacggaatacgagatatgttgaacttaacgatggacggaaactttgccttgagtgtttggactcggcggtcatggacaccatgcaatgccaacctctgtacttgcaaatacaaaatttctatgaaggactcaacatgaaggtagagcaggaagttccactcctcttggttgagagacaagcacttaacgaagccagagaaggtgaaaagaatggtcactatcacatgccagaaacaagaggactctgcctttcagaagaacaaactgttagtactgtaagaaagcgatcaaagcatggcacaggaaaatgggccgggaatattacagaaccttacaagttaacacggcaatgtgaagttaccgccattctcatcttattcgggctccctaggttacttactggttcgattctagctcatgagatgatgcatgcgtggatgaggctcaaaggattccgaacactgagccaagatgttgaagaaggtatatgtcaagtgatggctcataaatggttagatgctgagttagctgctggttcaacaaatagcaatgctgcatcatcatcctcctcttctcaaggactgaaaaagggaccgagatctcagtacgagagaaagcttggtgagtttttcaagcaccaaatcgagtctgatgcttctccggtttatggagacgggttcagagctgggaggttagctgttcacaagtacggtttgcgaaaaacacttgagcatatacagatgaccggtagattcccggtttaa

SEQ ID NO: 75349 - protein, 488 aa, Arabidopsis thaliana
  peptide (1)..(488): Ceres Seq. ID no. 6434199
MGWFNKIFKGSNQRLRVGNNKHNHNVYYDNYPTASHDDEPSAADTDADNDEPHHTQEPSTSEDNTSNDQENEDIDRAIALSLLEENQEQTSISGKYSMPVDEDEQLARALQESMQPNNLSTTCLHRICAGCNMEIGHGRFLNCLNSLWHPECFRCYGCSQPISEYEFSTSGNYPFHKACYRERYHPKCDVCSHFIPTNHAGLIEYRAHPFWVQKYCPSHEHDATPRCCSCERMEPRNTRYVELNDGRKLCLECLDSAVMDTMQCQPLYLQIQNFYEGLNMKVEQEVPLLLVERQALNEAREGEKNGHYHMPETRGLCLSEEQTVSTVRKRSKHGTGKWAGNITEPYKLTRQCEVTAILILFGLPRLLTGSILAHEMMHAWMRLKGFRTLSQDVEEGICQVMAHKWLDAELAAGSTNSNAASSSSSSQGLKKGPRSQYERKLGEFFKHQIESDASPVYGDGFRAGRLAVHKYGLRKTLEHIQMTGRFPV

SEQ ID NO: 75350 - protein, 391 aa, Arabidopsis thaliana
  peptide (1)..(391): Ceres Seq. ID no. 6434200
MPVDEDEQLARALQESMQPNNLSTTCLHRICAGCNMEIGHGRFLNCLNSLWHPECFRCYGCSQPISEYEFSTSGNYPFHKACYRERYHPKCDVCSHFIPTNHAGLIEYRAHPFWVQKYCPSHEHDATPRCCSCERMEPRNTRYVELNDGRKLCLECLDSAVMDTMQCQPLYLQIQNFYEGLNMKVEQEVPLLLVERQALNEAREGEKNGHYHMPETRGLCLSEEQTVSTVRKRSKHGTGKWAGNITEPYKLTRQCEVTAILILFGLPRLLTGSILAHEMMHAWMRLKGFRTLSQDVEEGICQVMAHKWLDAELAAGSTNSNAASSSSSSQGLKKGPRSQYERKLGEFFKHQIESDASPVYGDGFRAGRLAVHKYGLRKTLEHIQMTGRFPV

SEQ ID NO: 75351 - protein, 375 aa, Arabidopsis thaliana
  peptide (1)..(375): Ceres Seq. ID no. 6434201
MQPNNLSTTCLHRICAGCNMEIGHGRFLNCLNSLWHPECFRCYGCSQPISEYEFSTSGNYPFHKACYRERYHPKCDVCSHFIPTNHAGLIEYRAHPFWVQKYCPSHEHDATPRCCSCERMEPRNTRYVELNDGRKLCLECLDSAVMDTMQCQPLYLQIQNFYEGLNMKVEQEVPLLLVERQALNEAREGEKNGHYHMPETRGLCLSEEQTVSTVRKRSKHGTGKWAGNITEPYKLTRQCEVTAILILFGLPRLLTGSILAHEMMHAWMRLKGFRTLSQDVEEGICQVMAHKWLDAELAAGSTNSNAASSSSSSQGLKKGPRSQYERKLGEFFKHQIESDASPVYGDGFRAGRLAVHKYGLRKTLEHIQMTGRFPV

SEQ ID NO: 75352 - DNA, 1437 bp, Arabidopsis thaliana
  misc_feature (1)..(1437): Ceres Seq. ID no. 6434434
  misc_feature (1)..(1437): Ortholog of  Ceres SEQ ID NO 15172325 as cited in SEQ ID NO 54668
  misc_feature (1)..(1437): Ortholog of  Ceres SEQ ID NO 13594345 as cited in SEQ ID NO 58043
  misc_feature (1)..(1437): Ortholog of  Ceres SEQ ID NO 12614112 as cited in SEQ ID NO 60891
  misc_feature (1)..(1437): Ortholog of  Ceres SEQ ID NO 13662880 as cited in SEQ ID NO 65422
  misc_feature (1)..(1437): Ortholog of  Ceres SEQ ID NO 12779098 as cited in SEQ ID NO 67698
  misc_feature (1)..(1437): Ortholog of  Ceres SEQ ID NO 13591190 as cited in SEQ ID NO 68044
  misc_feature (1)..(1437): Ortholog of  Ceres SEQ ID NO 13596089 as cited in SEQ ID NO 68373
atggcatctcctgctgtccatagcaaacaaaaaccacatgttgtttgcgtgcctcacccggctcaaggccacatcaacccgatgctaaaagtggctaaactcctccacgcgagaggcttccatgtcaccttcgtcaacaccgtctataaccacaaccgtctcctccggtcccgtgggccttacgcactggacggacttccttctttccggttcgagtcgatagctgacggtcttccggataccgatggggataagacccaagatatccccgccctttgtgtgtccaccatgaagaactgcctcgctccgttcaaggagcttctccgacggatcaacgatgttgatgatgttcctccggtgagctgtattgtatcggacggtgtgatgagctttactcttgacgcagcagaggaactcaatctcccagaggttattttctggacgaacagtgcttgtggtttcatgacttttctacacttttatctcttcatcgaaaaaggcttatctccgtttaaagatgaaagttacatgtctaaggagcatctagacacggttatagattggataccatcaatgaagaatcttaggctaaaagacatccctagcttcatacgtaccactaatcctgacgacataatgtggagcaatccaaacgcgccagtgatcattctcaatacgttcgatgatcttgatcatgatcttatacaatctatgcaatctattttattacctccggtttatacgattggaccgctccatctcctagcaaaccaggaaattgacgaggttagtgaaataggacggatgggattaaatttgtggaaagaagatacagaatgtttggattggttggacagtaaaacgactccaaacagcgtcgtttttgttaattttggatgcataacggtgatgagtgcaaaacaacttcttgagtttgcttggggtttggcggcaagtgggaaagagtttttatgggtgatccggccggatttagttgccggagagacgacggcgattctctcagagtttttaacggagacggcagaccgcggaatgctggtgagttggtgttctcaagaaaaagttatttcccaccctatggttggagggttcttgacgcattgcgggtggaactcgacactcgaaagtatctctggtggtgttccgataatatgctggccgttttttgccgagcagcaaacgaattgtaagttttgttgtgatgagtggggagttggtgtcgagattggtggagatgttaagagggaggaggtcgagacagtggttagagagctaatggatagagagaagggaaagaaaatgcgagagaaggccgtagagtggcggcgcttggcgaatgaagctacggagcataagcatggttcctcggttgtgaattttgagacggttgtgagaaaggttcttttaagggagtag

SEQ ID NO: 75353 - protein, 478 aa, Arabidopsis thaliana
  peptide (1)..(478): Ceres Seq. ID no. 6434435
MASPAVHSKQKPHVVCVPHPAQGHINPMLKVAKLLHARGFHVTFVNTVYNHNRLLRSRGPYALDGLPSFRFESIADGLPDTDGDKTQDIPALCVSTMKNCLAPFKELLRRINDVDDVPPVSCIVSDGVMSFTLDAAEELNLPEVIFWTNSACGFMTFLHFYLFIEKGLSPFKDESYMSKEHLDTVIDWIPSMKNLRLKDIPSFIRTTNPDDIMWSNPNAPVIILNTFDDLDHDLIQSMQSILLPPVYTIGPLHLLANQEIDEVSEIGRMGLNLWKEDTECLDWLDSKTTPNSVVFVNFGCITVMSAKQLLEFAWGLAASGKEFLWVIRPDLVAGETTAILSEFLTETADRGMLVSWCSQEKVISHPMVGGFLTHCGWNSTLESISGGVPIICWPFFAEQQTNCKFCCDEWGVGVEIGGDVKREEVETVVRELMDREKGKKMREKAVEWRRLANEATEHKHGSSVVNFETVVRKVLLRE

SEQ ID NO: 75354 - protein, 451 aa, Arabidopsis thaliana
  peptide (1)..(451): Ceres Seq. ID no. 6434436
MLKVAKLLHARGFHVTFVNTVYNHNRLLRSRGPYALDGLPSFRFESIADGLPDTDGDKTQDIPALCVSTMKNCLAPFKELLRRINDVDDVPPVSCIVSDGVMSFTLDAAEELNLPEVIFWTNSACGFMTFLHFYLFIEKGLSPFKDESYMSKEHLDTVIDWIPSMKNLRLKDIPSFIRTTNPDDIMWSNPNAPVIILNTFDDLDHDLIQSMQSILLPPVYTIGPLHLLANQEIDEVSEIGRMGLNLWKEDTECLDWLDSKTTPNSVVFVNFGCITVMSAKQLLEFAWGLAASGKEFLWVIRPDLVAGETTAILSEFLTETADRGMLVSWCSQEKVISHPMVGGFLTHCGWNSTLESISGGVPIICWPFFAEQQTNCKFCCDEWGVGVEIGGDVKREEVETVVRELMDREKGKKMREKAVEWRRLANEATEHKHGSSVVNFETVVRKVLLRE

SEQ ID NO: 75355 - protein, 382 aa, Arabidopsis thaliana
  peptide (1)..(382): Ceres Seq. ID no. 6434437
MKNCLAPFKELLRRINDVDDVPPVSCIVSDGVMSFTLDAAEELNLPEVIFWTNSACGFMTFLHFYLFIEKGLSPFKDESYMSKEHLDTVIDWIPSMKNLRLKDIPSFIRTTNPDDIMWSNPNAPVIILNTFDDLDHDLIQSMQSILLPPVYTIGPLHLLANQEIDEVSEIGRMGLNLWKEDTECLDWLDSKTTPNSVVFVNFGCITVMSAKQLLEFAWGLAASGKEFLWVIRPDLVAGETTAILSEFLTETADRGMLVSWCSQEKVISHPMVGGFLTHCGWNSTLESISGGVPIICWPFFAEQQTNCKFCCDEWGVGVEIGGDVKREEVETVVRELMDREKGKKMREKAVEWRRLANEATEHKHGSSVVNFETVVRKVLLRE

SEQ ID NO: 75356 - DNA, 1725 bp, Arabidopsis thaliana
  misc_feature (1)..(1725): Ceres Seq. ID no. 6434881
  misc_feature (1)..(1725): Ortholog of  Ceres SEQ ID NO 14309919 as cited in SEQ ID NO 20769
atggcagacgctggagataatcagagaagaagcgatgaaaaagagtcgatatcaactgaagaaacgaaggagaatgaagacttgggatctggaagaaacgacacaggtcatcatgtatacaacgagggacacgaagaggtactagagtatctgaaacaagagagactgaaagatgctgatatgcagaggaaaaggcatgaaacagagtcgaaatccattgagggcacaactcctgatattaggctgagtgattcagggaaagggtctgatgaaatacagaaagcagactcagtttacaaacgctctaacgctgacacgcgagtgagtctgccacaacagagacgactgaaagatgtggtggaggcgcatagggtacgccgtgaaacagagtcaagattatggcaccaagagagggatagatctctggtttggggaggaagtgaacccaggatgagatttgatgaaagtactcagggttggagagatagtgactatgaatccaaatggaggtttcatgagagaactccggattgggattggagagatagtgaatccagaatgagatctcatgaaagaactcaggataggagaggaagtgaatcccaaggggtatttgatgagagaacagagaggagacaagaaccagtgcgatggcccggtgaagagtgttggtgtctgcggtgtcgaaacggaggaagttgccgttacaatcatcctactcaacttccacagatttgcaggtctttacttgatttgaaaagagattcgttgcagtattttctgaggggatattgtaagttcggctcagtttgtggatttcaacacataagggacagggatgttgcagaacctatgtatgagaattggagttttgatgtgagaactcagaggagatatgaaatagagtactcaggattcaggccagagaagagggcaaaaactagtctggattccgtagagcctgattcaagaaaaagactggaaggtctagagaataaacgagagcaagagaatccgcaagaacctgaaaggcagaggactgaggctcaagacaatctgcaggaatttcgagagcaagagaatccgcaaaaccagatacagataaatactgaaagacagaggacaatggctcatgacaatctgcagatcgtttcggattctcgaatgcatgatccaagacgccatgatacagagttgagactcgaacgagagaagatggtaaacagagaacttgaaaagcagaggatagaacatctaatcgatccactagtgaggcgatacatgcaagcaaagagagataaagaagttgaacagagagagagagctagcattgagagccagaggatagtggctcaagagattctgcggcaacagagattacaggggatgcgagagaatcagaacgtggattctcgaatgcatgatccaagacgccatgatacagagttgagactcgaacgagagaagatggtaaacagagaacttgaaaagcagaggatagaacctctaatcggtccactagtgaggcgatacatgcaagcaaagagagataaagaagttgaacagagagagagagctagcattgagagccagaggatagtggctcaagagaatctgcgacaacagagattgcaggggatgcgagagaatcagaacgtggatgctcatgatcaagagaaaactcaggaactcggtttcaaaggaaaagagggagatggagtttaa

SEQ ID NO: 75357 - protein, 574 aa, Arabidopsis thaliana
  peptide (1)..(574): Ceres Seq. ID no. 6434882
MADAGDNQRRSDEKESISTEETKENEDLGSGRNDTGHHVYNEGHEEVLEYLKQERLKDADMQRKRHETESKSIEGTTPDIRLSDSGKGSDEIQKADSVYKRSNADTRVSLPQQRRLKDVVEAHRVRRETESRLWHQERDRSLVWGGSEPRMRFDESTQGWRDSDYESKWRFHERTPDWDWRDSESRMRSHERTQDRRGSESQGVFDERTERRQEPVRWPGEECWCLRCRNGGSCRYNHPTQLPQICRSLLDLKRDSLQYFLRGYCKFGSVCGFQHIRDRDVAEPMYENWSFDVRTQRRYEIEYSGFRPEKRAKTSLDSVEPDSRKRLEGLENKREQENPQEPERQRTEAQDNLQEFREQENPQNQIQINTERQRTMAHDNLQIVSDSRMHDPRRHDTELRLEREKMVNRELEKQRIEHLIDPLVRRYMQAKRDKEVEQRERASIESQRIVAQEILRQQRLQGMRENQNVDSRMHDPRRHDTELRLEREKMVNRELEKQRIEPLIGPLVRRYMQAKRDKEVEQRERASIESQRIVAQENLRQQRLQGMRENQNVDAHDQEKTQELGFKGKEGDGV

SEQ ID NO: 75358 - protein, 514 aa, Arabidopsis thaliana
  peptide (1)..(514): Ceres Seq. ID no. 6434883
MQRKRHETESKSIEGTTPDIRLSDSGKGSDEIQKADSVYKRSNADTRVSLPQQRRLKDVVEAHRVRRETESRLWHQERDRSLVWGGSEPRMRFDESTQGWRDSDYESKWRFHERTPDWDWRDSESRMRSHERTQDRRGSESQGVFDERTERRQEPVRWPGEECWCLRCRNGGSCRYNHPTQLPQICRSLLDLKRDSLQYFLRGYCKFGSVCGFQHIRDRDVAEPMYENWSFDVRTQRRYEIEYSGFRPEKRAKTSLDSVEPDSRKRLEGLENKREQENPQEPERQRTEAQDNLQEFREQENPQNQIQINTERQRTMAHDNLQIVSDSRMHDPRRHDTELRLEREKMVNRELEKQRIEHLIDPLVRRYMQAKRDKEVEQRERASIESQRIVAQEILRQQRLQGMRENQNVDSRMHDPRRHDTELRLEREKMVNRELEKQRIEPLIGPLVRRYMQAKRDKEVEQRERASIESQRIVAQENLRQQRLQGMRENQNVDAHDQEKTQELGFKGKEGDGV

SEQ ID NO: 75359 - protein, 424 aa, Arabidopsis thaliana
  peptide (1)..(424): Ceres Seq. ID no. 6434884
MRFDESTQGWRDSDYESKWRFHERTPDWDWRDSESRMRSHERTQDRRGSESQGVFDERTERRQEPVRWPGEECWCLRCRNGGSCRYNHPTQLPQICRSLLDLKRDSLQYFLRGYCKFGSVCGFQHIRDRDVAEPMYENWSFDVRTQRRYEIEYSGFRPEKRAKTSLDSVEPDSRKRLEGLENKREQENPQEPERQRTEAQDNLQEFREQENPQNQIQINTERQRTMAHDNLQIVSDSRMHDPRRHDTELRLEREKMVNRELEKQRIEHLIDPLVRRYMQAKRDKEVEQRERASIESQRIVAQEILRQQRLQGMRENQNVDSRMHDPRRHDTELRLEREKMVNRELEKQRIEPLIGPLVRRYMQAKRDKEVEQRERASIESQRIVAQENLRQQRLQGMRENQNVDAHDQEKTQELGFKGKEGDGV

SEQ ID NO: 75360 - DNA, 1989 bp, Arabidopsis thaliana
  misc_feature (1)..(1989): Ceres Seq. ID no. 6435010
  misc_feature (1)..(1989): Ortholog of  Ceres SEQ ID NO 14311055 as cited in SEQ ID NO 53705
atgaagctgggatccaaatctgatgctttccagagacaaggccaggcttggttttgcacaactggacttcctagtgatattgtcgttgaagttggggagatgtcttttcatctccacaagtttcccttgctctctagaagtggagtcatggaaagaaggattgcagaagcatcaaaagaaggcgatgataaatgtctcattgaaatctctgatcttcctggtggagacaaaacgtttgaactagtcgctaagttctgctatggtgtgaagcttgaactcactgcttctaacgttgtatatctcagatgcgctgctgagcatctcgaaatgactgaagaacatggggaaggaaatcttatttctcaaactgaaacatttttcaatcaagtagtcctcaaaagctggaaagattcaataaaagcgcttcatagctgcgatgaggtcctcgagtatgctgatgaattgaacattaccaagaaatgcattgagtcactagccatgagagcatcgacagacccaaacttgtttggatggccagttgtggagcatggtgggcccatgcagagtccaggtggcagtgttttatggaatgggataagcaccggggctagacctaaacatactagttcagactggtggtacgaggatgcatcgatgctaagttttcccctttttaagagacttatcacggtgatggagtcccgcggcattagagaagacatcatcgctggctccctaacctattacacacgaaaacacttgcctggcttaaaaagacgacgtggtggacctgaatctagtggtcgtttcagcacacctttgggctcagggaatgtactgtccgaggaagagcagaagaacttgcttgaagagatccaggagcttcttcgtatgcaaaaaggtttagttccaaccaagtttttcgttgacatgcttcgaatcgccaagattttaaaagcaagtccggattgcatagccaatttggagaagaggatagggatgcagcttgaccaggctgcgttggaagatcttgtaatgcctagcttttctcatactatggagaccctatacgatgttgactctgtgcaaaggatcttggaccattttcttgggacagatcagattatgcctggtggggttggctctccttgttcttcagtagatgacgggaatttaatcggatccccacagtcaataacaccaatgacagcggttgcaaagctgattgatgggtatcttgctgaagttgctcctgatgtcaatcttaagcttccaaagttccaagctttagctgcttctattcctgaatacgccagactcttagatgacggactctatcgtgcaatagacatttatctaaagcatcatccatggttggcggaaacagaaagagagaatctgtgccggttgttagattgtcagaaactctctttagaagcttgtacacatgcggcgcagaacgagagattaccgctaagaataatcgtccaagtgctcttctttgagcagctacagctcagaacctctgtagctggatgcttcctggtctcagacaacctcgatggcggatcaagacagttaagaagcggaggatatgtaggaggaccaaacgaaggaggcggaggaggaggaggatgggcaaccgcggtaagagagaatcaagtcctgaaagttggaatggacagtatgagaatgcgagtttgtgagttagagaaagaatgttccaacatgagacaagagattgagaaactcggtaagacgacaaaaggtggtggttctgcaagcaatggagtcggtagcaagacttgggaaaacgtttctaagaaactcgggttcggttttaagctgaagtcgcatcaaatgtgcagtgctcaggaaggttctgtgtctaagtctaacaacgagaatgtgaagatagagaagctaaaggatgttaaagagcgtcgtgggaagcataagaaagcttcgagcattagttctgagaggtga

SEQ ID NO: 75361 - protein, 662 aa, Arabidopsis thaliana; identical to SEQ ID NO: 49249
  peptide (1)..(662): Ceres Seq. ID no. 6435011

SEQ ID NO: 75362 - protein, 629 aa, Arabidopsis thaliana; identical to SEQ ID NO: 49250
  peptide (1)..(629): Ceres Seq. ID no. 6435012

SEQ ID NO: 75363 - protein, 613 aa, Arabidopsis thaliana
  peptide (1)..(613): Ceres Seq. ID no. 6435013
MERRIAEASKEGDDKCLIEISDLPGGDKTFELVAKFCYGVKLELTASNVVYLRCAAEHLEMTEEHGEGNLISQTETFFNQVVLKSWKDSIKALHSCDEVLEYADELNITKKCIESLAMRASTDPNLFGWPVVEHGGPMQSPGGSVLWNGISTGARPKHTSSDWWYEDASMLSFPLFKRLITVMESRGIREDIIAGSLTYYTRKHLPGLKRRRGGPESSGRFSTPLGSGNVLSEEEQKNLLEEIQELLRMQKGLVPTKFFVDMLRIAKILKASPDCIANLEKRIGMQLDQAALEDLVMPSFSHTMETLYDVDSVQRILDHFLGTDQIMPGGVGSPCSSVDDGNLIGSPQSITPMTAVAKLIDGYLAEVAPDVNLKLPKFQALAASIPEYARLLDDGLYRAIDIYLKHHPWLAETERENLCRLLDCQKLSLEACTHAAQNERLPLRIIVQVLFFEQLQLRTSVAGCFLVSDNLDGGSRQLRSGGYVGGPNEGGGGGGGWATAVRENQVLKVGMDSMRMRVCELEKECSNMRQEIEKLGKTTKGGGSASNGVGSKTWENVSKKLGFGFKLKSHQMCSAQEGSVSKSNNENVKIEKLKDVKERRGKHKKASSISSER

SEQ ID NO: 75364 - DNA, 1398 bp, Arabidopsis thaliana
  misc_feature (1)..(1398): Ceres Seq. ID no. 6435241
  misc_feature (1)..(1398): Ortholog of  Ceres SEQ ID NO 13660287 as cited in SEQ ID NO 67316
atgttgatggaatatccttatcaacaagtgggttatgttggagagcatgcgcacatccttttcatgaacggaaactactacaactaccaccaaacaccaaccgttggtcttactaccaccgctatggcgagaagagaaggagaagtgacggagacccttctgaaaaagtcgacggagaatcgcggagaagatcgggatgggttagggatgaaggagaaggtttggagggaatctaaaaagctatgggttgtggctgggccggcgatctttacgaggttctccacgtccggactatctttgataagtcaagctttcattggccatcttggctctaccgagttggccgcttactccatcactctcaccgttctcctccgttttagtaatggtatcttgttaggcatggctagtgcgctagaaacactatgtggtcaagcctatggagcaaaacaatatcatatgcttgggatctacctccaaagatcatggatcgtcctcacaggctgtaccatttgccttatgcccatctacatctttgcaggccctattctcttggctttaggtcaagaggaacgccttgttcgtgtggctcggatcatagctctatgggtcataggcatcaacatctcctttgtgccttccttcacttgccaaatgttcctccaagctcagagtaagaacaagatcatcgcctacgttgctgctgtttcgttaggagtccatgtcttcttgtcgtggcttctagtggttcattttgatttcgggatcgctggtgccatgacctcttcgctcgtagcacattggttgcctaacattgcgcaggttttatttgtcacatgcggtggatgtacggaaacgtggagaggattctcttggttggctttcaaggatctttggcccgtttttaaactatctgtatcttccggtggcatgatttgcttggagctatggtacaactcgatcttgattctgctcacgggaaacttgaaaaacgctgaggttgctcttaacgcacttgcaatctgcatcaatataaatgcactggagatgatggtagccttcggcttcatggcagcagcaagagaaagggtttcatacatttttacaacaagtgaagctgttgccacacaagtagccgatctttctccactcttggccttctccattctcttgaacagtattcaaccagttctctctggagttgctgttggagcgggatggcagaaatatgttacggtcgttaaccttgcttgctattaccttgttggaattccttccggtctttttcttggctatgtcgttggtttacaagtcaaagtgtcttcgtcgttgaaacgtttgaaccgttgggttgaaccagaatccccaagtcgaaaccaaactttacaaaacgaatga

SEQ ID NO: 75365 - protein, 465 aa, Arabidopsis thaliana
  peptide (1)..(465): Ceres Seq. ID no. 6435242
MLMEYPYQQVGYVGEHAHILFMNGNYYNYHQTPTVGLTTTAMARREGEVTETLLKKSTENRGEDRDGLGMKEKVWRESKKLWVVAGPAIFTRFSTSGLSLISQAFIGHLGSTELAAYSITLTVLLRFSNGILLGMASALETLCGQAYGAKQYHMLGIYLQRSWIVLTGCTICLMPIYIFAGPILLALGQEERLVRVARIIALWVIGINISFVPSFTCQMFLQAQSKNKIIAYVAAVSLGVHVFLSWLLVVHFDFGIAGAMTSSLVAHWLPNIAQVLFVTCGGCTETWRGFSWLAFKDLWPVFKLSVSSGGMICLELWYNSILILLTGNLKNAEVALNALAICININALEMMVAFGFMAAARERVSYIFTTSEAVATQVADLSPLLAFSILLNSIQPVLSGVAVGAGWQKYVTVVNLACYYLVGIPSGLFLGYVVGLQVKVSSSLKRLNRWVEPESPSRNQTLQNE

SEQ ID NO: 75366 - protein, 463 aa, Arabidopsis thaliana
  peptide (1)..(463): Ceres Seq. ID no. 6435243
MEYPYQQVGYVGEHAHILFMNGNYYNYHQTPTVGLTTTAMARREGEVTETLLKKSTENRGEDRDGLGMKEKVWRESKKLWVVAGPAIFTRFSTSGLSLISQAFIGHLGSTELAAYSITLTVLLRFSNGILLGMASALETLCGQAYGAKQYHMLGIYLQRSWIVLTGCTICLMPIYIFAGPILLALGQEERLVRVARIIALWVIGINISFVPSFTCQMFLQAQSKNKIIAYVAAVSLGVHVFLSWLLVVHFDFGIAGAMTSSLVAHWLPNIAQVLFVTCGGCTETWRGFSWLAFKDLWPVFKLSVSSGGMICLELWYNSILILLTGNLKNAEVALNALAICININALEMMVAFGFMAAARERVSYIFTTSEAVATQVADLSPLLAFSILLNSIQPVLSGVAVGAGWQKYVTVVNLACYYLVGIPSGLFLGYVVGLQVKVSSSLKRLNRWVEPESPSRNQTLQNE

SEQ ID NO: 75367 - protein, 444 aa, Arabidopsis thaliana
  peptide (1)..(444): Ceres Seq. ID no. 6435244
MNGNYYNYHQTPTVGLTTTAMARREGEVTETLLKKSTENRGEDRDGLGMKEKVWRESKKLWVVAGPAIFTRFSTSGLSLISQAFIGHLGSTELAAYSITLTVLLRFSNGILLGMASALETLCGQAYGAKQYHMLGIYLQRSWIVLTGCTICLMPIYIFAGPILLALGQEERLVRVARIIALWVIGINISFVPSFTCQMFLQAQSKNKIIAYVAAVSLGVHVFLSWLLVVHFDFGIAGAMTSSLVAHWLPNIAQVLFVTCGGCTETWRGFSWLAFKDLWPVFKLSVSSGGMICLELWYNSILILLTGNLKNAEVALNALAICININALEMMVAFGFMAAARERVSYIFTTSEAVATQVADLSPLLAFSILLNSIQPVLSGVAVGAGWQKYVTVVNLACYYLVGIPSGLFLGYVVGLQVKVSSSLKRLNRWVEPESPSRNQTLQNE

SEQ ID NO: 75368 - DNA, 1398 bp, Arabidopsis thaliana
  misc_feature (1)..(1398): Ceres Seq. ID no. 6435245
  misc_feature (1)..(1398): Ortholog of  Ceres SEQ ID NO 13660287 as cited in SEQ ID NO 67316
atggccggagaaggaggagagctcacggcggctttgttgaaaaagacgactgagaacggaggagaagaaaatgatgagttagggttgaaggaaaaagtttggattgaatcaaagaagctatgggttgtggcggcgccatcgatcttcacgaagttctctacgtacggagtttcattggtaactcaaggctttgttggccatattggcccaaccgagttggccgcttactctatcaccttcaccgttctcctccgtttcagtaatggtatcttgttaggtatggccagtgcactaggaacattatgtggtcaagcctacggagccaaacaataccatatgctcgggattcacctccaaaggtcatggatcgtccttacaggttgtaccatttgcatcatgcccatcttcatcttttcaggcccgatcctcttagccttaggtcaagaggaccacattgttcgtgtggctcgggtcatagccctatggctcatagccatcaacttcaccttcgtacccgccttcacttgccaaatattcctccaatctcagagcaagaacaagatcatcgcctacgtgtctgctgtaaccttagggctccatgttttcttctcgtggctcctagtggttcatttcaatttcgggatcactggtgcaatgacctctacgctagttgcgttctggatgcctaacattgtgcagctcttgtatgtcacatccggtgggtgtaaggatacatggagaggattcactatgttggccttcaaagatttatggcccgtcttcaaactatctttgtcttccggtggaatggtttgcttggagttatggtacaactcgatattagtattgctcactgggaatttgaaaaacgcagaggtggcgattgatgcactagcaatctgcatcaacgtaaatgcactgcagatgatgatagcacttgggtttttggcagcagtaagtgtaagagtgtccaacgagctcggtaggggaaaccccgaaggcgccaaatttgcaacaatcgtagcggttttcacgtcactctctataggattagttctattcttcgtcttcttgtttctaaggggaagaatttcgtacattttcactacaagtgaagctgtggcagccgaagtcgctgatctttctccacttttagcattttccatcctcttgaacagtgttcaacccgttctctcaggagtggcagtgggagcgggatggcaaggatatgtggcttacattaaccttgcttgctattaccttctcggaattcctgttggtcttgtccttggttacgttgttggtttgcaagtcaaagtatctacgtcgttgaaaaatataaaccggtgggttgtaccagaatctagagatgcaaatcaaatttcatcagaggaataa

SEQ ID NO: 75369 - protein, 465 aa, Arabidopsis thaliana
  peptide (1)..(465): Ceres Seq. ID no. 6435246
MAGEGGELTAALLKKTTENGGEENDELGLKEKVWIESKKLWVVAAPSIFTKFSTYGVSLVTQGFVGHIGPTELAAYSITFTVLLRFSNGILLGMASALGTLCGQAYGAKQYHMLGIHLQRSWIVLTGCTICIMPIFIFSGPILLALGQEDHIVRVARVIALWLIAINFTFVPAFTCQIFLQSQSKNKIIAYVSAVTLGLHVFFSWLLVVHFNFGITGAMTSTLVAFWMPNIVQLLYVTSGGCKDTWRGFTMLAFKDLWPVFKLSLSSGGMVCLELWYNSILVLLTGNLKNAEVAIDALAICINVNALQMMIALGFLAAVSVRVSNELGRGNPEGAKFATIVAVFTSLSIGLVLFFVFLFLRGRISYIFTTSEAVAAEVADLSPLLAFSILLNSVQPVLSGVAVGAGWQGYVAYINLACYYLLGIPVGLVLGYVVGLQVKVSTSLKNINRWVVPESRDANQISSEE

SEQ ID NO: 75370 - protein, 372 aa, Arabidopsis thaliana
  peptide (1)..(372): Ceres Seq. ID no. 6435247
MASALGTLCGQAYGAKQYHMLGIHLQRSWIVLTGCTICIMPIFIFSGPILLALGQEDHIVRVARVIALWLIAINFTFVPAFTCQIFLQSQSKNKIIAYVSAVTLGLHVFFSWLLVVHFNFGITGAMTSTLVAFWMPNIVQLLYVTSGGCKDTWRGFTMLAFKDLWPVFKLSLSSGGMVCLELWYNSILVLLTGNLKNAEVAIDALAICINVNALQMMIALGFLAAVSVRVSNELGRGNPEGAKFATIVAVFTSLSIGLVLFFVFLFLRGRISYIFTTSEAVAAEVADLSPLLAFSILLNSVQPVLSGVAVGAGWQGYVAYINLACYYLLGIPVGLVLGYVVGLQVKVSTSLKNINRWVVPESRDANQISSEE

SEQ ID NO: 75371 - protein, 353 aa, Arabidopsis thaliana
  peptide (1)..(353): Ceres Seq. ID no. 6435248
MLGIHLQRSWIVLTGCTICIMPIFIFSGPILLALGQEDHIVRVARVIALWLIAINFTFVPAFTCQIFLQSQSKNKIIAYVSAVTLGLHVFFSWLLVVHFNFGITGAMTSTLVAFWMPNIVQLLYVTSGGCKDTWRGFTMLAFKDLWPVFKLSLSSGGMVCLELWYNSILVLLTGNLKNAEVAIDALAICINVNALQMMIALGFLAAVSVRVSNELGRGNPEGAKFATIVAVFTSLSIGLVLFFVFLFLRGRISYIFTTSEAVAAEVADLSPLLAFSILLNSVQPVLSGVAVGAGWQGYVAYINLACYYLLGIPVGLVLGYVVGLQVKVSTSLKNINRWVVPESRDANQISSEE

SEQ ID NO: 75372 - DNA, 939 bp, Arabidopsis thaliana
  misc_feature (1)..(939): Ceres Seq. ID no. 6436987
  misc_feature (1)..(939): Ortholog of  Ceres SEQ ID NO 14302757 as cited in SEQ ID NO 56631
  misc_feature (1)..(939): Ortholog of  Ceres SEQ ID NO 13662567 as cited in SEQ ID NO 62884
atgactttggtgccggccattggtcgcgagctctcgaatccaccgtccgatgggatttctaatcttcgattttctaataacagcgatcatttactagtctcttcatgggataagagtgtaagattgtatgatgcgaacggcgatttgatgagaggggagtttaaacatggtggagcggtactcgattgctgcttccatgatgattcttctggattcagtgtttgcgccgatactaaagttagaagaattgacttcaatgctggcaaagaagacgttttgggtacgcatgagaagccagttcgatgtgttgagtattcttatgctgcagggcaagtgatcactggaagttgggataaaacgattaaatgttgggatccaagaggtgcaagtgggactgagcgcacacagattggaacttatatgcaacctgagcgtgttaactctctttctcttgttggaaatcgtttggtagtggcaacagcaggaaggcatgtcaacatttatgatcttagaaatatgtcccagcctgagcaaagaagagagtcctcacttaaataccagacaagatgtgtacgttgttatcccaacggaacaggatatgcccttagctctgttgaagggagggtttcaatggagttttttgatctatcagaagctgctcaggctaaaaattatggcacttttgcttccggaggctgtgatggttttgtcaacatttgggacggtaacaataagaagaggctttatcagtactctaagtatccaacaagtattgcggcgctgtcattcagccgagatggtggattactggctgttgcttctagttacacgtttgaagagggagacaaaccgcatgaaccggacgccatctttgttagaagtgttaatgaaattgaagtgaaaccgaaacccaaagtatacccaaatcccccggtatag

SEQ ID NO: 75373 - protein, 312 aa, Arabidopsis thaliana
  peptide (1)..(312): Ceres Seq. ID no. 6436988
MTLVPAIGRELSNPPSDGISNLRFSNNSDHLLVSSWDKSVRLYDANGDLMRGEFKHGGAVLDCCFHDDSSGFSVCADTKVRRIDFNAGKEDVLGTHEKPVRCVEYSYAAGQVITGSWDKTIKCWDPRGASGTERTQIGTYMQPERVNSLSLVGNRLVVATAGRHVNIYDLRNMSQPEQRRESSLKYQTRCVRCYPNGTGYALSSVEGRVSMEFFDLSEAAQAKNYGTFASGGCDGFVNIWDGNNKKRLYQYSKYPTSIAALSFSRDGGLLAVASSYTFEEGDKPHEPDAIFVRSVNEIEVKPKPKVYPNPPV

SEQ ID NO: 75374 - protein, 263 aa, Arabidopsis thaliana
  peptide (1)..(263): Ceres Seq. ID no. 6436989
MRGEFKHGGAVLDCCFHDDSSGFSVCADTKVRRIDFNAGKEDVLGTHEKPVRCVEYSYAAGQVITGSWDKTIKCWDPRGASGTERTQIGTYMQPERVNSLSLVGNRLVVATAGRHVNIYDLRNMSQPEQRRESSLKYQTRCVRCYPNGTGYALSSVEGRVSMEFFDLSEAAQAKNYGTFASGGCDGFVNIWDGNNKKRLYQYSKYPTSIAALSFSRDGGLLAVASSYTFEEGDKPHEPDAIFVRSVNEIEVKPKPKVYPNPPV

SEQ ID NO: 75375 - protein, 172 aa, Arabidopsis thaliana
  peptide (1)..(172): Ceres Seq. ID no. 6436990
MQPERVNSLSLVGNRLVVATAGRHVNIYDLRNMSQPEQRRESSLKYQTRCVRCYPNGTGYALSSVEGRVSMEFFDLSEAAQAKNYGTFASGGCDGFVNIWDGNNKKRLYQYSKYPTSIAALSFSRDGGLLAVASSYTFEEGDKPHEPDAIFVRSVNEIEVKPKPKVYPNPPV

SEQ ID NO: 75376 - DNA, 1483 bp, Arabidopsis thaliana
  misc_feature (1)..(1483): Ceres Seq. ID no. 6437047
  misc_feature (1)..(1483): Ortholog of  Ceres SEQ ID NO 15172560 as cited in SEQ ID NO 57325
  misc_feature (1)..(1483): Ortholog of  Ceres SEQ ID NO 13655716 as cited in SEQ ID NO 68965
aataattgttcctctttcactttctacatcctttcttcttcttcctcttctcttccttctccgttgcaaagctcaagaaaaactaaaggaatccaagtggtaaacctcagcgcaaatttcaagaagaagaaaagcagagaaaagttttcttctttttgacctttcttcccctaaattaaagatcctgttatggaatctccacattctgaggcatcaatcgtgaatggtagtatccatttgaatggcagtggtgaaaccaaaacaaagaatatagtcatgtcgtctgattcagacagtttcatcggtgtgcttgaggtttttgttcaccaagctagggacatccacaacatctgtatctatcataagcaagatgtgtatgctaagctttgtctcacaaatgatcccgaaaactccttgtccacaaagatcatcaatggtggagggcaaaaccctgtcttcgacgatacccttcagttcgacgttaagaacctggattgttcgcttaagtgtgagatatttatgatgagccgcgtgaagaattatcttgaggatcagttacttggattctctcttgtacctttgtctgaagtgattgtgaggaatgggaaattggagaaagagttctccctttcttcaaccgatttgtatcactctcctgcaggttttgtcgagttgtctctctcgtacgcaggagattcgcctgacgtgatgcatattcctgcggttccaactgcggatgagaccgagttggctcctatcgagtttgatgagagtgagtttttggatccaaagattgtctgtgaaaacaatcaaatggtgtctaagtacttctccactacgtgttctgattctgatgattttgcaagctctgaaactggctttgtggaagtaaacagcatcctgtctgcagttgttgaaactgctgttgacgaagcagcaccggccaattctgtctcaacaaatggaatctcatctccatcaactgcagttagctctggctcctcgggaactcatgatgtttcaaagcaatctagtgaaggaaacaactcagattcagaacaagaagcgaagaagccaacagatatcatcaagagtggtgatttagataagactgatgaagaagcagttgtgaaaccggttctgacagtgaacattgaaccagagcaaaaggtagtgcaacaagatattgttgacatgtacacaaaaagcttgcagcaattcactgagtcactggctaagatgaaacttcctttggacatcgatagcccaacccaatcagagaactcaagctcctcccagcagacgccaaagagtgctagctcccgtgttttctacgggagtagagccttcttctgaagctcagaaatcatctcaagtttggcatcagaagtagcgagcatgtagtgaaagtgtaataagttaaaagtagacactatctaaaatgtgtaactatcttcctttgaagcctttagcttttcttgtt

SEQ ID NO: 75377 - protein, 388 aa, Arabidopsis thaliana
  peptide (1)..(388): Ceres Seq. ID no. 6437048
MESPHSEASIVNGSIHLNGSGETKTKNIVMSSDSDSFIGVLEVFVHQARDIHNICIYHKQDVYAKLCLTNDPENSLSTKIINGGGQNPVFDDTLQFDVKNLDCSLKCEIFMMSRVKNYLEDQLLGFSLVPLSEVIVRNGKLEKEFSLSSTDLYHSPAGFVELSLSYAGDSPDVMHIPAVPTADETELAPIEFDESEFLDPKIVCENNQMVSKYFSTTCSDSDDFASSETGFVEVNSILSAVVETAVDEAAPANSVSTNGISSPSTAVSSGSSGTHDVSKQSSEGNNSDSEQEAKKPTDIIKSGDLDKTDEEAVVKPVLTVNIEPEQKVVQQDIVDMYTKSLQQFTESLAKMKLPLDIDSPTQSENSSSSQQTPKSASSRVFYGSRAFF

SEQ ID NO: 75378 - protein, 359 aa, Arabidopsis thaliana
  peptide (1)..(359): Ceres Seq. ID no. 6437049
MSSDSDSFIGVLEVFVHQARDIHNICIYHKQDVYAKLCLTNDPENSLSTKIINGGGQNPVFDDTLQFDVKNLDCSLKCEIFMMSRVKNYLEDQLLGFSLVPLSEVIVRNGKLEKEFSLSSTDLYHSPAGFVELSLSYAGDSPDVMHIPAVPTADETELAPIEFDESEFLDPKIVCENNQMVSKYFSTTCSDSDDFASSETGFVEVNSILSAVVETAVDEAAPANSVSTNGISSPSTAVSSGSSGTHDVSKQSSEGNNSDSEQEAKKPTDIIKSGDLDKTDEEAVVKPVLTVNIEPEQKVVQQDIVDMYTKSLQQFTESLAKMKLPLDIDSPTQSENSSSSQQTPKSASSRVFYGSRAFF

SEQ ID NO: 75379 - protein, 278 aa, Arabidopsis thaliana
  peptide (1)..(278): Ceres Seq. ID no. 6437050
MMSRVKNYLEDQLLGFSLVPLSEVIVRNGKLEKEFSLSSTDLYHSPAGFVELSLSYAGDSPDVMHIPAVPTADETELAPIEFDESEFLDPKIVCENNQMVSKYFSTTCSDSDDFASSETGFVEVNSILSAVVETAVDEAAPANSVSTNGISSPSTAVSSGSSGTHDVSKQSSEGNNSDSEQEAKKPTDIIKSGDLDKTDEEAVVKPVLTVNIEPEQKVVQQDIVDMYTKSLQQFTESLAKMKLPLDIDSPTQSENSSSSQQTPKSASSRVFYGSRAFF

SEQ ID NO: 75380 - DNA, 978 bp, Arabidopsis thaliana
  misc_feature (1)..(978): Ceres Seq. ID no. 6437138
  misc_feature (1)..(978): Ortholog of  Ceres SEQ ID NO 14311596 as cited in SEQ ID NO 51728
  misc_feature (1)..(978): Ortholog of  Ceres SEQ ID NO 14308120 as cited in SEQ ID NO 58423
  misc_feature (1)..(978): Ortholog of  Ceres SEQ ID NO 14307004 as cited in SEQ ID NO 59551
  misc_feature (1)..(978): Ortholog of  Ceres SEQ ID NO 15177031 as cited in SEQ ID NO 60171
  misc_feature (1)..(978): Ortholog of  Ceres SEQ ID NO 12617197 as cited in SEQ ID NO 63406
  misc_feature (1)..(978): Ortholog of  Ceres SEQ ID NO 13597804 as cited in SEQ ID NO 64182
  misc_feature (1)..(978): Ortholog of  Ceres SEQ ID NO 15179788 as cited in SEQ ID NO 64818
  misc_feature (1)..(978): Ortholog of  Ceres SEQ ID NO 14302768 as cited in SEQ ID NO 64889
  misc_feature (1)..(978): Ortholog of  Ceres SEQ ID NO 13598565 as cited in SEQ ID NO 65250
  misc_feature (1)..(978): Ortholog of  Ceres SEQ ID NO 13598597 as cited in SEQ ID NO 65496
  misc_feature (1)..(978): Ortholog of  Ceres SEQ ID NO 13596284 as cited in SEQ ID NO 68273
  misc_feature (1)..(978): Ortholog of  Ceres SEQ ID NO 15178902 as cited in SEQ ID NO 0
atgagcagcgaagaagagaagacagtgtgtgtgacaggagcttcaggttacattgcttcatggatcgttaagcttcttcttctccgtggttacaccgttaaagcctctgttcgtgatccaaatgatccaaggaaaacagagcatttgcttgcattggaaggagcagaggaaaggcttaaattgttcaaagcaaacttgttagaagaaggctctttcgattcagcaatcgatggttgcgaaggagttttccacaccgcatcgccattctatcatgacgtcaaggaccctcaggctgagttacttgatccggcagtgaaaggaacaatcaatgttctaagctcttgtttgaagacttcctcggttaagagagtcgtcttaacctcatcgatagcagctgttgctttcaatggaatgcctcgaacacccgaaaccatagttgacgaaacttggttcgccgatcctgactattgcagagcttccaagctatggtatgtactctcgaagacattagctgaaaacgcagcgtggaaattcgcaaaagagaacaatttacagctggtttcgataaatccggctatggtgattggtcctctcttacagccaacgctaaacactagtgctgctgcagtactaagcttgatcaaaggagcacaaacgtttcctaatgcgacgttcgggtgggttaacgttaaagatgtagcgaacgctcatattcaagcgtttgagaatccagatgctgatgggagatactgtttagtggagagagttgctcattactctgaagttgttaacattttgcatgatctttaccctgattttcaactccctgagaagtgtgcagatgaaaagatatatattccaacatataaagtgtctaaagagaaagcagagtctcttggggttgagtttgtgccattggaagttagcattaaagagactgtagagagcttgagagataaagggttcatcagattttga

SEQ ID NO: 75381 - protein, 325 aa, Arabidopsis thaliana
  peptide (1)..(325): Ceres Seq. ID no. 6437139
MSSEEEKTVCVTGASGYIASWIVKLLLLRGYTVKASVRDPNDPRKTEHLLALEGAEERLKLFKANLLEEGSFDSAIDGCEGVFHTASPFYHDVKDPQAELLDPAVKGTINVLSSCLKTSSVKRVVLTSSIAAVAFNGMPRTPETIVDETWFADPDYCRASKLWYVLSKTLAENAAWKFAKENNLQLVSINPAMVIGPLLQPTLNTSAAAVLSLIKGAQTFPNATFGWVNVKDVANAHIQAFENPDADGRYCLVERVAHYSEVVNILHDLYPDFQLPEKCADEKIYIPTYKVSKEKAESLGVEFVPLEVSIKETVESLRDKGFIRF

SEQ ID NO: 75382 - protein, 188 aa, Arabidopsis thaliana
  peptide (1)..(188): Ceres Seq. ID no. 6437140
MPRTPETIVDETWFADPDYCRASKLWYVLSKTLAENAAWKFAKENNLQLVSINPAMVIGPLLQPTLNTSAAAVLSLIKGAQTFPNATFGWVNVKDVANAHIQAFENPDADGRYCLVERVAHYSEVVNILHDLYPDFQLPEKCADEKIYIPTYKVSKEKAESLGVEFVPLEVSIKETVESLRDKGFIRF

SEQ ID NO: 75383 - DNA, 2649 bp, Arabidopsis thaliana
  misc_feature (1)..(2649): Ceres Seq. ID no. 6437182
  misc_feature (1)..(2649): Ortholog of  Ceres SEQ ID NO 13654989 as cited in SEQ ID NO 63117
  misc_feature (1)..(2649): Ortholog of  Ceres SEQ ID NO 13584744 as cited in SEQ ID NO 69137
atggagagacattgtgtgttcgttaccatttttgtgctaatacttcatcttgttcaagctcaaaatcaaaccggattcattagtgtagattgcggtttatcccctcccgagtcaccttacaatgcacctcaaacaggtttaacatatacatcagataccggtttaataaacactgggaagactggtagaatcgccaaggatttcgaaccattcgtggataagccggctttgacaatgagatactttccagacggaatacgaaactgctacaatctaaatgtcacccgcgacaccaattatctgatcaaggccaccttcgtttatggaaattatgatgggcttaatgttgacccgaacttcgacctttacctcggtccgaatttatggacaacggtgagtagtaatgacacgacagaggagatcatccatgtgaccaaattcaattctttgcagatatgtcttgttaagacgggaataagtataccttttataaatgttttggagctccgaccattgaagaaaaatgtatacgctactcaaagcggttcattgaagtacttattcaggatgtatgttagcaattcaagtcgtcgtataaggttcccggatgatgtgtatgaccgaaaatggtacccgatcttccagaactcatggacgcaagtaactacgaatctcaatgtaaatattagcactatttatgaactaccacaaagcgtaatgtcaacagccgcgacgccgctaaatgctaatgcgaccttgaacattacatggacaatagagcctcctactacaccattttactcctacattcactttgcagagcttcaatctctaagggccaatgatacaagagaattcaatgtgacgttgaatggggagtatacaattggaccttatagtcctaaaccgctaaaaaccgaaaccatacaagacttaagccccgagcaatgtaatggaggggcgtgtattttgcagcttgtggagacgctgaaatcaactcttccgcctttacttaatgctattgaggctttcactgtgattgatttcccgcaaatggagacaaatgaagatgatgttactggtatcaacgatgttcaaaacacttatggattgaatagaatcagttggcaaggagatccatgtgtccccaaacagtattcgtgggacggtctaaattgcaacaactcagatatctctataccaccaataatcatttccttagatttatcttcaagtggtttaaatggggtcattacacaaggcattcaaaatctaacccatcttcaatacttggacttgtcagataataatttaactggtgatatacctaaatttctagctgacatacaatcactcttggttataaacttaagtggtaataatctcactggatcggtgcctctctcacttcttcagaagaaaggattgaaattaaatgtcgaaggcaaccctcatcttctttgcacagatggtttatgtgttaacaaaggagatggacataagaaaaagagcatcatagcaccagtggtcgcatcaattgcttcaatagctattcttataggtgcattggttctgttttttgttcttaaaaagaaaacgcaatcaaaagggccaccagcagcatatgtacaagcgtcgaatggtagatcccgtagatctgcagaaccagcaatagtgacgaagaataaacggtttacttactctgaagttatgcaaatgacaaataacttccaaagagtgcttgggaaaggagggtttggaattgtttatcatggtttggtgaatggtactgaacaagtagctattaagatactctcccattcttcatctcaaggatataaacaattcaaagctgaggtagaacttcttcttagagttcatcacaagaatttggtaggccttgttggatactgtgacgaaggagagaacttggctcttatatatgaatacatggccaatggagatttaaaagaacacatgtcaggaacacgaaaccacttcattttaaattggggaactagactaaaaatagtcgttgaatctgcccaaggacttgagtatttgcacaatggatgcaaaccactaatggtgcatagagacatcaaaacaacaaatatattgttgaatgaacaatttgatgccaaacttgctgattttgggctctcgagatcattcccgattgaaggtgaaactcatgtttcaacagctgttgctggaactcctggatatctcgatcccgaatactacagaacaaattggttgactgaaaagagtgatgtttatagtttcggagtcgtattgttagagatcatcacaaaccaacccgtgatagacccaagacgtgaaaagccacatatagcagaatgggttggggaagtgcttacaaaaggagacataaaaaatataatggatccaagtctaaatggagattatgattccacttctgtttggaaagctgttgagctagcgatgtgttgtcttaatccttcatcagctagaagaccgaacatgtctcaagttgttattgaattaaacgagtgtttgacatctgaaaattcaaggggaggagcgattcgagacatggactcagaaggttctatagaagtaagcttgacctttggtaccgaagtgaccccattggctcggtag

SEQ ID NO: 75384 - protein, 882 aa, Arabidopsis thaliana
  peptide (1)..(882): Ceres Seq. ID no. 6437183
MERHCVFVTIFVLILHLVQAQNQTGFISVDCGLSPPESPYNAPQTGLTYTSDTGLINTGKTGRIAKDFEPFVDKPALTMRYFPDGIRNCYNLNVTRDTNYLIKATFVYGNYDGLNVDPNFDLYLGPNLWTTVSSNDTTEEIIHVTKFNSLQICLVKTGISIPFINVLELRPLKKNVYATQSGSLKYLFRMYVSNSSRRIRFPDDVYDRKWYPIFQNSWTQVTTNLNVNISTIYELPQSVMSTAATPLNANATLNITWTIEPPTTPFYSYIHFAELQSLRANDTREFNVTLNGEYTIGPYSPKPLKTETIQDLSPEQCNGGACILQLVETLKSTLPPLLNAIEAFTVIDFPQMETNEDDVTGINDVQNTYGLNRISWQGDPCVPKQYSWDGLNCNNSDISIPPIIISLDLSSSGLNGVITQGIQNLTHLQYLDLSDNNLTGDIPKFLADIQSLLVINLSGNNLTGSVPLSLLQKKGLKLNVEGNPHLLCTDGLCVNKGDGHKKKSIIAPVVASIASIAILIGALVLFFVLKKKTQSKGPPAAYVQASNGRSRRSAEPAIVTKNKRFTYSEVMQMTNNFQRVLGKGGFGIVYHGLVNGTEQVAIKILSHSSSQGYKQFKAEVELLLRVHHKNLVGLVGYCDEGENLALIYEYMANGDLKEHMSGTRNHFILNWGTRLKIVVESAQGLEYLHNGCKPLMVHRDIKTTNILLNEQFDAKLADFGLSRSFPIEGETHVSTAVAGTPGYLDPEYYRTNWLTEKSDVYSFGVVLLEIITNQPVIDPRREKPHIAEWVGEVLTKGDIKNIMDPSLNGDYDSTSVWKAVELAMCCLNPSSARRPNMSQVVIELNECLTSENSRGGAIRDMDSEGSIEVSLTFGTEVTPLAR

SEQ ID NO: 75385 - protein, 804 aa, Arabidopsis thaliana
  peptide (1)..(804): Ceres Seq. ID no. 6437184
MRYFPDGIRNCYNLNVTRDTNYLIKATFVYGNYDGLNVDPNFDLYLGPNLWTTVSSNDTTEEIIHVTKFNSLQICLVKTGISIPFINVLELRPLKKNVYATQSGSLKYLFRMYVSNSSRRIRFPDDVYDRKWYPIFQNSWTQVTTNLNVNISTIYELPQSVMSTAATPLNANATLNITWTIEPPTTPFYSYIHFAELQSLRANDTREFNVTLNGEYTIGPYSPKPLKTETIQDLSPEQCNGGACILQLVETLKSTLPPLLNAIEAFTVIDFPQMETNEDDVTGINDVQNTYGLNRISWQGDPCVPKQYSWDGLNCNNSDISIPPIIISLDLSSSGLNGVITQGIQNLTHLQYLDLSDNNLTGDIPKFLADIQSLLVINLSGNNLTGSVPLSLLQKKGLKLNVEGNPHLLCTDGLCVNKGDGHKKKSIIAPVVASIASIAILIGALVLFFVLKKKTQSKGPPAAYVQASNGRSRRSAEPAIVTKNKRFTYSEVMQMTNNFQRVLGKGGFGIVYHGLVNGTEQVAIKILSHSSSQGYKQFKAEVELLLRVHHKNLVGLVGYCDEGENLALIYEYMANGDLKEHMSGTRNHFILNWGTRLKIVVESAQGLEYLHNGCKPLMVHRDIKTTNILLNEQFDAKLADFGLSRSFPIEGETHVSTAVAGTPGYLDPEYYRTNWLTEKSDVYSFGVVLLEIITNQPVIDPRREKPHIAEWVGEVLTKGDIKNIMDPSLNGDYDSTSVWKAVELAMCCLNPSSARRPNMSQVVIELNECLTSENSRGGAIRDMDSEGSIEVSLTFGTEVTPLAR

SEQ ID NO: 75386 - protein, 693 aa, Arabidopsis thaliana
  peptide (1)..(693): Ceres Seq. ID no. 6437185
MYVSNSSRRIRFPDDVYDRKWYPIFQNSWTQVTTNLNVNISTIYELPQSVMSTAATPLNANATLNITWTIEPPTTPFYSYIHFAELQSLRANDTREFNVTLNGEYTIGPYSPKPLKTETIQDLSPEQCNGGACILQLVETLKSTLPPLLNAIEAFTVIDFPQMETNEDDVTGINDVQNTYGLNRISWQGDPCVPKQYSWDGLNCNNSDISIPPIIISLDLSSSGLNGVITQGIQNLTHLQYLDLSDNNLTGDIPKFLADIQSLLVINLSGNNLTGSVPLSLLQKKGLKLNVEGNPHLLCTDGLCVNKGDGHKKKSIIAPVVASIASIAILIGALVLFFVLKKKTQSKGPPAAYVQASNGRSRRSAEPAIVTKNKRFTYSEVMQMTNNFQRVLGKGGFGIVYHGLVNGTEQVAIKILSHSSSQGYKQFKAEVELLLRVHHKNLVGLVGYCDEGENLALIYEYMANGDLKEHMSGTRNHFILNWGTRLKIVVESAQGLEYLHNGCKPLMVHRDIKTTNILLNEQFDAKLADFGLSRSFPIEGETHVSTAVAGTPGYLDPEYYRTNWLTEKSDVYSFGVVLLEIITNQPVIDPRREKPHIAEWVGEVLTKGDIKNIMDPSLNGDYDSTSVWKAVELAMCCLNPSSARRPNMSQVVIELNECLTSENSRGGAIRDMDSEGSIEVSLTFGTEVTPLAR

SEQ ID NO: 75387 - DNA, 618 bp, Arabidopsis thaliana
  misc_feature (1)..(618): Ceres Seq. ID no. 6437405
  misc_feature (1)..(618): Ortholog of  Ceres SEQ ID NO 14310764 as cited in SEQ ID NO 55235
atggaggaggtaaagggacaaagaggaagtggaaccacagaggcagattttgtgttgcaatggggtgagaggaaaagagttagatgtatgaaagtgaagaaagatcaaagccttgccaatggcaaatcaactgattgtttgactaaacgtaaactcatttctcgtgctgtctcttctgagagaggctcaccttctcgacatcttaaccgtcctaacaagatcactgattctctagtcaatgtgcggagatcgtttatggcgtcgcccgagaaggaagataggtattatacaacaaggggttcgatgggaatagatgagagtgggaaaattattaaggaacctgtgaaagaaacaaagaagcatgtgtggccaaagttgtatatagctttgtcaaataaagagaaggaagaagattttttggctatgaaaggttgcaagcttcctcaaagacctaagaagcgagccaaattggttcagaagacattgcttctggtgagtccaggagcttggttatcagatctgtgcaaagagagatatgaagtaagagagaagaagacttcaaagaagagaccaagaggattgaaggcaatggggagcatggaaagcgattcggagtga

SEQ ID NO: 75388 - protein, 205 aa, Arabidopsis thaliana
  peptide (1)..(205): Ceres Seq. ID no. 6437406
MEEVKGQRGSGTTEADFVLQWGERKRVRCMKVKKDQSLANGKSTDCLTKRKLISRAVSSERGSPSRHLNRPNKITDSLVNVRRSFMASPEKEDRYYTTRGSMGIDESGKIIKEPVKETKKHVWPKLYIALSNKEKEEDFLAMKGCKLPQRPKKRAKLVQKTLLLVSPGAWLSDLCKERYEVREKKTSKKRPRGLKAMGSMESDSE

SEQ ID NO: 75389 - protein, 176 aa, Arabidopsis thaliana
  peptide (1)..(176): Ceres Seq. ID no. 6437407
MKVKKDQSLANGKSTDCLTKRKLISRAVSSERGSPSRHLNRPNKITDSLVNVRRSFMASPEKEDRYYTTRGSMGIDESGKIIKEPVKETKKHVWPKLYIALSNKEKEEDFLAMKGCKLPQRPKKRAKLVQKTLLLVSPGAWLSDLCKERYEVREKKTSKKRPRGLKAMGSMESDSE

SEQ ID NO: 75390 - protein, 120 aa, Arabidopsis thaliana
  peptide (1)..(120): Ceres Seq. ID no. 6437408
MASPEKEDRYYTTRGSMGIDESGKIIKEPVKETKKHVWPKLYIALSNKEKEEDFLAMKGCKLPQRPKKRAKLVQKTLLLVSPGAWLSDLCKERYEVREKKTSKKRPRGLKAMGSMESDSE

SEQ ID NO: 75391 - DNA, 1875 bp, Arabidopsis thaliana
  misc_feature (1)..(1875): Ceres Seq. ID no. 6437428
  misc_feature (1)..(1875): Ortholog of  Ceres SEQ ID NO 13600419 as cited in SEQ ID NO 0
atgtctgatgggaaagttcagtttagagaagtagccgttccaccgaaccggtactctcctctcaagaaagcttggtcggatatctacacaccgttggatatggctggtgggcaaatagagaagctagtcaaatacaagagcactgtcaaggatccaggaactcctggatttctcagaattagagaagggatgttgctcttcgtccctaatgatcccaaatcagattctaagctcaaagtacttactcagaacatcaaaagtcaaaaatataccaaagaaggatcaaataaacctccttggctcaatctcaccaacaagcaggcaaagagtcatatctttgagtttgaaaattatcccgacatgcatgcttgccgtgatttcatcactaaggcccttgctaaatgtgaattggagcctaataaatccgttgtctcgacatcttccgagcaactcagtattaaggaattggagctgcgcttcaagcttctgagagaaaatagtgagctgcagagattgcataagcaatttgtggaaagtaaagtactgactgaagatgaattctgggctacaagaaagaaattacttggtaaagattccatcagaaagtcaaaacagcagctcgggcttaagagcatgatggtttctggcatcaaaccatctactgatgggcggactaatagagtgacgtttaacttgacacctgagataatttttcagatttttgctgagaagccagctgttcggcaggcattcatcaattatgttccgagtaagatgacagaaaaagacttctggacaaaatattttagagcagaatatctttacagcaccaaaaatacagcagtagctgcagcagaagctgctgaggacgaggaactcgctgtctttctgaagcctgatgagatattggctcgggaaactcgtcacaagattagacgggttgatccaactcttgacatggaggctgaccagggagacgactacactcatcttatggaccacgggatccagcgtgatggcaccatggatgttgttgaaccacaaaatgatcagtttaaacgatcacttttgcaagatcttaatcgtcatgctgctgttgtattggaaggcagaagcattgatgttgagtcagaagatacaaggattgttgcagaggctctcacacgggttaaacaagtaagcaaagctgatggtgaaaccaccaaggacgctaatcaggagagattggaaagaatgtcccgggtagcaggaatggaggatcttcaagcaccacaaaatttcccattggcgccgctttctatcaaggatcctcgtgattactttgaatctcaacaaggaaacgtcctcaatgtacccagaggagcaaagggcttgaagagaaatgtccatgaagcttatggattactaaaggaatccattttagagattagagctacaggattaagtgatccgttgattaagcctgaagtttctttcgaggttttcagttcgttaacccgaaccattgcaactgctaaaaatattaatgggaagaacccacgagagagctttctggacagattaccaaagtccactaaggatgaagttctacaccattggacatcaatacaagaattactgaaacatttttggtcatcttatccgataacaaccacatatcttcataccaaggttggtaaactgaaggatgcaatgtccaatacatattcaaaacttgaggcaatgaaagagtcggtgcaatctgatctccggcatcaggtttctctactggttcgtccaatgcaacaggctcttgacgctgcgttccatcactacgaagtggatctgcagagaagaacagctaagagcggcgaaagaccaaacggctacgtatag

SEQ ID NO: 75392 - protein, 624 aa, Arabidopsis thaliana
  peptide (1)..(624): Ceres Seq. ID no. 6437429
MSDGKVQFREVAVPPNRYSPLKKAWSDIYTPLDMAGGQIEKLVKYKSTVKDPGTPGFLRIREGMLLFVPNDPKSDSKLKVLTQNIKSQKYTKEGSNKPPWLNLTNKQAKSHIFEFENYPDMHACRDFITKALAKCELEPNKSVVSTSSEQLSIKELELRFKLLRENSELQRLHKQFVESKVLTEDEFWATRKKLLGKDSIRKSKQQLGLKSMMVSGIKPSTDGRTNRVTFNLTPEIIFQIFAEKPAVRQAFINYVPSKMTEKDFWTKYFRAEYLYSTKNTAVAAAEAAEDEELAVFLKPDEILARETRHKIRRVDPTLDMEADQGDDYTHLMDHGIQRDGTMDVVEPQNDQFKRSLLQDLNRHAAVVLEGRSIDVESEDTRIVAEALTRVKQVSKADGETTKDANQERLERMSRVAGMEDLQAPQNFPLAPLSIKDPRDYFESQQGNVLNVPRGAKGLKRNVHEAYGLLKESILEIRATGLSDPLIKPEVSFEVFSSLTRTIATAKNINGKNPRESFLDRLPKSTKDEVLHHWTSIQELLKHFWSSYPITTTYLHTKVGKLKDAMSNTYSKLEAMKESVQSDLRHQVSLLVRPMQQALDAAFHHYEVDLQRRTAKSGERPNGYV

SEQ ID NO: 75393 - protein, 591 aa, Arabidopsis thaliana; identical to SEQ ID NO: 74754
  peptide (1)..(591): Ceres Seq. ID no. 6437430

SEQ ID NO: 75394 - protein, 561 aa, Arabidopsis thaliana; identical to SEQ ID NO: 74755
  peptide (1)..(561): Ceres Seq. ID no. 6437431

SEQ ID NO: 75395 - DNA, 1482 bp, Arabidopsis thaliana
  misc_feature (1)..(1482): Ceres Seq. ID no. 6437462
  misc_feature (1)..(1482): Ortholog of  Ceres SEQ ID NO 13597546 as cited in SEQ ID NO 65017
  misc_feature (1)..(1482): Ortholog of  Ceres SEQ ID NO 14307912 as cited in SEQ ID NO 66380
  misc_feature (1)..(1482): Ortholog of  Ceres SEQ ID NO 14308045 as cited in SEQ ID NO 67444
  misc_feature (1)..(1482): Ortholog of  Ceres SEQ ID NO 13654353 as cited in SEQ ID NO 68318
atgaaagaaatgtggggtgttgcactgagttttgttatagctttagtggtcgtcaagatcagtctctggctctatagatgggctaaccctaactgctccggcaaactacctccaggttcaatggggtttccggtgatcggagaaaccgttgagttcttcaaaccttacagtttcaacgaaatccatccatttgtcaagaaaagaatgcacggtggttcattattccggacgaatatcctcggctctaaaacgattgtttcgacagatccggaagtgaactttgagattctcaaacaagagaacaggtgtttcatcatgagctatccagaagctcttgttagaatctttgggaaagataacttgttcttcaagcaaggcaaggacttccacaggtacatgagacatattgctctgcagcttcttggccctgagtgtttgaagcagagatttatacaacaaatcgacatagcaacaagcgagcatctcaaatctgtctccttccaaggcgttgtagacgtcaaagatactagtggaagattgatattggaacaaatgatcctgatgatcataagtaacatcaaacctgagactaagagcaaactgatagagagttttagagatttcagctttgatttggttaggtccccttttgatccttctttttggaacgctctttacaatggtcttatggcacgcagcaatgtgatgaagatgctaaaaagaatgttcaaagagaggagagaagaagcaacatcggatgactcaaaatatggagacttcatggagacaatgatatatgaggtggagaaagaaggcgatacgatcaacgaggaaagatcagtagagctaatacttagtttactgattgcgtcttatgaaactacttctactatgactgcattaactgtgaaattcatagctgaaaaccccaaagtgcttatggagctgaagagagaacatgagaccatcctccaaaacagagctgataaagaatctggagttacttggaaagaatatagatccatgatgaatttcacccatatggttatcaatgagtctcttcgtttaggaagtttgtcacctgctatgtttagaaaggcggtgaatgatgtggagatcaaagggtatacaattccagcaggatggattgtattggtggttccatctcttcttcattatgaccctcaaatctatgaacaaccatgtgagtttaatccatggagatgggaggggaaagaattgctttctggctctaaaacgttcatggcgtttggtggtggtgcaagactatgtgcaggagcagagtttgctaggcttcagatggctatatttcttcatcatctagtcacaacgtatgacttctctttgatcgataaatcttatatcatccgagcacccttacttcgattctccaagccgatacgcataacgatctccgagaatcctttaagttcatctcatcaaaatgcaaatcttttttag

SEQ ID NO: 75396 - protein, 493 aa, Arabidopsis thaliana
  peptide (1)..(493): Ceres Seq. ID no. 6437463
MKEMWGVALSFVIALVVVKISLWLYRWANPNCSGKLPPGSMGFPVIGETVEFFKPYSFNEIHPFVKKRMHGGSLFRTNILGSKTIVSTDPEVNFEILKQENRCFIMSYPEALVRIFGKDNLFFKQGKDFHRYMRHIALQLLGPECLKQRFIQQIDIATSEHLKSVSFQGVVDVKDTSGRLILEQMILMIISNIKPETKSKLIESFRDFSFDLVRSPFDPSFWNALYNGLMARSNVMKMLKRMFKERREEATSDDSKYGDFMETMIYEVEKEGDTINEERSVELILSLLIASYETTSTMTALTVKFIAENPKVLMELKREHETILQNRADKESGVTWKEYRSMMNFTHMVINESLRLGSLSPAMFRKAVNDVEIKGYTIPAGWIVLVVPSLLHYDPQIYEQPCEFNPWRWEGKELLSGSKTFMAFGGGARLCAGAEFARLQMAIFLHHLVTTYDFSLIDKSYIIRAPLLRFSKPIRITISENPLSSSHQNANLF

SEQ ID NO: 75397 - protein, 490 aa, Arabidopsis thaliana
  peptide (1)..(490): Ceres Seq. ID no. 6437464
MWGVALSFVIALVVVKISLWLYRWANPNCSGKLPPGSMGFPVIGETVEFFKPYSFNEIHPFVKKRMHGGSLFRTNILGSKTIVSTDPEVNFEILKQENRCFIMSYPEALVRIFGKDNLFFKQGKDFHRYMRHIALQLLGPECLKQRFIQQIDIATSEHLKSVSFQGVVDVKDTSGRLILEQMILMIISNIKPETKSKLIESFRDFSFDLVRSPFDPSFWNALYNGLMARSNVMKMLKRMFKERREEATSDDSKYGDFMETMIYEVEKEGDTINEERSVELILSLLIASYETTSTMTALTVKFIAENPKVLMELKREHETILQNRADKESGVTWKEYRSMMNFTHMVINESLRLGSLSPAMFRKAVNDVEIKGYTIPAGWIVLVVPSLLHYDPQIYEQPCEFNPWRWEGKELLSGSKTFMAFGGGARLCAGAEFARLQMAIFLHHLVTTYDFSLIDKSYIIRAPLLRFSKPIRITISENPLSSSHQNANLF

SEQ ID NO: 75398 - protein, 453 aa, Arabidopsis thaliana
  peptide (1)..(453): Ceres Seq. ID no. 6437465
MGFPVIGETVEFFKPYSFNEIHPFVKKRMHGGSLFRTNILGSKTIVSTDPEVNFEILKQENRCFIMSYPEALVRIFGKDNLFFKQGKDFHRYMRHIALQLLGPECLKQRFIQQIDIATSEHLKSVSFQGVVDVKDTSGRLILEQMILMIISNIKPETKSKLIESFRDFSFDLVRSPFDPSFWNALYNGLMARSNVMKMLKRMFKERREEATSDDSKYGDFMETMIYEVEKEGDTINEERSVELILSLLIASYETTSTMTALTVKFIAENPKVLMELKREHETILQNRADKESGVTWKEYRSMMNFTHMVINESLRLGSLSPAMFRKAVNDVEIKGYTIPAGWIVLVVPSLLHYDPQIYEQPCEFNPWRWEGKELLSGSKTFMAFGGGARLCAGAEFARLQMAIFLHHLVTTYDFSLIDKSYIIRAPLLRFSKPIRITISENPLSSSHQNANLF

SEQ ID NO: 75399 - DNA, 1105 bp, Arabidopsis thaliana
  misc_feature (1)..(1105): Ceres Seq. ID no. 6437631
  misc_feature (1)..(1105): Ortholog of  Ceres SEQ ID NO 15179676 as cited in SEQ ID NO 52442
  misc_feature (1)..(1105): Ortholog of  Ceres SEQ ID NO 13582807 as cited in SEQ ID NO 67806
aataacctttttgttgctcaagcgccgttcctagggtttttctctgaggaagaagcgtttcatttctctgaatttcatcgaaaatggcggaaagaggaggagaaggcggcgcagagcgtggcggtgaccgtggtgacttcggacgtggattcggcggtggacgtggaggtggccgtggccgtgatcgtggtccaagaggccgtggaagacgtggaggccgtgcctcggaagaaacgaaatgggttccagtgaccaaactaggtcgtctagtggctgacaataaaataacgaagctagagcagatctatctccattctctcccagtaaaggagtaccaaatcatagatcatcttgttggtcctacgttgaaagacgaggttatgaagatcatgcctgttcagaaacaaaccagagctggtcaaaggactagattcaaggcctttgttgttgttggtgatggtaatggtcatgttggtttgggtgtcaagtgttctaaggaagttgctactgccattagaggagctattattcttgctaagctctctgttgttccggtgaggagaggttactgggggaataagattgggaagccacacactgtgccttgtaaggttactgggaagtgtggctctgttactgtgagaatggttcctgctccgagaggttctggtattgttgctgctagggttcctaagaaggttcttcagttcgctggtattgatgatgtctttacttcttccagaggatctactaaaactcttggaaactttgtcaaggcgacgtttgactgcttacagaagacatatgggttccttacaccagagttctggaaagagactagattctccagatcgccctaccaagagcacactgatttcttgtcgactaaggctgtttctgcaaccaaggttatcacggagggtgaagaccaagcttaagaccttcatgagataagttttggttgttcttaatactaattcctactttgaaaaagagtatttttttttcttgattatctatgagttttgttattggtggtttcgttactgttttggattttgttagatgtttgccttaatgcaaatttcaatgaaatagcttttgc

SEQ ID NO: 75400 - protein, 284 aa, Arabidopsis thaliana; identical to SEQ ID NO: 38082
  peptide (1)..(284): Ceres Seq. ID no. 6437632

SEQ ID NO: 75401 - protein, 185 aa, Arabidopsis thaliana; identical to SEQ ID NO: 38083
  peptide (1)..(185): Ceres Seq. ID no. 6437633

SEQ ID NO: 75402 - protein, 182 aa, Arabidopsis thaliana; identical to SEQ ID NO: 38084
  peptide (1)..(182): Ceres Seq. ID no. 6437634

SEQ ID NO: 75403 - DNA, 3495 bp, Arabidopsis thaliana
  misc_feature (1)..(3495): Ceres Seq. ID no. 6437691
  misc_feature (1)..(3495): Ortholog of  Ceres SEQ ID NO 13600485 as cited in SEQ ID NO 1221
atgaagagggttagagaagaggtttacgttgaaccacaaatgcgaggacctactgtttcctctcgaggagaaacaaatggtaggccttcaacgattagtggcggaggaacaacgggagggctaacaacagttgatgctttgacatatcttaaagctgtgaaggatatgtttcaagacaacaaagagaaatatgagactttccttggagtcatgaaggacttcaaagctcagagagttgacactaatggcgtcatagcaagagtaaaagatttgttcaagggctatgacgacttacttttgggttttaataccttcttacctaaggggtacaaaattacccttcagcctgaggatgagaaacctaagaagccagtggatttccaagtagctatcgaatttgtcaacaggattaaggcgcgatttggaggtgatgaccgtgcatataaaaaatttctagacatcttgaacatgtatagaaaggaaaccaagtccatcaacgaggtctatcaagaggttactctgttgttccaggaccatgaagatctgctcggggagtttgttcatttcttaccagattttcgaggatcagtttctgttaatgaccctcttttccagaggaacacaataccgcgtgatagaaattctacatttcctggcatgcatccaaagcattttgagaagaaaataaaacggagtaggcatgatgagtatactgaactctctgatcaacgagaggatggtgatgagaaccttgtggcctactctgctggtaattctctgggaaaatcccttgctaatcaaggtcaatggccaggatatcctaaggtagaggacaccgaggggattcaaatttatgaaagtaacgggggccatgaaagagatccagacatcggaagtcaaaaaaatctactgtctacaaaccatatggccaaggcaataaatgaactggatcttactgactgtgcacaatgtacaccaagttatcgtcgcttgccagatgattatcctattcagattccaagctacagaaattcacttggtgaaaaggtgcttaacgatcattgggtatctgtcacatcggggagtgaggattactcattcaaacacatgcgcaaaaatcagtatgaagaaagcttgtttcgatgtgaggatgataggtttgagttggacatgttactagagtctgtaagtgcagccatcaagcgtgtggaaagtcttctggaaaagattaacaacaatacaatctctatagagacaccaatttgtattagagaacacttatcaggcaaatgcattgagcggttgtacggggattatgggcttgatgtcatggattttctgaagaagaattctcatatcgccttacctgtgattctaacacgcttgaagcagaaacaagaagaatgggctaggtgtcgcgctgatttcaggaaagtatgggctgaagtatatgctaagaatcatcacaaatcactcgatcatcgtagtttctatttcaagcagcaggactccaagaatttaagcacaaaaggtttagtggcggagattaaagatatcagtgagagaaagcataaagaagacctgcttcgtgccattgctgttggaactaagccctctttcaccccagatgtggagttcatttatactgatacaaaagttcatactgacctatataagctaatcaagtattattgtgaggaaatatgtgctactgaacagtcggataaagtaatgaagctatgggtaacctttttggagcccatgtttggcgttccttctaggtctgaaactattgagacaatgaaagatgttgcaaagatcgaagacaaccaagagcaccatgatgcaagtgaggcagtgaaggaaaatacatgtgacggttctatggcctcaaaccttaaaccgttaacacctccaaaaatgcctaacaaagaaaacccaatgatacaaggaagctcttttgcgcaagatttgccagtcaacacaggagaaagcattcagcaagataaactgcatgatgttgcagctataactaatgaggatagccagccttccaaactggtgtcaaccagaaacgatttgataatggagggtgtagagaatcgtagtagggtcagtgatgtatcaatgggagggcataaggtcgagcgagaagagggtgaattatcccccactgaaagttgcgagcaagaaaatttcgaggtttataaagagaatgggctcgagcctgtgcagaaactaccagataatgaaataagtaatacagaccgagaacccaaagagggtgcatgtggtactgaagctgtaacaaggagcaatgccctccctgaagatgatgataataaaataactcaaaagttatcagaaggggatgaaaatgcctcgaaatttattgtctcagcaagcaagtttggtggccaagtttcttccgatgaagagcataaaggagctgagagtgaaaatgaggctggagggatggttaattccaacgagggtgaagatggatcctttttcacattttcagaacggtatctgcaacctgtaaagccccttgcaaagcatgtgcctgggacactgcaagcaagtgaatgcgacacccggaatgattctcgagttttctatgggaatgattcactctatgtgctttttaggcttcatcaaatgttgtacgagagaatacaatcagcaaagatacattcagagaggaaatggaaagctccagatagcacatctactgattcttataccaggttcatggaagccctttacaatttacttgatggctctagcgacaatacaaagtttgaagatgaatgtcgagctattatcggagcacaatcatatgttctcttcacattggacaagctagttcaaaagtttgttaagcatcttcacgcagtcgcagctgatgagacagacaccaagcttctgcagctatatgcatacgagaactacagaaaaccaggaagattctttgatatagtgtaccatgagaatgctcgagcccttctccatgatcagaacatatacaggattgaatattcatctgcccaaacccgtctcggaattcaacttatgaacagctggaatgatcagcctgaagttacagctgtaacagtggaaccaggttttgctaattatctgcagaatgactttctttcgtttgtcagtgatgaagagaaacccggactatttctgaaaaggaacaaggcaaaattaagtggtccgggtgaagaatctctagggatgtcacgtgccttggaaggattgaacattatcaatgaggttgaatgtaagatagcttgcagttctttcaaggtcaagtatgaaccacacacagcagatcttttatatagaagaaagcagaagaaagcaacactgaatccaactggacctgaaaatgttaaaacctctgatagtagtgaactctcgagaaagaaacgaatatcgcgctttcacatgagtcttaaccgcagacttgtcgccttgccttaa

SEQ ID NO: 75404 - protein, 1164 aa, Arabidopsis thaliana
  peptide (1)..(1164): Ceres Seq. ID no. 6437692
MKRVREEVYVEPQMRGPTVSSRGETNGRPSTISGGGTTGGLTTVDALTYLKAVKDMFQDNKEKYETFLGVMKDFKAQRVDTNGVIARVKDLFKGYDDLLLGFNTFLPKGYKITLQPEDEKPKKPVDFQVAIEFVNRIKARFGGDDRAYKKFLDILNMYRKETKSINEVYQEVTLLFQDHEDLLGEFVHFLPDFRGSVSVNDPLFQRNTIPRDRNSTFPGMHPKHFEKKIKRSRHDEYTELSDQREDGDENLVAYSAGNSLGKSLANQGQWPGYPKVEDTEGIQIYESNGGHERDPDIGSQKNLLSTNHMAKAINELDLTDCAQCTPSYRRLPDDYPIQIPSYRNSLGEKVLNDHWVSVTSGSEDYSFKHMRKNQYEESLFRCEDDRFELDMLLESVSAAIKRVESLLEKINNNTISIETPICIREHLSGKCIERLYGDYGLDVMDFLKKNSHIALPVILTRLKQKQEEWARCRADFRKVWAEVYAKNHHKSLDHRSFYFKQQDSKNLSTKGLVAEIKDISERKHKEDLLRAIAVGTKPSFTPDVEFIYTDTKVHTDLYKLIKYYCEEICATEQSDKVMKLWVTFLEPMFGVPSRSETIETMKDVAKIEDNQEHHDASEAVKENTCDGSMASNLKPLTPPKMPNKENPMIQGSSFAQDLPVNTGESIQQDKLHDVAAITNEDSQPSKLVSTRNDLIMEGVENRSRVSDVSMGGHKVEREEGELSPTESCEQENFEVYKENGLEPVQKLPDNEISNTDREPKEGACGTEAVTRSNALPEDDDNKITQKLSEGDENASKFIVSASKFGGQVSSDEEHKGAESENEAGGMVNSNEGEDGSFFTFSERYLQPVKPLAKHVPGTLQASECDTRNDSRVFYGNDSLYVLFRLHQMLYERIQSAKIHSERKWKAPDSTSTDSYTRFMEALYNLLDGSSDNTKFEDECRAIIGAQSYVLFTLDKLVQKFVKHLHAVAADETDTKLLQLYAYENYRKPGRFFDIVYHENARALLHDQNIYRIEYSSAQTRLGIQLMNSWNDQPEVTAVTVEPGFANYLQNDFLSFVSDEEKPGLFLKRNKAKLSGPGEESLGMSRALEGLNIINEVECKIACSSFKVKYEPHTADLLYRRKQKKATLNPTGPENVKTSDSSELSRKKRISRFHMSLNRRLVALP

SEQ ID NO: 75405 - protein, 1151 aa, Arabidopsis thaliana
  peptide (1)..(1151): Ceres Seq. ID no. 6437693
MRGPTVSSRGETNGRPSTISGGGTTGGLTTVDALTYLKAVKDMFQDNKEKYETFLGVMKDFKAQRVDTNGVIARVKDLFKGYDDLLLGFNTFLPKGYKITLQPEDEKPKKPVDFQVAIEFVNRIKARFGGDDRAYKKFLDILNMYRKETKSINEVYQEVTLLFQDHEDLLGEFVHFLPDFRGSVSVNDPLFQRNTIPRDRNSTFPGMHPKHFEKKIKRSRHDEYTELSDQREDGDENLVAYSAGNSLGKSLANQGQWPGYPKVEDTEGIQIYESNGGHERDPDIGSQKNLLSTNHMAKAINELDLTDCAQCTPSYRRLPDDYPIQIPSYRNSLGEKVLNDHWVSVTSGSEDYSFKHMRKNQYEESLFRCEDDRFELDMLLESVSAAIKRVESLLEKINNNTISIETPICIREHLSGKCIERLYGDYGLDVMDFLKKNSHIALPVILTRLKQKQEEWARCRADFRKVWAEVYAKNHHKSLDHRSFYFKQQDSKNLSTKGLVAEIKDISERKHKEDLLRAIAVGTKPSFTPDVEFIYTDTKVHTDLYKLIKYYCEEICATEQSDKVMKLWVTFLEPMFGVPSRSETIETMKDVAKIEDNQEHHDASEAVKENTCDGSMASNLKPLTPPKMPNKENPMIQGSSFAQDLPVNTGESIQQDKLHDVAAITNEDSQPSKLVSTRNDLIMEGVENRSRVSDVSMGGHKVEREEGELSPTESCEQENFEVYKENGLEPVQKLPDNEISNTDREPKEGACGTEAVTRSNALPEDDDNKITQKLSEGDENASKFIVSASKFGGQVSSDEEHKGAESENEAGGMVNSNEGEDGSFFTFSERYLQPVKPLAKHVPGTLQASECDTRNDSRVFYGNDSLYVLFRLHQMLYERIQSAKIHSERKWKAPDSTSTDSYTRFMEALYNLLDGSSDNTKFEDECRAIIGAQSYVLFTLDKLVQKFVKHLHAVAADETDTKLLQLYAYENYRKPGRFFDIVYHENARALLHDQNIYRIEYSSAQTRLGIQLMNSWNDQPEVTAVTVEPGFANYLQNDFLSFVSDEEKPGLFLKRNKAKLSGPGEESLGMSRALEGLNIINEVECKIACSSFKVKYEPHTADLLYRRKQKKATLNPTGPENVKTSDSSELSRKKRISRFHMSLNRRLVALP

SEQ ID NO: 75406 - protein, 1109 aa, Arabidopsis thaliana
  peptide (1)..(1109): Ceres Seq. ID no. 6437694
MFQDNKEKYETFLGVMKDFKAQRVDTNGVIARVKDLFKGYDDLLLGFNTFLPKGYKITLQPEDEKPKKPVDFQVAIEFVNRIKARFGGDDRAYKKFLDILNMYRKETKSINEVYQEVTLLFQDHEDLLGEFVHFLPDFRGSVSVNDPLFQRNTIPRDRNSTFPGMHPKHFEKKIKRSRHDEYTELSDQREDGDENLVAYSAGNSLGKSLANQGQWPGYPKVEDTEGIQIYESNGGHERDPDIGSQKNLLSTNHMAKAINELDLTDCAQCTPSYRRLPDDYPIQIPSYRNSLGEKVLNDHWVSVTSGSEDYSFKHMRKNQYEESLFRCEDDRFELDMLLESVSAAIKRVESLLEKINNNTISIETPICIREHLSGKCIERLYGDYGLDVMDFLKKNSHIALPVILTRLKQKQEEWARCRADFRKVWAEVYAKNHHKSLDHRSFYFKQQDSKNLSTKGLVAEIKDISERKHKEDLLRAIAVGTKPSFTPDVEFIYTDTKVHTDLYKLIKYYCEEICATEQSDKVMKLWVTFLEPMFGVPSRSETIETMKDVAKIEDNQEHHDASEAVKENTCDGSMASNLKPLTPPKMPNKENPMIQGSSFAQDLPVNTGESIQQDKLHDVAAITNEDSQPSKLVSTRNDLIMEGVENRSRVSDVSMGGHKVEREEGELSPTESCEQENFEVYKENGLEPVQKLPDNEISNTDREPKEGACGTEAVTRSNALPEDDDNKITQKLSEGDENASKFIVSASKFGGQVSSDEEHKGAESENEAGGMVNSNEGEDGSFFTFSERYLQPVKPLAKHVPGTLQASECDTRNDSRVFYGNDSLYVLFRLHQMLYERIQSAKIHSERKWKAPDSTSTDSYTRFMEALYNLLDGSSDNTKFEDECRAIIGAQSYVLFTLDKLVQKFVKHLHAVAADETDTKLLQLYAYENYRKPGRFFDIVYHENARALLHDQNIYRIEYSSAQTRLGIQLMNSWNDQPEVTAVTVEPGFANYLQNDFLSFVSDEEKPGLFLKRNKAKLSGPGEESLGMSRALEGLNIINEVECKIACSSFKVKYEPHTADLLYRRKQKKATLNPTGPENVKTSDSSELSRKKRISRFHMSLNRRLVALP

SEQ ID NO: 75407 - DNA, 3078 bp, Arabidopsis thaliana
  misc_feature (1)..(3078): Ceres Seq. ID no. 6437869
  misc_feature (1)..(3078): Ortholog of  Ceres SEQ ID NO 13660597 as cited in SEQ ID NO 67655
  misc_feature (1)..(3078): Ortholog of  Ceres SEQ ID NO 15179308 as cited in SEQ ID NO 0
atggtgtcaccgggacggagtgaatctatctccggcgagaacaatacaacccttcccgacggaagcagcggcaagagaattcctccatcgtctccttccggagacaaatctccttcatctaaacgctcaaagttgggagatggcagcggcgcttctaccgatagcagtgaagctccaacctccgaagacgccaagattgccgaaggcttaacaccgactttgccagatagttctttttcgggatggacatatcgacactgtacatttaagaccccatggtgtaaattgctatcacagtctgcaaagcaacaaaacctttgcctttatgaatcttcatgcacttttggttcttgtttaacctccgacttcacattacatgaccggaatctcggtgcatttttgtgcaagatcacaagaattcagcgcaatggcaatgttgtagcggttctagatatcacaggaaccgggggacctctgcggataaataaagcatttgtcatcaagaatgtcagccatgagctacactctggtgacgaattggttcctgcaggaaaatttctacagttagagagagaggcaagagatccatcaagagtttcgatgttggcatcgcttgaaatctcgcgtgagaatcctgctacttctggggtccaagaaggcgtggaaggatattttcctgttaacaatcaaagtaataaagctgcagacagtggagtagtcatcagccacaaccaagattccaaaatggagatattagatgaggaaaacgaggtgacaagaaaccggagggcacaacaagctgcaaagttcagggaatatattcgagctggtattgttgacggcaaaagattggaattttcattcgaaaattttccttattatttgagtgagcatacaaagtatgtcttactagctgtttcagatatgcatctgaataagatgaatataggatatgccccatatgcatccgacttgaccattttgaatccaaggatattgctttctggtcctgcagggtctgaaatataccaagagatattagctaaagcacttgccaattcattcaatgcgaaattgctaatatttgacagcaatccaattttgggggttatgactgctaaagaatttgagtcactgatgaatggacctgcgctcattgatcgaggaaaaagcttagatttgtcatcaggtcaaggagattcatctatcccttctcctgctacttctccccgttcatttggaactccaatttctggtttactgatacttcattggggaaaaacacttgcaggggacagggtaagattcttcggtgatgagttgtgtccggggctacctacctcaaggggaccaccttatgggtttatagggaaagtactgttagtatttgatgagaatccttcagctaaagtgggtgttagatttgagaatccagtacctgatggagttgatcttggtcaactgtgtgaaatgggacatgggttcttctgcagtgctactgatcttcagttcgaaagctcggcatctgacgatctaaatgaattacttgttaccaaattgtttgaggttgcccatgatcagagcagaacttgtccggttattatatttttgaaagatgctgagaaatattttgttggaaattcccatttttgctctgcattcaaaagcaaacttgaagttatctcagataacctaattgtgatctgttcccagacacattctgataatcccaaggagaagggtattggacgtctaacggatctctttgtgaataaagttactatatacatgccacaggtctgttacgctgttctagttgacggtgaggaacttcttaaatcttggaagtatcatttggatcgtgatgctgagactttgaaaatgaaggctaattacaatcacttgcgcatggtgttgggacgatgtggtatagagtgtgaaggcattgagacgctgtgcatgaaggatctcacacttcgaagagacagtgcagaaaagatcattggatgggctcttagtcaccatataaagtctaatcctggtgctgatccagatgttagggttattttgtctcttgagagcttaaaatgtggaatagaactcttggaaattgaatctaagaagtctctcaaggacattgtgacagaaaatacgtttgaaataagtgatattattccgcccagtgaaattggtgttacattcgatgacattggggcacttgagaatgtcaaagacactttaaaggaactggttatgcttccttttcaatggcctgaacttttctgcaaggggcaattaacaaagccttgtaacggaattctcttatttggaccttctggaactggaaagaccatgcttgcaaaggcagtggcaacggaagctggtgctaacctcatcaacatgtcaatgtcaaggtggtttagtgagggtgagaaatatgtcaaagctgtcttttcgttggctagtaaaatttccccaagcattatctttttggacgaggtggaaagcatgctacatcggtacaggctgaagacgaaaaatgagttcataataaattgggacggtctgaggacaaatgaaaaggaacgtgttctggttcttgcagccacaaatagaccttttgaccttgacgaggctgtcattagaaggttgcctcataggttgatggtgggactaccagatgctcgtagtagatcaaagatattgaaggtgatactttcaaaagaagacttgtcccctgatttcgatattgatgaggttgctagtatgacaaatggatattctggaaacgatcttaagaatctatgtgttactgctgcccgccgtcgaatcatagagatagtggagaaggaaaaaagtgagcgagatgctgctgtggctgaaggcagagttcctccagctggaagtggaggttctgatctccgagttttaaaaatggaggatttcagaaacgcactcgagctggtgagtatgagcatctcatcaaagtctgtcaacatgacagcgcttcgacaatggaacgaagactacggggaaggtggatccagaaggaatgaatcattcagccagtacgtgtag

SEQ ID NO: 75408 - protein, 1025 aa, Arabidopsis thaliana
  peptide (1)..(1025): Ceres Seq. ID no. 6437870
MVSPGRSESISGENNTTLPDGSSGKRIPPSSPSGDKSPSSKRSKLGDGSGASTDSSEAPTSEDAKIAEGLTPTLPDSSFSGWTYRHCTFKTPWCKLLSQSAKQQNLCLYESSCTFGSCLTSDFTLHDRNLGAFLCKITRIQRNGNVVAVLDITGTGGPLRINKAFVIKNVSHELHSGDELVPAGKFLQLEREARDPSRVSMLASLEISRENPATSGVQEGVEGYFPVNNQSNKAADSGVVISHNQDSKMEILDEENEVTRNRRAQQAAKFREYIRAGIVDGKRLEFSFENFPYYLSEHTKYVLLAVSDMHLNKMNIGYAPYASDLTILNPRILLSGPAGSEIYQEILAKALANSFNAKLLIFDSNPILGVMTAKEFESLMNGPALIDRGKSLDLSSGQGDSSIPSPATSPRSFGTPISGLLILHWGKTLAGDRVRFFGDELCPGLPTSRGPPYGFIGKVLLVFDENPSAKVGVRFENPVPDGVDLGQLCEMGHGFFCSATDLQFESSASDDLNELLVTKLFEVAHDQSRTCPVIIFLKDAEKYFVGNSHFCSAFKSKLEVISDNLIVICSQTHSDNPKEKGIGRLTDLFVNKVTIYMPQVCYAVLVDGEELLKSWKYHLDRDAETLKMKANYNHLRMVLGRCGIECEGIETLCMKDLTLRRDSAEKIIGWALSHHIKSNPGADPDVRVILSLESLKCGIELLEIESKKSLKDIVTENTFEISDIIPPSEIGVTFDDIGALENVKDTLKELVMLPFQWPELFCKGQLTKPCNGILLFGPSGTGKTMLAKAVATEAGANLINMSMSRWFSEGEKYVKAVFSLASKISPSIIFLDEVESMLHRYRLKTKNEFIINWDGLRTNEKERVLVLAATNRPFDLDEAVIRRLPHRLMVGLPDARSRSKILKVILSKEDLSPDFDIDEVASMTNGYSGNDLKNLCVTAARRRIIEIVEKEKSERDAAVAEGRVPPAGSGGSDLRVLKMEDFRNALELVSMSISSKSVNMTALRQWNEDYGEGGSRRNESFSQYV

SEQ ID NO: 75409 - protein, 825 aa, Arabidopsis thaliana
  peptide (1)..(825): Ceres Seq. ID no. 6437871
MLASLEISRENPATSGVQEGVEGYFPVNNQSNKAADSGVVISHNQDSKMEILDEENEVTRNRRAQQAAKFREYIRAGIVDGKRLEFSFENFPYYLSEHTKYVLLAVSDMHLNKMNIGYAPYASDLTILNPRILLSGPAGSEIYQEILAKALANSFNAKLLIFDSNPILGVMTAKEFESLMNGPALIDRGKSLDLSSGQGDSSIPSPATSPRSFGTPISGLLILHWGKTLAGDRVRFFGDELCPGLPTSRGPPYGFIGKVLLVFDENPSAKVGVRFENPVPDGVDLGQLCEMGHGFFCSATDLQFESSASDDLNELLVTKLFEVAHDQSRTCPVIIFLKDAEKYFVGNSHFCSAFKSKLEVISDNLIVICSQTHSDNPKEKGIGRLTDLFVNKVTIYMPQVCYAVLVDGEELLKSWKYHLDRDAETLKMKANYNHLRMVLGRCGIECEGIETLCMKDLTLRRDSAEKIIGWALSHHIKSNPGADPDVRVILSLESLKCGIELLEIESKKSLKDIVTENTFEISDIIPPSEIGVTFDDIGALENVKDTLKELVMLPFQWPELFCKGQLTKPCNGILLFGPSGTGKTMLAKAVATEAGANLINMSMSRWFSEGEKYVKAVFSLASKISPSIIFLDEVESMLHRYRLKTKNEFIINWDGLRTNEKERVLVLAATNRPFDLDEAVIRRLPHRLMVGLPDARSRSKILKVILSKEDLSPDFDIDEVASMTNGYSGNDLKNLCVTAARRRIIEIVEKEKSERDAAVAEGRVPPAGSGGSDLRVLKMEDFRNALELVSMSISSKSVNMTALRQWNEDYGEGGSRRNESFSQYV

SEQ ID NO: 75410 - protein, 777 aa, Arabidopsis thaliana
  peptide (1)..(777): Ceres Seq. ID no. 6437872
MEILDEENEVTRNRRAQQAAKFREYIRAGIVDGKRLEFSFENFPYYLSEHTKYVLLAVSDMHLNKMNIGYAPYASDLTILNPRILLSGPAGSEIYQEILAKALANSFNAKLLIFDSNPILGVMTAKEFESLMNGPALIDRGKSLDLSSGQGDSSIPSPATSPRSFGTPISGLLILHWGKTLAGDRVRFFGDELCPGLPTSRGPPYGFIGKVLLVFDENPSAKVGVRFENPVPDGVDLGQLCEMGHGFFCSATDLQFESSASDDLNELLVTKLFEVAHDQSRTCPVIIFLKDAEKYFVGNSHFCSAFKSKLEVISDNLIVICSQTHSDNPKEKGIGRLTDLFVNKVTIYMPQVCYAVLVDGEELLKSWKYHLDRDAETLKMKANYNHLRMVLGRCGIECEGIETLCMKDLTLRRDSAEKIIGWALSHHIKSNPGADPDVRVILSLESLKCGIELLEIESKKSLKDIVTENTFEISDIIPPSEIGVTFDDIGALENVKDTLKELVMLPFQWPELFCKGQLTKPCNGILLFGPSGTGKTMLAKAVATEAGANLINMSMSRWFSEGEKYVKAVFSLASKISPSIIFLDEVESMLHRYRLKTKNEFIINWDGLRTNEKERVLVLAATNRPFDLDEAVIRRLPHRLMVGLPDARSRSKILKVILSKEDLSPDFDIDEVASMTNGYSGNDLKNLCVTAARRRIIEIVEKEKSERDAAVAEGRVPPAGSGGSDLRVLKMEDFRNALELVSMSISSKSVNMTALRQWNEDYGEGGSRRNESFSQYV

SEQ ID NO: 75411 - DNA, 801 bp, Arabidopsis thaliana
  misc_feature (1)..(801): Ceres Seq. ID no. 6437873
  misc_feature (1)..(801): Ortholog of  Ceres SEQ ID NO 14314172 as cited in SEQ ID NO 59584
atgttagttgcgtatcctgcgggaactatcaacaaattccaaatccctattagctgctatgccgctttgcgcagattcaagacctcgccttttggtcctctgattagttgttctgtctccccaagatcaatagttccttgtagcaatgtagagtgttatcattcatctttttctacaaaatatcaaattcagcctcgaaggagatggatgttttgtaactcacgcaacaactcgatttcatcggatgatgagtaccgttcatcacccaacatagctataagtcttttaagacgttacaggaccgtgattggacgcggtgaaggcgaaaccttaaaagaattcatatccgctggtgtgaatgcatatgcgctcggctgcacagatgaagatttgagaaaagaactaatggctatgaaagattcgggtttagagattgagagaatggagaattacggcggaagcacacagactaaatccaaaattacgctgtctgaggtagatgaatgcatattgtggcttaggattgtattcatcacgatcttgtgtacgccgcaaccaacagtcataagatggtcatcgactccttcggtttctgatgaaattctaagcaaatggagaggcttttgcgcggttatagcaaatgcatactatattagaggaatggcttggctgcctgtgaagactcttcagttggagcagatggcggtgacaggacaatcagaggagccgtccgttgtggccagccgaatgagactggtgtttagcactctcgaggttagtcttattgtatctgtcttataa

SEQ ID NO: 75412 - protein, 266 aa, Arabidopsis thaliana
  peptide (1)..(266): Ceres Seq. ID no. 6437874
MLVAYPAGTINKFQIPISCYAALRRFKTSPFGPLISCSVSPRSIVPCSNVECYHSSFSTKYQIQPRRRWMFCNSRNNSISSDDEYRSSPNIAISLLRRYRTVIGRGEGETLKEFISAGVNAYALGCTDEDLRKELMAMKDSGLEIERMENYGGSTQTKSKITLSEVDECILWLRIVFITILCTPQPTVIRWSSTPSVSDEILSKWRGFCAVIANAYYIRGMAWLPVKTLQLEQMAVTGQSEEPSVVASRMRLVFSTLEVSLIVSVL

SEQ ID NO: 75413 - protein, 197 aa, Arabidopsis thaliana
  peptide (1)..(197): Ceres Seq. ID no. 6437875
MFCNSRNNSISSDDEYRSSPNIAISLLRRYRTVIGRGEGETLKEFISAGVNAYALGCTDEDLRKELMAMKDSGLEIERMENYGGSTQTKSKITLSEVDECILWLRIVFITILCTPQPTVIRWSSTPSVSDEILSKWRGFCAVIANAYYIRGMAWLPVKTLQLEQMAVTGQSEEPSVVASRMRLVFSTLEVSLIVSVL

SEQ ID NO: 75414 - DNA, 2052 bp, Arabidopsis thaliana
  misc_feature (1)..(2052): Ceres Seq. ID no. 6437876
  misc_feature (1)..(2052): Ortholog of  Ceres SEQ ID NO 12586556 as cited in SEQ ID NO 64667
  misc_feature (1)..(2052): Ortholog of  Ceres SEQ ID NO 13660894 as cited in SEQ ID NO 67475
atgatccgatcacgaagtgtcttgttaattttcaggaaggtgttgtatcaatcgtcttgtcttaagtgtttattatgtgcaaactctttctctacttcagtttcgtcaagcttgggttttcgagcgacgaacaaagagttaaaccagatgataagatcggggtatatcgccgaagctagagatatttttgagaaactggaagcgaggaacacagtgacatggaatacgatgataagcgggtatgtgaaaaggcgtgaaatgaatcaagcacggaaactgttcgacgtaatgcctaagagagatgttgtgacttggaacacgatgatttcggggtatgtttcatgtggtgggattaggtttcttgaggaagcaaggaagctgtttgatgaaatgccttcaagggattctttttcatggaacactatgattagtggttatgcgaagaatcggaggataggtgaagcgttgttgttatttgagaaaatgcctgagagaaatgcagtgtcatggagtgctatgatcactgggttttgtcagaacggtgaagtggatagcgcggttgtgttgtttcggaaaatgcctgtgaaggattcgtctcctctatgtgcacttgtggctggtcttattaaaaacgagagactttcagaagctgcgtgggttttgggtcagtatgggagtttagtttcaggaagggaagatttggtgtatgcttataacactttgattgttggatatggacagagaggacaagtagaagcagctcgatgtctgtttgatcagattcctgatctctgtggtgatgatcatggtggagagtttagagagaggttctgtaaaaatgttgtgtcatggaattctatgatcaaagcttacttgaaagtgggtgatgtggtctctgcaaggttgctatttgatcagatgaaagaccgcgatacaatttcttggaacacaatgattgatggatacgtacatgtttccaggatggaagatgcttttgctctgttttcggaaatgccgaaccgtgatgcacattcgtggaacatgatggtctcgggttatgctagtgttggcaatgtagagcttgctcgccactactttgaaaaaacacctgagaaacatacagtctcgtggaactcgataatagcagcttatgagaaaaacaaggactacaaagaagctgttgatttgtttatccggatgaacattgaaggagagaagcctgacccacatactttaacttctcttctcagtgcatctaccgggcttgtgaatctgcgtttaggaatgcagatgcaccaaatcgttgtcaagactgtgatccccgatgttccagtccacaatgcccttatcactatgtattcaagatgcggtgaaataatggagtcgaggagaatcttcgatgaaatgaaactcaaaagagaagtaatcacatggaatgcaatgataggaggatatgcatttcatggtaatgcctcagaggccttgaatctgttcgggtcgatgaaaagcaacgggatatatccttctcacataacattcgtctcagttctgaacgcttgtgctcacgcgggacttgttgatgaggctaaagcacagtttgtgtccatgatgagtgtgtacaagatcgagccgcagatggaacattattcttccctggtcaacgttaccagtggacaagggcagtttgaagaggccatgtatatcataacgagtatgccttttgagccagacaaaacggtatggggtgcattattggatgcttgtaggatatataacaatgtagggcttgcacatgttgcagctgaagcaatgtcgagactcgaaccagagagctcaacaccttatgtactgttatataacatgtatgcggatatgggactatgggacgaagcttctcaagtgagaatgaacatggagaccattcaaaatattggtggcttcaaattcacctcttacacttgtagcttgtgcttcatccaattctttgcagcgattaaaacacacaaaaagtttgcatatgaattgctgactctgaatttctcaaaaaggtaa

SEQ ID NO: 75415 - protein, 683 aa, Arabidopsis thaliana
  peptide (1)..(683): Ceres Seq. ID no. 6437877
MIRSRSVLLIFRKVLYQSSCLKCLLCANSFSTSVSSSLGFRATNKELNQMIRSGYIAEARDIFEKLEARNTVTWNTMISGYVKRREMNQARKLFDVMPKRDVVTWNTMISGYVSCGGIRFLEEARKLFDEMPSRDSFSWNTMISGYAKNRRIGEALLLFEKMPERNAVSWSAMITGFCQNGEVDSAVVLFRKMPVKDSSPLCALVAGLIKNERLSEAAWVLGQYGSLVSGREDLVYAYNTLIVGYGQRGQVEAARCLFDQIPDLCGDDHGGEFRERFCKNVVSWNSMIKAYLKVGDVVSARLLFDQMKDRDTISWNTMIDGYVHVSRMEDAFALFSEMPNRDAHSWNMMVSGYASVGNVELARHYFEKTPEKHTVSWNSIIAAYEKNKDYKEAVDLFIRMNIEGEKPDPHTLTSLLSASTGLVNLRLGMQMHQIVVKTVIPDVPVHNALITMYSRCGEIMESRRIFDEMKLKREVITWNAMIGGYAFHGNASEALNLFGSMKSNGIYPSHITFVSVLNACAHAGLVDEAKAQFVSMMSVYKIEPQMEHYSSLVNVTSGQGQFEEAMYIITSMPFEPDKTVWGALLDACRIYNNVGLAHVAAEAMSRLEPESSTPYVLLYNMYADMGLWDEASQVRMNMETIQNIGGFKFTSYTCSLCFIQFFAAIKTHKKFAYELLTLNFSKR

SEQ ID NO: 75416 - protein, 634 aa, Arabidopsis thaliana
  peptide (1)..(634): Ceres Seq. ID no. 6437878
MIRSGYIAEARDIFEKLEARNTVTWNTMISGYVKRREMNQARKLFDVMPKRDVVTWNTMISGYVSCGGIRFLEEARKLFDEMPSRDSFSWNTMISGYAKNRRIGEALLLFEKMPERNAVSWSAMITGFCQNGEVDSAVVLFRKMPVKDSSPLCALVAGLIKNERLSEAAWVLGQYGSLVSGREDLVYAYNTLIVGYGQRGQVEAARCLFDQIPDLCGDDHGGEFRERFCKNVVSWNSMIKAYLKVGDVVSARLLFDQMKDRDTISWNTMIDGYVHVSRMEDAFALFSEMPNRDAHSWNMMVSGYASVGNVELARHYFEKTPEKHTVSWNSIIAAYEKNKDYKEAVDLFIRMNIEGEKPDPHTLTSLLSASTGLVNLRLGMQMHQIVVKTVIPDVPVHNALITMYSRCGEIMESRRIFDEMKLKREVITWNAMIGGYAFHGNASEALNLFGSMKSNGIYPSHITFVSVLNACAHAGLVDEAKAQFVSMMSVYKIEPQMEHYSSLVNVTSGQGQFEEAMYIITSMPFEPDKTVWGALLDACRIYNNVGLAHVAAEAMSRLEPESSTPYVLLYNMYADMGLWDEASQVRMNMETIQNIGGFKFTSYTCSLCFIQFFAAIKTHKKFAYELLTLNFSKR

SEQ ID NO: 75417 - protein, 607 aa, Arabidopsis thaliana
  peptide (1)..(607): Ceres Seq. ID no. 6437879
MISGYVKRREMNQARKLFDVMPKRDVVTWNTMISGYVSCGGIRFLEEARKLFDEMPSRDSFSWNTMISGYAKNRRIGEALLLFEKMPERNAVSWSAMITGFCQNGEVDSAVVLFRKMPVKDSSPLCALVAGLIKNERLSEAAWVLGQYGSLVSGREDLVYAYNTLIVGYGQRGQVEAARCLFDQIPDLCGDDHGGEFRERFCKNVVSWNSMIKAYLKVGDVVSARLLFDQMKDRDTISWNTMIDGYVHVSRMEDAFALFSEMPNRDAHSWNMMVSGYASVGNVELARHYFEKTPEKHTVSWNSIIAAYEKNKDYKEAVDLFIRMNIEGEKPDPHTLTSLLSASTGLVNLRLGMQMHQIVVKTVIPDVPVHNALITMYSRCGEIMESRRIFDEMKLKREVITWNAMIGGYAFHGNASEALNLFGSMKSNGIYPSHITFVSVLNACAHAGLVDEAKAQFVSMMSVYKIEPQMEHYSSLVNVTSGQGQFEEAMYIITSMPFEPDKTVWGALLDACRIYNNVGLAHVAAEAMSRLEPESSTPYVLLYNMYADMGLWDEASQVRMNMETIQNIGGFKFTSYTCSLCFIQFFAAIKTHKKFAYELLTLNFSKR

SEQ ID NO: 75418 - DNA, 1899 bp, Arabidopsis thaliana
  misc_feature (1)..(1899): Ceres Seq. ID no. 6437938
  misc_feature (1)..(1899): Ortholog of  Ceres SEQ ID NO 13657677 as cited in SEQ ID NO 66119
atgcagagatcgatttcattgacggccaaaagattgtttgttcattggaatctccaggggataggtaatcctccaactgttccttctttcttcaatctttgcggttccggttgctgggaacgatcttttgctagtgctagtggtgattacagagagatattgagaaataggctaagtgatattattaaggtagatgatgcggttgatctgttcggtgacatggtcaagtctcgtccatttccttccattgttgaattcaataaactgttgagtgccgttgctaagatgaacaagtttgaacttgtcatctctctcggcgagcagatgcaaactttgggaatttcacatgatctttacacatacagtattttcatcaactgcttttgccgacgctctcagctctctcttgctttagctgttcttgccaagatgatgaaactcggctatgagcccgatattgtcacgctttcttcgctgctcaatggctactgtcacagtaagaggatttctgatgccgtagctttggttgatcaaatggtcgaaatgggatataaacctgatacctttacattcacaactctaattcatggactttttcttcacaacaaagcttcagaagcagtggctttagttgatcaaatggttcaaagaggatgtcaaccagatctggttacttatggtaccgtagtaaacggattatgtaagagaggtgatattgatttggctttgagtttgttaaagaagatggagaaagggaaaatagaggctgatgttgtgatctacaacacaatcattgatggtctttgcaaatacaaacatatggatgatgcactcaatctgttcactgaaatggataacaaaggtattagaccagatgtttttacctacagctccctcataagttgcctttgtaattacggaagatggagtgatgcttctcgactactcagtgatatgattgagaggaaaatcaatccaaatgtagtcactttcagcgcattgattgatgcatttgtgaaggaagggaagcttgtagaggctgagaaattgtacgacgagatgatcaaaaggtctatagatcctgatattttcacttatagttcactgatcaatgggttttgtatgcacgatcgtttagacgaggccaagcacatgtttgagttgatgattagcaaagactgtttcccaaacgtagtgacttacagtactcttataaagggattttgtaaggctaagagagtagaagaaggtatggaactcttccgcgagatgtctcaaagaggattggttggcaacacagtcacttacaccactcttatccatggattttttcaagctagagattgtgataatgcccaaatggttttcaaacagatggtttctgttggtgtgcatcccaatattttgacatacaacattctgttagatggactttgtaaaaatgggaagctagcgaaagcaatggttgtattcgagtatctgcaaaggagtacaatggaacctgatatttacacatataatattatgattgaagggatgtgcaaggcagggaaggtggaagatgggtgggaattgttttgtaatctcagccttaaaggagtgagccctaatgttatagcctacaatacaatgatatcaggattttgtaggaaaggttcaaaggaggaagcagattccctgttaaaaaaaatgaaagaagatgggcctcttccaaatagtggtacctataatacgctgattagggcacgccttagagatggtgacagagaagcatcagctgaactcatcaaagaaatgaggagttgcgggtttgctggagatgcttcaaccattggcttggtcactaatatgttacatgatgggagattggacaaaagcttcctcgatatgctttcttaa

SEQ ID NO: 75419 - protein, 632 aa, Arabidopsis thaliana
  peptide (1)..(632): Ceres Seq. ID no. 6437939
MQRSISLTAKRLFVHWNLQGIGNPPTVPSFFNLCGSGCWERSFASASGDYREILRNRLSDIIKVDDAVDLFGDMVKSRPFPSIVEFNKLLSAVAKMNKFELVISLGEQMQTLGISHDLYTYSIFINCFCRRSQLSLALAVLAKMMKLGYEPDIVTLSSLLNGYCHSKRISDAVALVDQMVEMGYKPDTFTFTTLIHGLFLHNKASEAVALVDQMVQRGCQPDLVTYGTVVNGLCKRGDIDLALSLLKKMEKGKIEADVVIYNTIIDGLCKYKHMDDALNLFTEMDNKGIRPDVFTYSSLISCLCNYGRWSDASRLLSDMIERKINPNVVTFSALIDAFVKEGKLVEAEKLYDEMIKRSIDPDIFTYSSLINGFCMHDRLDEAKHMFELMISKDCFPNVVTYSTLIKGFCKAKRVEEGMELFREMSQRGLVGNTVTYTTLIHGFFQARDCDNAQMVFKQMVSVGVHPNILTYNILLDGLCKNGKLAKAMVVFEYLQRSTMEPDIYTYNIMIEGMCKAGKVEDGWELFCNLSLKGVSPNVIAYNTMISGFCRKGSKEEADSLLKKMKEDGPLPNSGTYNTLIRARLRDGDREASAELIKEMRSCGFAGDASTIGLVTNMLHDGRLDKSFLDMLS

SEQ ID NO: 75420 - protein, 559 aa, Arabidopsis thaliana
  peptide (1)..(559): Ceres Seq. ID no. 6437940
MVKSRPFPSIVEFNKLLSAVAKMNKFELVISLGEQMQTLGISHDLYTYSIFINCFCRRSQLSLALAVLAKMMKLGYEPDIVTLSSLLNGYCHSKRISDAVALVDQMVEMGYKPDTFTFTTLIHGLFLHNKASEAVALVDQMVQRGCQPDLVTYGTVVNGLCKRGDIDLALSLLKKMEKGKIEADVVIYNTIIDGLCKYKHMDDALNLFTEMDNKGIRPDVFTYSSLISCLCNYGRWSDASRLLSDMIERKINPNVVTFSALIDAFVKEGKLVEAEKLYDEMIKRSIDPDIFTYSSLINGFCMHDRLDEAKHMFELMISKDCFPNVVTYSTLIKGFCKAKRVEEGMELFREMSQRGLVGNTVTYTTLIHGFFQARDCDNAQMVFKQMVSVGVHPNILTYNILLDGLCKNGKLAKAMVVFEYLQRSTMEPDIYTYNIMIEGMCKAGKVEDGWELFCNLSLKGVSPNVIAYNTMISGFCRKGSKEEADSLLKKMKEDGPLPNSGTYNTLIRARLRDGDREASAELIKEMRSCGFAGDASTIGLVTNMLHDGRLDKSFLDMLS

SEQ ID NO: 75421 - protein, 537 aa, Arabidopsis thaliana
  peptide (1)..(537): Ceres Seq. ID no. 6437941
MNKFELVISLGEQMQTLGISHDLYTYSIFINCFCRRSQLSLALAVLAKMMKLGYEPDIVTLSSLLNGYCHSKRISDAVALVDQMVEMGYKPDTFTFTTLIHGLFLHNKASEAVALVDQMVQRGCQPDLVTYGTVVNGLCKRGDIDLALSLLKKMEKGKIEADVVIYNTIIDGLCKYKHMDDALNLFTEMDNKGIRPDVFTYSSLISCLCNYGRWSDASRLLSDMIERKINPNVVTFSALIDAFVKEGKLVEAEKLYDEMIKRSIDPDIFTYSSLINGFCMHDRLDEAKHMFELMISKDCFPNVVTYSTLIKGFCKAKRVEEGMELFREMSQRGLVGNTVTYTTLIHGFFQARDCDNAQMVFKQMVSVGVHPNILTYNILLDGLCKNGKLAKAMVVFEYLQRSTMEPDIYTYNIMIEGMCKAGKVEDGWELFCNLSLKGVSPNVIAYNTMISGFCRKGSKEEADSLLKKMKEDGPLPNSGTYNTLIRARLRDGDREASAELIKEMRSCGFAGDASTIGLVTNMLHDGRLDKSFLDMLS

SEQ ID NO: 75422 - DNA, 1077 bp, Arabidopsis thaliana
  misc_feature (1)..(1077): Ceres Seq. ID no. 6438465
  misc_feature (1)..(1077): Ortholog of  Ceres SEQ ID NO 12364737 as cited in SEQ ID NO 51089
  misc_feature (1)..(1077): Ortholog of  Ceres SEQ ID NO 13582301 as cited in SEQ ID NO 56509
  misc_feature (1)..(1077): Ortholog of  Ceres SEQ ID NO 13655302 as cited in SEQ ID NO 63307
  misc_feature (1)..(1077): Ortholog of  Ceres SEQ ID NO 13597380 as cited in SEQ ID NO 64054
  misc_feature (1)..(1077): Ortholog of  Ceres SEQ ID NO 12625474 as cited in SEQ ID NO 64169
  misc_feature (1)..(1077): Ortholog of  Ceres SEQ ID NO 13597502 as cited in SEQ ID NO 64681
atgtcttcttcttcttcaatggacttactcatgtgtctgcttcttctaatctctccggttgttctggccaagtcttcttccaccgtccctgctatctttaccttcggtgactctatttttgacgccggaaacaaccattacaacaaaaactgtaccgctcaggctgattttcctccttatggttcttcctttttccaccgtcctactgggaggttcaccaacggaagaaccgtcgctgacttcatctgccttccattacagaaaccattcttggaattgcagattcaaatcttgaatggaacttcaaacttttcaaatggcattaactttgctagtgctggtagtggtctcttgcttgataccaacaaatttatgggcgtgacaccgatccaaacccagctacagcaattccagacacttgtagagcaaaaccttatcgaaaaatctataatccaagagtctctcttcttattagaaactggttctaacgacatcttcaactacttcctcccattccgagctcctacactttctccagacgcttatgtgaacgcaatgttagaccaagtgaacaaaacgattgatcagatctacaaactaggcgcacgccgcatcgctttcttctccttaggtcctgtaggttgtgtccctgcaagagccatgcttcctaatgccccaaccaataaatgctttggtaagatgaatgttatggccaagatgtataataaaagacttgaagatatagtgaacataatccccactaagtaccctggagccattgcggtgtttggagctgtatatggtatcactcacagatttcaaacctaccctgcccgttacgggttttcggatgtttcaaacgcgtgttgtgggaacggtacactgggaggattgatgcagtgtggaagagaaggatacaagatttgcaataacccaaatgagtttctgttttgggatttttatcatcccacagaacacacttaccgtctcatgtcaaaagctttatggaatggaaacaaaaaccatatcagaccatttaatctcatggctcttgccaccaacaagatcacattttaa

SEQ ID NO: 75423 - protein, 358 aa, Arabidopsis thaliana
  peptide (1)..(358): Ceres Seq. ID no. 6438466
MSSSSSMDLLMCLLLLISPVVLAKSSSTVPAIFTFGDSIFDAGNNHYNKNCTAQADFPPYGSSFFHRPTGRFTNGRTVADFICLPLQKPFLELQIQILNGTSNFSNGINFASAGSGLLLDTNKFMGVTPIQTQLQQFQTLVEQNLIEKSIIQESLFLLETGSNDIFNYFLPFRAPTLSPDAYVNAMLDQVNKTIDQIYKLGARRIAFFSLGPVGCVPARAMLPNAPTNKCFGKMNVMAKMYNKRLEDIVNIIPTKYPGAIAVFGAVYGITHRFQTYPARYGFSDVSNACCGNGTLGGLMQCGREGYKICNNPNEFLFWDFYHPTEHTYRLMSKALWNGNKNHIRPFNLMALATNKITF

SEQ ID NO: 75424 - protein, 352 aa, Arabidopsis thaliana
  peptide (1)..(352): Ceres Seq. ID no. 6438467
MDLLMCLLLLISPVVLAKSSSTVPAIFTFGDSIFDAGNNHYNKNCTAQADFPPYGSSFFHRPTGRFTNGRTVADFICLPLQKPFLELQIQILNGTSNFSNGINFASAGSGLLLDTNKFMGVTPIQTQLQQFQTLVEQNLIEKSIIQESLFLLETGSNDIFNYFLPFRAPTLSPDAYVNAMLDQVNKTIDQIYKLGARRIAFFSLGPVGCVPARAMLPNAPTNKCFGKMNVMAKMYNKRLEDIVNIIPTKYPGAIAVFGAVYGITHRFQTYPARYGFSDVSNACCGNGTLGGLMQCGREGYKICNNPNEFLFWDFYHPTEHTYRLMSKALWNGNKNHIRPFNLMALATNKITF

SEQ ID NO: 75425 - protein, 348 aa, Arabidopsis thaliana
  peptide (1)..(348): Ceres Seq. ID no. 6438468
MCLLLLISPVVLAKSSSTVPAIFTFGDSIFDAGNNHYNKNCTAQADFPPYGSSFFHRPTGRFTNGRTVADFICLPLQKPFLELQIQILNGTSNFSNGINFASAGSGLLLDTNKFMGVTPIQTQLQQFQTLVEQNLIEKSIIQESLFLLETGSNDIFNYFLPFRAPTLSPDAYVNAMLDQVNKTIDQIYKLGARRIAFFSLGPVGCVPARAMLPNAPTNKCFGKMNVMAKMYNKRLEDIVNIIPTKYPGAIAVFGAVYGITHRFQTYPARYGFSDVSNACCGNGTLGGLMQCGREGYKICNNPNEFLFWDFYHPTEHTYRLMSKALWNGNKNHIRPFNLMALATNKITF

SEQ ID NO: 75426 - DNA, 519 bp, Arabidopsis thaliana
  misc_feature (1)..(519): Ceres Seq. ID no. 6438907
  misc_feature (1)..(519): Ortholog of  Ceres SEQ ID NO 15179062 as cited in SEQ ID NO 0
atggcgtcaatttctctctcttcttctacggttccgtcgctgaattcgaaagaatcgtcaggtgtttctgctttcgcttctcgttctatctcggccgtcaaatttcagtttccggttcgtcgggttcgaaccggagacttaaagtttccatctttatcttcaacgactcgatgcactcctcgacgtattgaagccaagaagcagacatttgactcatttgaggatctgcttgtgaactctgataaaccagttctagttgactattatgcaacctggtgtggtccttgccagttcatggttccaatactcaatgaagtgagtgaaaccctgaaagacaagatacaggtggtgaagattgataccgaaaaataccccagtattgctaataaatacaagattgaggcacttcctactttcatcctattcaaagatggggaaccttgtgatcgctttgagggtgctttgacggccaaacaactcattcaacgaattgaggattctctaaaagtgaagccatag

SEQ ID NO: 75427 - protein, 172 aa, Arabidopsis thaliana
  peptide (1)..(172): Ceres Seq. ID no. 6438908
MASISLSSSTVPSLNSKESSGVSAFASRSISAVKFQFPVRRVRTGDLKFPSLSSTTRCTPRRIEAKKQTFDSFEDLLVNSDKPVLVDYYATWCGPCQFMVPILNEVSETLKDKIQVVKIDTEKYPSIANKYKIEALPTFILFKDGEPCDRFEGALTAKQLIQRIEDSLKVKP

SEQ ID NO: 75428 - DNA, 2037 bp, Arabidopsis thaliana
  misc_feature (1)..(2037): Ceres Seq. ID no. 6439103
  misc_feature (1)..(2037): Ortholog of  Ceres SEQ ID NO 13584744 as cited in SEQ ID NO 69137
atgacgcagaagctcgtacgccttgtgatcgtctctctggctattactgtcactttacttcaagcaaaaaccgataaccaagaagtctccgcgttgaacgtaatgttcacgagcttaaattcgccgtcgaaactcaaaggttggaaagctaacggaggtgatccctgcgaagattcttgggaaggcgtcaaatgcaaaggctcttcggtcactgaattacagttatcaggctttgagctaggtggatctcgcggttatctactaagcaacctcaaatctctcacaacttttacagtgatctcagcaaaaacaatctcaaaggaaacataccttatcaactcccacccaacattgccaatcttaatcttggacaaaacaagctcaatggagaactaccagatatgtttcagaaactgtccaaactcgaaactctgtagggacttttcgttgaataaactctctgggaaattacctcagagttttgctaatctcacaagcctcaaaaaactacacttgcaggataatcgattcacaggcgacataaacgttctcaggaaccttgccatcgatgacttgaacgtcgaagacaaccagtttgaaggatggatacctaatgagcttaaggacatagacagtttactgactggaggtaacgactggtcaactgaaactgctccaccaccaccaccgggtgttaaatatggccgaaaatcttcgggttcgaaagacggaggaggtataaccgccggaactggaatggtgatcgctggagcatgtttaggcgttcttgtgttgatcattgttttaattgcgctcgtttccaagaaaaaatcatctctctcacctcatttcatcgacgaagataacagtcatcacaccccaaagttcaaatctctcacctcgcatggatctgcgcaagagcttcgtgttgatttcggcaacgattacaaagatgggaaatctggagattcgggtgatgaaaatatccataggataggatcaaagggactaaaacattatgtttcgtcgcgtgtgatgtctttcactgataccgaatttgcgaacaagctcaatgcaaaacgaaccacttcaactcgttccgctgtggaattcgagctctctgatttgcaaagcgcaacagccaatttctcacctggaaatctactaggggaaggctcaatcggacgtgtttacagagccaaatattccgacggacgtactttggcggttaagaagatcgattcaacgttgtttgattcgggtaaatcagaaggaataacgccgattgtaatgagcctctcaaagattaggcatcaaaatatagcagagctcgtaggctattgctcagagcaaggtcacaacatgttagtctacgaatacttcaggaatggctcactccatgagttccttcatttgtcagattgcttcagtaaacccttgacttggaacacaagagtcagaatcgccttgggaaccgctcgagccgttgagtacctgcacgaggcatgttcaccttctgtgatgcataagaatatcaagtcttctaacattttgctagacgcagatctcaaccctcgtctctcagattacggcctctcaaaattctaccttagaacgagtcaaaatctaggagaaggatacaatgcaccagaagccagggacccttctgcttatacaccaaagagtgacgtctacagctttggcgtcgtcatgttagagcttctcaccggtcgagttccatttgacgggtcaaagccaaggccggagagatcgttggtacggtgggcgacaccacaacttcacgacatagatgcattgtcgaatatagcggatccagctctgcacggactttacccaccaaaatcattgtcaagattcgccgacattatcgcattatgtgttcaggtggaaccggagttccgaccaccgatgtcagaagttgtggaggcgcttgtacggatggttcaacggtcaagtatgaagcttaaagatgatctttcatcgtcttatcgagcccacgacgattatgattactag

SEQ ID NO: 75429 - protein, 678 aa, Arabidopsis thaliana
  peptide (1)..(678): Ceres Seq. ID no. 6439104
MTQKLVRLVIVSLAITVTLLQAKTDNQEVSALNVMFTSLNSPSKLKGWKANGGDPCEDSWEGVKCKGSSVTELQLSGFELGGSRGYLLSNLKSLTTFTVISAKTISKETYLINSHPTLPILILDKTSSMENYQICFRNCPNSKLCRDFSLNKLSGKLPQSFANLTSLKKLHLQDNRFTGDINVLRNLAIDDLNVEDNQFEGWIPNELKDIDSLLTGGNDWSTETAPPPPPGVKYGRKSSGSKDGGGITAGTGMVIAGACLGVLVLIIVLIALVSKKKSSLSPHFIDEDNSHHTPKFKSLTSHGSAQELRVDFGNDYKDGKSGDSGDENIHRIGSKGLKHYVSSRVMSFTDTEFANKLNAKRTTSTRSAVEFELSDLQSATANFSPGNLLGEGSIGRVYRAKYSDGRTLAVKKIDSTLFDSGKSEGITPIVMSLSKIRHQNIAELVGYCSEQGHNMLVYEYFRNGSLHEFLHLSDCFSKPLTWNTRVRIALGTARAVEYLHEACSPSVMHKNIKSSNILLDADLNPRLSDYGLSKFYLRTSQNLGEGYNAPEARDPSAYTPKSDVYSFGVVMLELLTGRVPFDGSKPRPERSLVRWATPQLHDIDALSNIADPALHGLYPPKSLSRFADIIALCVQVEPEFRPPMSEVVEALVRMVQRSSMKLKDDLSSSYRAHDDYDY

SEQ ID NO: 75430 - protein, 644 aa, Arabidopsis thaliana
  peptide (1)..(644): Ceres Seq. ID no. 6439105
MFTSLNSPSKLKGWKANGGDPCEDSWEGVKCKGSSVTELQLSGFELGGSRGYLLSNLKSLTTFTVISAKTISKETYLINSHPTLPILILDKTSSMENYQICFRNCPNSKLCRDFSLNKLSGKLPQSFANLTSLKKLHLQDNRFTGDINVLRNLAIDDLNVEDNQFEGWIPNELKDIDSLLTGGNDWSTETAPPPPPGVKYGRKSSGSKDGGGITAGTGMVIAGACLGVLVLIIVLIALVSKKKSSLSPHFIDEDNSHHTPKFKSLTSHGSAQELRVDFGNDYKDGKSGDSGDENIHRIGSKGLKHYVSSRVMSFTDTEFANKLNAKRTTSTRSAVEFELSDLQSATANFSPGNLLGEGSIGRVYRAKYSDGRTLAVKKIDSTLFDSGKSEGITPIVMSLSKIRHQNIAELVGYCSEQGHNMLVYEYFRNGSLHEFLHLSDCFSKPLTWNTRVRIALGTARAVEYLHEACSPSVMHKNIKSSNILLDADLNPRLSDYGLSKFYLRTSQNLGEGYNAPEARDPSAYTPKSDVYSFGVVMLELLTGRVPFDGSKPRPERSLVRWATPQLHDIDALSNIADPALHGLYPPKSLSRFADIIALCVQVEPEFRPPMSEVVEALVRMVQRSSMKLKDDLSSSYRAHDDYDY

SEQ ID NO: 75431 - protein, 550 aa, Arabidopsis thaliana
  peptide (1)..(550): Ceres Seq. ID no. 6439106
MENYQICFRNCPNSKLCRDFSLNKLSGKLPQSFANLTSLKKLHLQDNRFTGDINVLRNLAIDDLNVEDNQFEGWIPNELKDIDSLLTGGNDWSTETAPPPPPGVKYGRKSSGSKDGGGITAGTGMVIAGACLGVLVLIIVLIALVSKKKSSLSPHFIDEDNSHHTPKFKSLTSHGSAQELRVDFGNDYKDGKSGDSGDENIHRIGSKGLKHYVSSRVMSFTDTEFANKLNAKRTTSTRSAVEFELSDLQSATANFSPGNLLGEGSIGRVYRAKYSDGRTLAVKKIDSTLFDSGKSEGITPIVMSLSKIRHQNIAELVGYCSEQGHNMLVYEYFRNGSLHEFLHLSDCFSKPLTWNTRVRIALGTARAVEYLHEACSPSVMHKNIKSSNILLDADLNPRLSDYGLSKFYLRTSQNLGEGYNAPEARDPSAYTPKSDVYSFGVVMLELLTGRVPFDGSKPRPERSLVRWATPQLHDIDALSNIADPALHGLYPPKSLSRFADIIALCVQVEPEFRPPMSEVVEALVRMVQRSSMKLKDDLSSSYRAHDDYDY

SEQ ID NO: 75432 - DNA, 520 bp, Arabidopsis thaliana
  misc_feature (1)..(520): Ceres Seq. ID no. 6439285
  misc_feature (1)..(520): Ortholog of  Ceres SEQ ID NO 15169443 as cited in SEQ ID NO 58785
atttacttatctgttcactatttttccagaagatgaaggttgttgccgcatacttgctcgctgttttgagcggaaaagcttcaccaaccagtgccgatatcaagactatccttggatcagttggtgctgagacagaggattctcagattgagcttttgttgaaggaagtgaaaggaaaagatttggctgagttgattgctgctggaagggagaagttagcttcagtgccgtctggtggcggaggtggtgttgcggttgcttctgctacatctggaggtggaggaggtggtggtgcttctgctgctgagtccaagaaagaagagaagaaggaagaaaaggaagaatccgatgatgacatgggtttcagtctattcgagtaagctggtagtagcatgaaaagtccggttttgttgtcctcttttaatattgtaaccttttgaaatctatatgttgttgttgtttagtttgtattcgatcatcttttttagacattgctgaaattctcaagagtttttgaccc

SEQ ID NO: 75433 - protein, 125 aa, Arabidopsis thaliana
  peptide (1)..(125): Ceres Seq. ID no. 6439286
LLICSLFFQKMKVVAAYLLAVLSGKASPTSADIKTILGSVGAETEDSQIELLLKEVKGKDLAELIAAGREKLASVPSGGGGGVAVASATSGGGGGGGASAAESKKEEKKEEKEESDDDMGFSLFE

SEQ ID NO: 75434 - protein, 115 aa, Arabidopsis thaliana; identical to SEQ ID NO: 23308
  peptide (1)..(115): Ceres Seq. ID no. 6439287

SEQ ID NO: 75435 - DNA, 872 bp, Arabidopsis thaliana
  misc_feature (1)..(872): Ceres Seq. ID no. 6439292
  misc_feature (1)..(872): Ortholog of  Ceres SEQ ID NO 15168557 as cited in SEQ ID NO 58119
  misc_feature (1)..(872): Ortholog of  Ceres SEQ ID NO 14316469 as cited in SEQ ID NO 59125
aaaaaccaaaccaaacccatagggttgtgttgttgctgttctgttcctatcgaccacggcggcgacgaggcggagaagaccgacaaagcggagaagccagcttcgaaaccctctagcatttattttttaaaagcgaaattcattttaagggttttggtcatggcttcaatctcgacttggttccgatacatggctcacaagctcgagtattccctcactctcagtctcaagagtcataggagtaataaactgagtgaccgggaacttattcaaataatctgcaagaatctgttctatgggaaaataacctacttacactcggataaaggaccagaaatgtcaccaaccatgacagcaaatgaaaacacacttcttattcgtaagataccaattgctaataccaggtttgtattcattggagatgctgtcgtcttaaaggatccaaacgattcagataagtatctggtaagaagattagcagctgtagaaggattcgaaatggtatcgggtgatgaaaaagaggagccttttgttcttgagaagaatcagtgttgggtaacagctgaaaaccaggagctcaaagctaaggaagcatatgatagtagaacatttggtccagtttcaacagcagacattgttggaagagctatatactgtctgagaacagccgtcgatcacggacctgttcgaaacagccaaactgcaatgggacaagattctccaatcctggccgtggaattggacgtggacgagatggctaagaaccataaggcatagagagacgcactttcttgtgtttgtttattattgtcaaagctaaaattgccttctttgattgagatttgagaaaacaataaatcattacaacaatg

SEQ ID NO: 75436 - protein, 258 aa, Arabidopsis thaliana
  peptide (1)..(258): Ceres Seq. ID no. 6439293
KNQTKPIGLCCCCSVPIDHGGDEAEKTDKAEKPASKPSSIYFLKAKFILRVLVMASISTWFRYMAHKLEYSLTLSLKSHRSNKLSDRELIQIICKNLFYGKITYLHSDKGPEMSPTMTANENTLLIRKIPIANTRFVFIGDAVVLKDPNDSDKYLVRRLAAVEGFEMVSGDEKEEPFVLEKNQCWVTAENQELKAKEAYDSRTFGPVSTADIVGRAIYCLRTAVDHGPVRNSQTAMGQDSPILAVELDVDEMAKNHKA

SEQ ID NO: 75437 - protein, 205 aa, Arabidopsis thaliana
  peptide (1)..(205): Ceres Seq. ID no. 6439294
MASISTWFRYMAHKLEYSLTLSLKSHRSNKLSDRELIQIICKNLFYGKITYLHSDKGPEMSPTMTANENTLLIRKIPIANTRFVFIGDAVVLKDPNDSDKYLVRRLAAVEGFEMVSGDEKEEPFVLEKNQCWVTAENQELKAKEAYDSRTFGPVSTADIVGRAIYCLRTAVDHGPVRNSQTAMGQDSPILAVELDVDEMAKNHKA

SEQ ID NO: 75438 - protein, 195 aa, Arabidopsis thaliana
  peptide (1)..(195): Ceres Seq. ID no. 6439295
MAHKLEYSLTLSLKSHRSNKLSDRELIQIICKNLFYGKITYLHSDKGPEMSPTMTANENTLLIRKIPIANTRFVFIGDAVVLKDPNDSDKYLVRRLAAVEGFEMVSGDEKEEPFVLEKNQCWVTAENQELKAKEAYDSRTFGPVSTADIVGRAIYCLRTAVDHGPVRNSQTAMGQDSPILAVELDVDEMAKNHKA

SEQ ID NO: 75439 - DNA, 681 bp, Arabidopsis thaliana
  misc_feature (1)..(681): Ceres Seq. ID no. 6439329
  misc_feature (1)..(681): Ortholog of  Ceres SEQ ID NO 15227029 as cited in SEQ ID NO 60571
  misc_feature (1)..(681): Ortholog of  Ceres SEQ ID NO 15175269 as cited in SEQ ID NO 63840
  misc_feature (1)..(681): Ortholog of  Ceres SEQ ID NO 15176141 as cited in SEQ ID NO 0
gcgttatacttaaaacactctcctcttttccttgtccttctctatcgcttctataaactttttcgatctaaggttcgtgatctccttcttctctacgaagtttacactttttcttcaaaggaaacaatgagccagtacaatcaacctcccgttggtgttcctcctcctcaaggttatccaccggagggatatccaaaagatgcttatccaccacaaggatatcctcctcagggatatcctcagcaaggctatccacctcagggatatcctcaacaaggttatcctcagcaaggatatcctccaccgtacgcgcctcaatatcctccaccaccgcagcatcagcaacaacagagcagtcctggctttctagaaggatgtcttgctgctctgtgttgttgctgtctcttggatgcttgcttctgattggagtctctctctctctgcataaagcttcgggatttatttgtaagagggttttggttaaacaaaaaccttaattgatttgtggggcattaaaaatgaatctctcgatgattctctttcgttttatgtgtaatgttcttcggttcataacattttaactattgtctatcgacgttctgccttagtttgtatttgattatgggaatgtaaattggttgggagacactattctatgccatagtttattgcttggatctt

SEQ ID NO: 75440 - protein, 140 aa, Arabidopsis thaliana
  peptide (1)..(140): Ceres Seq. ID no. 6439330
ALYLKHSPLFLVLLYRFYKLFRSKVRDLLLLYEVYTFSSKETMSQYNQPPVGVPPPQGYPPEGYPKDAYPPQGYPPQGYPQQGYPPQGYPQQGYPQQGYPPPYAPQYPPPPQHQQQQSSPGFLEGCLAALCCCCLLDACF

SEQ ID NO: 75441 - protein, 98 aa, Arabidopsis thaliana; identical to SEQ ID NO: 29278
  peptide (1)..(98): Ceres Seq. ID no. 6439331

SEQ ID NO: 75442 - DNA, 1653 bp, Arabidopsis thaliana
  misc_feature (1)..(1653): Ceres Seq. ID no. 6439453
  misc_feature (1)..(1653): Ortholog of  Ceres SEQ ID NO 12613725 as cited in SEQ ID NO 68196
atggcttccattgatgaagaaaggtcacttcttgaagttgaagaatctcttatacaggaagaagtaaaattatatgctgaagatggttcaatagatattcatggaaacccaccattgaagcagacaacaggaaactggaaagcttgtccattcatttttgcaaacgaatgctgcgaacggttggcttattatggaattgccaagaatctcatcacgtacttcacaaatgaattgcatgagactaatgtttctgctgctagacacgtcatgacatggcaaggaacatgttacatcactcctcttattggagctttaatagctgatgcttactggggaagatattggactattgcttgtttctctgccatttatttcaccggaatggttgcattgacactctcagcttcagttccgggtcttaagccagcggaatgcattggctctctatgtccaccagcaacaatggttcagtctacggttttattttcagggctttaccttatcgctcttggcactggaggaatcaaaccatgtgtctcatcctttggtgctgatcagtttgataagaccgatccaagcgaacgagtcagaaaagcttctttctttaactggttttacttcactatcaacattggtgcttttgtttcatctactgttctagtttggattcaagagaattatggatgggaattaggattcttgatacctaccgtgttcatgggacttgctactatgagtttcttctttggcacgccgctttatagatttcagaaaccgagaggtagcccgattactagcgtctgccaagttcttgtagccgcataccgtaaatcgaatctcaaggtccctgaagactccacggacgcggcaattatatcagaaggagatgcaaacactaacccgtggaagctatgtaccgtgactcaagtcgaagaagttaagattctgttacgtttggtccccatttgggcctcaggaatcatcttctcagttctccattcacagatttacactctctttgttcaacaaggacggtgcatgaaacgaaccatcggcttattcgaaatccctcccgcaactctcgggatgttcgacactgcaagtgttctcatatctgtcccaatctatgaccgcgtcatcgttcccttagtgagacggttcacaggcttagctaaaggattcaccgagctacaaagaatggggattggtctttttgtctctgttttgagcttgacatttgcagctatcgttgagacggttcggttacagttagctagagatcttgatctagtggaaagtggagacattgttccattaaacatcttttggcaaatccctcagtactttttaatgggcactgctggagttttcttctttgttgggaggattgagtttttctatgagcaatctccagattcaatgagaagcttgtgtagtgcttgggctcttctcactactacactaggaaactacttgagctcgttgatcattacccttgtggcgtatttgagcggaaaagattgttggattccttcagacaacattaacaatggacatcttgattacttcttctggcttttggtcagtcttggatctgttaacatacctgtttttgtcttcttctctgtgaaatatactcatatgaaggtttga

SEQ ID NO: 75443 - protein, 550 aa, Arabidopsis thaliana
  peptide (1)..(550): Ceres Seq. ID no. 6439454
MASIDEERSLLEVEESLIQEEVKLYAEDGSIDIHGNPPLKQTTGNWKACPFIFANECCERLAYYGIAKNLITYFTNELHETNVSAARHVMTWQGTCYITPLIGALIADAYWGRYWTIACFSAIYFTGMVALTLSASVPGLKPAECIGSLCPPATMVQSTVLFSGLYLIALGTGGIKPCVSSFGADQFDKTDPSERVRKASFFNWFYFTINIGAFVSSTVLVWIQENYGWELGFLIPTVFMGLATMSFFFGTPLYRFQKPRGSPITSVCQVLVAAYRKSNLKVPEDSTDAAIISEGDANTNPWKLCTVTQVEEVKILLRLVPIWASGIIFSVLHSQIYTLFVQQGRCMKRTIGLFEIPPATLGMFDTASVLISVPIYDRVIVPLVRRFTGLAKGFTELQRMGIGLFVSVLSLTFAAIVETVRLQLARDLDLVESGDIVPLNIFWQIPQYFLMGTAGVFFFVGRIEFFYEQSPDSMRSLCSAWALLTTTLGNYLSSLIITLVAYLSGKDCWIPSDNINNGHLDYFFWLLVSLGSVNIPVFVFFSVKYTHMKV

SEQ ID NO: 75444 - protein, 461 aa, Arabidopsis thaliana
  peptide (1)..(461): Ceres Seq. ID no. 6439455
MTWQGTCYITPLIGALIADAYWGRYWTIACFSAIYFTGMVALTLSASVPGLKPAECIGSLCPPATMVQSTVLFSGLYLIALGTGGIKPCVSSFGADQFDKTDPSERVRKASFFNWFYFTINIGAFVSSTVLVWIQENYGWELGFLIPTVFMGLATMSFFFGTPLYRFQKPRGSPITSVCQVLVAAYRKSNLKVPEDSTDAAIISEGDANTNPWKLCTVTQVEEVKILLRLVPIWASGIIFSVLHSQIYTLFVQQGRCMKRTIGLFEIPPATLGMFDTASVLISVPIYDRVIVPLVRRFTGLAKGFTELQRMGIGLFVSVLSLTFAAIVETVRLQLARDLDLVESGDIVPLNIFWQIPQYFLMGTAGVFFFVGRIEFFYEQSPDSMRSLCSAWALLTTTLGNYLSSLIITLVAYLSGKDCWIPSDNINNGHLDYFFWLLVSLGSVNIPVFVFFSVKYTHMKV

SEQ ID NO: 75445 - protein, 423 aa, Arabidopsis thaliana
  peptide (1)..(423): Ceres Seq. ID no. 6439456
MVALTLSASVPGLKPAECIGSLCPPATMVQSTVLFSGLYLIALGTGGIKPCVSSFGADQFDKTDPSERVRKASFFNWFYFTINIGAFVSSTVLVWIQENYGWELGFLIPTVFMGLATMSFFFGTPLYRFQKPRGSPITSVCQVLVAAYRKSNLKVPEDSTDAAIISEGDANTNPWKLCTVTQVEEVKILLRLVPIWASGIIFSVLHSQIYTLFVQQGRCMKRTIGLFEIPPATLGMFDTASVLISVPIYDRVIVPLVRRFTGLAKGFTELQRMGIGLFVSVLSLTFAAIVETVRLQLARDLDLVESGDIVPLNIFWQIPQYFLMGTAGVFFFVGRIEFFYEQSPDSMRSLCSAWALLTTTLGNYLSSLIITLVAYLSGKDCWIPSDNINNGHLDYFFWLLVSLGSVNIPVFVFFSVKYTHMKV

SEQ ID NO: 75446 - DNA, 1098 bp, Arabidopsis thaliana
  misc_feature (1)..(1098): Ceres Seq. ID no. 6439620
  misc_feature (1)..(1098): Ortholog of  Ceres SEQ ID NO 13595567 as cited in SEQ ID NO 56760
  misc_feature (1)..(1098): Ortholog of  Ceres SEQ ID NO 12625474 as cited in SEQ ID NO 64169
atgggtttgccttcgtctctagagtcataccttcttttgatcctcctctcttttctcaatgtctccacgatatactcatcgaagccatcaaaagaagaagccgtgctttttggcgggaactttccggctttttatgttattggagattcactggttgatccaggaaacaataaccatcttccgacgatgattagagcgaattatccaccttatggttctgactttgaaggaggcaaagctaccggacgttttagtaatggcaaaacaattgctgattacattgctatttattataagcttcctttggttcctgcttatttgggattatctgatgaccggaaggacactatctcaactggtatgaactatgcttctgctggctgtgggattcgtcgtctcacaggaaagatagcgggaaaatgtctatcgttgagcaaacaagtcgatttgttcgaggaaaccattgaaaagcatttgaagacgaatttcaaaacgccatatgagttgagagaacacttggctcactcgttgttcatgaccgtgattggggttaacgactatgcattcttctatactaggttaaccgatgcgaatgatttcgcagacgaacttcttcataagttcttgaaaaaaatagagaaattgcataagttaggagcaagaaagttcttcatcaacaacattaaaccattaggttgttacccaaatatagtactaagacggtaccacgaggaagccgacgaacgtataaaccttgctataagcatttacaacgaaaagcttagaagaagcctgcctgttatgaagaaaaaattaaacaacacttcttttttatactctgattacttcaagttcatgttgggactaagaggaccttcgaccaatcgatatagttcgaatctattgaacacgacaggcccgtgttgtcctttagattatgatggaagtttaacttcaagttgcaagcgcaggtcaaaaacgtgtaaagcaccagattctactcatattttctttgatccgcgtcatccgactcagttggcgaatttcatgtactccattgcgtgtttcgacgagagaactatttgccatgtcgtgtga

SEQ ID NO: 75447 - protein, 365 aa, Arabidopsis thaliana
  peptide (1)..(365): Ceres Seq. ID no. 6439621
MGLPSSLESYLLLILLSFLNVSTIYSSKPSKEEAVLFGGNFPAFYVIGDSLVDPGNNNHLPTMIRANYPPYGSDFEGGKATGRFSNGKTIADYIAIYYKLPLVPAYLGLSDDRKDTISTGMNYASAGCGIRRLTGKIAGKCLSLSKQVDLFEETIEKHLKTNFKTPYELREHLAHSLFMTVIGVNDYAFFYTRLTDANDFADELLHKFLKKIEKLHKLGARKFFINNIKPLGCYPNIVLRRYHEEADERINLAISIYNEKLRRSLPVMKKKLNNTSFLYSDYFKFMLGLRGPSTNRYSSNLLNTTGPCCPLDYDGSLTSSCKRRSKTCKAPDSTHIFFDPRHPTQLANFMYSIACFDERTICHVV

SEQ ID NO: 75448 - protein, 303 aa, Arabidopsis thaliana
  peptide (1)..(303): Ceres Seq. ID no. 6439622
MIRANYPPYGSDFEGGKATGRFSNGKTIADYIAIYYKLPLVPAYLGLSDDRKDTISTGMNYASAGCGIRRLTGKIAGKCLSLSKQVDLFEETIEKHLKTNFKTPYELREHLAHSLFMTVIGVNDYAFFYTRLTDANDFADELLHKFLKKIEKLHKLGARKFFINNIKPLGCYPNIVLRRYHEEADERINLAISIYNEKLRRSLPVMKKKLNNTSFLYSDYFKFMLGLRGPSTNRYSSNLLNTTGPCCPLDYDGSLTSSCKRRSKTCKAPDSTHIFFDPRHPTQLANFMYSIACFDERTICHVV

SEQ ID NO: 75449 - protein, 245 aa, Arabidopsis thaliana
  peptide (1)..(245): Ceres Seq. ID no. 6439623
MNYASAGCGIRRLTGKIAGKCLSLSKQVDLFEETIEKHLKTNFKTPYELREHLAHSLFMTVIGVNDYAFFYTRLTDANDFADELLHKFLKKIEKLHKLGARKFFINNIKPLGCYPNIVLRRYHEEADERINLAISIYNEKLRRSLPVMKKKLNNTSFLYSDYFKFMLGLRGPSTNRYSSNLLNTTGPCCPLDYDGSLTSSCKRRSKTCKAPDSTHIFFDPRHPTQLANFMYSIACFDERTICHVV

SEQ ID NO: 75450 - DNA, 1431 bp, Arabidopsis thaliana
  misc_feature (1)..(1431): Ceres Seq. ID no. 6439638
  misc_feature (1)..(1431): Ortholog of  Ceres SEQ ID NO 13660287 as cited in SEQ ID NO 67316
atggaagagccatttcttccgcaagatgagcagatagtcccctgtaaagccacatggaaaagtggtcagctcaatgtcgagctgaagaaagtgagccgcttggctgttcctatggccaccgtgaccattgcacagtacttattgccagtcatctcagtcatggtcgctggccacaacggcgagctccagctctccggtgtcgctcttgctacctccttcacaaatgtctccggtttcagcattatgtttgggttagtgggttcactagaaactctttctggccaagcttatggagccaaacaatacgaaaaaatgggaacctatacatactccgcaatttcctctaacatccctatatgtgtcctcatatcaattctctggatatacatggaaaaactcttgatctctctcggacaagaccctgacatctccagagtcgctggctcctacgccttgcggctcataccgactttgtttgcccatgcgattgtcttaccactgacccggtttctgctagcacaagggttggttcttccactgctttactttgccctgaccacccttttgttccacattgcggtttgctggactttggtttccgcacttggtttgggaagcaatggagctgccttggctattagtgtgtctttctggtttttcgctatgacactctcatgttatgtgagattctccagctcttgcgagaagactcgccgatttgtatcccaagatttcttgtcttctgtcaagcagttcttccgttatggagtcccatcagcggcaatgctttgcctagaatggtggctatttgagctacttatactctgttcaggtcttctccaaaacccaaaactcgagacctctgttctttcaatttgtcttacaacagcaactttgcactatgtgattccagttggagtcgcggccgctgtgagcacacgcgtgtcaaacaaattgggagctgggattcctcaagttgctagggtttcagtattggcagggctttgtctctggcttgtagagtcatctttctttagcatacttctcttcgccttcaggaacatcataggctacgcattcagcaacagtaaagaagttgtggactatgtggctgatctatctcctttgctctgtctctcctttgttcttgacggatttaccgcagttcttaatggggttgccaggggatgtggttggcaacacattggagctttgaacaacgtagtagcttattatctcgtaggagctccggttggaatatatttagctttcagttgtgagttgaacggaaaaggactatggtgtggtgtagtggttggatccgctgtgcaagccattatactggctattgtcacggcttccatgaattggaaggaacaggccaagaaggcaaggaagagactaatctcaagtgaaaatggattggcttaa

SEQ ID NO: 75451 - protein, 476 aa, Arabidopsis thaliana
  peptide (1)..(476): Ceres Seq. ID no. 6439639
MEEPFLPQDEQIVPCKATWKSGQLNVELKKVSRLAVPMATVTIAQYLLPVISVMVAGHNGELQLSGVALATSFTNVSGFSIMFGLVGSLETLSGQAYGAKQYEKMGTYTYSAISSNIPICVLISILWIYMEKLLISLGQDPDISRVAGSYALRLIPTLFAHAIVLPLTRFLLAQGLVLPLLYFALTTLLFHIAVCWTLVSALGLGSNGAALAISVSFWFFAMTLSCYVRFSSSCEKTRRFVSQDFLSSVKQFFRYGVPSAAMLCLEWWLFELLILCSGLLQNPKLETSVLSICLTTATLHYVIPVGVAAAVSTRVSNKLGAGIPQVARVSVLAGLCLWLVESSFFSILLFAFRNIIGYAFSNSKEVVDYVADLSPLLCLSFVLDGFTAVLNGVARGCGWQHIGALNNVVAYYLVGAPVGIYLAFSCELNGKGLWCGVVVGSAVQAIILAIVTASMNWKEQAKKARKRLISSENGLA

SEQ ID NO: 75452 - protein, 439 aa, Arabidopsis thaliana
  peptide (1)..(439): Ceres Seq. ID no. 6439640
MATVTIAQYLLPVISVMVAGHNGELQLSGVALATSFTNVSGFSIMFGLVGSLETLSGQAYGAKQYEKMGTYTYSAISSNIPICVLISILWIYMEKLLISLGQDPDISRVAGSYALRLIPTLFAHAIVLPLTRFLLAQGLVLPLLYFALTTLLFHIAVCWTLVSALGLGSNGAALAISVSFWFFAMTLSCYVRFSSSCEKTRRFVSQDFLSSVKQFFRYGVPSAAMLCLEWWLFELLILCSGLLQNPKLETSVLSICLTTATLHYVIPVGVAAAVSTRVSNKLGAGIPQVARVSVLAGLCLWLVESSFFSILLFAFRNIIGYAFSNSKEVVDYVADLSPLLCLSFVLDGFTAVLNGVARGCGWQHIGALNNVVAYYLVGAPVGIYLAFSCELNGKGLWCGVVVGSAVQAIILAIVTASMNWKEQAKKARKRLISSENGLA

SEQ ID NO: 75453 - protein, 423 aa, Arabidopsis thaliana
  peptide (1)..(423): Ceres Seq. ID no. 6439641
MVAGHNGELQLSGVALATSFTNVSGFSIMFGLVGSLETLSGQAYGAKQYEKMGTYTYSAISSNIPICVLISILWIYMEKLLISLGQDPDISRVAGSYALRLIPTLFAHAIVLPLTRFLLAQGLVLPLLYFALTTLLFHIAVCWTLVSALGLGSNGAALAISVSFWFFAMTLSCYVRFSSSCEKTRRFVSQDFLSSVKQFFRYGVPSAAMLCLEWWLFELLILCSGLLQNPKLETSVLSICLTTATLHYVIPVGVAAAVSTRVSNKLGAGIPQVARVSVLAGLCLWLVESSFFSILLFAFRNIIGYAFSNSKEVVDYVADLSPLLCLSFVLDGFTAVLNGVARGCGWQHIGALNNVVAYYLVGAPVGIYLAFSCELNGKGLWCGVVVGSAVQAIILAIVTASMNWKEQAKKARKRLISSENGLA

SEQ ID NO: 75454 - DNA, 549 bp, Arabidopsis thaliana
  misc_feature (1)..(549): Ceres Seq. ID no. 6441329
  misc_feature (1)..(549): Ortholog of  Ceres SEQ ID NO 13595847 as cited in SEQ ID NO 55845
  misc_feature (1)..(549): Ortholog of  Ceres SEQ ID NO 12635868 as cited in SEQ ID NO 0
atggcggcaagctttttgaagaatgagagtaaacaacggctatacatttggttgattttacagctatatatatatgatgaaatgccagtaatattgccctgtgagagaaaaagcaaaagcaaaaatggctcgatctttcgctattgctgtgatctgtatcgtcctcatcgccggcgttactggtcaagctccgacttcaccaccaaccgctacaccagctccaccaactccaacaactcctccaccagcagcaactcctcctcctgtctcagcaccaccaccagtcacaacatctcctcctccagtcaccactgctcctcctccagcaaatccaccaccaccagtctcttctcctcctcctgcttctcctccaccagctactcctcctccagtcgcttctcctcctcctcccgttgcttctcctccaccagcaactcctcctcccgtcgctactcctcccccagctcctctagcttcccctcctgctcaagttccagctccagcaccgaccacgaagccagattctccatctccatctccgtcatctag

SEQ ID NO: 75455 - protein, 182 aa, Arabidopsis thaliana
  peptide (1)..(182): Ceres Seq. ID no. 6441330
MAASFLKNESKQRLYIWLILQLYIYDEMPVILPCERKSKSKNGSIFRYCCDLYRPHRRRYWSSSDFTTNRYTSSTNSNNSSTSSNSSSCLSTTTSHNISSSSHHCSSSSKSTTTSLFSSSCFSSTSYSSSSRFSSSSRCFSSTSNSSSRRYSSPSSSSFPSCSSSSSSTDHEARFSISISVI

SEQ ID NO: 75456 - protein, 155 aa, Arabidopsis thaliana
  peptide (1)..(155): Ceres Seq. ID no. 6441331
MPVILPCERKSKSKNGSIFRYCCDLYRPHRRRYWSSSDFTTNRYTSSTNSNNSSTSSNSSSCLSTTTSHNISSSSHHCSSSSKSTTTSLFSSSCFSSTSYSSSSRFSSSSRCFSSTSNSSSRRYSSPSSSSFPSCSSSSSSTDHEARFSISISVI

SEQ ID NO: 75457 - protein, 141 aa, Arabidopsis thaliana
  peptide (1)..(141): Ceres Seq. ID no. 6441332
MARSFAIAVICIVLIAGVTGQAPTSPPTATPAPPTPTTPPPAATPPPVSAPPPVTTSPPPVTTAPPPANPPPPVSSPPPASPPPATPPPVASPPPPVASPPPATPPPVATPPPAPLASPPAQVPAPAPTTKPDSPSPSPSS

SEQ ID NO: 75458 - DNA, 2529 bp, Arabidopsis thaliana
  misc_feature (1)..(2529): Ceres Seq. ID no. 6441540
  misc_feature (1)..(2529): Ortholog of  Ceres SEQ ID NO 13593911 as cited in SEQ ID NO 52935
atggaattccgcaaaccctttaagtctcatagctcgtataaacagattataagcaccggagatcaaaacgagaagacaaagaagaagaagaaactggcgaatcttgacgatggcgacattgctaaaactcagagctctgggtctagtttcgatggaaacagctataagttctggcaagacattgcaacagatgattatacaaagagcgggagtttcgatttcccgcaataccgtgaggagatcacactcgatgtaaacgaagaaacagaggaaacagaggatgtcagcaacaacaacaatttgtccggttctaaagaaacgagagtctttttcaaaataaacagttcaggaactaataatatgtctggttctgtacgttcttgtacatcttcgacttcgttttcatcggccacaatgcggttaaatttagagcagcagttggaggatgaaggagaggtggttgtaagatgttcatcggtgaggaaaacagagctagtttcgagggcgaaggcgagatcgaggttgatagatccgccacaagaagaggaacaacaatactcgagctggatcgggacatcggatcagttaagatcaggtttacttgggagacactccgatgatattgaggaagaagatgattcttcggctgaagaagatgttccagtggaatatcgaaagttgaaaatggatgcgataacgttgcttcaatggatgagcttaatcgcactcgtagttgcgttagtgttgagtctagggcttcatacttggagaaatgcaactctatggagccttcatctgtggaaatgggaagtggtcttgctggttctcatctgtgggaggctggtttcgggatgcggaatccgaatcatcgtcttctttatcgaaagaaacttccttttgaggaaacgggttctttacttcgtatacggtgtgaagactgctgttcagaactgtctctggctcggcctcgtgcttctcgcttggcatttcttgtttgacaagaaagtagaaaaggaaacacaaagcgatgttcttcttcttatgtctaaaatattagtgtgttttttgttgagcacggtcttatggctgatcaagacactggtggtgaaagttctagcctcttcgttccacgttagtacctactttgatcggattcaagaagctctgtttcatcattacttgatcgagacgttatctggacctccaatgcttgagttaagcaggattgaggaagaggaagatcggacgcaagatgagatctacaagatgcagaaaggaggagctgatttatcacctgaactttgttccgctgcgtttcctcaggaaaaaagtggaagtacaatgaacatgaagttctctccaatcattccaaagacgggaagtgataacggaatcacaatggatgatttacacaagatgaatcagaaaaacgtttcagcttggaacatgaagagactgatgaagattgtgagaaatgtttccctgagtacgttggacgaacaagcgcttcaaaacacgtgtgaagatgaatccactcgacagatacggagcgaaaaagaagctaaagcagctgcaaggaagattttcaagaacgtagctcaacctggcacaaaacacatatatctggaggacttgatgagatttttgcgagtagacgaggcgatgaagacaatgtgtctcttcgaaggcgccttagtgaccaaaaagattactaaatcagccttgaagaactggctggtaaatgctttcagagagagaagagcacttgccttaacactcaatgacaccaaaacagcagtgaacaaactccatcacatgattagttttctcactgccattgtcatcatagtcatatggctgatccttcttgaaatcgctacttccaagtatcttttatttctaacttcacaagttgtactcttagccttcatgtttgggaactctctcaagaccgtcttcgagtcaatcatcttcctcttcatcattcacccttacgatgttggtgatcggttactcatcgacactgtagagatggtggtggaggaaatgaacattctcacaacagttttcttgagagctgacaatctgaagattgtgtatccaaatattcttctatggcagaaagcgatccacaattacaaccgtagtccggatatgggagatgaagttacatgctgtgtccacattactactcctcctgaaaagattgctgcaatcaaacaaagaatatcaagctacattgatagcaagccagagtattggtatccaaaagctgatgtcattgtaaaggatgtggaagatttgaacattgtgaggatagcaatatggctatgtcataaaattaaccatcaaaacatgggagagagatttacaagaagagcgttgttgatcgaggaagtaatcaaaatcctcctcgaactcgacattcaataccggtttcatccacttgacatcaatgttaaaaccatgccaacagttgtctcgagcagagttccacctgcctggtcacaaaaccctgatttaaggtaa

SEQ ID NO: 75459 - protein, 842 aa, Arabidopsis thaliana
  peptide (1)..(842): Ceres Seq. ID no. 6441541
MEFRKPFKSHSSYKQIISTGDQNEKTKKKKKLANLDDGDIAKTQSSGSSFDGNSYKFWQDIATDDYTKSGSFDFPQYREEITLDVNEETEETEDVSNNNNLSGSKETRVFFKINSSGTNNMSGSVRSCTSSTSFSSATMRLNLEQQLEDEGEVVVRCSSVRKTELVSRAKARSRLIDPPQEEEQQYSSWIGTSDQLRSGLLGRHSDDIEEEDDSSAEEDVPVEYRKLKMDAITLLQWMSLIALVVALVLSLGLHTWRNATLWSLHLWKWEVVLLVLICGRLVSGCGIRIIVFFIERNFLLRKRVLYFVYGVKTAVQNCLWLGLVLLAWHFLFDKKVEKETQSDVLLLMSKILVCFLLSTVLWLIKTLVVKVLASSFHVSTYFDRIQEALFHHYLIETLSGPPMLELSRIEEEEDRTQDEIYKMQKGGADLSPELCSAAFPQEKSGSTMNMKFSPIIPKTGSDNGITMDDLHKMNQKNVSAWNMKRLMKIVRNVSLSTLDEQALQNTCEDESTRQIRSEKEAKAAARKIFKNVAQPGTKHIYLEDLMRFLRVDEAMKTMCLFEGALVTKKITKSALKNWLVNAFRERRALALTLNDTKTAVNKLHHMISFLTAIVIIVIWLILLEIATSKYLLFLTSQVVLLAFMFGNSLKTVFESIIFLFIIHPYDVGDRLLIDTVEMVVEEMNILTTVFLRADNLKIVYPNILLWQKAIHNYNRSPDMGDEVTCCVHITTPPEKIAAIKQRISSYIDSKPEYWYPKADVIVKDVEDLNIVRIAIWLCHKINHQNMGERFTRRALLIEEVIKILLELDIQYRFHPLDINVKTMPTVVSSRVPPAWSQNPDLR

SEQ ID NO: 75460 - protein, 722 aa, Arabidopsis thaliana
  peptide (1)..(722): Ceres Seq. ID no. 6441542
MSGSVRSCTSSTSFSSATMRLNLEQQLEDEGEVVVRCSSVRKTELVSRAKARSRLIDPPQEEEQQYSSWIGTSDQLRSGLLGRHSDDIEEEDDSSAEEDVPVEYRKLKMDAITLLQWMSLIALVVALVLSLGLHTWRNATLWSLHLWKWEVVLLVLICGRLVSGCGIRIIVFFIERNFLLRKRVLYFVYGVKTAVQNCLWLGLVLLAWHFLFDKKVEKETQSDVLLLMSKILVCFLLSTVLWLIKTLVVKVLASSFHVSTYFDRIQEALFHHYLIETLSGPPMLELSRIEEEEDRTQDEIYKMQKGGADLSPELCSAAFPQEKSGSTMNMKFSPIIPKTGSDNGITMDDLHKMNQKNVSAWNMKRLMKIVRNVSLSTLDEQALQNTCEDESTRQIRSEKEAKAAARKIFKNVAQPGTKHIYLEDLMRFLRVDEAMKTMCLFEGALVTKKITKSALKNWLVNAFRERRALALTLNDTKTAVNKLHHMISFLTAIVIIVIWLILLEIATSKYLLFLTSQVVLLAFMFGNSLKTVFESIIFLFIIHPYDVGDRLLIDTVEMVVEEMNILTTVFLRADNLKIVYPNILLWQKAIHNYNRSPDMGDEVTCCVHITTPPEKIAAIKQRISSYIDSKPEYWYPKADVIVKDVEDLNIVRIAIWLCHKINHQNMGERFTRRALLIEEVIKILLELDIQYRFHPLDINVKTMPTVVSSRVPPAWSQNPDLR

SEQ ID NO: 75461 - protein, 704 aa, Arabidopsis thaliana
  peptide (1)..(704): Ceres Seq. ID no. 6441543
MRLNLEQQLEDEGEVVVRCSSVRKTELVSRAKARSRLIDPPQEEEQQYSSWIGTSDQLRSGLLGRHSDDIEEEDDSSAEEDVPVEYRKLKMDAITLLQWMSLIALVVALVLSLGLHTWRNATLWSLHLWKWEVVLLVLICGRLVSGCGIRIIVFFIERNFLLRKRVLYFVYGVKTAVQNCLWLGLVLLAWHFLFDKKVEKETQSDVLLLMSKILVCFLLSTVLWLIKTLVVKVLASSFHVSTYFDRIQEALFHHYLIETLSGPPMLELSRIEEEEDRTQDEIYKMQKGGADLSPELCSAAFPQEKSGSTMNMKFSPIIPKTGSDNGITMDDLHKMNQKNVSAWNMKRLMKIVRNVSLSTLDEQALQNTCEDESTRQIRSEKEAKAAARKIFKNVAQPGTKHIYLEDLMRFLRVDEAMKTMCLFEGALVTKKITKSALKNWLVNAFRERRALALTLNDTKTAVNKLHHMISFLTAIVIIVIWLILLEIATSKYLLFLTSQVVLLAFMFGNSLKTVFESIIFLFIIHPYDVGDRLLIDTVEMVVEEMNILTTVFLRADNLKIVYPNILLWQKAIHNYNRSPDMGDEVTCCVHITTPPEKIAAIKQRISSYIDSKPEYWYPKADVIVKDVEDLNIVRIAIWLCHKINHQNMGERFTRRALLIEEVIKILLELDIQYRFHPLDINVKTMPTVVSSRVPPAWSQNPDLR

SEQ ID NO: 75462 - DNA, 792 bp, Arabidopsis thaliana
  misc_feature (1)..(792): Ceres Seq. ID no. 6441612
  misc_feature (1)..(792): Ortholog of  Ceres SEQ ID NO 12784416 as cited in SEQ ID NO 61324
atggctgaaatcaaggatgaaggaagcgccaagggctatgctttccctctcaggaaccctaatgttacgctgaatgagagaaactttgcagccttcactcacagatcagctgctgctcatccttggcatgacttggagattggtccagaagctcctactgttttcaactgtgttgttgaaattagcaaaggtggaaaggttaagtacgagctagacaagaacagtggccttattaaggttgatcgcgttctctactcatccattgtgtacccccacaactacggtttcatccctcgaactatctgtgaagacagtgatccaatggatgtcctggtactgatgcaggagcctgtgctaaccggatcattcctccgtgcccgtgctattggtctaatgcccatgattgatcagggtgagaaagacgacaagatcattgcagtatgtgctgatgatcccgagttccgtcactacagagacatcaaagagcttccccctcaccgtctagctgaaatccgtcgcttctttgaggactacaagaagaacgagaacaagaaagtcgacgttgaagctttccttcccgctcaagctgccatagacgctatcaaggactccatggatctttacgcacttacatcaaagctggcctgcaacgctaatgaagaaaccagtccttttccgttcctcccggtttgcttagacatcactgaagccgccttctatactacatgcatgttagataaaatttcaattggtgcatttaatttcgtaatgctcatcagaaaacattgttga

SEQ ID NO: 75463 - protein, 263 aa, Arabidopsis thaliana
  peptide (1)..(263): Ceres Seq. ID no. 6441613
MAEIKDEGSAKGYAFPLRNPNVTLNERNFAAFTHRSAAAHPWHDLEIGPEAPTVFNCVVEISKGGKVKYELDKNSGLIKVDRVLYSSIVYPHNYGFIPRTICEDSDPMDVLVLMQEPVLTGSFLRARAIGLMPMIDQGEKDDKIIAVCADDPEFRHYRDIKELPPHRLAEIRRFFEDYKKNENKKVDVEAFLPAQAAIDAIKDSMDLYALTSKLACNANEETSPFPFLPVCLDITEAAFYTTCMLDKISIGAFNFVMLIRKHC

SEQ ID NO: 75464 - protein, 156 aa, Arabidopsis thaliana
  peptide (1)..(156): Ceres Seq. ID no. 6441614
MDVLVLMQEPVLTGSFLRARAIGLMPMIDQGEKDDKIIAVCADDPEFRHYRDIKELPPHRLAEIRRFFEDYKKNENKKVDVEAFLPAQAAIDAIKDSMDLYALTSKLACNANEETSPFPFLPVCLDITEAAFYTTCMLDKISIGAFNFVMLIRKHC

SEQ ID NO: 75465 - protein, 150 aa, Arabidopsis thaliana
  peptide (1)..(150): Ceres Seq. ID no. 6441615
MQEPVLTGSFLRARAIGLMPMIDQGEKDDKIIAVCADDPEFRHYRDIKELPPHRLAEIRRFFEDYKKNENKKVDVEAFLPAQAAIDAIKDSMDLYALTSKLACNANEETSPFPFLPVCLDITEAAFYTTCMLDKISIGAFNFVMLIRKHC

SEQ ID NO: 75466 - DNA, 1089 bp, Arabidopsis thaliana
  misc_feature (1)..(1089): Ceres Seq. ID no. 6441718
  misc_feature (1)..(1089): Ortholog of  Ceres SEQ ID NO 13646157 as cited in SEQ ID NO 20485
  misc_feature (1)..(1089): Ortholog of  Ceres SEQ ID NO 15175488 as cited in SEQ ID NO 54441
  misc_feature (1)..(1089): Ortholog of  Ceres SEQ ID NO 15175098 as cited in SEQ ID NO 57679
atgaatagaggagtgttggagagttcgccggttcaacatctcacggcggctggaaaccctaattggtggaataatgtcagccgcggcttgaggccaccaacgccgttgatgagtcacgagccgccgtctaccaccgcttttattccaagtctcttgccaaacttcttctcttctccgacttcctcttcatcttcttcaccttctttccctcctcctaatagtaaccctaacttctcttcttggcttgaaatgagtgatctgcctcttgatcagccatggagccttagtcaactcctcttgggtggattgatgatgggagaggaagagaaaatggagatgatgaaccatcatcatcatcaaaatcaacaccaaagttaccaagcgaagaggatacaaaattgggaagaacaagttttgaggcaccaagcttccatgaaacaagagagtagtaataataatagttatggaataatgtcctcaccaaactcacctccaaacaaatcttgtgctacaattatcaacaccaatgaagacaacaacaataacattcacagtggtcttaacttgtccgagtgtaatagctcagagatgattgggtcttcttttgctaataagaaaccaaaacttcaagttccttcatcacaatcaactctcaaggtgagaaaggagaaacttggaggcagaatagcatctcttcaccagctagtatctccctttggcaagactgacacagcctctgtcttgtcggaggctattggatacattagattcctccacagtcaaattgaggctttaagtctaccatactttggtactccctcgaggaacaatatgatgcaccaacatgcacaaagaaatatgaatggtatatttcctgaggaccctggtcagcttgtgaatgagtattgcatgaaaagaggagtttcattgtcatcgacggacaatcaaaaatcaaatcctaacgaagaaccgatgaaagatttgagaagtagagggctttgtcttgttcccatctcatgcacactacaagttggcagcgacaatggtgccgactattgggctccggcgttcggaaccactctccagtga

SEQ ID NO: 75467 - protein, 362 aa, Arabidopsis thaliana
  peptide (1)..(362): Ceres Seq. ID no. 6441719
MNRGVLESSPVQHLTAAGNPNWWNNVSRGLRPPTPLMSHEPPSTTAFIPSLLPNFFSSPTSSSSSSPSFPPPNSNPNFSSWLEMSDLPLDQPWSLSQLLLGGLMMGEEEKMEMMNHHHHQNQHQSYQAKRIQNWEEQVLRHQASMKQESSNNNSYGIMSSPNSPPNKSCATIINTNEDNNNNIHSGLNLSECNSSEMIGSSFANKKPKLQVPSSQSTLKVRKEKLGGRIASLHQLVSPFGKTDTASVLSEAIGYIRFLHSQIEALSLPYFGTPSRNNMMHQHAQRNMNGIFPEDPGQLVNEYCMKRGVSLSSTDNQKSNPNEEPMKDLRSRGLCLVPISCTLQVGSDNGADYWAPAFGTTLQ

SEQ ID NO: 75468 - protein, 326 aa, Arabidopsis thaliana
  peptide (1)..(326): Ceres Seq. ID no. 6441720
MSHEPPSTTAFIPSLLPNFFSSPTSSSSSSPSFPPPNSNPNFSSWLEMSDLPLDQPWSLSQLLLGGLMMGEEEKMEMMNHHHHQNQHQSYQAKRIQNWEEQVLRHQASMKQESSNNNSYGIMSSPNSPPNKSCATIINTNEDNNNNIHSGLNLSECNSSEMIGSSFANKKPKLQVPSSQSTLKVRKEKLGGRIASLHQLVSPFGKTDTASVLSEAIGYIRFLHSQIEALSLPYFGTPSRNNMMHQHAQRNMNGIFPEDPGQLVNEYCMKRGVSLSSTDNQKSNPNEEPMKDLRSRGLCLVPISCTLQVGSDNGADYWAPAFGTTLQ

SEQ ID NO: 75469 - protein, 279 aa, Arabidopsis thaliana
  peptide (1)..(279): Ceres Seq. ID no. 6441721
MSDLPLDQPWSLSQLLLGGLMMGEEEKMEMMNHHHHQNQHQSYQAKRIQNWEEQVLRHQASMKQESSNNNSYGIMSSPNSPPNKSCATIINTNEDNNNNIHSGLNLSECNSSEMIGSSFANKKPKLQVPSSQSTLKVRKEKLGGRIASLHQLVSPFGKTDTASVLSEAIGYIRFLHSQIEALSLPYFGTPSRNNMMHQHAQRNMNGIFPEDPGQLVNEYCMKRGVSLSSTDNQKSNPNEEPMKDLRSRGLCLVPISCTLQVGSDNGADYWAPAFGTTLQ

SEQ ID NO: 75470 - DNA, 1095 bp, Arabidopsis thaliana
  misc_feature (1)..(1095): Ceres Seq. ID no. 6442178
  misc_feature (1)..(1095): Ortholog of  Ceres SEQ ID NO 13655992 as cited in SEQ ID NO 65504
  misc_feature (1)..(1095): Ortholog of  Ceres SEQ ID NO 13587581 as cited in SEQ ID NO 0
atgggagcagcgaagaatatctgggcattagccaacgccgaagatgcagctaacgacgccgaacaaatcccttattcttcgttcgtcgtcgacacgtctttagagttatgtaaagatctgttcaagaattggggagagcttgatgattcactcttctctgttgagagagtatctggaggcattacaaatcttttgctgaaggtttctgtgaaagaggacactaataaagaagtgtctgttacagtgagactgtatgggcctaacactgagtatgttattaaccgggagagagagattctggctatcaagtatctctcggctgccggatttggtgccaagttgcttggtggttttggaaatggcatggtgcaatcgttcatcaatgcaagaaccttagagccatcagacatgagagagccaaagattgctgcacaaattgccagagaacttggaaagtttcataaagtggacataccaggttccaaggaacctcagctgtgggttgatatcttgaagttctatgaaaaagcatctactcttacgtttgaagaacctgataagcagaagctctttgagactatttcgtttgaagaactccacaaagaaattattgagctaagggaattcacaggcttacttaacgcacctgtggtgtttgctcataacgatttactatcaggaaacttcatgctgaatgatgaagaagagaaactatacttgattgatttcgagtatggatcatacaactatagaggctttgacatcggaaatcacttcaatgaatatgcaggatacgactgtgattacagcctgtacccaagtaaagaggaacaatatcatttcatcaagcattacttacagccagacaaaccagacgaggtcagtatcgctgaagtagaatcagtctttgtagagacagatgcgtataaattagcatctcatttgtactgggcaatatgggcgatcatccaggcaaggatgtctcccattgagtttgaatatttgggttacttctttttgcggtacaatgaatacaagaagcagaagccacttactttttcacttgttacatctcacctctcagcatcgctgtag

SEQ ID NO: 75471 - protein, 364 aa, Arabidopsis thaliana
  peptide (1)..(364): Ceres Seq. ID no. 6442179
MGAAKNIWALANAEDAANDAEQIPYSSFVVDTSLELCKDLFKNWGELDDSLFSVERVSGGITNLLLKVSVKEDTNKEVSVTVRLYGPNTEYVINREREILAIKYLSAAGFGAKLLGGFGNGMVQSFINARTLEPSDMREPKIAAQIARELGKFHKVDIPGSKEPQLWVDILKFYEKASTLTFEEPDKQKLFETISFEELHKEIIELREFTGLLNAPVVFAHNDLLSGNFMLNDEEEKLYLIDFEYGSYNYRGFDIGNHFNEYAGYDCDYSLYPSKEEQYHFIKHYLQPDKPDEVSIAEVESVFVETDAYKLASHLYWAIWAIIQARMSPIEFEYLGYFFLRYNEYKKQKPLTFSLVTSHLSASL

SEQ ID NO: 75472 - protein, 243 aa, Arabidopsis thaliana
  peptide (1)..(243): Ceres Seq. ID no. 6442180
MVQSFINARTLEPSDMREPKIAAQIARELGKFHKVDIPGSKEPQLWVDILKFYEKASTLTFEEPDKQKLFETISFEELHKEIIELREFTGLLNAPVVFAHNDLLSGNFMLNDEEEKLYLIDFEYGSYNYRGFDIGNHFNEYAGYDCDYSLYPSKEEQYHFIKHYLQPDKPDEVSIAEVESVFVETDAYKLASHLYWAIWAIIQARMSPIEFEYLGYFFLRYNEYKKQKPLTFSLVTSHLSASL

SEQ ID NO: 75473 - protein, 228 aa, Arabidopsis thaliana
  peptide (1)..(228): Ceres Seq. ID no. 6442181
MREPKIAAQIARELGKFHKVDIPGSKEPQLWVDILKFYEKASTLTFEEPDKQKLFETISFEELHKEIIELREFTGLLNAPVVFAHNDLLSGNFMLNDEEEKLYLIDFEYGSYNYRGFDIGNHFNEYAGYDCDYSLYPSKEEQYHFIKHYLQPDKPDEVSIAEVESVFVETDAYKLASHLYWAIWAIIQARMSPIEFEYLGYFFLRYNEYKKQKPLTFSLVTSHLSASL

SEQ ID NO: 75474 - DNA, 1560 bp, Arabidopsis thaliana
  misc_feature (1)..(1560): Ceres Seq. ID no. 6442182
  misc_feature (1)..(1560): Ortholog of  Ceres SEQ ID NO 14314925 as cited in SEQ ID NO 57985
  misc_feature (1)..(1560): Ortholog of  Ceres SEQ ID NO 13591365 as cited in SEQ ID NO 62720
atggcttccatttccagaatcttaccaacagatggcagattaagtcaatgcagaatcaacacctcgtgggttccttctacaaccagaactcaaactcacttagattttcccaagttagtttctgttagtaactctgggataagtttgaggattcagaatagtaaacctattagccctgtctttgctcttgaagcaacttcctccaggagggttgtttgcaaagctgctgctggtgtgtcaggtgacttacctgagagtactcctaaggaacttagtcagtatgagaagattattgagcttttgacaaccctttttccactttgggttattttgggaacacttgttggcatcttcaagccatccttggttacatggttggaaacagatctctttactctaggtcttggatttcttatgctttccatgggtttgactcttacgtttgaagatttcagaagatgtttacgtaatccatggacggtgggtgttggttttcttgctcaatatatgatcaagccaattctaggttttctcattgcaatgactcttaagctttcggcacctcttgcgactggccttatcctagtctcatgctgccctggaggacaggcgtcaaacgttgctacttacatttccaaggggaatgtagcgctctctgtactcatgacaacgtgttcaaccattggggctattataatgactcctcttcttactaagcttcttgctggtcagcttgttcccgttgacgctgctggacttgctcttagtacgttccaagtagtgttggttcctaccataattggagttctggcaaatgagttctttcctaaatttacgtctaagatcataacagtgacgcctctaatcggagtcattctgactactctgctctgtgccagccctattggacaagttgcagatgttttgaaaacccaaggagctcaacttatactcccggtggcactccttcatgctgcagcctttgctattggctattggatttcaaagttttctttcggcgagtccacttcgcgtaccatttctatagaatgtggaatgcaaagttcagcgctcgggttcttgcttgcacaaaagcatttcacaaaccctctagttgctgttccttctgcagtcagtgttgtctgtatggcgcttggcgggagcggcctggccgtgttctggagaaacctaccgattccgatgacaaggatgacttcaaagagaaaggcggtttgcatcttctccaaacgatgtgattgttttgttgtaatgttagtaaacattacaaaatttgtgttgaaaaacatgaaacaaaatgtgtttaagagacatagaaacaagggcgtgcatgatgacaactttgtggtcaaccttttttttatttctcaattaatggacaaatcttttttggcacaccttctccaaattttgaatctaagtttcagattgggattagcgttgttcccggaatcctgtctactctcacaatgcactccctcatttccagccatgacttctcttagctcatatacgtcttttgtcagcaatgataagttttga

SEQ ID NO: 75475 - protein, 519 aa, Arabidopsis thaliana
  peptide (1)..(519): Ceres Seq. ID no. 6442183
MASISRILPTDGRLSQCRINTSWVPSTTRTQTHLDFPKLVSVSNSGISLRIQNSKPISPVFALEATSSRRVVCKAAAGVSGDLPESTPKELSQYEKIIELLTTLFPLWVILGTLVGIFKPSLVTWLETDLFTLGLGFLMLSMGLTLTFEDFRRCLRNPWTVGVGFLAQYMIKPILGFLIAMTLKLSAPLATGLILVSCCPGGQASNVATYISKGNVALSVLMTTCSTIGAIIMTPLLTKLLAGQLVPVDAAGLALSTFQVVLVPTIIGVLANEFFPKFTSKIITVTPLIGVILTTLLCASPIGQVADVLKTQGAQLILPVALLHAAAFAIGYWISKFSFGESTSRTISIECGMQSSALGFLLAQKHFTNPLVAVPSAVSVVCMALGGSGLAVFWRNLPIPMTRMTSKRKAVCIFSKRCDCFVVMLVNITKFVLKNMKQNVFKRHRNKGVHDDNFVVNLFFISQLMDKSFLAHLLQILNLSFRLGLALFPESCLLSQCTPSFPAMTSLSSYTSFVSNDKF

SEQ ID NO: 75476 - protein, 381 aa, Arabidopsis thaliana
  peptide (1)..(381): Ceres Seq. ID no. 6442184
MLSMGLTLTFEDFRRCLRNPWTVGVGFLAQYMIKPILGFLIAMTLKLSAPLATGLILVSCCPGGQASNVATYISKGNVALSVLMTTCSTIGAIIMTPLLTKLLAGQLVPVDAAGLALSTFQVVLVPTIIGVLANEFFPKFTSKIITVTPLIGVILTTLLCASPIGQVADVLKTQGAQLILPVALLHAAAFAIGYWISKFSFGESTSRTISIECGMQSSALGFLLAQKHFTNPLVAVPSAVSVVCMALGGSGLAVFWRNLPIPMTRMTSKRKAVCIFSKRCDCFVVMLVNITKFVLKNMKQNVFKRHRNKGVHDDNFVVNLFFISQLMDKSFLAHLLQILNLSFRLGLALFPESCLLSQCTPSFPAMTSLSSYTSFVSNDKF

SEQ ID NO: 75477 - protein, 378 aa, Arabidopsis thaliana
  peptide (1)..(378): Ceres Seq. ID no. 6442185
MGLTLTFEDFRRCLRNPWTVGVGFLAQYMIKPILGFLIAMTLKLSAPLATGLILVSCCPGGQASNVATYISKGNVALSVLMTTCSTIGAIIMTPLLTKLLAGQLVPVDAAGLALSTFQVVLVPTIIGVLANEFFPKFTSKIITVTPLIGVILTTLLCASPIGQVADVLKTQGAQLILPVALLHAAAFAIGYWISKFSFGESTSRTISIECGMQSSALGFLLAQKHFTNPLVAVPSAVSVVCMALGGSGLAVFWRNLPIPMTRMTSKRKAVCIFSKRCDCFVVMLVNITKFVLKNMKQNVFKRHRNKGVHDDNFVVNLFFISQLMDKSFLAHLLQILNLSFRLGLALFPESCLLSQCTPSFPAMTSLSSYTSFVSNDKF

SEQ ID NO: 75478 - DNA, 1551 bp, Arabidopsis thaliana
  misc_feature (1)..(1551): Ceres Seq. ID no. 6442206
  misc_feature (1)..(1551): Ortholog of  Ceres SEQ ID NO 13502874 as cited in SEQ ID NO 66298
  misc_feature (1)..(1551): Ortholog of  Ceres SEQ ID NO 12614124 as cited in SEQ ID NO 68392
atggaagcaataatgaacgttgactttcaaaactgtttgatcttaatcctcctctgcctcctttccttcctctgttactctttcttcttcaagaaaccaaaggatggtttcaatttgccaccgagccctccctctctaccgatcattggccatcttcatcatctcctctctctttttatgcacagatctttgcaaaaactctcctccaagtatggacctctcctctatcttcacgtcttcaatgttcccatactccttgtctcgtctccctcaatagcctatgagatctttaggacacaagacgtaaacgtttcctcgcgcgactttcctacgaacgaagggtctctcctcttcggatcctttggcttcggcaccgcaccgtacggagaatactggaagttcatgaagaagctcattgtcaccaagttcctcgggcctcaagcactcgagaggtcacaaaaagtccgtaggagttattacttaaacctattagataaggcggtgaagaaggagagcgttgagattgctgaggaagctatgaagctggtcaacaataccgtttgccagatgattatggggaggagttgttcagaggaaaacggtgaagcagagagagtcagaggcttggtgaccaagacagatgccttgacgaagaagtttatcttggcaggcatcttgcggaaaccgcttcagaagattgggatctcactgttcaaaaaggagttaatggatgcttcctgcaagttcaacgaggtgttggagaagattcttgtagaatataaagagaaagttgaagagcatcatcaaggtactgacatgatggataagctcttagaagtttatggagacgaaaaagcagagtataagatcactagagaccatatcaagtccttgtttgtggatcttttctttgcaggcactgacacctggacgcacgctatacaatggattatggccgagatcattaacaactcgtacattcttgagagattgagagaagaaattgattctgttgtaggaaaaacaaggttgattcaagaaactgatctaccgaacctcccgtgcttgcaagcaaccgtcaaagaagggctaaggttgcaccctccggttcctcttgtgttaagaacgtttaaagaagggtgtacgattggaggcttttatgttccggagaagacaacacttgttgttaatgggtatgctatgatgagagatcctgaatactgggaagatcctcaagaatttaagccagagagatttctagcttcttcaagatcaagccaaaatgatgagataagagacgaactcctaaaataccttcctttcgggaatggaagaagagcctgtccaggagctaacctagcttatatctctgtaggaaccgcgattggagtgatggttcagtgctttgactgggagatcaaaggagataagatcaacatggatgaggctcctggaaaaataacgttgaccatggctcatcctcttaactgcactcttgttcctcgaaccctaatccctgttacttcaactgtacagattcctagttcttga

SEQ ID NO: 75479 - protein, 516 aa, Arabidopsis thaliana
  peptide (1)..(516): Ceres Seq. ID no. 6442207
MEAIMNVDFQNCLILILLCLLSFLCYSFFFKKPKDGFNLPPSPPSLPIIGHLHHLLSLFMHRSLQKLSSKYGPLLYLHVFNVPILLVSSPSIAYEIFRTQDVNVSSRDFPTNEGSLLFGSFGFGTAPYGEYWKFMKKLIVTKFLGPQALERSQKVRRSYYLNLLDKAVKKESVEIAEEAMKLVNNTVCQMIMGRSCSEENGEAERVRGLVTKTDALTKKFILAGILRKPLQKIGISLFKKELMDASCKFNEVLEKILVEYKEKVEEHHQGTDMMDKLLEVYGDEKAEYKITRDHIKSLFVDLFFAGTDTWTHAIQWIMAEIINNSYILERLREEIDSVVGKTRLIQETDLPNLPCLQATVKEGLRLHPPVPLVLRTFKEGCTIGGFYVPEKTTLVVNGYAMMRDPEYWEDPQEFKPERFLASSRSSQNDEIRDELLKYLPFGNGRRACPGANLAYISVGTAIGVMVQCFDWEIKGDKINMDEAPGKITLTMAHPLNCTLVPRTLIPVTSTVQIPSS

SEQ ID NO: 75480 - protein, 512 aa, Arabidopsis thaliana
  peptide (1)..(512): Ceres Seq. ID no. 6442208
MNVDFQNCLILILLCLLSFLCYSFFFKKPKDGFNLPPSPPSLPIIGHLHHLLSLFMHRSLQKLSSKYGPLLYLHVFNVPILLVSSPSIAYEIFRTQDVNVSSRDFPTNEGSLLFGSFGFGTAPYGEYWKFMKKLIVTKFLGPQALERSQKVRRSYYLNLLDKAVKKESVEIAEEAMKLVNNTVCQMIMGRSCSEENGEAERVRGLVTKTDALTKKFILAGILRKPLQKIGISLFKKELMDASCKFNEVLEKILVEYKEKVEEHHQGTDMMDKLLEVYGDEKAEYKITRDHIKSLFVDLFFAGTDTWTHAIQWIMAEIINNSYILERLREEIDSVVGKTRLIQETDLPNLPCLQATVKEGLRLHPPVPLVLRTFKEGCTIGGFYVPEKTTLVVNGYAMMRDPEYWEDPQEFKPERFLASSRSSQNDEIRDELLKYLPFGNGRRACPGANLAYISVGTAIGVMVQCFDWEIKGDKINMDEAPGKITLTMAHPLNCTLVPRTLIPVTSTVQIPSS

SEQ ID NO: 75481 - protein, 457 aa, Arabidopsis thaliana
  peptide (1)..(457): Ceres Seq. ID no. 6442209
MHRSLQKLSSKYGPLLYLHVFNVPILLVSSPSIAYEIFRTQDVNVSSRDFPTNEGSLLFGSFGFGTAPYGEYWKFMKKLIVTKFLGPQALERSQKVRRSYYLNLLDKAVKKESVEIAEEAMKLVNNTVCQMIMGRSCSEENGEAERVRGLVTKTDALTKKFILAGILRKPLQKIGISLFKKELMDASCKFNEVLEKILVEYKEKVEEHHQGTDMMDKLLEVYGDEKAEYKITRDHIKSLFVDLFFAGTDTWTHAIQWIMAEIINNSYILERLREEIDSVVGKTRLIQETDLPNLPCLQATVKEGLRLHPPVPLVLRTFKEGCTIGGFYVPEKTTLVVNGYAMMRDPEYWEDPQEFKPERFLASSRSSQNDEIRDELLKYLPFGNGRRACPGANLAYISVGTAIGVMVQCFDWEIKGDKINMDEAPGKITLTMAHPLNCTLVPRTLIPVTSTVQIPSS

SEQ ID NO: 75482 - DNA, 1134 bp, Arabidopsis thaliana
  misc_feature (1)..(1134): Ceres Seq. ID no. 6442497
  misc_feature (1)..(1134): Ortholog of  Ceres SEQ ID NO 13599131 as cited in SEQ ID NO 0
atttctctcactctcagaccttcttgttcgatttccatggcgaatttaacgacgaacgctaaaactcgcctgagaggtgttgtattcgatatggacggaaccctgactgttccggtcatcgatttcgccgcaatgtatagagctgttcttggtgaagatgcttacaagcgaatcaaagcagagagccctagtgggattgatattctgcatcatattgagtcgtggagtcctgataaacagcagaaggcgtatgaaatcattgctgattatgagaaacaaggaatagataagcttcaaatcatgcctggtactgctgaactatgtggcttccttgattccaaaaagataaagagggggctaattacacgcaatgttcaaaaggcaatcgacatcttccatcaacgttttgaggttatcttttctccagcactaggcagagagtttcgtccatataaaccaaacccagacccgctgttgcatatatgttctacatgggacatccaacctaatgaagtcatgatggttggtgacagcttaaaagatgatgtgagtgacagacatgatgacaagcctttggtcaaccctttctccatagcaaatcgataagcaatgcaatgaaagaagcttaaacaatggatcttctcatgccattgcttaaagattttctatgtggaaaggatgcctaccaacttttcagactatttttctcacatctttactgaagattacaactggtaatcgatctttcttttctcgattctgcagatagcatgtgggaaacgagctggagccttcacttgcttgctagatgaaaccggaaggtatggaccagacgatttttctgtttccggtctgcaacctgattttaaggttgattccttgtccaaaatccagaacctattggagacgaacttcgacctgaacccgtagtttttccaagttcctcatcttgtagtttcagtgaccaaattagtgtcctactcaacacagtatctgttcaggatagccataaatgtcaaaccacggaattctatgcactggctatctttaagttgcacaattgtgtccctgcatggtcgtctagcgaacatgtgtgtgagggcaaacattgttgtttgttaaatccaaaatttc

SEQ ID NO: 75483 - protein, 201 aa, Arabidopsis thaliana
  peptide (1)..(201): Ceres Seq. ID no. 6442498
ISLTLRPSCSISMANLTTNAKTRLRGVVFDMDGTLTVPVIDFAAMYRAVLGEDAYKRIKAESPSGIDILHHIESWSPDKQQKAYEIIADYEKQGIDKLQIMPGTAELCGFLDSKKIKRGLITRNVQKAIDIFHQRFEVIFSPALGREFRPYKPNPDPLLHICSTWDIQPNEVMMVGDSLKDDVSDRHDDKPLVNPFSIANR

SEQ ID NO: 75484 - protein, 189 aa, Arabidopsis thaliana
  peptide (1)..(189): Ceres Seq. ID no. 6442499
MANLTTNAKTRLRGVVFDMDGTLTVPVIDFAAMYRAVLGEDAYKRIKAESPSGIDILHHIESWSPDKQQKAYEIIADYEKQGIDKLQIMPGTAELCGFLDSKKIKRGLITRNVQKAIDIFHQRFEVIFSPALGREFRPYKPNPDPLLHICSTWDIQPNEVMMVGDSLKDDVSDRHDDKPLVNPFSIANR

SEQ ID NO: 75485 - protein, 171 aa, Arabidopsis thaliana
  peptide (1)..(171): Ceres Seq. ID no. 6442500
MDGTLTVPVIDFAAMYRAVLGEDAYKRIKAESPSGIDILHHIESWSPDKQQKAYEIIADYEKQGIDKLQIMPGTAELCGFLDSKKIKRGLITRNVQKAIDIFHQRFEVIFSPALGREFRPYKPNPDPLLHICSTWDIQPNEVMMVGDSLKDDVSDRHDDKPLVNPFSIANR

SEQ ID NO: 75486 - DNA, 1038 bp, Arabidopsis thaliana
  misc_feature (1)..(1038): Ceres Seq. ID no. 6442528
  misc_feature (1)..(1038): Ortholog of  Ceres SEQ ID NO 13582332 as cited in SEQ ID NO 59890
  misc_feature (1)..(1038): Ortholog of  Ceres SEQ ID NO 13598278 as cited in SEQ ID NO 68456
atgaagacagttcttgtaatcataaactgtatattcttggccattggaaactgtggaggccctctaatgatgcgtctctacttccaaaatggtggcgaaaggatctggtttccaagcttccttcaaaccgttggttgtccactcattttcttccctcttctcttatctttcctccgccgtcgtcgttgccttgaagaacaagaaacgactccatttttcctcatgaaacctcctctctttatcgccgctatcgttgttggtttgctcgtgggatttgacaattacctctactcttacgggttagcttatatccctgtttctactgcgtctttgatcatctccgcgcaattaggcttcactgctctctttgcattttttatggtgaagcaaaagttcacacctttcactataaacgctatcgttttgctcactggtggtgccgtagtccttgcccttaactctgatagtgacaagcttgcaaacgagacacacaaggaatatgttgttgggttcatcatgactcttggtgcagctcttctctatgggtttatattgccacttgtcgagctttcttacaagaaatctggtcagcgaatcacgtatacgctcgcgctcgagttccagatggtcttatgctttgctgccacttgtgtctgcctcgtggggatgctagccgctggcgatttcaaggtgatagcaggagaagcaagagattttaagcttggagagtctttgtactatgtggtgattgtgttcacggccataatctggcaagcattttttgtgggagctattgggttgatcttctgtgcatcgtctctggtctctggaattatggtcagtgctctgcttccggtgacggtgatcttggccgtcatttgcttccaggagaagtttcaggcggggaaaggtgtcgctttggctctctccctctggggatcagtctcttatttctatggacaggttaaatccgaggagaagactaaggctcaggatacacaactgtctcagcttccagttactgattatgtagcttaa

SEQ ID NO: 75487 - protein, 345 aa, Arabidopsis thaliana
  peptide (1)..(345): Ceres Seq. ID no. 6442529
MKTVLVIINCIFLAIGNCGGPLMMRLYFQNGGERIWFPSFLQTVGCPLIFFPLLLSFLRRRRCLEEQETTPFFLMKPPLFIAAIVVGLLVGFDNYLYSYGLAYIPVSTASLIISAQLGFTALFAFFMVKQKFTPFTINAIVLLTGGAVVLALNSDSDKLANETHKEYVVGFIMTLGAALLYGFILPLVELSYKKSGQRITYTLALEFQMVLCFAATCVCLVGMLAAGDFKVIAGEARDFKLGESLYYVVIVFTAIIWQAFFVGAIGLIFCASSLVSGIMVSALLPVTVILAVICFQEKFQAGKGVALALSLWGSVSYFYGQVKSEEKTKAQDTQLSQLPVTDYVA

SEQ ID NO: 75488 - protein, 323 aa, Arabidopsis thaliana
  peptide (1)..(323): Ceres Seq. ID no. 6442530
MMRLYFQNGGERIWFPSFLQTVGCPLIFFPLLLSFLRRRRCLEEQETTPFFLMKPPLFIAAIVVGLLVGFDNYLYSYGLAYIPVSTASLIISAQLGFTALFAFFMVKQKFTPFTINAIVLLTGGAVVLALNSDSDKLANETHKEYVVGFIMTLGAALLYGFILPLVELSYKKSGQRITYTLALEFQMVLCFAATCVCLVGMLAAGDFKVIAGEARDFKLGESLYYVVIVFTAIIWQAFFVGAIGLIFCASSLVSGIMVSALLPVTVILAVICFQEKFQAGKGVALALSLWGSVSYFYGQVKSEEKTKAQDTQLSQLPVTDYVA

SEQ ID NO: 75489 - protein, 322 aa, Arabidopsis thaliana
  peptide (1)..(322): Ceres Seq. ID no. 6442531
MRLYFQNGGERIWFPSFLQTVGCPLIFFPLLLSFLRRRRCLEEQETTPFFLMKPPLFIAAIVVGLLVGFDNYLYSYGLAYIPVSTASLIISAQLGFTALFAFFMVKQKFTPFTINAIVLLTGGAVVLALNSDSDKLANETHKEYVVGFIMTLGAALLYGFILPLVELSYKKSGQRITYTLALEFQMVLCFAATCVCLVGMLAAGDFKVIAGEARDFKLGESLYYVVIVFTAIIWQAFFVGAIGLIFCASSLVSGIMVSALLPVTVILAVICFQEKFQAGKGVALALSLWGSVSYFYGQVKSEEKTKAQDTQLSQLPVTDYVA

SEQ ID NO: 75490 - DNA, 2889 bp, Arabidopsis thaliana
  misc_feature (1)..(2889): Ceres Seq. ID no. 6442697
  misc_feature (1)..(2889): Ortholog of  Ceres SEQ ID NO 13584744 as cited in SEQ ID NO 69137
atgacaccgtttcgctggagactgcttggtggtggaattcactacaacacgttaaaggtggaacacaacgaatctggaccattgagtttaaagggtctgtttggttctgtttctggaaatttcacttttttcacttttttgggatcacatttaatggtgagaatctcactgcttttgttgtgtttactggtttcaacttgtctcttcacttcttcatcagcacaagctccaggttttgtgagcttggattgtggaggtgcagagccattcactgatgaacttggactcaaatggtcacctgataatcatctcatttatggagaaaccgctaatatatcgtccgttaacgaaacaagaactcagtacacgactttaaggcatttccctgctgattcaagaaagtattgctacactctcaatgtcacgagtaggaatagatatctcattagagctactttcttgtatggtaatttcgacaacagcaacaatgtgtatcccaaattcgatatctccctcggggcgactcattgggcgaccattgttatctctgaaacctatataatcgaaactgcagaactggtgtttctggcttcttctcctactgttagtgtttgtttgtcaaatgccacaactggacagccgtttatatctactcttgagcttaggcagttgagtggttcgatgtatggttcgatgctatctgaagaccggttttacctgagtgttgcagcacggataaatttcggggctgaaagtgaagcttctgtgaggtacccggatgatccgtatgatagaatatgggaatctgatttgcaaaagaagcctaattatcttgtggatgttgctgctgggactgtgcgagtgtcgactacattgccaatcgaaagcagggtcgatgacagaccgcctcagaaggttatgcagacggctgtggttggaacaaacgggtccttaacttacagaatgaacctagatggcttccctggttttggttgggcattcacatactttgctgaaatcgaggatttggctgaggatgagtcaaggaagtttagattagttctacctgagcagcctgagtatagcaaatcggttgttaacatcaaggaaaatacacagagaccgtatcgcgtttatgcacctggctatcctaacataacacttccatttgtgctaaactttcgatttgccaaaacggctgattcttctaggggacctattctgaatgccatggagatcagcaaatatttgcggaaaagcgatggttcagtagatgcaactgttatggctaatgtggcatcgctatattcttccactgaatgggctcaagaaggcggtgacccttgttcaccctcaccgtggtcatgggtgcaatgcaattcggatccacaaccaagggttgttgctatcaagctgtcgagtatgaacttgacgggaaatataccttctgacctggtgaaattgactggtttggttgagttacacctcgagaacaaccgactaaccggaaagatcccttcctcgttgacgaaactcccaaacctgaaagaactgtacctgcagaacaatgtgttaacaggaacaataccatcagacctggccaaagatgtgatctcaaacttctctgggaaccttaaccttgaaaaaagtggagataaaggcaagaagctcggtgtcatcatcggtgcatcagttggtgcttttgttctgctaattgcaaccatcatttcttgcatcgtcatgtgcaaaagcaagaagaataacaagttgggaaaaacttcggcagagttaacgaatcgtcccttaccgattcagagagtttcgtctaccttgagtgaagctcatggagacgctgcacattgcttcacactttatgagatcgaggaagccacaaaaaaattcgaaaagagaattgggtcgggaggttttggaatcgtatactatggtaaaacaagggaggggaaagagattgctgtaaaggttcttgcaaataattcatatcagggaaagagagagtttgcaaacgaggttacattactctcaaggatacatcatcggaaccttgtgcagtttcttggttattgccaagaagagggaaaaaacatgcttgtgtatgagttcatgcacaatgggactttgaaggagcatctttatggcgtggtaccacgtgaccggagaatcagttggattaaaaggcttgagatagctgaagatgcagcccgagggatcgagtatcttcacacagggtgtgttccagcaatcatacatagagatctcaagactagtaacatcctacttgacaaacacatgagggcaaaggtttcagatttcggtttgtcgaaattcgcagttgacgggacctcacatgtctccagcattgtccgtggcacagttggatatcttgaccccgagtactatatatcgcagcagttaacagagaagagtgatgtatatagcttcggagtcattcttcttgagctaatgtctggccaagaagccatatcgaatgaaagctttggtgtcaactgccggaacatagtccaatgggctaagatgcatatagacaacggggacatccgagggatcatcgatccagcgctagcggaagatgattacagtctccaatcaatgtggaagattgcggagaaagcgttgctgtgtgtgaaaccgcacgggaacatgagaccttcgatgtccgaggtgcaaaaagatatccaagacgcgattaggatcgagaaggaagcgttggctgcaagaggcggtatatcagacgagttttccaggagctcggctcattcgtcttcgctcaacatgggaatgcttgacctggctggatcacagagttatgtatccattgatgaatcagtattgcagccaacagctcggtag

SEQ ID NO: 75491 - protein, 962 aa, Arabidopsis thaliana
  peptide (1)..(962): Ceres Seq. ID no. 6442698
MTPFRWRLLGGGIHYNTLKVEHNESGPLSLKGLFGSVSGNFTFFTFLGSHLMVRISLLLLCLLVSTCLFTSSSAQAPGFVSLDCGGAEPFTDELGLKWSPDNHLIYGETANISSVNETRTQYTTLRHFPADSRKYCYTLNVTSRNRYLIRATFLYGNFDNSNNVYPKFDISLGATHWATIVISETYIIETAELVFLASSPTVSVCLSNATTGQPFISTLELRQLSGSMYGSMLSEDRFYLSVAARINFGAESEASVRYPDDPYDRIWESDLQKKPNYLVDVAAGTVRVSTTLPIESRVDDRPPQKVMQTAVVGTNGSLTYRMNLDGFPGFGWAFTYFAEIEDLAEDESRKFRLVLPEQPEYSKSVVNIKENTQRPYRVYAPGYPNITLPFVLNFRFAKTADSSRGPILNAMEISKYLRKSDGSVDATVMANVASLYSSTEWAQEGGDPCSPSPWSWVQCNSDPQPRVVAIKLSSMNLTGNIPSDLVKLTGLVELHLENNRLTGKIPSSLTKLPNLKELYLQNNVLTGTIPSDLAKDVISNFSGNLNLEKSGDKGKKLGVIIGASVGAFVLLIATIISCIVMCKSKKNNKLGKTSAELTNRPLPIQRVSSTLSEAHGDAAHCFTLYEIEEATKKFEKRIGSGGFGIVYYGKTREGKEIAVKVLANNSYQGKREFANEVTLLSRIHHRNLVQFLGYCQEEGKNMLVYEFMHNGTLKEHLYGVVPRDRRISWIKRLEIAEDAARGIEYLHTGCVPAIIHRDLKTSNILLDKHMRAKVSDFGLSKFAVDGTSHVSSIVRGTVGYLDPEYYISQQLTEKSDVYSFGVILLELMSGQEAISNESFGVNCRNIVQWAKMHIDNGDIRGIIDPALAEDDYSLQSMWKIAEKALLCVKPHGNMRPSMSEVQKDIQDAIRIEKEALAARGGISDEFSRSSAHSSSLNMGMLDLAGSQSYVSIDESVLQPTAR

SEQ ID NO: 75492 - protein, 911 aa, Arabidopsis thaliana
  peptide (1)..(911): Ceres Seq. ID no. 6442699
MVRISLLLLCLLVSTCLFTSSSAQAPGFVSLDCGGAEPFTDELGLKWSPDNHLIYGETANISSVNETRTQYTTLRHFPADSRKYCYTLNVTSRNRYLIRATFLYGNFDNSNNVYPKFDISLGATHWATIVISETYIIETAELVFLASSPTVSVCLSNATTGQPFISTLELRQLSGSMYGSMLSEDRFYLSVAARINFGAESEASVRYPDDPYDRIWESDLQKKPNYLVDVAAGTVRVSTTLPIESRVDDRPPQKVMQTAVVGTNGSLTYRMNLDGFPGFGWAFTYFAEIEDLAEDESRKFRLVLPEQPEYSKSVVNIKENTQRPYRVYAPGYPNITLPFVLNFRFAKTADSSRGPILNAMEISKYLRKSDGSVDATVMANVASLYSSTEWAQEGGDPCSPSPWSWVQCNSDPQPRVVAIKLSSMNLTGNIPSDLVKLTGLVELHLENNRLTGKIPSSLTKLPNLKELYLQNNVLTGTIPSDLAKDVISNFSGNLNLEKSGDKGKKLGVIIGASVGAFVLLIATIISCIVMCKSKKNNKLGKTSAELTNRPLPIQRVSSTLSEAHGDAAHCFTLYEIEEATKKFEKRIGSGGFGIVYYGKTREGKEIAVKVLANNSYQGKREFANEVTLLSRIHHRNLVQFLGYCQEEGKNMLVYEFMHNGTLKEHLYGVVPRDRRISWIKRLEIAEDAARGIEYLHTGCVPAIIHRDLKTSNILLDKHMRAKVSDFGLSKFAVDGTSHVSSIVRGTVGYLDPEYYISQQLTEKSDVYSFGVILLELMSGQEAISNESFGVNCRNIVQWAKMHIDNGDIRGIIDPALAEDDYSLQSMWKIAEKALLCVKPHGNMRPSMSEVQKDIQDAIRIEKEALAARGGISDEFSRSSAHSSSLNMGMLDLAGSQSYVSIDESVLQPTAR

SEQ ID NO: 75493 - protein, 735 aa, Arabidopsis thaliana; identical to SEQ ID NO: 46118
  peptide (1)..(735): Ceres Seq. ID no. 6442700

SEQ ID NO: 75494 - DNA, 1131 bp, Arabidopsis thaliana
  misc_feature (1)..(1131): Ceres Seq. ID no. 6442753
  misc_feature (1)..(1131): Ortholog of  Ceres SEQ ID NO 15226198 as cited in SEQ ID NO 62150
atgcctacgatatttttcaacgccattgacgacgctttatataccactgtgactgttcttttagttttgagtatgttaatgatcgcgaggaaagctttggcctcggcgcatactaaggcgtttcgtttggcaacaagggatgtacattgctttagttccatcttagtgtctcctcctctcgtgtcacttgacttgcctgaaaattggattccttactctgatcctccacctcctgtttcctttgagactgaacagaagactgtggtgatagatggtaatgttatcgctgaggaaatcagaacaaagattattagtgaagtggggaagatgaaaaaggctgttggaaaagtccctggtcttgctgttgttttggttggtgaacaaagagactcgcaaacttatgttcgcaacaaaattaaagcttgtgaagaaactggcattaaatctgttttggctgaattaccagaggattgtactgaaggacagattatcagtgtattgagaaaattcaatgaagacacgtctattcacggaattcttgtgcaacttcctttaccccaacatcttaatgaatcaaaaatcttgaatatggtgagattggagaaagatgttgatgggtttcatccattaaacgtggggaatcttgcaatgagagggagggaaccgctgtttgtatcttgcactcctaagggctgtgtggagttgttgataagaacgggtgttgaaatagcaggaaaaaatgctgtggtcataggcagaagcaacatcgttggactaccaatgtctttattattgcagaggcatgacgcgacagtaagcacggtgcatgcgtttacaaaggatccagagcacattactaggaaggcggatatcgttatagcagcagcgggtatacctaatttagttcgtggaagttggcttaagcctggagcagttgtcattgatgttggaacaactccagtcgaggatagtagctgtgagtttggttaccgtcttgtcggggatgtatgttacgaggaagcgttaggtgttgcctcggctatcactcccgtaccgggaggagttggacctatgacgatcaccatgctactatgcaatactttggaggctgctaagcggatcttcctctga

SEQ ID NO: 75495 - protein, 376 aa, Arabidopsis thaliana
  peptide (1)..(376): Ceres Seq. ID no. 6442754
MPTIFFNAIDDALYTTVTVLLVLSMLMIARKALASAHTKAFRLATRDVHCFSSILVSPPLVSLDLPENWIPYSDPPPPVSFETEQKTVVIDGNVIAEEIRTKIISEVGKMKKAVGKVPGLAVVLVGEQRDSQTYVRNKIKACEETGIKSVLAELPEDCTEGQIISVLRKFNEDTSIHGILVQLPLPQHLNESKILNMVRLEKDVDGFHPLNVGNLAMRGREPLFVSCTPKGCVELLIRTGVEIAGKNAVVIGRSNIVGLPMSLLLQRHDATVSTVHAFTKDPEHITRKADIVIAAAGIPNLVRGSWLKPGAVVIDVGTTPVEDSSCEFGYRLVGDVCYEEALGVASAITPVPGGVGPMTITMLLCNTLEAAKRIFL

SEQ ID NO: 75496 - protein, 352 aa, Arabidopsis thaliana; identical to SEQ ID NO: 75077
  peptide (1)..(352): Ceres Seq. ID no. 6442755

SEQ ID NO: 75497 - protein, 350 aa, Arabidopsis thaliana; identical to SEQ ID NO: 75078
  peptide (1)..(350): Ceres Seq. ID no. 6442756

SEQ ID NO: 75498 - DNA, 1656 bp, Arabidopsis thaliana
  misc_feature (1)..(1656): Ceres Seq. ID no. 6442761
  misc_feature (1)..(1656): Ortholog of  Ceres SEQ ID NO 15169092 as cited in SEQ ID NO 60430
  misc_feature (1)..(1656): Ortholog of  Ceres SEQ ID NO 14303680 as cited in SEQ ID NO 66019
  misc_feature (1)..(1656): Ortholog of  Ceres SEQ ID NO 15224940 as cited in SEQ ID NO 0
atgtctccgtcttcaaccactacttgcacttcccttcttgaagagttgcagatgatatgggatgagattggtgaaagttacaatgaaagagataagatgctgctagaacttgagcaggaatgtctggatatatacaataagaaggttgagaaaactcgtaagttcagagctgagttacagcgatcattagctcaagctgaagctgagattgccagcctcatgtctgcgcttggtgaaaaagtttcgtttgccaagaagaaagaaggctctttgaaggagcagatttccagtgtaaagcctgtactggaagatctactgatgaaaaaggatcgaagaaggaaagagctctctgagacactgaatcaaatagcagagatcacgtctaacatagcagggaatgattatactgttagttctggttcagaagttgatgaaagtgacttgacacaaagaaagttggatgaacttagagcagatctgcaggatcttcgaaatgaaaaggctgttcgactgcagaaagtaaactcttatatcagtgctgtccatgagctgtcagagattctgtcttttgatttctccaaggccctgaatagtgtccatagcagcttgactgagttttcaaagactcattcgaaaagcattagtaatgatactcttgctaggttcacagaacttgtaaagtctctgaaggcggagaaacatgagaggctgcttaagctacaaggtttgggaagaagcatgcaagagctgtggaacctaatggaaacacctatggatgagaggagaagatttgaccattgcagcagcttactttctagtctacctgatgatgccttgaaaaaaggatgcctcagcctagacattatccgagaggccgaagatgaagtgagaagactgaattccctgaagtccagcaaaatgaaggaattggtgtttaagaggcagtgtgaactagaagagatctgcagagggaatcatatggatatcaatagtgatgctgcaagaaagagtcttgtcgaactcattgaatctggtgatggtgatctgtctgatattcttgcaagcatagatggtcagatcgagaaggcaagagaagaagctttaagcagaaaggaaatattggacaaagttgataagtggagacacgcaaaggaggaagaaacatggcttgatgattatgaaaaggatgaaaatcgcttcagtgctgtgagaggagcacacaaaaatctaaaacgggcagaaaaagctaggagccttatcagcaaaattcctgcaatggtggatgttctgaccacgaaagtgaaggcctgggagaaagaaagaggggtccccttcttatgcgataagcaaccgttattacaaacactagaagatgacattgttatccgtgctcaaagagaagaggaaaagcgtcaattccgagagcagaaacgactacaaggtcagcttgctacagagaaagaagcaaagtatggttccaagtctgcaaagaagaagccattgggacagagtcttaacacagacaatgtgactaaaactcccattggtcggcgcattggaaatacacctggacgttctgttacttctggtggcaaagattatagaggcaatgcggtgataccattgaactatgttgctcttcagaaagacgattga

SEQ ID NO: 75499 - protein, 551 aa, Arabidopsis thaliana
  peptide (1)..(551): Ceres Seq. ID no. 6442762
MSPSSTTTCTSLLEELQMIWDEIGESYNERDKMLLELEQECLDIYNKKVEKTRKFRAELQRSLAQAEAEIASLMSALGEKVSFAKKKEGSLKEQISSVKPVLEDLLMKKDRRRKELSETLNQIAEITSNIAGNDYTVSSGSEVDESDLTQRKLDELRADLQDLRNEKAVRLQKVNSYISAVHELSEILSFDFSKALNSVHSSLTEFSKTHSKSISNDTLARFTELVKSLKAEKHERLLKLQGLGRSMQELWNLMETPMDERRRFDHCSSLLSSLPDDALKKGCLSLDIIREAEDEVRRLNSLKSSKMKELVFKRQCELEEICRGNHMDINSDAARKSLVELIESGDGDLSDILASIDGQIEKAREEALSRKEILDKVDKWRHAKEEETWLDDYEKDENRFSAVRGAHKNLKRAEKARSLISKIPAMVDVLTTKVKAWEKERGVPFLCDKQPLLQTLEDDIVIRAQREEEKRQFREQKRLQGQLATEKEAKYGSKSAKKKPLGQSLNTDNVTKTPIGRRIGNTPGRSVTSGGKDYRGNAVIPLNYVALQKDD

SEQ ID NO: 75500 - protein, 534 aa, Arabidopsis thaliana
  peptide (1)..(534): Ceres Seq. ID no. 6442763
MIWDEIGESYNERDKMLLELEQECLDIYNKKVEKTRKFRAELQRSLAQAEAEIASLMSALGEKVSFAKKKEGSLKEQISSVKPVLEDLLMKKDRRRKELSETLNQIAEITSNIAGNDYTVSSGSEVDESDLTQRKLDELRADLQDLRNEKAVRLQKVNSYISAVHELSEILSFDFSKALNSVHSSLTEFSKTHSKSISNDTLARFTELVKSLKAEKHERLLKLQGLGRSMQELWNLMETPMDERRRFDHCSSLLSSLPDDALKKGCLSLDIIREAEDEVRRLNSLKSSKMKELVFKRQCELEEICRGNHMDINSDAARKSLVELIESGDGDLSDILASIDGQIEKAREEALSRKEILDKVDKWRHAKEEETWLDDYEKDENRFSAVRGAHKNLKRAEKARSLISKIPAMVDVLTTKVKAWEKERGVPFLCDKQPLLQTLEDDIVIRAQREEEKRQFREQKRLQGQLATEKEAKYGSKSAKKKPLGQSLNTDNVTKTPIGRRIGNTPGRSVTSGGKDYRGNAVIPLNYVALQKDD

SEQ ID NO: 75501 - protein, 519 aa, Arabidopsis thaliana
  peptide (1)..(519): Ceres Seq. ID no. 6442764
MLLELEQECLDIYNKKVEKTRKFRAELQRSLAQAEAEIASLMSALGEKVSFAKKKEGSLKEQISSVKPVLEDLLMKKDRRRKELSETLNQIAEITSNIAGNDYTVSSGSEVDESDLTQRKLDELRADLQDLRNEKAVRLQKVNSYISAVHELSEILSFDFSKALNSVHSSLTEFSKTHSKSISNDTLARFTELVKSLKAEKHERLLKLQGLGRSMQELWNLMETPMDERRRFDHCSSLLSSLPDDALKKGCLSLDIIREAEDEVRRLNSLKSSKMKELVFKRQCELEEICRGNHMDINSDAARKSLVELIESGDGDLSDILASIDGQIEKAREEALSRKEILDKVDKWRHAKEEETWLDDYEKDENRFSAVRGAHKNLKRAEKARSLISKIPAMVDVLTTKVKAWEKERGVPFLCDKQPLLQTLEDDIVIRAQREEEKRQFREQKRLQGQLATEKEAKYGSKSAKKKPLGQSLNTDNVTKTPIGRRIGNTPGRSVTSGGKDYRGNAVIPLNYVALQKDD

SEQ ID NO: 75502 - DNA, 1557 bp, Arabidopsis thaliana
  misc_feature (1)..(1557): Ceres Seq. ID no. 6442856
  misc_feature (1)..(1557): Ortholog of  Ceres SEQ ID NO 14308370 as cited in SEQ ID NO 55399
atggcattggcagaggagcagcatcagaattatcatgtggctgaggcgattccgggtacgcctgggatccatgatgtcaggattcaacccggttctgagaattccgggttctgtgttgatccggttggtgtttctaatgtacctggaattaggagagttgggttgagagctgaaatcgatacttctcctccattcggatcggttcaggaggcggtgactcgattcggtggtcgtggttattgggttcctttcaagcttgatgacactttcaatggtgaatttgacattaagagaatggaggagcatgcagcggagcttgagaaggatctgattgtgaaagagcttgaaactttggatgttttagaagctcttggatcaaccaaaaggatcgttgaagatttgaagcggcagcttcagcaagaagcactgagatgctctgaccaactcagttcagatatcaaagagatgaacgatgagcattgccatcacaatcccatgtcatctcctgatttgatcttgatggaattgaagcaagctaagatgaatcttggtaaaaccatggacaaccttgtagtgatccagtcctctgttgaatctctgaataagaaaatgaaagaagagaaagacttccttgagaagacacgggctaagctaacgtatgggtttggtggaccggtatctctagctgaggagttgagtcggattaaggtaaaaccacaggttcaagatgaaccgttaagggagcaggttaagatggttgctgaagccgatgaaacgggtttaaacctgcagaacaagaacagtctgagaactgcagagatgagattggttgctgctaggaaaatggaagaagctgcgaaagcagcggaagcacttgcgattgctgaaattacaatgttatcatccaatggtgaaagccaggacgatgattcggaattttgctttccagagcctccaagatctcctgtgacaccaagaggactcaggattgataatgacttctccacggataagagttcaagacgagggattttgaagaagcttgaggaagctactgaaggagttaaacaaagtaagcaggctttagaagctgcgttaaaccgagtagagatcgctaatgtgaagcaacttgcagctgaaaatgctttccgcgggtggacaaaagactcattgaaaggcgataactttacacctttgaatcatacccgacgctcctttttcagccatttgaacaagcatcacgagccacttgacattctcccaaagccagtgttaaagtctaatatctcaatgcgtgatgttctaaggcgtaagcaagttccaaaggaagatgttgttgctccccaaagacagagccttgaagggcaaataccgaggcgaaatgtgaatttgagccaaatgttgaaggaactaaagcaggatgtgaagttttcggcacggggagagaaagaggaggtacatgaagagaaacagtacgtcacgcagaggagaaagtttgggttcatacacattacacttccactgcagaagcagagcaagaaaaaatccagcctttaa

SEQ ID NO: 75503 - protein, 518 aa, Arabidopsis thaliana
  peptide (1)..(518): Ceres Seq. ID no. 6442857
MALAEEQHQNYHVAEAIPGTPGIHDVRIQPGSENSGFCVDPVGVSNVPGIRRVGLRAEIDTSPPFGSVQEAVTRFGGRGYWVPFKLDDTFNGEFDIKRMEEHAAELEKDLIVKELETLDVLEALGSTKRIVEDLKRQLQQEALRCSDQLSSDIKEMNDEHCHHNPMSSPDLILMELKQAKMNLGKTMDNLVVIQSSVESLNKKMKEEKDFLEKTRAKLTYGFGGPVSLAEELSRIKVKPQVQDEPLREQVKMVAEADETGLNLQNKNSLRTAEMRLVAARKMEEAAKAAEALAIAEITMLSSNGESQDDDSEFCFPEPPRSPVTPRGLRIDNDFSTDKSSRRGILKKLEEATEGVKQSKQALEAALNRVEIANVKQLAAENAFRGWTKDSLKGDNFTPLNHTRRSFFSHLNKHHEPLDILPKPVLKSNISMRDVLRRKQVPKEDVVAPQRQSLEGQIPRRNVNLSQMLKELKQDVKFSARGEKEEVHEEKQYVTQRRKFGFIHITLPLQKQSKKKSSL

SEQ ID NO: 75504 - protein, 420 aa, Arabidopsis thaliana; identical to SEQ ID NO: 70261
  peptide (1)..(420): Ceres Seq. ID no. 6442858

SEQ ID NO: 75505 - protein, 363 aa, Arabidopsis thaliana; identical to SEQ ID NO: 70262
  peptide (1)..(363): Ceres Seq. ID no. 6442859

SEQ ID NO: 75506 - DNA, 504 bp, Arabidopsis thaliana
  misc_feature (1)..(504): Ceres Seq. ID no. 6442878
  misc_feature (1)..(504): Ortholog of  Ceres SEQ ID NO 12578784 as cited in SEQ ID NO 20729
atggttgtgtcgagatactggttggaaatcgtaattgcatttgagaaagcactcgacaagataacatattctcgacctaagaagcatgtagttaagagttttctttcgaaagagaagataaagaacctctacttaggattcataaccatcttaggaatcgccactgtgcttgtttctctcctcccggagtttcgggtggtgggggcgtctctgttctttggaatgggattctctggcttagctccgattcttcacaagctgataatcttttgggaccaacctgaagcccttcacacgacatgttatgagattttgatgggtttgctttatgggttaggagctctggtttatgcaactaggatcccagagagatggatgccgggtaaattcgatatagcaggacatagccatcagttgtttcatgttctggtagttgctggtgcgttcacgcactatagagctgggctagtgtatcttaagtggagagatattgaaggatgttga

SEQ ID NO: 75507 - protein, 167 aa, Arabidopsis thaliana
  peptide (1)..(167): Ceres Seq. ID no. 6442879
MVVSRYWLEIVIAFEKALDKITYSRPKKHVVKSFLSKEKIKNLYLGFITILGIATVLVSLLPEFRVVGASLFFGMGFSGLAPILHKLIIFWDQPEALHTTCYEILMGLLYGLGALVYATRIPERWMPGKFDIAGHSHQLFHVLVVAGAFTHYRAGLVYLKWRDIEGC

SEQ ID NO: 75508 - protein, 93 aa, Arabidopsis thaliana
  peptide (1)..(93): Ceres Seq. ID no. 6442880
MGFSGLAPILHKLIIFWDQPEALHTTCYEILMGLLYGLGALVYATRIPERWMPGKFDIAGHSHQLFHVLVVAGAFTHYRAGLVYLKWRDIEGC

SEQ ID NO: 75509 - DNA, 1185 bp, Arabidopsis thaliana
  misc_feature (1)..(1185): Ceres Seq. ID no. 6442893
  misc_feature (1)..(1185): Ortholog of  Ceres SEQ ID NO 13595351 as cited in SEQ ID NO 55934
  misc_feature (1)..(1185): Ortholog of  Ceres SEQ ID NO 13639645 as cited in SEQ ID NO 57488
atgggattaaggatgtcagaatcagctaaaccttattttgcaatggtctgtcttcagttcggatacgcaggtatgaacttagtaactaaaaccgtcctagaccgcggtatgagccattacgttcttgttgcataccgcaacgcttttgccacagccgctatcgcacccttcgctcttctctccgaaaggaaagtgagatcaaagatgacgtttccaatattcatgcgaatatttcttcttgctcttctcgggccggtgattgatcagaacttatactatatcggtctaaaactcacatcaccaacgttttcctccgccgttagcaacatcgtgcctgcaattaccattatccttgccacacttttcaggatggagaaagtggagatgagaaaagtaagatgcctggtaaaagtgatggggacgttagtgacagtggttggatccatattgatgatattctacaaaggtcctttcattaatttcttccggtctcacctcacggccgcctcttcgccgccgacggctgactatcttaaggctgccgtcttcctactcctcgcttccctctcatgggcgtcgttctttgttcttcaggctgcgactttgaagaaatactcagcccatctctcaatgtcaacaatggtgtgtttcatgggaacgttacagtctttagccctagccttcgtaatggaacacaatccttctgctttgaacatcggttttgacatgaaccttctcgcttctgcctacgcgggaataatgtcgtcgagcatagcttactacgttcaaggacttatgatgcagcgaaaaggaccggtctttgtcactgcttttaaccctcttatcgttgtcattgtctccatcatgagcttcttcgttctcggtcaaggaatctaccttggaggggttattggagtggttgttttgatggtgggagtctacgccgtgttatggggcaaacatgtagatgatgacggcgaagaaacacgccatgaagataacgttgtagccgttaagtgttgtagtggcaataatggtctaacgataatgccgaaaatcgacgaagctgatgaggaggatgttgaaaccggaaaggctacgtcggagaaggagtcgtcagttccggaagtggtggtggtagttttttgtagtgaaaatgtgcatagcgtttcacgacctaactag

SEQ ID NO: 75510 - protein, 394 aa, Arabidopsis thaliana
  peptide (1)..(394): Ceres Seq. ID no. 6442894
MGLRMSESAKPYFAMVCLQFGYAGMNLVTKTVLDRGMSHYVLVAYRNAFATAAIAPFALLSERKVRSKMTFPIFMRIFLLALLGPVIDQNLYYIGLKLTSPTFSSAVSNIVPAITIILATLFRMEKVEMRKVRCLVKVMGTLVTVVGSILMIFYKGPFINFFRSHLTAASSPPTADYLKAAVFLLLASLSWASFFVLQAATLKKYSAHLSMSTMVCFMGTLQSLALAFVMEHNPSALNIGFDMNLLASAYAGIMSSSIAYYVQGLMMQRKGPVFVTAFNPLIVVIVSIMSFFVLGQGIYLGGVIGVVVLMVGVYAVLWGKHVDDDGEETRHEDNVVAVKCCSGNNGLTIMPKIDEADEEDVETGKATSEKESSVPEVVVVVFCSENVHSVSRPN

SEQ ID NO: 75511 - protein, 390 aa, Arabidopsis thaliana
  peptide (1)..(390): Ceres Seq. ID no. 6442895
MSESAKPYFAMVCLQFGYAGMNLVTKTVLDRGMSHYVLVAYRNAFATAAIAPFALLSERKVRSKMTFPIFMRIFLLALLGPVIDQNLYYIGLKLTSPTFSSAVSNIVPAITIILATLFRMEKVEMRKVRCLVKVMGTLVTVVGSILMIFYKGPFINFFRSHLTAASSPPTADYLKAAVFLLLASLSWASFFVLQAATLKKYSAHLSMSTMVCFMGTLQSLALAFVMEHNPSALNIGFDMNLLASAYAGIMSSSIAYYVQGLMMQRKGPVFVTAFNPLIVVIVSIMSFFVLGQGIYLGGVIGVVVLMVGVYAVLWGKHVDDDGEETRHEDNVVAVKCCSGNNGLTIMPKIDEADEEDVETGKATSEKESSVPEVVVVVFCSENVHSVSRPN

SEQ ID NO: 75512 - protein, 380 aa, Arabidopsis thaliana
  peptide (1)..(380): Ceres Seq. ID no. 6442896
MVCLQFGYAGMNLVTKTVLDRGMSHYVLVAYRNAFATAAIAPFALLSERKVRSKMTFPIFMRIFLLALLGPVIDQNLYYIGLKLTSPTFSSAVSNIVPAITIILATLFRMEKVEMRKVRCLVKVMGTLVTVVGSILMIFYKGPFINFFRSHLTAASSPPTADYLKAAVFLLLASLSWASFFVLQAATLKKYSAHLSMSTMVCFMGTLQSLALAFVMEHNPSALNIGFDMNLLASAYAGIMSSSIAYYVQGLMMQRKGPVFVTAFNPLIVVIVSIMSFFVLGQGIYLGGVIGVVVLMVGVYAVLWGKHVDDDGEETRHEDNVVAVKCCSGNNGLTIMPKIDEADEEDVETGKATSEKESSVPEVVVVVFCSENVHSVSRPN

SEQ ID NO: 75513 - DNA, 1053 bp, Arabidopsis thaliana
  misc_feature (1)..(1053): Ceres Seq. ID no. 6442907
  misc_feature (1)..(1053): Ortholog of  Ceres SEQ ID NO 13595616 as cited in SEQ ID NO 59854
atggcggctctaacatcttcttcttctgctattactctcctcaacaaacctttcttacctaaccgctcttccttcttctcctctgattcacaatctcctcttctccgattctctgcttctacctctgttcgttctcgttttccatccgcagccataagcgccgttgctcccaaatcggacataaataaaaatgaaactccaaagatcgaaatagaggaaactcaagtgttcgcgtgtcctgtttgctacgaaccacttatgaggaaaggaccttcaggtatcaacctacaagcaatctacaggtctggattcaagtgtggacaatgtaacaagacatattctagcaaagatgaatacttggatcttactgtcactgctgatttggatgattataatgaagtcaaacccattactaccgagctctttcggagtccattagtatcatttttgtatgaaagaggttggcgtcaagcctttaagcgaagcgggtttcccggtccagatgaagagtttagaatggctgaggaatacttcaaagaagcagaaggtgggcttcttgtggatgttagttgcggaagcggtttgttttcccgcaaatttgcgcagtctggcaaatactctggcgtgattgctttagactactctgaaaacatgcttcgtcagtgcaaagaattcattaaaaatgataatactttcgacaactcaactaatatagctgttgtgagagcagacgtttctcgcctccctttcccttcgggttctgttgacgcggttcatgctggtgcagccttgcactgttggccttctcctacaaatgctattgctgagatctgtcgtgttctaagaagcggaggtgtgtttgtcgggacaacgtttctcagatacagtccttcgactccttggattattcgtcctttccaatcgagaattctgcagagctacaattacttgatgcaggatgagatcaaggatgtgtgcacatcatgtggtctcacagattatgaagattatattcaggattcttttatcatgtttactgctcgcaagccctag

SEQ ID NO: 75514 - protein, 350 aa, Arabidopsis thaliana
  peptide (1)..(350): Ceres Seq. ID no. 6442908
MAALTSSSSAITLLNKPFLPNRSSFFSSDSQSPLLRFSASTSVRSRFPSAAISAVAPKSDINKNETPKIEIEETQVFACPVCYEPLMRKGPSGINLQAIYRSGFKCGQCNKTYSSKDEYLDLTVTADLDDYNEVKPITTELFRSPLVSFLYERGWRQAFKRSGFPGPDEEFRMAEEYFKEAEGGLLVDVSCGSGLFSRKFAQSGKYSGVIALDYSENMLRQCKEFIKNDNTFDNSTNIAVVRADVSRLPFPSGSVDAVHAGAALHCWPSPTNAIAEICRVLRSGGVFVGTTFLRYSPSTPWIIRPFQSRILQSYNYLMQDEIKDVCTSCGLTDYEDYIQDSFIMFTARKP

SEQ ID NO: 75515 - protein, 264 aa, Arabidopsis thaliana
  peptide (1)..(264): Ceres Seq. ID no. 6442909
MRKGPSGINLQAIYRSGFKCGQCNKTYSSKDEYLDLTVTADLDDYNEVKPITTELFRSPLVSFLYERGWRQAFKRSGFPGPDEEFRMAEEYFKEAEGGLLVDVSCGSGLFSRKFAQSGKYSGVIALDYSENMLRQCKEFIKNDNTFDNSTNIAVVRADVSRLPFPSGSVDAVHAGAALHCWPSPTNAIAEICRVLRSGGVFVGTTFLRYSPSTPWIIRPFQSRILQSYNYLMQDEIKDVCTSCGLTDYEDYIQDSFIMFTARKP

SEQ ID NO: 75516 - protein, 178 aa, Arabidopsis thaliana
  peptide (1)..(178): Ceres Seq. ID no. 6442910
MAEEYFKEAEGGLLVDVSCGSGLFSRKFAQSGKYSGVIALDYSENMLRQCKEFIKNDNTFDNSTNIAVVRADVSRLPFPSGSVDAVHAGAALHCWPSPTNAIAEICRVLRSGGVFVGTTFLRYSPSTPWIIRPFQSRILQSYNYLMQDEIKDVCTSCGLTDYEDYIQDSFIMFTARKP

SEQ ID NO: 75517 - DNA, 1713 bp, Arabidopsis thaliana
  misc_feature (1)..(1713): Ceres Seq. ID no. 6443080
  misc_feature (1)..(1713): Ortholog of  Ceres SEQ ID NO 13600220 as cited in SEQ ID NO 0
atgaacgttcaaattttcatcctccttttgataatctcatggcttacaccgaagattacttctcttcctcctgaatctcaagtccttgatcgaagtagttttcctgatgattttgttttcggaaccgctatatcggcctttcagagcgaaggtgcaacaagcgaaggtggaaaatcgccaactatttgggattacttcagccacacctttccagaaagaaccaatatgcagaatgcagatgtagccgtcgatttttaccatcgttataaggatgacatcaaattgatagaagagctaaatgtggacgctttcagattttcgatttcgtgggccagattaatacccagtggaaaggtaaaggatggagtaaacaaagaaggtgtacaattctacaaggctctcatagacgagcttattgctaatggcattcaaccttcggtgactctctatcattgggaccatcctcaagctcttgaggacgaagaagattttcgaaattttgcaagagtttgttttgaaaatttcggagacaaagttaagatgtggacaacaatcaacgagccttatgttataagtgttgcgggctacgacacgggcatcaaagcggttggacggtgctcgaaatgggtgaatagtcggtgtcaagccggtgactcggccatcgagccttacattgtatcacatcaccttcttctttcccatgctgcggcagtacaagagttccgaaattgtaacaagactttacaagatggtaagattgggatagtgatatctccttggtggcttgagccttacgactctacatcgtctgctgacaaagaagccgttgaacgaggccttcccttagaactagagtggcatttaaatccggtgatttacggagattatcctgaaacaatgaaaaagcatgtcggaaatagattacctgctttcacaccagaacaatcaaagatgttaataaattcatcagatttcattggagtaaactattatagcatacacttcaccgctcatctccctcatatcgatcatactcgacctcgattcagaactgatcaccattttgagaagaaatgtaaggatgatcgaggcaaaattcactcgcatccagaaggtttgcgaagagttctgaactatatcaaagataaatacaataaccctatcgtctatgtaaaagagaatggaatagatcactacgatgatggtacaaaatcgcgggaaacaattctcaaggacacatttaggataagctaccatcaggaccatcttaaacaagttcacaaagctataatagaggatgggtgtgatgttagaggatattacgtgtggtctttattcgacaacttcgagtgggagcatggatataattctagattcggtatgtactatgttgacttcaaaaacaatctccaacggtatcctaaagattccgtcaactggttcaagaaattcctcagtagaccggtggtaagaagtgaagaaacagaggatgaaaaagtatgcaatgtgtcacgcaaggaagaaaaaattaataaggctttggatgtctcagagggtttcaagacttcagttgattctattgtcaatctcatcaaaaacggatcgagaatagaagaagaagatgatgaagaagagagagatttctgtgcttttaagaatcataatgatcagttgggtttctttctgaagctacagaactcattgggattctag

SEQ ID NO: 75518 - protein, 570 aa, Arabidopsis thaliana
  peptide (1)..(570): Ceres Seq. ID no. 6443081
MNVQIFILLLIISWLTPKITSLPPESQVLDRSSFPDDFVFGTAISAFQSEGATSEGGKSPTIWDYFSHTFPERTNMQNADVAVDFYHRYKDDIKLIEELNVDAFRFSISWARLIPSGKVKDGVNKEGVQFYKALIDELIANGIQPSVTLYHWDHPQALEDEEDFRNFARVCFENFGDKVKMWTTINEPYVISVAGYDTGIKAVGRCSKWVNSRCQAGDSAIEPYIVSHHLLLSHAAAVQEFRNCNKTLQDGKIGIVISPWWLEPYDSTSSADKEAVERGLPLELEWHLNPVIYGDYPETMKKHVGNRLPAFTPEQSKMLINSSDFIGVNYYSIHFTAHLPHIDHTRPRFRTDHHFEKKCKDDRGKIHSHPEGLRRVLNYIKDKYNNPIVYVKENGIDHYDDGTKSRETILKDTFRISYHQDHLKQVHKAIIEDGCDVRGYYVWSLFDNFEWEHGYNSRFGMYYVDFKNNLQRYPKDSVNWFKKFLSRPVVRSEETEDEKVCNVSRKEEKINKALDVSEGFKTSVDSIVNLIKNGSRIEEEDDEEERDFCAFKNHNDQLGFFLKLQNSLGF

SEQ ID NO: 75519 - protein, 495 aa, Arabidopsis thaliana
  peptide (1)..(495): Ceres Seq. ID no. 6443082
MQNADVAVDFYHRYKDDIKLIEELNVDAFRFSISWARLIPSGKVKDGVNKEGVQFYKALIDELIANGIQPSVTLYHWDHPQALEDEEDFRNFARVCFENFGDKVKMWTTINEPYVISVAGYDTGIKAVGRCSKWVNSRCQAGDSAIEPYIVSHHLLLSHAAAVQEFRNCNKTLQDGKIGIVISPWWLEPYDSTSSADKEAVERGLPLELEWHLNPVIYGDYPETMKKHVGNRLPAFTPEQSKMLINSSDFIGVNYYSIHFTAHLPHIDHTRPRFRTDHHFEKKCKDDRGKIHSHPEGLRRVLNYIKDKYNNPIVYVKENGIDHYDDGTKSRETILKDTFRISYHQDHLKQVHKAIIEDGCDVRGYYVWSLFDNFEWEHGYNSRFGMYYVDFKNNLQRYPKDSVNWFKKFLSRPVVRSEETEDEKVCNVSRKEEKINKALDVSEGFKTSVDSIVNLIKNGSRIEEEDDEEERDFCAFKNHNDQLGFFLKLQNSLGF

SEQ ID NO: 75520 - protein, 390 aa, Arabidopsis thaliana
  peptide (1)..(390): Ceres Seq. ID no. 6443083
MWTTINEPYVISVAGYDTGIKAVGRCSKWVNSRCQAGDSAIEPYIVSHHLLLSHAAAVQEFRNCNKTLQDGKIGIVISPWWLEPYDSTSSADKEAVERGLPLELEWHLNPVIYGDYPETMKKHVGNRLPAFTPEQSKMLINSSDFIGVNYYSIHFTAHLPHIDHTRPRFRTDHHFEKKCKDDRGKIHSHPEGLRRVLNYIKDKYNNPIVYVKENGIDHYDDGTKSRETILKDTFRISYHQDHLKQVHKAIIEDGCDVRGYYVWSLFDNFEWEHGYNSRFGMYYVDFKNNLQRYPKDSVNWFKKFLSRPVVRSEETEDEKVCNVSRKEEKINKALDVSEGFKTSVDSIVNLIKNGSRIEEEDDEEERDFCAFKNHNDQLGFFLKLQNSLGF

SEQ ID NO: 75521 - DNA, 1464 bp, Arabidopsis thaliana
  misc_feature (1)..(1464): Ceres Seq. ID no. 6443128
  misc_feature (1)..(1464): Ortholog of  Ceres SEQ ID NO 13595870 as cited in SEQ ID NO 62101
  misc_feature (1)..(1464): Ortholog of  Ceres SEQ ID NO 13590241 as cited in SEQ ID NO 63878
  misc_feature (1)..(1464): Ortholog of  Ceres SEQ ID NO 13657939 as cited in SEQ ID NO 66349
  misc_feature (1)..(1464): Ortholog of  Ceres SEQ ID NO 13660597 as cited in SEQ ID NO 67655
atgagtttcctcagaggtataattgattcgtttagctctattctcaacgaagaatctaagaaagatcctagtgtttcatcatcatcaacttcttctgagtccatgaatggtatcgatggagttccggttactaacgaacgaattgcgtataagcttaaaggatacttcgatttagcgaaagaggaaatcgctaaaggggttagagcagaagagtggggtttacatgatgatgctcttcttcattatagaaatgctcaaaggatcatgaatgaagctacttctactccttctccttcgtatattagttccagtgaaaaggagaaggtgagatcgtaccgagagaagatttcaaattggcaaaatcaagtatctgagagattgcaagctttgggtgttggaatgtctgagaataagaggacggtggcatatccttcttcagcttcagtttcctctacagcgtcaaggtataggaaaactttatcgcaaaagactccggttgccagaggtggcgttgcaacgccaaggaaccctaaagatgctgctgcaagcccaaaacctgtgaaagaatctggaaatgtctatgatgataagttggttgagatgataaatacaacaatagtggatagaagcccatctgtgaaatgggatgatgtcgctggacttaatggagctaaacaagctttgttggagatggtaattttaccggcaaaacgaagagatttgttcactggtctccgaagaccagcgagaggtctgcttctctttgggccacctggcaatgggaaaacaatgcttgccaaggcagtcgcttctgagtcacaggcaacatttttcaatgtctcagcatcttctttgacatcaaaatgggtgggtgaggctgaaaagctagttaaaacgctgtttcaagttgcaatatccagacaaccgtctgttatatttatggatgaaatagatagtataatgtcaacaaggtcaaccagtgagaatgaagcaagcagaaggctgaaatcagaatttcttatccagtttgatggtgtgacttctaatcctgatgatttggtgattatcattggagctactaacaagccacaggagttggatgatgcagtgcttaggagattggtgaagagaatatatgtaccattgccggattccaacgtcagaaaactactttttaaaactaaattaaagtgccagcctcactcgttatccgatggcgacattgataaaatcgtcaaagaaaccgaaggatactcaggaagcgatctccaagcattgtgtgaagaagctgcaatgatgccaatcagagaactcggtgcaaatattctaacgatccaagcaaataaagtaagatctctacgatatgatgattttcggaaatcaatggcagtgatcagaccaagcttgagtaaaagcaaatgggaagagcttgaacgttggaactcagagtttggctctaattga

SEQ ID NO: 75522 - protein, 487 aa, Arabidopsis thaliana
  peptide (1)..(487): Ceres Seq. ID no. 6443129
MSFLRGIIDSFSSILNEESKKDPSVSSSSTSSESMNGIDGVPVTNERIAYKLKGYFDLAKEEIAKGVRAEEWGLHDDALLHYRNAQRIMNEATSTPSPSYISSSEKEKVRSYREKISNWQNQVSERLQALGVGMSENKRTVAYPSSASVSSTASRYRKTLSQKTPVARGGVATPRNPKDAAASPKPVKESGNVYDDKLVEMINTTIVDRSPSVKWDDVAGLNGAKQALLEMVILPAKRRDLFTGLRRPARGLLLFGPPGNGKTMLAKAVASESQATFFNVSASSLTSKWVGEAEKLVKTLFQVAISRQPSVIFMDEIDSIMSTRSTSENEASRRLKSEFLIQFDGVTSNPDDLVIIIGATNKPQELDDAVLRRLVKRIYVPLPDSNVRKLLFKTKLKCQPHSLSDGDIDKIVKETEGYSGSDLQALCEEAAMMPIRELGANILTIQANKVRSLRYDDFRKSMAVIRPSLSKSKWEELERWNSEFGSN

SEQ ID NO: 75523 - protein, 453 aa, Arabidopsis thaliana
  peptide (1)..(453): Ceres Seq. ID no. 6443130
MNGIDGVPVTNERIAYKLKGYFDLAKEEIAKGVRAEEWGLHDDALLHYRNAQRIMNEATSTPSPSYISSSEKEKVRSYREKISNWQNQVSERLQALGVGMSENKRTVAYPSSASVSSTASRYRKTLSQKTPVARGGVATPRNPKDAAASPKPVKESGNVYDDKLVEMINTTIVDRSPSVKWDDVAGLNGAKQALLEMVILPAKRRDLFTGLRRPARGLLLFGPPGNGKTMLAKAVASESQATFFNVSASSLTSKWVGEAEKLVKTLFQVAISRQPSVIFMDEIDSIMSTRSTSENEASRRLKSEFLIQFDGVTSNPDDLVIIIGATNKPQELDDAVLRRLVKRIYVPLPDSNVRKLLFKTKLKCQPHSLSDGDIDKIVKETEGYSGSDLQALCEEAAMMPIRELGANILTIQANKVRSLRYDDFRKSMAVIRPSLSKSKWEELERWNSEFGSN

SEQ ID NO: 75524 - protein, 399 aa, Arabidopsis thaliana
  peptide (1)..(399): Ceres Seq. ID no. 6443131
MNEATSTPSPSYISSSEKEKVRSYREKISNWQNQVSERLQALGVGMSENKRTVAYPSSASVSSTASRYRKTLSQKTPVARGGVATPRNPKDAAASPKPVKESGNVYDDKLVEMINTTIVDRSPSVKWDDVAGLNGAKQALLEMVILPAKRRDLFTGLRRPARGLLLFGPPGNGKTMLAKAVASESQATFFNVSASSLTSKWVGEAEKLVKTLFQVAISRQPSVIFMDEIDSIMSTRSTSENEASRRLKSEFLIQFDGVTSNPDDLVIIIGATNKPQELDDAVLRRLVKRIYVPLPDSNVRKLLFKTKLKCQPHSLSDGDIDKIVKETEGYSGSDLQALCEEAAMMPIRELGANILTIQANKVRSLRYDDFRKSMAVIRPSLSKSKWEELERWNSEFGSN

SEQ ID NO: 75525 - DNA, 459 bp, Arabidopsis thaliana
  misc_feature (1)..(459): Ceres Seq. ID no. 6443224
  misc_feature (1)..(459): Ortholog of  Ceres SEQ ID NO 13582184 as cited in SEQ ID NO 56002
  misc_feature (1)..(459): Ortholog of  Ceres SEQ ID NO 15227042 as cited in SEQ ID NO 0
atgtctatctcaaaaagcaagttcaatgccgtgattttgaagcgtttgttcatgagcaaagtgaacaaagcgccactgtctctctctcgtctggtccgatacatggacggaaaggatggaaagattgctgttattgttggtactgtgactgatgatgttagaatcgaagatgttccggctcttacagttactgcattgaggttcactgagagcgctagagctaggatccacaaggctggtggagagtgcctcacttttgatcagctcgctcttccgtgccccacttggtcagagaacacggttctgcttagaggtcctaagaacacacgtgaagcagtgaagcactttggaccagctcctggtgtgcctcacagccacaccaaaccgtatgtacgtcaaactggtaaaaaaattgagatagcaagaggaagaagaaggagcagaggtttcaaggtctaa

SEQ ID NO: 75526 - protein, 152 aa, Arabidopsis thaliana
  peptide (1)..(152): Ceres Seq. ID no. 6443225
MSISKSKFNAVILKRLFMSKVNKAPLSLSRLVRYMDGKDGKIAVIVGTVTDDVRIEDVPALTVTALRFTESARARIHKAGGECLTFDQLALPCPTWSENTVLLRGPKNTREAVKHFGPAPGVPHSHTKPYVRQTGKKIEIARGRRRSRGFKV

SEQ ID NO: 75527 - protein, 135 aa, Arabidopsis thaliana
  peptide (1)..(135): Ceres Seq. ID no. 6443226
MSKVNKAPLSLSRLVRYMDGKDGKIAVIVGTVTDDVRIEDVPALTVTALRFTESARARIHKAGGECLTFDQLALPCPTWSENTVLLRGPKNTREAVKHFGPAPGVPHSHTKPYVRQTGKKIEIARGRRRSRGFKV

SEQ ID NO: 75528 - protein, 118 aa, Arabidopsis thaliana
  peptide (1)..(118): Ceres Seq. ID no. 6443227
MDGKDGKIAVIVGTVTDDVRIEDVPALTVTALRFTESARARIHKAGGECLTFDQLALPCPTWSENTVLLRGPKNTREAVKHFGPAPGVPHSHTKPYVRQTGKKIEIARGRRRSRGFKV

SEQ ID NO: 75529 - DNA, 1566 bp, Arabidopsis thaliana
  misc_feature (1)..(1566): Ceres Seq. ID no. 6443376
  misc_feature (1)..(1566): Ortholog of  Ceres SEQ ID NO 15175923 as cited in SEQ ID NO 54037
  misc_feature (1)..(1566): Ortholog of  Ceres SEQ ID NO 13503610 as cited in SEQ ID NO 62416
  misc_feature (1)..(1566): Ortholog of  Ceres SEQ ID NO 13657610 as cited in SEQ ID NO 66165
  misc_feature (1)..(1566): Ortholog of  Ceres SEQ ID NO 13598312 as cited in SEQ ID NO 68448
  misc_feature (1)..(1566): Ortholog of  Ceres SEQ ID NO 13596100 as cited in SEQ ID NO 68573
atggaagctgctaatgagcctgttaatggcggatccgtacagatccgaacagagaacaacgaaagacgaaagcttcctaatttcttacaaagcgtcaacatgaaatacgtcaagctaggttatcattacctcattactcatctcttcaagctctgtttggttccattaatggcggttttagtcacagagatctctcgattaacaacagacgatctttaccagatttggcttcatctccaatacaatctcgttgctttcatctttctctctgctttagctatctttggctccaccgtttacatcatgagtcgtcccagatctgtttatctcgttgattactcttgttatcttcctccggagagtcttcaggttaagtatcagaagtttatggatcattctaagttgattgaagatttcaatgagtcatctttagagtttcagaggaagattcttgaacgttctggtttaggagaagagacttatctccctgaagctttacattgtatccctccgaggcctacgatgatggcggctcgtgaggaatctgagcaggtaatgtttggtgctcttgataagcttttcgagaataccaagattaaccctagggatattggtgtgttggttgtgaattgtagcttgtttaatcctacaccttcgttgtcagctatgattgttaacaagtataagcttagagggaatgttaagagttttaaccttggtggaatggggtgtagtgctggtgttatctctatcgatttagctaaagatatgttgcaagttcataggaatacttatgctgttgtggttagtactgagaacattactcagaattggtattttgggaataagaaggctatgttgattccgaattgtttgtttcgtgttggtggttcggcgattttgttgtcgaacaaggggaaagatcgtagacggtctaagtataagcttgttcataccgttaggactcataaaggagctgttgagaaggctttcaactgtgtttaccaagagcaagatgataatgggaagaccggggtttcgttgtcgaaagatcttatggctatagctggggaagctcttaaggcgaatatcactactttaggtcctttggttcttcctataagtgagcagattctgtttttcatgactttggttacgaagaaactgtttaactcgaagctgaagccgtatattccggatttcaagcttgcgtttgatcatttctgtatccatgctggtggtagagctgtgattgatgagcttgagaagaatctgcagctttcgcagactcatgtcgaggcatccagaatgacactgcacagatttggaaacacttcttcgagctcgatttggtatgaactggcttacatagaggctaaaggtaggatgaagaaaggaaaccgggtttggcagattgcttttggaagtgggtttaagtgtaacagtgcagtttgggtggctctaaacaatgtcaagccttcggttagtatccgtgggaacactgcatcgaccgatatccggttaagctcgacttctgatttaatgaaaaaccatttgtttggttag

SEQ ID NO: 75530 - protein, 521 aa, Arabidopsis thaliana
  peptide (1)..(521): Ceres Seq. ID no. 6443377
MEAANEPVNGGSVQIRTENNERRKLPNFLQSVNMKYVKLGYHYLITHLFKLCLVPLMAVLVTEISRLTTDDLYQIWLHLQYNLVAFIFLSALAIFGSTVYIMSRPRSVYLVDYSCYLPPESLQVKYQKFMDHSKLIEDFNESSLEFQRKILERSGLGEETYLPEALHCIPPRPTMMAAREESEQVMFGALDKLFENTKINPRDIGVLVVNCSLFNPTPSLSAMIVNKYKLRGNVKSFNLGGMGCSAGVISIDLAKDMLQVHRNTYAVVVSTENITQNWYFGNKKAMLIPNCLFRVGGSAILLSNKGKDRRRSKYKLVHTVRTHKGAVEKAFNCVYQEQDDNGKTGVSLSKDLMAIAGEALKANITTLGPLVLPISEQILFFMTLVTKKLFNSKLKPYIPDFKLAFDHFCIHAGGRAVIDELEKNLQLSQTHVEASRMTLHRFGNTSSSSIWYELAYIEAKGRMKKGNRVWQIAFGSGFKCNSAVWVALNNVKPSVSIRGNTASTDIRLSSTSDLMKNHLFG

SEQ ID NO: 75531 - protein, 488 aa, Arabidopsis thaliana
  peptide (1)..(488): Ceres Seq. ID no. 6443378
MKYVKLGYHYLITHLFKLCLVPLMAVLVTEISRLTTDDLYQIWLHLQYNLVAFIFLSALAIFGSTVYIMSRPRSVYLVDYSCYLPPESLQVKYQKFMDHSKLIEDFNESSLEFQRKILERSGLGEETYLPEALHCIPPRPTMMAAREESEQVMFGALDKLFENTKINPRDIGVLVVNCSLFNPTPSLSAMIVNKYKLRGNVKSFNLGGMGCSAGVISIDLAKDMLQVHRNTYAVVVSTENITQNWYFGNKKAMLIPNCLFRVGGSAILLSNKGKDRRRSKYKLVHTVRTHKGAVEKAFNCVYQEQDDNGKTGVSLSKDLMAIAGEALKANITTLGPLVLPISEQILFFMTLVTKKLFNSKLKPYIPDFKLAFDHFCIHAGGRAVIDELEKNLQLSQTHVEASRMTLHRFGNTSSSSIWYELAYIEAKGRMKKGNRVWQIAFGSGFKCNSAVWVALNNVKPSVSIRGNTASTDIRLSSTSDLMKNHLFG

SEQ ID NO: 75532 - protein, 465 aa, Arabidopsis thaliana
  peptide (1)..(465): Ceres Seq. ID no. 6443379
MAVLVTEISRLTTDDLYQIWLHLQYNLVAFIFLSALAIFGSTVYIMSRPRSVYLVDYSCYLPPESLQVKYQKFMDHSKLIEDFNESSLEFQRKILERSGLGEETYLPEALHCIPPRPTMMAAREESEQVMFGALDKLFENTKINPRDIGVLVVNCSLFNPTPSLSAMIVNKYKLRGNVKSFNLGGMGCSAGVISIDLAKDMLQVHRNTYAVVVSTENITQNWYFGNKKAMLIPNCLFRVGGSAILLSNKGKDRRRSKYKLVHTVRTHKGAVEKAFNCVYQEQDDNGKTGVSLSKDLMAIAGEALKANITTLGPLVLPISEQILFFMTLVTKKLFNSKLKPYIPDFKLAFDHFCIHAGGRAVIDELEKNLQLSQTHVEASRMTLHRFGNTSSSSIWYELAYIEAKGRMKKGNRVWQIAFGSGFKCNSAVWVALNNVKPSVSIRGNTASTDIRLSSTSDLMKNHLFG

SEQ ID NO: 75533 - DNA, 1206 bp, Arabidopsis thaliana
  misc_feature (1)..(1206): Ceres Seq. ID no. 6443782
  misc_feature (1)..(1206): Ortholog of  Ceres SEQ ID NO 15175767 as cited in SEQ ID NO 56994
atgacgacgacgacgacgattcagtctcctctctctacacgttgaatttcaatcggcttcacgaaccttcaacctcgtgcggatcgaaattcgatcagtttgtagtaaccgacaagttccgaagatttttcatctgctggatttcgtcgatcagattgaaaccgagcttttcaatcaggtgacttggatatttctctacgttatgctcgatctgaagaattgggattcaaatctagtctcatagatcgattctgattaaactcgtggagatccaatctctatcactagttcgattggattgttgtttgttatcttcaaggcctctctgtgtttgtgagtgagatggtatatttgcatagctcaatctcggtctgcaattccgtcgacccaatgatcatgtctcactcctcacctaaatccagaaacacccgtaataaatcttcatcatcaccaacctgttccaaattccctgtctgcgacggatctcagtccgctgctatcgacgtcgtgatccttatcgcggtcatcaccgcctgcggcttcctcttcttcccttacgtcaaactcatcaccctcaaatcgattgaggtcttttcagatctctctcttttagtcaaacaagagattttgcagaacccgattgtgtatggatcattagctttgagtatcttctgtgctgccatctctacttggcttgttatactcttgtgtactatgcagagatgcggcaaaccgaattgtaaaggccttaggaaagctgttgagtttgatattcagcttgagactgaggaatgcgtcaagagctccagcaacaagaggggaatgtttgagttgcctcgtgttcatcaccgtgaattggaagctgagctgaagaagatggctccgcctaatgggcgagccgtgcttgttttcagagcgaggtgtggttgttctgtaaggagattagtcgtttccgggccaaagaagcagcagaggaagatcaagaaatgaataagcgaacaaagttattatatatataaaaaaaggttcaatctttggaaatgagattggatcactacacttttcttcggttagttttattctctcatacacactcttttacaaaaacttatatatgttatagtccatgtgtttaaataatgtacaattggaataagcattgtaaggatattgtgggaaccaggttatagtgaagaacattttggt

SEQ ID NO: 75534 - protein, 215 aa, Arabidopsis thaliana; identical to SEQ ID NO: 39239
  peptide (1)..(215): Ceres Seq. ID no. 6443783

SEQ ID NO: 75535 - protein, 199 aa, Arabidopsis thaliana; identical to SEQ ID NO: 39240
  peptide (1)..(199): Ceres Seq. ID no. 6443784

SEQ ID NO: 75536 - protein, 197 aa, Arabidopsis thaliana; identical to SEQ ID NO: 39241
  peptide (1)..(197): Ceres Seq. ID no. 6443785

SEQ ID NO: 75537 - DNA, 638 bp, Arabidopsis thaliana
  misc_feature (1)..(638): Ceres Seq. ID no. 6443793
  misc_feature (1)..(638): Ortholog of  Ceres SEQ ID NO 13598936 as cited in SEQ ID NO 0
attattgttgactgttagagtttttttcgctccgcctctctgaaactcgccgctagtaagcttcttcttcacttgtgctcttcttcgacgagatgaaccgtattggattgataaggggatcatcatccaaggatgtagtccggagaacgtttgcagcagcagctagtaaagccaagaaaggtggcaaaggaggtggagccagcgatgctcctaaaggttccagcttgaccaaagagatcaaatccaccactgttgttggtgccaatactctcaaagacggatctgatcccaagatcttgcctgattctgattaccctgattggctctggcatctcctcgataagcgaccagctctcagtgagcttaggaggaagaacgtcgagactcttccctacgatgatctcaaacgttttgtcaagctcgacacacggggtaaaatcaaggagaacaactccatcaaggccaaaaactgagagatgtaagatgttttcaactctctcactgttgctgttttctttgtatgtgggaactatgcttgctaataagtagattcttccagttagattacatttccaaggcgttattatgctcttgtatgttctcagacactcttagtatatccaagaaattgctgcttc

SEQ ID NO: 75538 - protein, 126 aa, Arabidopsis thaliana; identical to SEQ ID NO: 35339
  peptide (1)..(126): Ceres Seq. ID no. 6443794

SEQ ID NO: 75539 - DNA, 1251 bp, Arabidopsis thaliana
  misc_feature (1)..(1251): Ceres Seq. ID no. 6443811
  misc_feature (1)..(1251): Ortholog of  Ceres SEQ ID NO 14312281 as cited in SEQ ID NO 59172
  misc_feature (1)..(1251): Ortholog of  Ceres SEQ ID NO 14302299 as cited in SEQ ID NO 68665
aaaatctcagaaataactttcacaacagagtcaaagagttccaaatcgtttgtttgtattttgtacgatcaaagttgttggtacttgtaagataatcgaaaccaaagatgcggatgagctgtaatggatgcagagttcttcggaaagggtgtagtgaggattgtagtataaggccgtgtttggcttggatcaaatcgcctgaagcgcaagctaacgcaactgtctttctcgccaagttctatggccgtgctggactcatgaacctcatcaacgccggtcccaatcaccttcgtcctggttagtggtttttcttttaaccttttgatggcagttttgaattatactttccaacgatgccgtttcgtcttaggtcattttttgaacctaattagatcaaatatttttgcagggattttccgatcgttgttgcacgaagcttgtgggaggattgtgaatccgatctatggttcggtgggtttgttgtggtcggggaattggcagctttgtcaagacgccgtggaggctgtgatgaaaggagaaccggtcaaagagatcgccacagacgctgcgacgatcggccaaggtccgcctcttaagatctacgacatccgacatatctccaaggatgataactctgccgccgcggctactggctcaaccgatttgaaacttgcgaaaactcgccgtgctaagcgggtctccaccgtcgcgatacaggcggaatcggagggaaagtctgacgaggctagtcacgattcgtcgttgagtcatcagtctgaaatagtggctgctcatgaaggagagagcaaggaatccgagagcaatgtctctgaggttttggcattctcgcctccggctgtgaagggctccggcgagataaagcttgacctaactttaaggctcgaaccggtgtcacgtgcgtatcatgtggtacctgttaagaagagaaggatcggcgtgtttggcacgtgtcagaaggagagcacgtgtaagactgagcttatgctctaagctccgttttagctatactcagaagttttgcccccatcagctctattcggctcggctctgatgatcttcaagtcgagccggtaacttttttttaatatatagttctctatttccccctttaatgttcactttccatttgtgacaaaagaatagagtatatgtacaaaattatttacagagattaattcaagaattggctgagatattatctattttttaacgaataaaagcaaaaaattt

SEQ ID NO: 75540 - protein, 228 aa, Arabidopsis thaliana
  peptide (1)..(228): Ceres Seq. ID no. 6443812
MAVLNYTFQRCRFVLGHFLNLIRSNIFAGIFRSLLHEACGRIVNPIYGSVGLLWSGNWQLCQDAVEAVMKGEPVKEIATDAATIGQGPPLKIYDIRHISKDDNSAAAATGSTDLKLAKTRRAKRVSTVAIQAESEGKSDEASHDSSLSHQSEIVAAHEGESKESESNVSEVLAFSPPAVKGSGEIKLDLTLRLEPVSRAYHVVPVKKRRIGVFGTCQKESTCKTELML

SEQ ID NO: 75541 - protein, 160 aa, Arabidopsis thaliana
  peptide (1)..(160): Ceres Seq. ID no. 6443813
MKGEPVKEIATDAATIGQGPPLKIYDIRHISKDDNSAAAATGSTDLKLAKTRRAKRVSTVAIQAESEGKSDEASHDSSLSHQSEIVAAHEGESKESESNVSEVLAFSPPAVKGSGEIKLDLTLRLEPVSRAYHVVPVKKRRIGVFGTCQKESTCKTELML

SEQ ID NO: 75542 - DNA, 768 bp, Arabidopsis thaliana
  misc_feature (1)..(768): Ceres Seq. ID no. 6443821
  misc_feature (1)..(768): Ortholog of  Ceres SEQ ID NO 13595067 as cited in SEQ ID NO 55857
  misc_feature (1)..(768): Ortholog of  Ceres SEQ ID NO 12635516 as cited in SEQ ID NO 0
  misc_feature (1)..(768): Ortholog of  Ceres SEQ ID NO 15179376 as cited in SEQ ID NO 0
agagatcatcgagagggcaagagagaaaaatgggaaaggcacgtacggtgggagtgggaatggactattctccgacgagcaaattagctctccggtgggcggcggagaatctccttgaagacggcgacaccgtcatcttgattcacgtccaaccacaaaacgccgatcatacccgcaaaatcctcttcgaggaaaccggttcacgtatttaacttactacatctctttaatatatattagtagagttaactccatattatgatcaaaatttgtattttgatcatttaaaagttacaaactaattattgcagcgctaattcctttggaggaatttagagaggttaatttgtctaaacagtatggacttgcttacgatcctgaggttcttgatgttcttgatactctctctagggctaaaaaggtgaaggttgtagcaaaggtgtattggggagatccaagggagaaactttgtgatgctgtcgaaaatctaaaactcgattccattgttcttggcagtcgaggtttgggttctctcaaaaggatcttgctgggtagtgtgagcaatcatgtggtgacaaatgcaacatgtcctgtcacagttgttaaggctaattaaagtgtctcttgttctttaattggacccagttaataacattagtagttacgtgtgtcactcatgcattgttttgacatttatacgtttgttgccttctacaaatttgtgtgaaactgattggtactgtttcattaataaatttcagttaaatg

SEQ ID NO: 75543 - protein, 69 aa, Arabidopsis thaliana
  peptide (1)..(69): Ceres Seq. ID no. 6443822
RSSRGQERKMGKARTVGVGMDYSPTSKLALRWAAENLLEDGDTVILIHVQPQNADHTRKILFEETGSRI

SEQ ID NO: 75544 - protein, 60 aa, Arabidopsis thaliana
  peptide (1)..(60): Ceres Seq. ID no. 6443823
MGKARTVGVGMDYSPTSKLALRWAAENLLEDGDTVILIHVQPQNADHTRKILFEETGSRI

SEQ ID NO: 75545 - protein, 50 aa, Arabidopsis thaliana
  peptide (1)..(50): Ceres Seq. ID no. 6443824
MDYSPTSKLALRWAAENLLEDGDTVILIHVQPQNADHTRKILFEETGSRI

SEQ ID NO: 75546 - DNA, 672 bp, Arabidopsis thaliana
  misc_feature (1)..(672): Ceres Seq. ID no. 6443829
  misc_feature (1)..(672): Ortholog of  Ceres SEQ ID NO 13595067 as cited in SEQ ID NO 55857
  misc_feature (1)..(672): Ortholog of  Ceres SEQ ID NO 12635516 as cited in SEQ ID NO 0
  misc_feature (1)..(672): Ortholog of  Ceres SEQ ID NO 15179376 as cited in SEQ ID NO 0
aatttctacttagagatcatcgagagggcaagagagaaaaatgggaaaggcacgtacggtgggagtgggaatggactattctccgacgagcaaattagctctccggtgggcggcggagaatctccttgaagacggcgacaccgtcatcttgattcacgtccaaccacaaaacgccgatcatacccgcaaaatcctcttcgaggaaaccggttcaccgctaattcctttggaggaatttagagaggttaatttgtctaaacagtatggacttgcttacgatcctgaggttcttgatgttcttgatactctctctagggctaaaaaggtgaaggttgtagcaaaggtgtattggggagatccaagggagaaactttgtgatgctgtcgaaaatctaaaactcgattccattgttcttggcagtcgaggtttgggttctctcaaaaggatcttgctgggtagtgtgagcaatcatgtggtgacaaatgcaacatgtcctgtcacagttgttaaggctaattaaagtgtctcttgttctttaattggacccagttaataacattagtagttacgtgtgtcactcatgcattgttttgacatttatacgtttgttgccttctacaaatttgtgtgaaactgattggtactgtttcattaataaatttcagttaaatg

SEQ ID NO: 75547 - protein, 159 aa, Arabidopsis thaliana; identical to SEQ ID NO: 27886
  peptide (1)..(159): Ceres Seq. ID no. 6443830

SEQ ID NO: 75548 - protein, 149 aa, Arabidopsis thaliana; identical to SEQ ID NO: 27887
  peptide (1)..(149): Ceres Seq. ID no. 6443831

SEQ ID NO: 75549 - DNA, 1117 bp, Arabidopsis thaliana
  misc_feature (1)..(1117): Ceres Seq. ID no. 6443840
  misc_feature (1)..(1117): Ortholog of  Ceres SEQ ID NO 13660872 as cited in SEQ ID NO 60830
aaaaatttcaatctttggctcacttctttgtttatctcatagctcttcaccaaaaccaatattttctcctttgttgttctttcttttctatcaaaactttctacttaaaatatcattcctttaaacaatgataagcaaggatccaagatcgagtttacctccagggtttcgatttcatccaacagatgaagaactcattctccattacctaaggaagaaagtttcctcttccccagtcccgctttcgattatcgccgatgtcgatatctacaaatccgatccatgggatttaccagctaaggctccatttggggagaaagagtggtattttttcagtccgagggataggaaatatccaaacggagcaagaccaaacagagcagctgcgtctggatattggaaagcaaccggaacagataaattgattgcggtaccaaatggtgaagggtttcatgaaaacattgctggatgattgggttctttgccggatttacaagaaatcacacgcttcattgtcatcacctgatgttgctttggtcacaagcaatcaagagcatgaggaaaatgacaacgaaccattcgtagaccgcggaacctttttgccaaatttgcaaaatgatcaaccccttaaacgccagaagtcttcttgttcgttctcaaacttactagacgctacagatttgacgtttctcgcaaattttctaaacgaaaccccggaaaatcgttctgaatcagatttttctttcatgattggcaatttctctaatcctgacatttacggaaaccattacttggatcagaagttaccgcagttgagctctcccacttcagagacaagcggcatcggaagcaaaagagagagagtggattttgcggaagaaacgataaacgcttcgaagaagatgatgaacacatatagttacaataatagtatagatcaaatggatcatagtatgatgcaacaacctagtttcctgaaccaggaactcatgatgagttctcaccttcaatatcaaggctagagagaatattaatttgaaaacctaatcacgaattagggatcattcggtatgtgattgaaaagtaggagtcgttgttagtaatttaccaaactatt

SEQ ID NO: 75550 - protein, 194 aa, Arabidopsis thaliana; identical to SEQ ID NO: 36022
  peptide (1)..(194): Ceres Seq. ID no. 6443841

SEQ ID NO: 75551 - protein, 189 aa, Arabidopsis thaliana; identical to SEQ ID NO: 36023
  peptide (1)..(189): Ceres Seq. ID no. 6443842

SEQ ID NO: 75552 - protein, 114 aa, Arabidopsis thaliana
  peptide (1)..(114): Ceres Seq. ID no. 6443843
MISKDPRSSLPPGFRFHPTDEELILHYLRKKVSSSPVPLSIIADVDIYKSDPWDLPAKAPFGEKEWYFFSPRDRKYPNGARPNRAAASGYWKATGTDKLIAVPNGEGFHENIAG

SEQ ID NO: 75553 - DNA, 685 bp, Arabidopsis thaliana
  misc_feature (1)..(685): Ceres Seq. ID no. 6443844
  misc_feature (1)..(685): Ortholog of  Ceres SEQ ID NO 12557737 as cited in SEQ ID NO 81
aattttatgggccttcaaattcagccgatcatcatgttgaccaataaaagcttaacggattagagttttttgctcttctcatgtaatcaaatccctgcagaaaaagcacaaaaatcataaaaccctagcaatggcgacccaaccggcgaaagagtctgttcaatgtttcggaaggaagaagacggcaacagcagtcacctactgcaaacggggctcgggcatgattaagctcaacggttcgccgatcgagctttatcagccagagatcctccgattcaagatcttcgagccagtccttctcctcgggaaacaccgtttcgccggagttgacatgaggatccgtgccacgggcggtggtaacacatctcgggtctacgcaatccgtcagagtatcgctaaggccctcgttgcttactaccagaagtacgttgatgagcagtcgaagaaggagatcaaggacatcttgatgaggtacgataggactcttcttgttgcggatccgagaaggtgcgagtcgaagaagtttggtggtcctggtgctcgtgctcgtttccagaagagttaccgttagattctggtttgattttttgtttctgtatcaacgttttgggattatgatgttgaaattgtgagacttggtttctcttttgcgttttattttcaatggttattggataatgtttct

SEQ ID NO: 75554 - protein, 146 aa, Arabidopsis thaliana; identical to SEQ ID NO: 30715
  peptide (1)..(146): Ceres Seq. ID no. 6443845

SEQ ID NO: 75555 - protein, 116 aa, Arabidopsis thaliana; identical to SEQ ID NO: 30716
  peptide (1)..(116): Ceres Seq. ID no. 6443846

SEQ ID NO: 75556 - protein, 79 aa, Arabidopsis thaliana; identical to SEQ ID NO: 30717
  peptide (1)..(79): Ceres Seq. ID no. 6443847

SEQ ID NO: 75557 - DNA, 1303 bp, Arabidopsis thaliana
  misc_feature (1)..(1303): Ceres Seq. ID no. 6443848
  misc_feature (1)..(1303): Ortholog of  Ceres SEQ ID NO 13584646 as cited in SEQ ID NO 60715
attctttgtcgtgttcttttaattaaccttttgcaatttgtcttgtgtttctcacaacacaaaaacttgtaaaagtgttaaaaaatcaagatctgaaaaatcttatcaccgcttctaggtttttcagttttttttcttccttttcctgatctaaattaacttatatttcttagggtttcacttcttgaaacatttaatcagaattaattaacctctctagggctttcatggcgaatccatggtggacaggacaagtgaacctatccggcctcgaaacgacgccgcctggttcctctcagttaaagaaaccagatctccacatctccatgaacatggccatggactcaggtcacaataatcatcaccatcaccaagaagtcgataacaacaacaacgacgacgatagagacaacttgagtggagacgaccacgagccacgtgaaggagccgtagaagcccccacgcgccgtccacgtggacgtcctgctggttccaagaacaaaccaaagccaccgatcttcgtcactcgcgattctccaaatgctctcaagagccatgtcatggagatcgctagtgggactgacgtcatcgaaaccctagctacttttgctaggcggcgtcaacgtggcatctgcatcttgagcggaaatggcacagtggctaacgtcaccctccgtcaaccctcgaccgctgccgttgcggcggctcctggtggtgcggctgttttggctttacaagggaggtttgagattctttctttaaccggttctttcttgccaggaccggctccacctggttccaccggtttaacgatttacttagccggtggtcaaggtcaggttgttggaggaagcgtggtgggcccattgatggcagcaggtccggtgatgctgatcgccgccacgttctctaacgcgacttacgagagattgccattggaggaggaagaggcagcagagagaggcggtggtggaggcagcggaggagtggttccggggcagctcggaggcggaggttcgccactaagcagcggtgctggtggaggcgacggtaaccaaggacttccggtgtataatatgccgggaaatcttgtttctaatggtggcagtggtggaggaggacagatgagcggccaagaagcttatggttgggctcaagctaggtcaggattttaacgtgcgttaaaatggtttttaatttacagaagttaacaataagattataatgatgtttattatgatgatgaaaaccagtcagttgctacttgttactagtgagctatatagtttgtggacattatatt

SEQ ID NO: 75558 - protein, 315 aa, Arabidopsis thaliana; identical to SEQ ID NO: 29907
  peptide (1)..(315): Ceres Seq. ID no. 6443849

SEQ ID NO: 75559 - protein, 282 aa, Arabidopsis thaliana; identical to SEQ ID NO: 29908
  peptide (1)..(282): Ceres Seq. ID no. 6443850

SEQ ID NO: 75560 - protein, 280 aa, Arabidopsis thaliana; identical to SEQ ID NO: 29909
  peptide (1)..(280): Ceres Seq. ID no. 6443851

SEQ ID NO: 75561 - DNA, 1279 bp, Arabidopsis thaliana
  misc_feature (1)..(1279): Ceres Seq. ID no. 6443868
  misc_feature (1)..(1279): Ortholog of  Ceres SEQ ID NO 14304879 as cited in SEQ ID NO 53767
  misc_feature (1)..(1279): Ortholog of  Ceres SEQ ID NO 12616439 as cited in SEQ ID NO 63634
atcaccattgctttgttttgttcgtcaaatataatcaattttaaatttcttctcttctcttcaaacgaatcgcctttttcgataatctctttgcatcgatttcatcatggctactcaaacggatctcgctcagcccaagcttgatatgaccaaggaggagaaagagaggttgaagtatttgcaattcgtgcaagctgctgctgtggaagctctgcttcgctttgctcttatttacgctaaggcaaaggacaagtctggtcctttgaaacctggtgttgaatctgttgaaggagctgtcaagactgtcgttggtcctgtctacgagaaataccacgacgtccctgttgaggtccttaaatacatggaccagaaggtacaattttgactctttccctatctttggatcttgctgaaagtgcctttgttgatgaacaatgaatgaatctgtgttgttgattgtatatctacttcatcgaacatatgtgattaaaaaagtacagttaaagttgtgatgatttcatatcatctctttggtagaaggttcaggtaaacgggtcaatgtcattatgttctgtagagtccctctttttgaagctgacaagtttgttttgcgttgttgcaggttgatatgtctgtgactgagcttgaccgtcgtgtcccaccagtcgtcaagcaagtgtctgcccaagccatctccgctgctcagatagcacccattgtggcacgtgcgttggcctctgaggttcgacgtgctggtgttgttgaaaccgcttctggaatggctaaatccgtctactccaagtacgagcctgctgctaaggagttgtatgcaaactatgagccaaaagcagagcagtgtgccgtttcagcttggaagaagcttaaccagcttcctctattcccaaggctggctcaagttgctgtaccaacagctgctttctgctctgagaagtacaatgatactgtggttaaggctgcagagaaagggtacagagtcacatcgtacatgccattggttccaacagagaggatctcaaaaatcttcgctgaggagaaagctgagaccgagcctttggagttccatccacttgattgatatgggtgttttgttagtgtgattttttgttttgttgggattaaggtgaaccggatcttggttagcgattgatctctggttctcgttcttttttttctttgtcatgaacttttgttgtttcgtttaataatcaaaagttgtataatctaagtttgggattaccaccctattgagtattgagtg

SEQ ID NO: 75562 - protein, 155 aa, Arabidopsis thaliana
  peptide (1)..(155): Ceres Seq. ID no. 6443869
MSVTELDRRVPPVVKQVSAQAISAAQIAPIVARALASEVRRAGVVETASGMAKSVYSKYEPAAKELYANYEPKAEQCAVSAWKKLNQLPLFPRLAQVAVPTAAFCSEKYNDTVVKAAEKGYRVTSYMPLVPTERISKIFAEEKAETEPLEFHPLD

SEQ ID NO: 75563 - protein, 105 aa, Arabidopsis thaliana
  peptide (1)..(105): Ceres Seq. ID no. 6443870
MAKSVYSKYEPAAKELYANYEPKAEQCAVSAWKKLNQLPLFPRLAQVAVPTAAFCSEKYNDTVVKAAEKGYRVTSYMPLVPTERISKIFAEEKAETEPLEFHPLD

SEQ ID NO: 75564 - protein, 96 aa, Arabidopsis thaliana
  peptide (1)..(96): Ceres Seq. ID no. 6443871
MQTMSQKQSSVPFQLGRSLTSFLYSQGWLKLLYQQLLSALRSTMILWLRLQRKGTESHRTCHWFQQRGSQKSSLRRKLRPSLWSSIHLIDMGVLLV

SEQ ID NO: 75565 - DNA, 1849 bp, Arabidopsis thaliana
  misc_feature (1)..(1849): Ceres Seq. ID no. 6443918
  misc_feature (1)..(1849): Ortholog of  Ceres SEQ ID NO 13662574 as cited in SEQ ID NO 64794
aatttatctttcctttgggtttctcacggagtcacggttcctcgttcgtcctctcccgtcgtctctccgcactaaattgatgggcacatcatctgggtccaatcttcctcaccagatgctacctccacgtcagcaactacaaacatctctttcgcttgtatcttcagatccccacttgtcacggtctaattctggcattgtgcgtgaatcaccagctgaaagtgctagctctcaagaaacttggccaacctcaaaatctattatgggaaggaagacagatagcggaaagacagggcctgactctcatgatcaacatgtgatccgccatgtttccattgctgataaggtatcgctacgggacatagctagagagagacttgacatagtcgctgagagaatgcatcgattaccagaagaatatctcgaggagttaaagaatggtcttaaggctatccttgaaggaaatggtgcgcagcctatagatgagtttatgtttctgcagaagtttgtccagacgagatctgatttaacttcaaagacacttgtcagggctcaccgagtgcagcttgaagttcttgtggttataaacactggtatccaagcattcttgcacccaaacatcaatctctctcagtcatcactcatcgagatctttgtgtacaagagatgcagaaacatagcttgccaaaacgaactcccggctgatggttgtccctgtgagatatgcgctaataggaaaggcttctgcaacctgtgcatgtgtgtgatatgtaacaagtttgactttgcagtcaacacatgccgctggattggctgcgacgtgtgttctcattggactcatacggattgtgctattagggatggggagatttcgatgggagtttctcccaagagcgtatctgggatgggagaaatgctgttcaagtgtcgagcgtgcaaccatacttctgaattgctggggtgggtgaaagatgtgtttcagcactgtgcaccaaactgggatagggaatctttaatgaaggaacttgacttcgttagtaggattttccgtggaagcgaagatacaagaggccggaaactcttctggaagtgtgaggagcttatggagaagattaaaggtggactggctgaagcaacagcggccaagttgatactcatgtttttccaagaaattgaattggactctccaaagagccttgaaagcggagaaggtgggggtacgatagcacctcaagatgcatgcaaccgaattgctgaagttgtaaaggaaacactgaggaaaatggagatagtgggtgaggaaaagacgaggatgtacaagaaagcgcgaatggggcttgaggaatgcgagagagaggtagaagagaaagcaaagcaagtggcggaactgcagatggagaggcagaagaagaaacaacagatagaagaggtggagaggatagtgaggctgaagcaagcagaggcagagatgtttcagttaaaagcaaacgaggcaaaagtggaagcagagagattggaaaggattgtgaaagcgaaaaaggagaaaacagaagaggaatacgcaagtaactatttgaaactgaggctgagcgaggcggaggcagagaaagagtatctgtttgaaaagataaaagagcaggaaagtggtgggaatggtggtgaagcgtcacaagcagtgatgtactcaaagatcagagaaatgctgcatggatacaatgcatcgtcgccaagggtagatccaagatcaaaccagcgaaatcctttcagatccaatccttagatgtttgtattgtctctctttgtttgtattaaaaaaaaaatccgaatcaattaaggttggatttgtgtg

SEQ ID NO: 75566 - protein, 592 aa, Arabidopsis thaliana
  peptide (1)..(592): Ceres Seq. ID no. 6443919
IYLSFGFLTESRFLVRPLPSSLRTKLMGTSSGSNLPHQMLPPRQQLQTSLSLVSSDPHLSRSNSGIVRESPAESASSQETWPTSKSIMGRKTDSGKTGPDSHDQHVIRHVSIADKVSLRDIARERLDIVAERMHRLPEEYLEELKNGLKAILEGNGAQPIDEFMFLQKFVQTRSDLTSKTLVRAHRVQLEVLVVINTGIQAFLHPNINLSQSSLIEIFVYKRCRNIACQNELPADGCPCEICANRKGFCNLCMCVICNKFDFAVNTCRWIGCDVCSHWTHTDCAIRDGEISMGVSPKSVSGMGEMLFKCRACNHTSELLGWVKDVFQHCAPNWDRESLMKELDFVSRIFRGSEDTRGRKLFWKCEELMEKIKGGLAEATAAKLILMFFQEIELDSPKSLESGEGGGTIAPQDACNRIAEVVKETLRKMEIVGEEKTRMYKKARMGLEECEREVEEKAKQVAELQMERQKKKQQIEEVERIVRLKQAEAEMFQLKANEAKVEAERLERIVKAKKEKTEEEYASNYLKLRLSEAEAEKEYLFEKIKEQESGGNGGEASQAVMYSKIREMLHGYNASSPRVDPRSNQRNPFRSNP

SEQ ID NO: 75567 - protein, 566 aa, Arabidopsis thaliana; identical to SEQ ID NO: 43217
  peptide (1)..(566): Ceres Seq. ID no. 6443920

SEQ ID NO: 75568 - protein, 554 aa, Arabidopsis thaliana; identical to SEQ ID NO: 43218
  peptide (1)..(554): Ceres Seq. ID no. 6443921

SEQ ID NO: 75569 - DNA, 1812 bp, Arabidopsis thaliana
  misc_feature (1)..(1812): Ceres Seq. ID no. 6443967
  misc_feature (1)..(1812): Ortholog of  Ceres SEQ ID NO 14311183 as cited in SEQ ID NO 58495
  misc_feature (1)..(1812): Ortholog of  Ceres SEQ ID NO 13502874 as cited in SEQ ID NO 66298
  misc_feature (1)..(1812): Ortholog of  Ceres SEQ ID NO 12614124 as cited in SEQ ID NO 68392
atccgaagctaaaagaaaacactagaggaggtgaagatttttaaaaatgtcattcttatcattttctcctatttctctggacttattatctagtaatgtcttcttaaccattctagcgattatcatatccggtttacttaaaaccattacgtaccggaaacacaattcgaaccatttaaatctcccgcccggcccaccaggatggccggtgatcggaaacttatttcagttcacgcgctccgggaaacagtttttcgagtacgtcgaggatctcgtaaagatctacggtccgattcttactctcaggcttggtactcgaacaatgatcatcatctccgacgccagtctcgcccacgaagcgttaatcgaacgtggagcacaattcgcgacccgacccgttgaaactccgacccggaaaatcttcagctccagtgaaatcacagttcattccgctatgtatggacctgtgtggaggtcattgagacggaacatggttcagaacatgcttagctcgaatcggctcaaggagtttggttctgttagaaaatccgccatggataaactcatcgagagaatcaaatctgaagctagagacaacgatggactcgtctgggttctgcaaaacagcagatacgctgcgttttgtgttttattagatatctgttttggagttgagatggaagaggaatcaattgagaagatggatcagttgatgacggcgatattaaacgccgttgatccaaaactccacgattaccttccgatcttaacgccgtttaactacaatgagagaaatcgtgctcttaagcttcgtcgggaacttgtagatttcgtcgtcggattcatcgagaaacgacggaaggcgattcggaccgcaacggtatcgtctttctcgtatcttgatacactctttgatcttagaatcatcgaaggaagtgaaacgacgccgtctgatgaagatcttgtaacgctctgttcggagtttctcaatgccggtacggacacgactggggcggcgatcgagtggggaatcgcagagttgatagcgaatcccgagattcaatctcgactgtacgatgagattaaatcaacggttggagatcgtgcggtcgatgaaagagacgtggacaaaatggtcttgttacaagctgtagtcaaagagattctccggcgacatccaccgacttactttacattaagtcacggtgtaacggaaccaacgactctctctggctataacatccctgtcggggtcaacattgagttttatcttcccggaattagtgaagacccgaagatctggtcagagccaaaaaagttcgaccctgaccggttcttatcagggcgggaagacgccgatataacaggagttgctggagtgaagatgatgccttttggtgttggccgtaggatctgtccggggatgggaatggcgacggtacatgtgcatttgatgatagcgaggatggttcaagagttcgagtggttagcctatccaccgcagagcgagatggattttgccgggaagttggtgtttgcggttgtgatgaagaagccgttgagggccatggtgagacctagggtacaatgaaagccgcaggtttgtagcatatccaacttttaaaaatgaataaatgctgtatggaatacatgcataaactgataaacactctcatgtaaaaatgaatacaagaagcatattggtactcaagtcatgttttccattaagaatcttttagaattctgttatctttgagggtaaaaacttaactatgtttgtaataaaagcttagaatgagaatttggtaaaac

SEQ ID NO: 75570 - protein, 514 aa, Arabidopsis thaliana; identical to SEQ ID NO: 75202
  peptide (1)..(514): Ceres Seq. ID no. 6443968

SEQ ID NO: 75571 - protein, 422 aa, Arabidopsis thaliana; identical to SEQ ID NO: 75203
  peptide (1)..(422): Ceres Seq. ID no. 6443969

SEQ ID NO: 75572 - protein, 378 aa, Arabidopsis thaliana; identical to SEQ ID NO: 75204
  peptide (1)..(378): Ceres Seq. ID no. 6443970

SEQ ID NO: 75573 - DNA, 1389 bp, Arabidopsis thaliana
  misc_feature (1)..(1389): Ceres Seq. ID no. 6444000
  misc_feature (1)..(1389): Ortholog of  Ceres SEQ ID NO 15177298 as cited in SEQ ID NO 52711
aggtccgtcgcttctcttccatttcttctcattttcgattttgattcttatttctttccagtagctcctgctctgtgaatttctccgctcacgatagatctgcttatactccttacattcaaccttagatctgaaacatgggtgcaggtggaagaatgccggttcctacttcttccaagaaatcggaaaccgacaccacaaagcgtgtgccgtgcgagaaaccgcctttctcggtgggagatctgaagaaagcaatcccgccgcattgtttcaaacgctcaatccctcgctctttctcctaccttatcagtgacatcattatagcctcatgcttctactacgtcgccaccaattacttctctctcctccctcagcctctctcttacttggcttggccactctattgggcctgtcaaggctgtgtcctaactggtatctgggtcatagcccacgaatgcggtcaccacgcattcagcgactaccaatggctggatgacacagttggtcttatcttccattccttcctcctcgtcccttacttctcctggaagtatagtcatcgccgtcaccattccaacactggatccctcgaaagagatgaagtatttgtcccaaagcagaaatcagcaatcaagtggtacgggaaatacctcaacaaccctcttggacgcatcatgatgttaaccgtccagtttgtcctcgggtggcccttgtacttagcctttaacgtctctggcagaccgtatgacgggttcgcttgccatttcttccccaacgctcccatctacaatgaccgagaacgcctccagatatacctctctgatgcgggtattctagccgtctgttttggtctttaccgttacgctgctgcacaagggatggcctcgatgatctgcctctacggagtaccgcttctgatagtgaatgcgttcctcgtcttgatcacttacttgcagcacactcatccctcgttgcctcactacgattcatcagagtgggactggctcaggggagctttggctaccgtagacagagactacggaatcttgaacaaggtgttccacaacattacagacacacacgtggctcatcacctgttctcgacaatgccgcattataacgcaatggaagctacaaaggcgataaagccaattctgggagactattaccagttcgatggaacaccgtggtatgtagcgatgtatagggaggcaaaggagtgtatctatgtagaaccggacagggaaggtgacaagaaaggtgtgtactggtacaacaataagttatgaggatgatggtgaagaaattgtcgacctttctcttgtctgtttgtcttttgttaaagaagctatgcttcgttttaataatcttattgtccattttgttgtg

SEQ ID NO: 75574 - protein, 383 aa, Arabidopsis thaliana; identical to SEQ ID NO: 39928
  peptide (1)..(383): Ceres Seq. ID no. 6444001

SEQ ID NO: 75575 - protein, 377 aa, Arabidopsis thaliana; identical to SEQ ID NO: 39929
  peptide (1)..(377): Ceres Seq. ID no. 6444002

SEQ ID NO: 75576 - protein, 204 aa, Arabidopsis thaliana; identical to SEQ ID NO: 39930
  peptide (1)..(204): Ceres Seq. ID no. 6444003

SEQ ID NO: 75577 - DNA, 1263 bp, Arabidopsis thaliana
  misc_feature (1)..(1263): Ceres Seq. ID no. 6444004
  misc_feature (1)..(1263): Ortholog of  Ceres SEQ ID NO 13597538 as cited in SEQ ID NO 64966
aaaatctcatctttttccctcgacgacaaccaccttagggttaggtttattttctcgcttattctctctaactctttttccctattccgatttcgatttgtcttctccgattcgcttttcctttcgctctctagactctagagtcaatttgatttctactctcgtatcggatctatacttaatcatggatactcgtaagagaggacggcctgaagctggctcattcaactccaatggcggcggatacaagaagtctaagcaagagatggaatcatattcaactggtttaggaagcaaatcgaagccatgcacaaaatttttcagtacttctggctgtcctttcggagagaattgccatttcttgcattatgttcccggaggatacaatgctgtatcgcagatgacaaatatgggaccacccattcctcaagtttccagaaacatgcaaggttctggtaatggaggccgattctcagggaggggagagtctgggcctggccatgtctctaactttggtgactcagccactgccagattcagtgttgatgcctctttagccggtgcaatcattgggaaaggcggagtcagttcaaagcagatatgtcgtcagacgggagtaaaattatcaattcaagatcacgagagagacccaaacttgaagaacattgtgcttgaaggaacacttgagcagataagcgaagcgagtgcaatggtaaaagatttgattgggaggcttaattcagcagctaagaaaccacctggtggtggtcttggtggtggtggtggcatgggttctgaagggaaaccacatccagggagcaacttcaagactaagatatgtgagagattctcaaaaggaaactgtacatttggtgatagatgtcactttgctcatggggaagcagagctacgcaagtcaggaatcgtctagttgttgcttgcagatagagaatttgctggtaaaactagtttcttatttagtggtggtgatatctgatatcatcttcacctactttgtttttgtttgttatgagagaatacaattttagtttcattatcattgtaagtctatttggtgttttttttaatagtttagtttttggttaattctgagtatgaattgagatgggaggaagcttgaagagaatgattgacaaaactcagaaacagtggttaggattgtatgacgccttttattcatattcttgttatctccgttatgtcatgtgtgtgaatcacttatataattttcgtaagattttc

SEQ ID NO: 75578 - protein, 309 aa, Arabidopsis thaliana; identical to SEQ ID NO: 30380
  peptide (1)..(309): Ceres Seq. ID no. 6444005

SEQ ID NO: 75579 - protein, 248 aa, Arabidopsis thaliana; identical to SEQ ID NO: 30381
  peptide (1)..(248): Ceres Seq. ID no. 6444006

SEQ ID NO: 75580 - protein, 221 aa, Arabidopsis thaliana; identical to SEQ ID NO: 30382
  peptide (1)..(221): Ceres Seq. ID no. 6444007

SEQ ID NO: 75581 - DNA, 1335 bp, Arabidopsis thaliana
  misc_feature (1)..(1335): Ceres Seq. ID no. 6444417
  misc_feature (1)..(1335): Ortholog of  Ceres SEQ ID NO 15176309 as cited in SEQ ID NO 52886
atggttgcaagaaccccacagaagcagaggaaagtggcgatggtggtgcctcctctcaactcagatcttctcaaggaaacgatcaacaaggttgataaatgtatggaaagactgcaagagctacagtacacaattgcaggaggaaccaaagttgtctctggtgtgaaccttagccctcgaagcactagaatttacttgaagactagtcttagatgcaagcaagaaactttaaggatcaagaatgctactaataagaaatctccagtagggaagtttcctgcttcctcaccaggagattggaggaaaatgtcactcccagcaatgctactaggagagactgtaaatgaaatcttacaagcctcacaggtcacaagagacattgtggacgccatagcaccaaagaagagtagaaagtccaggagattaacaatgtcacaagaagacgatggccctaaaacacccgagacacaacaaaaatcccgggaacagaatcctgaaactgtcagtagcaatatcaaagcaagaaggaagaaagagaagcagaacagacgatcagaatcagattctcctccatctctacaaagggcacgctcaagaattgcgttcagaaccatctctccacaagtaaagggaaataatggtgagaatagttttcggcatttggccaacagggtttcaccaaagcacaaaccttgggttaaaaaggcggttctttttccgaaccctctatttatttccggtaccgctacacaacaagcaaagttcagtagaacaatgtctccggtcatagccagaaatgagatatccagcatcaagaacaataaagaaacgccttacaagttcttaatcaaatctcctcccacatcagcatctaagtttcaggtcaagatcaggagcccacctaaggtcttggtttctcctacaagaaatggcagtaactcggttcggaagtcacctagaggctccaggtctccgacaagaactgttaacttaggaaagaagtcagcgtcgatttctcctattagaaatacgggaaagaggtctccaaagctatcaactgctgctaagctcagaagatcatttactcctacgagaaatggcagtaacttggctcgtaagtcgtctatttctccgaaaagagtcacacttcaagcatttctttctccaacaagaaatggtaacttttgtaagaagtcacccaaagcttcgatttctccaactagggtgtgcaacaagtcgcagaagctgtcaacggctgcaaagttcaggaggtcattttcgccatcgagactagctatgaggtttgtatctccaatgaagagcaggaaagtgtag

SEQ ID NO: 75582 - protein, 444 aa, Arabidopsis thaliana
  peptide (1)..(444): Ceres Seq. ID no. 6444418
MVARTPQKQRKVAMVVPPLNSDLLKETINKVDKCMERLQELQYTIAGGTKVVSGVNLSPRSTRIYLKTSLRCKQETLRIKNATNKKSPVGKFPASSPGDWRKMSLPAMLLGETVNEILQASQVTRDIVDAIAPKKSRKSRRLTMSQEDDGPKTPETQQKSREQNPETVSSNIKARRKKEKQNRRSESDSPPSLQRARSRIAFRTISPQVKGNNGENSFRHLANRVSPKHKPWVKKAVLFPNPLFISGTATQQAKFSRTMSPVIARNEISSIKNNKETPYKFLIKSPPTSASKFQVKIRSPPKVLVSPTRNGSNSVRKSPRGSRSPTRTVNLGKKSASISPIRNTGKRSPKLSTAAKLRRSFTPTRNGSNLARKSSISPKRVTLQAFLSPTRNGNFCKKSPKASISPTRVCNKSQKLSTAAKFRRSFSPSRLAMRFVSPMKSRKV

SEQ ID NO: 75583 - protein, 431 aa, Arabidopsis thaliana
  peptide (1)..(431): Ceres Seq. ID no. 6444419
MVVPPLNSDLLKETINKVDKCMERLQELQYTIAGGTKVVSGVNLSPRSTRIYLKTSLRCKQETLRIKNATNKKSPVGKFPASSPGDWRKMSLPAMLLGETVNEILQASQVTRDIVDAIAPKKSRKSRRLTMSQEDDGPKTPETQQKSREQNPETVSSNIKARRKKEKQNRRSESDSPPSLQRARSRIAFRTISPQVKGNNGENSFRHLANRVSPKHKPWVKKAVLFPNPLFISGTATQQAKFSRTMSPVIARNEISSIKNNKETPYKFLIKSPPTSASKFQVKIRSPPKVLVSPTRNGSNSVRKSPRGSRSPTRTVNLGKKSASISPIRNTGKRSPKLSTAAKLRRSFTPTRNGSNLARKSSISPKRVTLQAFLSPTRNGNFCKKSPKASISPTRVCNKSQKLSTAAKFRRSFSPSRLAMRFVSPMKSRKV

SEQ ID NO: 75584 - protein, 410 aa, Arabidopsis thaliana
  peptide (1)..(410): Ceres Seq. ID no. 6444420
MERLQELQYTIAGGTKVVSGVNLSPRSTRIYLKTSLRCKQETLRIKNATNKKSPVGKFPASSPGDWRKMSLPAMLLGETVNEILQASQVTRDIVDAIAPKKSRKSRRLTMSQEDDGPKTPETQQKSREQNPETVSSNIKARRKKEKQNRRSESDSPPSLQRARSRIAFRTISPQVKGNNGENSFRHLANRVSPKHKPWVKKAVLFPNPLFISGTATQQAKFSRTMSPVIARNEISSIKNNKETPYKFLIKSPPTSASKFQVKIRSPPKVLVSPTRNGSNSVRKSPRGSRSPTRTVNLGKKSASISPIRNTGKRSPKLSTAAKLRRSFTPTRNGSNLARKSSISPKRVTLQAFLSPTRNGNFCKKSPKASISPTRVCNKSQKLSTAAKFRRSFSPSRLAMRFVSPMKSRKV

SEQ ID NO: 75585 - DNA, 705 bp, Arabidopsis thaliana
  misc_feature (1)..(705): Ceres Seq. ID no. 6444538
  misc_feature (1)..(705): Ortholog of  Ceres SEQ ID NO 15177486 as cited in SEQ ID NO 0
atgctccatctccttcttctctccgacgaagaacattccaccaccaatagcatgcccccttcctcctccgcctctagatccgcctccaatcacagctcctcttcctcctcctcctcctcctctctccacctctgcaagcactctccttccgcgactctcgacctcctcatcctaatcctcgtcctcttctccggcgctttcctcctctcctcttacttctcctatctcttccactccttttctctcctctcctctcacttcccttccctctcctccttgatcttctccgacgatgaagatctctcctcgatccctcccgcttcctacttcttcgccttcgccgtcttcttcgccgcttcaattgcgtttctcgacctttgttgtggacccagatcgaggaagtgtcggaatcccaagtgtaaaggtttgaagaaagcgatggagtttgatttgcaattgcagacggaggaatgtgttaaatctggagctactaaggagatcgatcgattgccatggaaaggaggtagtgagagcaatcctgattacgagtgtttgagggctgagcttagaaggatggctccgcctaatggtcgtgctgttttacttttccgatctagatgtggttgccctgttgctaagcttgaaggttggggtcctaaacgaggccggcgtcataaaaaatctgctgcaagtttgaatctttaa

SEQ ID NO: 75586 - protein, 234 aa, Arabidopsis thaliana
  peptide (1)..(234): Ceres Seq. ID no. 6444539
MLHLLLLSDEEHSTTNSMPPSSSASRSASNHSSSSSSSSSSLHLCKHSPSATLDLLILILVLFSGAFLLSSYFSYLFHSFSLLSSHFPSLSSLIFSDDEDLSSIPPASYFFAFAVFFAASIAFLDLCCGPRSRKCRNPKCKGLKKAMEFDLQLQTEECVKSGATKEIDRLPWKGGSESNPDYECLRAELRRMAPPNGRAVLLFRSRCGCPVAKLEGWGPKRGRRHKKSAASLNL

SEQ ID NO: 75587 - protein, 217 aa, Arabidopsis thaliana
  peptide (1)..(217): Ceres Seq. ID no. 6444540
MPPSSSASRSASNHSSSSSSSSSSLHLCKHSPSATLDLLILILVLFSGAFLLSSYFSYLFHSFSLLSSHFPSLSSLIFSDDEDLSSIPPASYFFAFAVFFAASIAFLDLCCGPRSRKCRNPKCKGLKKAMEFDLQLQTEECVKSGATKEIDRLPWKGGSESNPDYECLRAELRRMAPPNGRAVLLFRSRCGCPVAKLEGWGPKRGRRHKKSAASLNL

SEQ ID NO: 75588 - DNA, 450 bp, Arabidopsis thaliana
  misc_feature (1)..(450): Ceres Seq. ID no. 6444769
  misc_feature (1)..(450): Ortholog of  Ceres SEQ ID NO 15178852 as cited in SEQ ID NO 0
atggattctgtattaaccaataagaacccaattatttatccgaagagaacacggcgttatcgtactgatcagagcagtaccgatgagttttcatctacaaatcgtataagagatatcaaagatccagagcatcctgaactttctttggaagatctcaatgttcttactgaagaatcagttgaagttgatgatcacaagagttacgttagaattacattcactccaactcttcctcattgtcacttgccaacccatattggtctttgcatcttagtcaaacttgtgcaaagcttacctgctagattcaaggttgatgtgagagtagcaccagggagtcatgataaagagacgacagtcaataaacaacttggggataaagaacgtgtgactgcagcattagagaatcccgagttggtggctctgcttaataaaatgatgcaagtgtgttag

SEQ ID NO: 75589 - protein, 149 aa, Arabidopsis thaliana; identical to SEQ ID NO: 71808
  peptide (1)..(149): Ceres Seq. ID no. 6444770

SEQ ID NO: 75590 - DNA, 1878 bp, Arabidopsis thaliana
  misc_feature (1)..(1878): Ceres Seq. ID no. 6444779
  misc_feature (1)..(1878): Ortholog of  Ceres SEQ ID NO 13598865 as cited in SEQ ID NO 0
atgacttcttcaaggaagaggccttctctctcactacctagcaagagtcacgagtccacggatgttaacaagaccatcgacaatgcagccgagattatcgagaaatggaacacagagtatgtttccgataagaaattttattctctgttttgcgagagcaagcgagacgcgaagaagtttgttaaacgcgtgaaggaactgcagaacgccatggatttgttgattagagaagatccaaattcggagaaactccttagagctcagaatctgatgcagatcgctatgaaacgacttcagaaagagtttctccagattctttcaatgaaccgtgcgcatttggatcctgaatccatctcctctagatctcctacatctgtcgtatcgaacgatgatgatgtttggcacgagtctcgttcagctggtgactccatcatcgaagttgaggaggtgtcaaagaactctaggacagagctgaaatccatagcagattgcatgatcgctgcgggttgtgcgaaagagtgtgcgactacttataaatccattcgaaaatcgatagttgatgaatcgatttaccgtctcggagtagagaatataagctcatccaaggcgaaaaagatgccatgtgaggttgttgagttgaagatgaataggtggatagaggcggttaaggtctcgatgaagactctcttcaatggcgaaaagactctatgcgatgaaatcttcgaatcctctgtttctcttagagagttttgtttccgagacatctccaaggaaggagctcttcttctgtttggattcccggaaactatcaccttaagagacaagaaaaatccacatccggagaagattttcccgttgctagatatgtattgcacgatcacagataacttgcttgcgattgaagcaatcttctcgtttccatcaatttcgaatgttcgaactcaagctcacagctcacttagccgactaagcgagtcaattcttgctcacttgatggattttgaatctcaaatacgtaaagactcgtccaagacagtggttcgtggtggaggagttcatccgatgactatctccgccatgaatcacatctctcgactcgcggaatacagtaacgctctcattaatatactcaagggatcatcatcatcatcttccgctaaagcattgcttcctaaatcttacttcaatgtctcagaatctgaagaatctccagtgtcggagctaaaagcacgattcgcgtggatgattctcgtcctcctctgtaaaatcgacggcaaagctgaaatgtacaaggacttctcaatgcagtatctcttcttagccaacaatctccaacacgttgtctcacgtgctcgatccacgaacgtgaagcatgttctcggcaacgattggatagcgaaaaactcagagaaagttagacagttcgcaagaagctacgagcggttggcatggggtccattggcgtcgatgtgtccggcgattagtacttcggaggcggtggagatgtcgcccgaagaagcgatgatgcaattcaaaaagttcaacgagactttcgagagcacgtgcgaggcacagagtgagtgcatcgtactagatccgaagctgttggacgagatgagaatttcgatcgggagaaaactgttaccggtttaccgcgatttttacaacgctcatagaaatgccgttatgttagcgggaacggaaggccagtggaatgtccgatataaccctgaagatattggaaaccacttgtcggagctgtttagcggaaagggtatttcggagaaaggatatgtctgtacgccagatttttgtgttacaacacctactccaactcctgtacgaaagactcgatctttgtcatgcagaagattttga

SEQ ID NO: 75591 - protein, 625 aa, Arabidopsis thaliana; identical to SEQ ID NO: 45006
  peptide (1)..(625): Ceres Seq. ID no. 6444780

SEQ ID NO: 75592 - protein, 555 aa, Arabidopsis thaliana; identical to SEQ ID NO: 45007
  peptide (1)..(555): Ceres Seq. ID no. 6444781

SEQ ID NO: 75593 - protein, 535 aa, Arabidopsis thaliana
  peptide (1)..(535): Ceres Seq. ID no. 6444782
MQIAMKRLQKEFLQILSMNRAHLDPESISSRSPTSVVSNDDDVWHESRSAGDSIIEVEEVSKNSRTELKSIADCMIAAGCAKECATTYKSIRKSIVDESIYRLGVENISSSKAKKMPCEVVELKMNRWIEAVKVSMKTLFNGEKTLCDEIFESSVSLREFCFRDISKEGALLLFGFPETITLRDKKNPHPEKIFPLLDMYCTITDNLLAIEAIFSFPSISNVRTQAHSSLSRLSESILAHLMDFESQIRKDSSKTVVRGGGVHPMTISAMNHISRLAEYSNALINILKGSSSSSSAKALLPKSYFNVSESEESPVSELKARFAWMILVLLCKIDGKAEMYKDFSMQYLFLANNLQHVVSRARSTNVKHVLGNDWIAKNSEKVRQFARSYERLAWGPLASMCPAISTSEAVEMSPEEAMMQFKKFNETFESTCEAQSECIVLDPKLLDEMRISIGRKLLPVYRDFYNAHRNAVMLAGTEGQWNVRYNPEDIGNHLSELFSGKGISEKGYVCTPDFCVTTPTPTPVRKTRSLSCRRF

SEQ ID NO: 75594 - DNA, 453 bp, Arabidopsis thaliana
  misc_feature (1)..(453): Ceres Seq. ID no. 6444966
  misc_feature (1)..(453): Ortholog of  Ceres SEQ ID NO 13581701 as cited in SEQ ID NO 51151
atgtgtagctggtgggcaagattctgttgcttcttcacaacaagtctacgaggagtgagaaagactttcgaagattgcagaagagtgagattcttgctagagaatcataaggcatcattccgagaaagagatgtttcaatggattgtgagtacaaagaagagatgtggagattgcttggggagcaagttacacctcctaggctcttcataaagtgtaagtacattggtggagcagacgaggtggtgtctcttaacgaaaacgagaagctcaagaagcttctagaagtgttttcatcagctaagtcgcggcagtgtgagatgtgcgagaacgaaagatttttgatatgttcgaaatgcaatgggaggtcgagagttgttgcagagcacgaaacctggaagagatgcatagagtgtaatgagaatggtcttgtgaaatgtgctctttgtacttaa

SEQ ID NO: 75595 - protein, 150 aa, Arabidopsis thaliana
  peptide (1)..(150): Ceres Seq. ID no. 6444967
MCSWWARFCCFFTTSLRGVRKTFEDCRRVRFLLENHKASFRERDVSMDCEYKEEMWRLLGEQVTPPRLFIKCKYIGGADEVVSLNENEKLKKLLEVFSSAKSRQCEMCENERFLICSKCNGRSRVVAEHETWKRCIECNENGLVKCALCT

SEQ ID NO: 75596 - protein, 104 aa, Arabidopsis thaliana
  peptide (1)..(104): Ceres Seq. ID no. 6444968
MDCEYKEEMWRLLGEQVTPPRLFIKCKYIGGADEVVSLNENEKLKKLLEVFSSAKSRQCEMCENERFLICSKCNGRSRVVAEHETWKRCIECNENGLVKCALCT

SEQ ID NO: 75597 - protein, 96 aa, Arabidopsis thaliana
  peptide (1)..(96): Ceres Seq. ID no. 6444969
MWRLLGEQVTPPRLFIKCKYIGGADEVVSLNENEKLKKLLEVFSSAKSRQCEMCENERFLICSKCNGRSRVVAEHETWKRCIECNENGLVKCALCT

SEQ ID NO: 75598 - DNA, 1131 bp, Arabidopsis thaliana
  misc_feature (1)..(1131): Ceres Seq. ID no. 6445002
  misc_feature (1)..(1131): Ortholog of  Ceres SEQ ID NO 14310390 as cited in SEQ ID NO 59715
atgacgcaattactcttgatattttttcctatatattggaaaccgccgtcgccggatctgatagtgcatatccatgaagtagaagacgaagaaacttactttctgatcttagaacggagtatatgtacagaagattcgcgtccctcaatttttgatctcaagggtcgggtttacctttttttccttcttatttttggtggctttgcgttttctcattcgacgatttctggatttggggatttcaaaaccatgaggaagaagctcgatactcggttcccagctgctcgtattaaaaagattatgcaagctgatgaggatgttggcaagatagctttggcagtgcctgtcttagtctcaaaatctttggagttgttcttgcaagacctttgtgatcgtacatatgaaattacccttgaaagaggtgccaagactgtgagctcattgcacctaaaacattgtgtggaaagatataacgtgtttgattttctgagggaagttgtgagtaaggtgcctgactatggccattcccaagggcaaggacatggtgatgttaccatggatgatcgcagcatctccaagagaaggaagcccatcagcgatgaagtgaatgacagtgacgaggaatataagaaaagcaaaacgcaagagatagggagtgctaagaccagtggcaggggtggtagaggaagagggcgaggaagaggtcgtggtggacgagctgcaaaagcagccgaaagagagggtctcaaccgcgagatggaagtagaagccgccaattctggacagccaccaccagaagacaatgtcaagatgcatgcgtcagagtcatcaccacaagaggatgagaagaaaggcatcgacggcacagcagcatcgaacgaagacaccaagcaacaccttcaaagtcccaaagaaggcattgactttgatctcaacgctgaatccctcgacctaaacgagaccaaactggcaccagccacaggcacaaccacaaccacaactgcagcaacagactctgaggagtattcgggctggcctatgatggacataagcaaaatggatccagcacagcttgctagtctgggtaagaggatagacgaggatgaggaagattatgacgaagaaggctaa

SEQ ID NO: 75599 - protein, 376 aa, Arabidopsis thaliana
  peptide (1)..(376): Ceres Seq. ID no. 6445003
MTQLLLIFFPIYWKPPSPDLIVHIHEVEDEETYFLILERSICTEDSRPSIFDLKGRVYLFFLLIFGGFAFSHSTISGFGDFKTMRKKLDTRFPAARIKKIMQADEDVGKIALAVPVLVSKSLELFLQDLCDRTYEITLERGAKTVSSLHLKHCVERYNVFDFLREVVSKVPDYGHSQGQGHGDVTMDDRSISKRRKPISDEVNDSDEEYKKSKTQEIGSAKTSGRGGRGRGRGRGRGGRAAKAAEREGLNREMEVEAANSGQPPPEDNVKMHASESSPQEDEKKGIDGTAASNEDTKQHLQSPKEGIDFDLNAESLDLNETKLAPATGTTTTTTAATDSEEYSGWPMMDISKMDPAQLASLGKRIDEDEEDYDEEG

SEQ ID NO: 75600 - protein, 293 aa, Arabidopsis thaliana; identical to SEQ ID NO: 38641
  peptide (1)..(293): Ceres Seq. ID no. 6445004

SEQ ID NO: 75601 - protein, 276 aa, Arabidopsis thaliana; identical to SEQ ID NO: 38642
  peptide (1)..(276): Ceres Seq. ID no. 6445005

SEQ ID NO: 75602 - DNA, 1500 bp, Arabidopsis thaliana
  misc_feature (1)..(1500): Ceres Seq. ID no. 6445046
  misc_feature (1)..(1500): Ortholog of  Ceres SEQ ID NO 15169670 as cited in SEQ ID NO 62085
atgaagatttatcttctttccgaatcaccctccggctacggattgttcgagggacacggttccgatgagattggacagaacacggaggcggttcggagctccgtctcggaccttagtcggttcgggcgggtcgtccagctcactgcttttcacccgttccagtctgcactcgatgctcttaaccaaatcaacgccgtctctgaaggatacatgagcgatgagctgagaagttttctggagctgaatctcccgaaagtgaaggaaggcaagaagcccaagtttagtttgggagtgtctgagcctaaaatcggttcttgcatttttgaagctaccaaaattccttgccagagcaatgagtttgtccatgagctccttagaggtgtgcgtcagcatttcgataggttcatcaaagacttgaagcctggtgatttggaaaaagctcaacttggactagctcatagctacagcagagcaaaggtgaagttcaatgttaaccgggtggataacatggttattcaagctattttcatgcttgacacacttgataaggatatcaattcctttgctatgagagtcagagaatggtactcatggcacttccctgagcttgtcaagatagttaatgacaactacctctacgccaaagtttcaaagattatcgtcgacaagtcaaagttgtctgaagagcacatccctatgcttactgaagccctgggtgatgaagataaggcaagagaggttattgaagctggaaaagcatctatgggccaggatttatcaccggttgatctgatcaatgtccagacctttgctcagagagttatggaccttgcagattacaggaagaagctctatgattatcttgttactaaaatgagtgacattgctccaaatttggcggccttgatcggagagatggttggggctaggttgatttcacatgcaggaagtctgacaaatcttgccaagtgcccatcttcaaccctccagattctcggtgctgagaaggcacttttcagggcactgaaaacacgtggaaacacacccaaatatggtctaatattccattcatcattcatcgggcgtgcatctgctaaaaacaagggccgtattgctcgtttccttgcaaacaagtgttccattgcttcccggattgattgtttctcagataacagcactacagctttcggtgagaaactaagggaacaagtagaggaaagacttgacttttatgacaaaggtgttgccccacgtaagaatgttgatgtaatgaaagaagtgttggaaaatcttgagaagaaagacgagggagaaaaaacagtggatgcttcggagaagaaaaagaagagaaagacagaggagaaggaggaggagaaggaagaggagaaatcaaagaaaaagaaaaagaaaagcaaagcagtagaaggagaggaattgacagcaacagataatggccatagcaagaagaagaagaaaactaagtcacaagatgatgaataa

SEQ ID NO: 75603 - protein, 499 aa, Arabidopsis thaliana
  peptide (1)..(499): Ceres Seq. ID no. 6445047
MKIYLLSESPSGYGLFEGHGSDEIGQNTEAVRSSVSDLSRFGRVVQLTAFHPFQSALDALNQINAVSEGYMSDELRSFLELNLPKVKEGKKPKFSLGVSEPKIGSCIFEATKIPCQSNEFVHELLRGVRQHFDRFIKDLKPGDLEKAQLGLAHSYSRAKVKFNVNRVDNMVIQAIFMLDTLDKDINSFAMRVREWYSWHFPELVKIVNDNYLYAKVSKIIVDKSKLSEEHIPMLTEALGDEDKAREVIEAGKASMGQDLSPVDLINVQTFAQRVMDLADYRKKLYDYLVTKMSDIAPNLAALIGEMVGARLISHAGSLTNLAKCPSSTLQILGAEKALFRALKTRGNTPKYGLIFHSSFIGRASAKNKGRIARFLANKCSIASRIDCFSDNSTTAFGEKLREQVEERLDFYDKGVAPRKNVDVMKEVLENLEKKDEGEKTVDASEKKKKRKTEEKEEEKEEEKSKKKKKKSKAVEGEELTATDNGHSKKKKKTKSQDDE

SEQ ID NO: 75604 - protein, 429 aa, Arabidopsis thaliana
  peptide (1)..(429): Ceres Seq. ID no. 6445048
MSDELRSFLELNLPKVKEGKKPKFSLGVSEPKIGSCIFEATKIPCQSNEFVHELLRGVRQHFDRFIKDLKPGDLEKAQLGLAHSYSRAKVKFNVNRVDNMVIQAIFMLDTLDKDINSFAMRVREWYSWHFPELVKIVNDNYLYAKVSKIIVDKSKLSEEHIPMLTEALGDEDKAREVIEAGKASMGQDLSPVDLINVQTFAQRVMDLADYRKKLYDYLVTKMSDIAPNLAALIGEMVGARLISHAGSLTNLAKCPSSTLQILGAEKALFRALKTRGNTPKYGLIFHSSFIGRASAKNKGRIARFLANKCSIASRIDCFSDNSTTAFGEKLREQVEERLDFYDKGVAPRKNVDVMKEVLENLEKKDEGEKTVDASEKKKKRKTEEKEEEKEEEKSKKKKKKSKAVEGEELTATDNGHSKKKKKTKSQDDE

SEQ ID NO: 75605 - protein, 330 aa, Arabidopsis thaliana
  peptide (1)..(330): Ceres Seq. ID no. 6445049
MVIQAIFMLDTLDKDINSFAMRVREWYSWHFPELVKIVNDNYLYAKVSKIIVDKSKLSEEHIPMLTEALGDEDKAREVIEAGKASMGQDLSPVDLINVQTFAQRVMDLADYRKKLYDYLVTKMSDIAPNLAALIGEMVGARLISHAGSLTNLAKCPSSTLQILGAEKALFRALKTRGNTPKYGLIFHSSFIGRASAKNKGRIARFLANKCSIASRIDCFSDNSTTAFGEKLREQVEERLDFYDKGVAPRKNVDVMKEVLENLEKKDEGEKTVDASEKKKKRKTEEKEEEKEEEKSKKKKKKSKAVEGEELTATDNGHSKKKKKTKSQDDE

SEQ ID NO: 75606 - DNA, 2931 bp, Arabidopsis thaliana
  misc_feature (1)..(2931): Ceres Seq. ID no. 6445262
  misc_feature (1)..(2931): Ortholog of  Ceres SEQ ID NO 13595870 as cited in SEQ ID NO 62101
  misc_feature (1)..(2931): Ortholog of  Ceres SEQ ID NO 13590241 as cited in SEQ ID NO 63878
  misc_feature (1)..(2931): Ortholog of  Ceres SEQ ID NO 13657939 as cited in SEQ ID NO 66349
atggcgaaagcagcagagcagaaacaaaacccgaccgttgcgagtgcagaagcgaagcttgatatccgcgacgtggtcaacacagccatcacttacggcgaagataaccgtcacggcggcgggaaacgcaatgacgtggccatgtttgtgctaagagccatgtgcatggccgtatcaacggtggctgttacgttaatggtaacagcacgcgagactagcatgaccactctctatggcttcgagtttcagctccacatatctagttgtggtttcatcggcaacggttctttactcgttgattcaactgattataagtggaacaagactaatgagaaaatctccggtgattccgacaagaacacaagcatggttttgcttcgttgcagatcagataataggatacgcaatgaagcctttttatattacgattgttctgtgttctgtttcttctatccctttagcctgggaaatgatgaagctcattgctacgttttaatggcgatcactctatctcgactagcttggtttattagactacccagaaattacccttcaatctcatgccaaaacaattcagctacgaacgttgtccatgaagatggtgatgataacgacaaagccaagacaaaccaagtcaatcttctcgcaataccaatcacactcactataatctccgcttctctagccaaaccgtcgttcgcggctgcgaaggtaacggagagaaagagaactcagaagaaacctcaggaggctttgacacttgaacagcttaaagcttggtccaaagatttacctgtagtttcgaatcgtataccttatactgacattttgagcttaaaagctgaaggtaagcttaagcatgtgataaagcctcctaatttaagtttgcggcaaaaggcagagcctgtgttagtagttttggaggattctagagtattaaggactgtgttgccttctttagagggtaataagaggttttgggaacaatgggatgagttagggattgatgtacaatgtgttaatgcttatactcctccggttaagagacctcctgtgccgtctccttatttaggatttttgtggaaagttcctgcttatatgttaacatgggttaagccaaagaaggagtctaaacgtgctgctgagttgaagagaatgagggaggatttcaagaggcagaggaaggaggagattgagacgatgaaagaggaaagagtgatgatggaaaagacaatgaaggcgcagaagaaacaacaggagaggaagaaaaggaaggctgttaggaagaagaaatacgaggagtctctgcgtgaggcgaggaaaaattatcgagatatggcggatatgtgggcaagattggctcaggatcctaatgtggctactgctcttggattggtattcttttatatattttaccgtgtggtggttctcaactataggaagcaaaagaaggattatgaagacaggttgaagattgagaaggcggaagcagatgagaggaagaaaatgagggagttggaaagggagatggagggaattgaggaagaggatgaggaggttgaggaaggtacaggtgagaaaaatccttacttacagatggcgatgcagttcatgaagtcaggtgcacgtgtgagacgagcatcaaataagaggttacctgagtatcttgagagaggtgtggatgtcaaatttacagatgttgctggacttgggaagattcgtcttgaacttgaggaaatcgttaagttttttactcatggagagatgtaccgcaggagaggggtcaagattccaggtggtattcttttatgtgggcctcctggggtcggaaaaactttactggcaaaagctgtagctggtgaagcaggagtcaatttcttctctatctctgcttctcagtttgtggaaatatatgttggtgttggtgcatctcgtgtccgagcattataccaagaagctagagaaaatgctccatctgtggtcttcattgatgaattggatgctgttggaagggagcgtgggttaataaagggttctggaggacaagaaagggatgccactcttaatcagctacttgtttctttagatggttttgaaggaaggggagaggtcatcaccattgcttccacaaacagaccagacattctcgatcctgcgcttgtgaggcctggacggttcgaccgcaaaatctttatccctaaacctggtcttattggacggatggaaattctgcaggttcatgctcgtaagaagccgatggctgaagatttagactatatggcagttgctagcatgacagatggcatggttggagcagagcttgctaatattgttgagatcgcggcaattaatatgatgcgtgatggaagaacagagttaacaacagatgatttgcttcaagctgcacaaatagaagaaagaggaatgttagatagaaaagacaggagcttggagacatggcgacaagttgcgatcaatgaagctgcaatggctgttgtagcagtgaactttcctgatatgaagaatatagaatttttaagcacgatatgggctgaaacatcggataacgcaagatcagctgctcgatcattggttcttggtggtctttctgataagcatcatggcttgaataacttctgggtagctgatcgaattaacgatattgatgtggaggcattgcggatattgaacatgtgttacgagcgtgctaaagagattcttggaagaaacaggacgctcatggacgaggtggtagagaaactggttcaaaagaaaagtctaacgaaacaagaattcttcactcttgttgagctctatgggtccagtaaaccaatgccaccgagtatccttgaacttaggaagatcaaacggcttgagctagaagagatggtgctgaaactggacatgactaccgcaagaaacagttcataa

SEQ ID NO: 75607 - protein, 976 aa, Arabidopsis thaliana
  peptide (1)..(976): Ceres Seq. ID no. 6445263
MAKAAEQKQNPTVASAEAKLDIRDVVNTAITYGEDNRHGGGKRNDVAMFVLRAMCMAVSTVAVTLMVTARETSMTTLYGFEFQLHISSCGFIGNGSLLVDSTDYKWNKTNEKISGDSDKNTSMVLLRCRSDNRIRNEAFLYYDCSVFCFFYPFSLGNDEAHCYVLMAITLSRLAWFIRLPRNYPSISCQNNSATNVVHEDGDDNDKAKTNQVNLLAIPITLTIISASLAKPSFAAAKVTERKRTQKKPQEALTLEQLKAWSKDLPVVSNRIPYTDILSLKAEGKLKHVIKPPNLSLRQKAEPVLVVLEDSRVLRTVLPSLEGNKRFWEQWDELGIDVQCVNAYTPPVKRPPVPSPYLGFLWKVPAYMLTWVKPKKESKRAAELKRMREDFKRQRKEEIETMKEERVMMEKTMKAQKKQQERKKRKAVRKKKYEESLREARKNYRDMADMWARLAQDPNVATALGLVFFYIFYRVVVLNYRKQKKDYEDRLKIEKAEADERKKMRELEREMEGIEEEDEEVEEGTGEKNPYLQMAMQFMKSGARVRRASNKRLPEYLERGVDVKFTDVAGLGKIRLELEEIVKFFTHGEMYRRRGVKIPGGILLCGPPGVGKTLLAKAVAGEAGVNFFSISASQFVEIYVGVGASRVRALYQEARENAPSVVFIDELDAVGRERGLIKGSGGQERDATLNQLLVSLDGFEGRGEVITIASTNRPDILDPALVRPGRFDRKIFIPKPGLIGRMEILQVHARKKPMAEDLDYMAVASMTDGMVGAELANIVEIAAINMMRDGRTELTTDDLLQAAQIEERGMLDRKDRSLETWRQVAINEAAMAVVAVNFPDMKNIEFLSTIWAETSDNARSAARSLVLGGLSDKHHGLNNFWVADRINDIDVEALRILNMCYERAKEILGRNRTLMDEVVEKLVQKKSLTKQEFFTLVELYGSSKPMPPSILELRKIKRLELEEMVLKLDMTTARNSS

SEQ ID NO: 75608 - protein, 929 aa, Arabidopsis thaliana
  peptide (1)..(929): Ceres Seq. ID no. 6445264
MFVLRAMCMAVSTVAVTLMVTARETSMTTLYGFEFQLHISSCGFIGNGSLLVDSTDYKWNKTNEKISGDSDKNTSMVLLRCRSDNRIRNEAFLYYDCSVFCFFYPFSLGNDEAHCYVLMAITLSRLAWFIRLPRNYPSISCQNNSATNVVHEDGDDNDKAKTNQVNLLAIPITLTIISASLAKPSFAAAKVTERKRTQKKPQEALTLEQLKAWSKDLPVVSNRIPYTDILSLKAEGKLKHVIKPPNLSLRQKAEPVLVVLEDSRVLRTVLPSLEGNKRFWEQWDELGIDVQCVNAYTPPVKRPPVPSPYLGFLWKVPAYMLTWVKPKKESKRAAELKRMREDFKRQRKEEIETMKEERVMMEKTMKAQKKQQERKKRKAVRKKKYEESLREARKNYRDMADMWARLAQDPNVATALGLVFFYIFYRVVVLNYRKQKKDYEDRLKIEKAEADERKKMRELEREMEGIEEEDEEVEEGTGEKNPYLQMAMQFMKSGARVRRASNKRLPEYLERGVDVKFTDVAGLGKIRLELEEIVKFFTHGEMYRRRGVKIPGGILLCGPPGVGKTLLAKAVAGEAGVNFFSISASQFVEIYVGVGASRVRALYQEARENAPSVVFIDELDAVGRERGLIKGSGGQERDATLNQLLVSLDGFEGRGEVITIASTNRPDILDPALVRPGRFDRKIFIPKPGLIGRMEILQVHARKKPMAEDLDYMAVASMTDGMVGAELANIVEIAAINMMRDGRTELTTDDLLQAAQIEERGMLDRKDRSLETWRQVAINEAAMAVVAVNFPDMKNIEFLSTIWAETSDNARSAARSLVLGGLSDKHHGLNNFWVADRINDIDVEALRILNMCYERAKEILGRNRTLMDEVVEKLVQKKSLTKQEFFTLVELYGSSKPMPPSILELRKIKRLELEEMVLKLDMTTARNSS

SEQ ID NO: 75609 - protein, 923 aa, Arabidopsis thaliana
  peptide (1)..(923): Ceres Seq. ID no. 6445265
MCMAVSTVAVTLMVTARETSMTTLYGFEFQLHISSCGFIGNGSLLVDSTDYKWNKTNEKISGDSDKNTSMVLLRCRSDNRIRNEAFLYYDCSVFCFFYPFSLGNDEAHCYVLMAITLSRLAWFIRLPRNYPSISCQNNSATNVVHEDGDDNDKAKTNQVNLLAIPITLTIISASLAKPSFAAAKVTERKRTQKKPQEALTLEQLKAWSKDLPVVSNRIPYTDILSLKAEGKLKHVIKPPNLSLRQKAEPVLVVLEDSRVLRTVLPSLEGNKRFWEQWDELGIDVQCVNAYTPPVKRPPVPSPYLGFLWKVPAYMLTWVKPKKESKRAAELKRMREDFKRQRKEEIETMKEERVMMEKTMKAQKKQQERKKRKAVRKKKYEESLREARKNYRDMADMWARLAQDPNVATALGLVFFYIFYRVVVLNYRKQKKDYEDRLKIEKAEADERKKMRELEREMEGIEEEDEEVEEGTGEKNPYLQMAMQFMKSGARVRRASNKRLPEYLERGVDVKFTDVAGLGKIRLELEEIVKFFTHGEMYRRRGVKIPGGILLCGPPGVGKTLLAKAVAGEAGVNFFSISASQFVEIYVGVGASRVRALYQEARENAPSVVFIDELDAVGRERGLIKGSGGQERDATLNQLLVSLDGFEGRGEVITIASTNRPDILDPALVRPGRFDRKIFIPKPGLIGRMEILQVHARKKPMAEDLDYMAVASMTDGMVGAELANIVEIAAINMMRDGRTELTTDDLLQAAQIEERGMLDRKDRSLETWRQVAINEAAMAVVAVNFPDMKNIEFLSTIWAETSDNARSAARSLVLGGLSDKHHGLNNFWVADRINDIDVEALRILNMCYERAKEILGRNRTLMDEVVEKLVQKKSLTKQEFFTLVELYGSSKPMPPSILELRKIKRLELEEMVLKLDMTTARNSS

SEQ ID NO: 75610 - DNA, 1443 bp, Arabidopsis thaliana
  misc_feature (1)..(1443): Ceres Seq. ID no. 6445325
  misc_feature (1)..(1443): Ortholog of  Ceres SEQ ID NO 13596509 as cited in SEQ ID NO 62004
  misc_feature (1)..(1443): Ortholog of  Ceres SEQ ID NO 13659971 as cited in SEQ ID NO 67565
  misc_feature (1)..(1443): Ortholog of  Ceres SEQ ID NO 13500385 as cited in SEQ ID NO 67583
atggtgagaaggcaagaggaggagaagaaggcggagaagggaatgcgtctggggaaatacgagctagggaggacgctcggcgagggtaatttcggtaaagttaaattcgctaaagataccgtctccggtcattccttcgccgttaaaatcatcgacaagtctcgtatcgccgatctcaacttctccttacagataaaaagagagatccggactctgaaaatgttgaaacatccccacattgttagattacatgaggtcttggctagcaaaacgaaaattaatatggtaatggaacttgttaccggaggagaattgttcgacagaattgtttccaacggaaaattaacagaaactgatggaagaaaaatgtttcagcagcttatcgatggaatcagctactgtcatagcaaaggtgttttccacagggatctcaagctagagaatgttcttcttgatgcaaagggacatataaagatcactgattttggcctcagtgctctgcctcagcattttagggatgacggattgttgcatacaacctgtggaagtcctaattacgttgcgcctgaggttttagctaacagaggctacgatggtgcagcatcagacatatggtcctgtggtgtaatcttgtatgtgattctaaccggatgtcttcctttcgacgacagaaaccttgcagttctttaccagaagatatgtaaaggagacccaccaataccaagatggttatccccgggtgcaagaaccatgattaagagaatgcttgatccaaatccagtcacgaggatcacagttgtgggtattaaagccagcgagtggttcaaacttgagtacattccttcaattcccgatgatgatgacgaagaagaagttgacacagacgatgatgctttctcaatccaagaactcggatcagaagaagggaagggcagtgattcaccgaccatcatcaatgcgtttcagttaatcggaatgtcttcctttcttgacctgtccggtttctttgaacaagagaatgtatcagagaggagaataagattcacttcaaatagctcagcaaaagatttactggagaaaatcgaaacagccgttacagaaatgggattcagtgtacaaaagaaacatgccaagttaagagtaaaacaagaagaaagaaaccagaaaggtcaagttggtttatcagtaacagctgaggttttcgagataaagccgtcactgaacgtggttgagctaagaaaatcttatggcgattcatgtttatatagacaggtatgccactattgtcatttcttaattagactgaagaaacacatatcaaagataaaaatgtttatgtttgatattggggttggtgcagttgtacgagagactattaaaagacgtgggcacatcctcgccggagcaagagatagtaacttaggtgttggtgttttcggctga

SEQ ID NO: 75611 - protein, 480 aa, Arabidopsis thaliana
  peptide (1)..(480): Ceres Seq. ID no. 6445326
MVRRQEEEKKAEKGMRLGKYELGRTLGEGNFGKVKFAKDTVSGHSFAVKIIDKSRIADLNFSLQIKREIRTLKMLKHPHIVRLHEVLASKTKINMVMELVTGGELFDRIVSNGKLTETDGRKMFQQLIDGISYCHSKGVFHRDLKLENVLLDAKGHIKITDFGLSALPQHFRDDGLLHTTCGSPNYVAPEVLANRGYDGAASDIWSCGVILYVILTGCLPFDDRNLAVLYQKICKGDPPIPRWLSPGARTMIKRMLDPNPVTRITVVGIKASEWFKLEYIPSIPDDDDEEEVDTDDDAFSIQELGSEEGKGSDSPTIINAFQLIGMSSFLDLSGFFEQENVSERRIRFTSNSSAKDLLEKIETAVTEMGFSVQKKHAKLRVKQEERNQKGQVGLSVTAEVFEIKPSLNVVELRKSYGDSCLYRQVCHYCHFLIRLKKHISKIKMFMFDIGVGAVVRETIKRRGHILAGARDSNLGVGVFG

SEQ ID NO: 75612 - protein, 466 aa, Arabidopsis thaliana
  peptide (1)..(466): Ceres Seq. ID no. 6445327
MRLGKYELGRTLGEGNFGKVKFAKDTVSGHSFAVKIIDKSRIADLNFSLQIKREIRTLKMLKHPHIVRLHEVLASKTKINMVMELVTGGELFDRIVSNGKLTETDGRKMFQQLIDGISYCHSKGVFHRDLKLENVLLDAKGHIKITDFGLSALPQHFRDDGLLHTTCGSPNYVAPEVLANRGYDGAASDIWSCGVILYVILTGCLPFDDRNLAVLYQKICKGDPPIPRWLSPGARTMIKRMLDPNPVTRITVVGIKASEWFKLEYIPSIPDDDDEEEVDTDDDAFSIQELGSEEGKGSDSPTIINAFQLIGMSSFLDLSGFFEQENVSERRIRFTSNSSAKDLLEKIETAVTEMGFSVQKKHAKLRVKQEERNQKGQVGLSVTAEVFEIKPSLNVVELRKSYGDSCLYRQVCHYCHFLIRLKKHISKIKMFMFDIGVGAVVRETIKRRGHILAGARDSNLGVGVFG

SEQ ID NO: 75613 - protein, 407 aa, Arabidopsis thaliana
  peptide (1)..(407): Ceres Seq. ID no. 6445328
MLKHPHIVRLHEVLASKTKINMVMELVTGGELFDRIVSNGKLTETDGRKMFQQLIDGISYCHSKGVFHRDLKLENVLLDAKGHIKITDFGLSALPQHFRDDGLLHTTCGSPNYVAPEVLANRGYDGAASDIWSCGVILYVILTGCLPFDDRNLAVLYQKICKGDPPIPRWLSPGARTMIKRMLDPNPVTRITVVGIKASEWFKLEYIPSIPDDDDEEEVDTDDDAFSIQELGSEEGKGSDSPTIINAFQLIGMSSFLDLSGFFEQENVSERRIRFTSNSSAKDLLEKIETAVTEMGFSVQKKHAKLRVKQEERNQKGQVGLSVTAEVFEIKPSLNVVELRKSYGDSCLYRQVCHYCHFLIRLKKHISKIKMFMFDIGVGAVVRETIKRRGHILAGARDSNLGVGVFG

SEQ ID NO: 75614 - DNA, 1722 bp, Arabidopsis thaliana
  misc_feature (1)..(1722): Ceres Seq. ID no. 6445479
  misc_feature (1)..(1722): Ortholog of  Ceres SEQ ID NO 14314070 as cited in SEQ ID NO 56946
  misc_feature (1)..(1722): Ortholog of  Ceres SEQ ID NO 14302852 as cited in SEQ ID NO 64814
  misc_feature (1)..(1722): Ortholog of  Ceres SEQ ID NO 13598593 as cited in SEQ ID NO 64978
  misc_feature (1)..(1722): Ortholog of  Ceres SEQ ID NO 14303067 as cited in SEQ ID NO 67078
  misc_feature (1)..(1722): Ortholog of  Ceres SEQ ID NO 13595992 as cited in SEQ ID NO 68401
atggatctagctaaacacacaagacttcaaatattgggatgcatactcctggcatcacttgcattaacaatggccgatacacccccgggcatagccaagaacccaagccacgcaacatgtaagatcaagaagtacaaacattgttacaacttggaacatgtttgtcccaagttttgccctgactcttgccatgtcgaatgtgcttcttgcaaacccatatgtggtcctccttcccctggcgacgatggtggcggcgatgacagtggtggtgatgacggtggatacactcctcctgctcctgttccaccagtttcaccaccacctcctacaccttccgtgccaagccctactccaccagtttcaccaccgcctccaactcctacaccatctgtgccaagtcccactccaccagtttcaccaccacctccaactcctacaccgtctgtgccaagtcccactccaccagtttcaccaccacctccgactcctacaccttccgtgccaagtcccaccccaccagtttcaccaccacctccgactcctacaccttctgtgccaagtcccactccaccagttcctactgatcctatgccaagtccccctccgccagtttcaccaccgcctccaactcctacaccatctgtgccaagtcctcctgatgttactcccactcctcctacgccatctgtgccaagtcctcctgatgttactcccactcctcctacgccatccgtgccaagtcctcctgatgttactcccactcctcctacgccaccttccgtcccaactccttccggctctcccccttacgttcccccgccatcagacgaagaggaagcagcaggtgccaaaagggtcaggtgtaagaagcagcgctctccatgttacggagttgaatacacttgccccgccgattgtccccgttcttgtcaagtggattgcgtcacttgcaagcctgtttgcaattgcgacaagcctggatctgtttgccaagacccacgtttcatcggaggagatggtctaaccttttacttccacggcaagaaagactccaacttctgccttatctctgatcctaaccttcacatcaacgctcatttcatcggtaaacgtagagctggtatggcacgtgacttcacatgggtccaatccattgccatactcttcggcactcaccgtttatacgtcggagccctaaagactgccacgtgggatgattccgttgaccggattgccgtctctttcgacggaaatgttatctcacttcctcagctagacggtgccaggtggacttcttcccctggtgtataccctgaggtctcggtcaagcgagttgaagtagagggtttgcttaagatcacagcaagagtggtgccaataacaatggaagattcaagaatccatggctacgacgtgaaggaagacgactgtctagctcaccttgacctaggcttcaagttccaagaccttagcgataatgtcgatggtgttttgggacagacttataggtctaactacgttagccgagttaagattggagtccacatgcctgtgatgggtggtgacagagaatttcagaccaccggactttttgcacctgactgttcagccgcaaggttcaccggtaacggagacagcaacaatggccggagcaaattggagctccctgagatgagttgtgccagtggcttaggtggcaagggagtggtttgcaagagataa

SEQ ID NO: 75615 - protein, 573 aa, Arabidopsis thaliana
  peptide (1)..(573): Ceres Seq. ID no. 6445480
MDLAKHTRLQILGCILLASLALTMADTPPGIAKNPSHATCKIKKYKHCYNLEHVCPKFCPDSCHVECASCKPICGPPSPGDDGGGDDSGGDDGGYTPPAPVPPVSPPPPTPSVPSPTPPVSPPPPTPTPSVPSPTPPVSPPPPTPTPSVPSPTPPVSPPPPTPTPSVPSPTPPVSPPPPTPTPSVPSPTPPVPTDPMPSPPPPVSPPPPTPTPSVPSPPDVTPTPPTPSVPSPPDVTPTPPTPSVPSPPDVTPTPPTPPSVPTPSGSPPYVPPPSDEEEAAGAKRVRCKKQRSPCYGVEYTCPADCPRSCQVDCVTCKPVCNCDKPGSVCQDPRFIGGDGLTFYFHGKKDSNFCLISDPNLHINAHFIGKRRAGMARDFTWVQSIAILFGTHRLYVGALKTATWDDSVDRIAVSFDGNVISLPQLDGARWTSSPGVYPEVSVKRVEVEGLLKITARVVPITMEDSRIHGYDVKEDDCLAHLDLGFKFQDLSDNVDGVLGQTYRSNYVSRVKIGVHMPVMGGDREFQTTGLFAPDCSAARFTGNGDSNNGRSKLELPEMSCASGLGGKGVVCKR

SEQ ID NO: 75616 - protein, 550 aa, Arabidopsis thaliana
  peptide (1)..(550): Ceres Seq. ID no. 6445481
MADTPPGIAKNPSHATCKIKKYKHCYNLEHVCPKFCPDSCHVECASCKPICGPPSPGDDGGGDDSGGDDGGYTPPAPVPPVSPPPPTPSVPSPTPPVSPPPPTPTPSVPSPTPPVSPPPPTPTPSVPSPTPPVSPPPPTPTPSVPSPTPPVSPPPPTPTPSVPSPTPPVPTDPMPSPPPPVSPPPPTPTPSVPSPPDVTPTPPTPSVPSPPDVTPTPPTPSVPSPPDVTPTPPTPPSVPTPSGSPPYVPPPSDEEEAAGAKRVRCKKQRSPCYGVEYTCPADCPRSCQVDCVTCKPVCNCDKPGSVCQDPRFIGGDGLTFYFHGKKDSNFCLISDPNLHINAHFIGKRRAGMARDFTWVQSIAILFGTHRLYVGALKTATWDDSVDRIAVSFDGNVISLPQLDGARWTSSPGVYPEVSVKRVEVEGLLKITARVVPITMEDSRIHGYDVKEDDCLAHLDLGFKFQDLSDNVDGVLGQTYRSNYVSRVKIGVHMPVMGGDREFQTTGLFAPDCSAARFTGNGDSNNGRSKLELPEMSCASGLGGKGVVCKR

SEQ ID NO: 75617 - protein, 377 aa, Arabidopsis thaliana
  peptide (1)..(377): Ceres Seq. ID no. 6445482
MPSPPPPVSPPPPTPTPSVPSPPDVTPTPPTPSVPSPPDVTPTPPTPSVPSPPDVTPTPPTPPSVPTPSGSPPYVPPPSDEEEAAGAKRVRCKKQRSPCYGVEYTCPADCPRSCQVDCVTCKPVCNCDKPGSVCQDPRFIGGDGLTFYFHGKKDSNFCLISDPNLHINAHFIGKRRAGMARDFTWVQSIAILFGTHRLYVGALKTATWDDSVDRIAVSFDGNVISLPQLDGARWTSSPGVYPEVSVKRVEVEGLLKITARVVPITMEDSRIHGYDVKEDDCLAHLDLGFKFQDLSDNVDGVLGQTYRSNYVSRVKIGVHMPVMGGDREFQTTGLFAPDCSAARFTGNGDSNNGRSKLELPEMSCASGLGGKGVVCKR

SEQ ID NO: 75618 - DNA, 1665 bp, Arabidopsis thaliana
  misc_feature (1)..(1665): Ceres Seq. ID no. 6445513
  misc_feature (1)..(1665): Ortholog of  Ceres SEQ ID NO 14311055 as cited in SEQ ID NO 53705
atgtctctttgctgtgatcttcaaatcaatctcaataaccaatttactttcttcgtcaatcaggatttgatctcagagtactcaggcttcttgaggaagatgataaaacagagcaataagaagaaaaagaatcacaagaacagtagaatcatcatcgaggttgaagattttccaggtgggtcagatgggttcgacttggttttaagattctgttatggtggaggaatctcgatagatgtctcaaatgtgtccattttgcattgctcttctgtcttccttgagatgacagagaaactctgttcctcgaatctcttgcttcgaacagagaagtttctagaaggaatgttctactggtcctggaacgacatcgtattgtgtctcaagagctgcgagcaagtgttcttacacgctgattcttacggtcttgttgataagcttgttttcggggttttagccaaaatccctcagaattcagacgtgagtcatgtcttttcatcatcctctccgtcttcctctgcctctgcctcagcctcctctcagtcgccggagacggcaatgattaggtcgtattcagacaaaaggtctacttcgaggtctttttcttgcaggacaagtaacgagtggtggttcgacgatatgtcaattctcgggccaaaaatcattgaaaagctgataaatacacttggtgcgcatgataagaacaatgacagcttggtcctcacaaaatttcttctccattacctcaagacaaaggtcccaaacaagtcaaccaacaagctcgagtattcaggtttagctgatacagcggttcaaggagtggttttcgcagcgaaaaccgcgttttcatgcagaaaaatgttctgggttctgcgagttttatcgggatttagcataagtaaagaatcaagaattggtttagagagggttataggagaaatgctggatcaagcaacacttgatgatcttctgataccagctggaggaaaaggagaaaaaggggtttacgatgtggatttggtgataagattactcaaagtgtttgtaagaattggaaacacagaagaaggagatcagaatttgagaatgagaagaattgggaagttgattgataagtatctcagagagatatctccagaccagaatcttaaagtgtcaaagtttcttgaagttgcagagagtttgccagattcagctagagattggtttgatggattatacagagccattaacatctatcttgagtctcatccgaaactatcatccgaggatagaacaaaactatgtcgatgtctaaactacaagaaattgacattggacacatgcaaacaacttgcaaaaaatcccaagatccctccaaatattgcagttcaagcactcaagtcacaacaattatcaaacgagactcgaccacactcaagagaggacaagaacaaagtaaacaagatctggaattcacgtaagtacttagaagagaaaccaatactggtgtgtttgaaaggttttgatatgtcggagaagtttgaagatgatctaatgatgaatttggagaggaagcaatggaataattctgaaaaagttagtaaggagaagaagagtgaagtaatgtcaagatctgtgagacatggacatacacattcaagttctagttttccaaggctttgttaa

SEQ ID NO: 75619 - protein, 554 aa, Arabidopsis thaliana
  peptide (1)..(554): Ceres Seq. ID no. 6445514
MSLCCDLQINLNNQFTFFVNQDLISEYSGFLRKMIKQSNKKKKNHKNSRIIIEVEDFPGGSDGFDLVLRFCYGGGISIDVSNVSILHCSSVFLEMTEKLCSSNLLLRTEKFLEGMFYWSWNDIVLCLKSCEQVFLHADSYGLVDKLVFGVLAKIPQNSDVSHVFSSSSPSSSASASASSQSPETAMIRSYSDKRSTSRSFSCRTSNEWWFDDMSILGPKIIEKLINTLGAHDKNNDSLVLTKFLLHYLKTKVPNKSTNKLEYSGLADTAVQGVVFAAKTAFSCRKMFWVLRVLSGFSISKESRIGLERVIGEMLDQATLDDLLIPAGGKGEKGVYDVDLVIRLLKVFVRIGNTEEGDQNLRMRRIGKLIDKYLREISPDQNLKVSKFLEVAESLPDSARDWFDGLYRAINIYLESHPKLSSEDRTKLCRCLNYKKLTLDTCKQLAKNPKIPPNIAVQALKSQQLSNETRPHSREDKNKVNKIWNSRKYLEEKPILVCLKGFDMSEKFEDDLMMNLERKQWNNSEKVSKEKKSEVMSRSVRHGHTHSSSSFPRLC

SEQ ID NO: 75620 - protein, 521 aa, Arabidopsis thaliana; identical to SEQ ID NO: 74121
  peptide (1)..(521): Ceres Seq. ID no. 6445515

SEQ ID NO: 75621 - protein, 460 aa, Arabidopsis thaliana; identical to SEQ ID NO: 74122
  peptide (1)..(460): Ceres Seq. ID no. 6445516

SEQ ID NO: 75622 - DNA, 2469 bp, Arabidopsis thaliana
  misc_feature (1)..(2469): Ceres Seq. ID no. 6445555
  misc_feature (1)..(2469): Ortholog of  Ceres SEQ ID NO 13654989 as cited in SEQ ID NO 63117
  misc_feature (1)..(2469): Ortholog of  Ceres SEQ ID NO 13584744 as cited in SEQ ID NO 69137
atgaaggctcaaaagggaagctcgaagaagaaaggtacgaattctgggttagtcgctgtagcagtggataacaataaaggaagccaacatgctctcaaatgggctgctgatcatcttgtctctaaaggacaaaccattatcctcctccatgttatccttaggtcatcctctgattcaggtgagattactgcagagaaacataagcaagctgaaaatctttttgtgacatttcattgctactgcagtcgaaaagagatacaatgccttgatgtcacgcttgaggatgacaacattgtcaagtcccttgcggaatatgtttcctctggtgtgattgagaatttgattcttggtgctccttcgaggcatggattcatgaggaaatttaagatttctgatacaccgagcaatgtagcgaaagcagcacctgatttctgtacagtttacgttatttcaaaagggaagatatcatctgtccgccatgcctcacgagctgctccatatcggtctccgcttatgggtcagattgaaaaccactctgaaatcataaactacgaaaagttcagaaacaccatgagctttagagatagggctcctcccaggtcttcgactgctagctccattgaagattatggaaagtcacctatggcaaggacgtcaaattacgcaaactcattctttgatttggaagattccgaaaacgacatatcatttgtttgctcaggcaggccaagtaccgcaagctcaggccggccaagtacaagtaccggaaggtctgacatatcttttgtgagctcaggcaggccgagtacaagcaccactggaagcccttccttcatctacgattttcctgattctggtttaactccgagagagtcgacgagctctggacactctatgcgtctaggaatcaggttcaatgacacaaatatccaacatgatttctcattcgtctcacaagatagcggtcggtcatcttgttcttgttcaccacaaaacttggaagaagtggaagctgagatgcggagattgaagcaggaactgaaacacgcaattgacatgtatggatcagcttgcagagaagcactagctgcaaagcaagaggcgaaggagctccaacgtcagaaaattgaagaggaagggtgggtgcaagaaggacagttatcagagaaatctacaaagtccatagtggaaaaagagagagcacataaagctgcgaaggatgcttctgaaacagcaggcaagatagcagagctcgaaacacaaagaagagctatagaagctgcaggttctttctctgattccagtttaaggtatcgaaggtatgtcattggtgagattgaagaagccacaaactcattcgacaaggctaataaaataggcgaaggcgggtatggtcctgtctataagggttatcttgatcatacccctgttgctattaaggctttgaaagcagatgcagttcaaggaagatctcaatttcaaagagaggtagaagttcttagctgcataagacacccacacatggtactactaattggagcatgtccagagtatggagtgcttgtatatgagtatatggccaaagggagtttagctgataggctctataagtatggaaacacaccaccactctcgtgggagctcaggttccgaattgcagccgaagttgcgacgggtctgctcttcctacaccagacgaaacccgagcctatagtgcaccgtgatcttaaacccggaaacattttgattgaccagaactacgtaagcaaaataggggacgttggattagccaaactagtgcctgcagttgctgaaaacgtcacgcagtgccacgtgtcatcaaccgctgggactttctgttacattgaccctgagtaccaacaaactggaatgctaggtgtgaaatctgatgtctactcttttggtatcttgcttctcgaactgctcacagcgaaaaggccgacgggtttggcttataccgttgagcaagcaatggagcaagggaaattcaaggatatgttagacccagcagtgcctaactggccggtggaagaagctatgtctttggcaaagattgctcttaaatgtgcacagctgagaaggaaagaccgaccagacctcggaaaagaggttttaccagagctcaataaattgagagctcgtgcagatacgaatatggaatggatgatgttcaacttaagtagaggtcgtctaacaccaaatcatagccaagtgtccttgccaccagttgatgaactaagtgtatgctcggataagtcttatacacattcaagcactgtatccgacacagagaagaactcaggtgcattagagaaccatattttttccatcttctttaacatttttacaatgtgtttgatccatcaaatcttacagtttactctgtttcttttccagaccaaaacgaagaggattagcatattttgtgtgttgaaggaaatggagtga

SEQ ID NO: 75623 - protein, 822 aa, Arabidopsis thaliana
  peptide (1)..(822): Ceres Seq. ID no. 6445556
MKAQKGSSKKKGTNSGLVAVAVDNNKGSQHALKWAADHLVSKGQTIILLHVILRSSSDSGEITAEKHKQAENLFVTFHCYCSRKEIQCLDVTLEDDNIVKSLAEYVSSGVIENLILGAPSRHGFMRKFKISDTPSNVAKAAPDFCTVYVISKGKISSVRHASRAAPYRSPLMGQIENHSEIINYEKFRNTMSFRDRAPPRSSTASSIEDYGKSPMARTSNYANSFFDLEDSENDISFVCSGRPSTASSGRPSTSTGRSDISFVSSGRPSTSTTGSPSFIYDFPDSGLTPRESTSSGHSMRLGIRFNDTNIQHDFSFVSQDSGRSSCSCSPQNLEEVEAEMRRLKQELKHAIDMYGSACREALAAKQEAKELQRQKIEEEGWVQEGQLSEKSTKSIVEKERAHKAAKDASETAGKIAELETQRRAIEAAGSFSDSSLRYRRYVIGEIEEATNSFDKANKIGEGGYGPVYKGYLDHTPVAIKALKADAVQGRSQFQREVEVLSCIRHPHMVLLIGACPEYGVLVYEYMAKGSLADRLYKYGNTPPLSWELRFRIAAEVATGLLFLHQTKPEPIVHRDLKPGNILIDQNYVSKIGDVGLAKLVPAVAENVTQCHVSSTAGTFCYIDPEYQQTGMLGVKSDVYSFGILLLELLTAKRPTGLAYTVEQAMEQGKFKDMLDPAVPNWPVEEAMSLAKIALKCAQLRRKDRPDLGKEVLPELNKLRARADTNMEWMMFNLSRGRLTPNHSQVSLPPVDELSVCSDKSYTHSSTVSDTEKNSGALENHIFSIFFNIFTMCLIHQILQFTLFLFQTKTKRISIFCVLKEME

SEQ ID NO: 75624 - protein, 698 aa, Arabidopsis thaliana
  peptide (1)..(698): Ceres Seq. ID no. 6445557
MRKFKISDTPSNVAKAAPDFCTVYVISKGKISSVRHASRAAPYRSPLMGQIENHSEIINYEKFRNTMSFRDRAPPRSSTASSIEDYGKSPMARTSNYANSFFDLEDSENDISFVCSGRPSTASSGRPSTSTGRSDISFVSSGRPSTSTTGSPSFIYDFPDSGLTPRESTSSGHSMRLGIRFNDTNIQHDFSFVSQDSGRSSCSCSPQNLEEVEAEMRRLKQELKHAIDMYGSACREALAAKQEAKELQRQKIEEEGWVQEGQLSEKSTKSIVEKERAHKAAKDASETAGKIAELETQRRAIEAAGSFSDSSLRYRRYVIGEIEEATNSFDKANKIGEGGYGPVYKGYLDHTPVAIKALKADAVQGRSQFQREVEVLSCIRHPHMVLLIGACPEYGVLVYEYMAKGSLADRLYKYGNTPPLSWELRFRIAAEVATGLLFLHQTKPEPIVHRDLKPGNILIDQNYVSKIGDVGLAKLVPAVAENVTQCHVSSTAGTFCYIDPEYQQTGMLGVKSDVYSFGILLLELLTAKRPTGLAYTVEQAMEQGKFKDMLDPAVPNWPVEEAMSLAKIALKCAQLRRKDRPDLGKEVLPELNKLRARADTNMEWMMFNLSRGRLTPNHSQVSLPPVDELSVCSDKSYTHSSTVSDTEKNSGALENHIFSIFFNIFTMCLIHQILQFTLFLFQTKTKRISIFCVLKEME

SEQ ID NO: 75625 - protein, 651 aa, Arabidopsis thaliana
  peptide (1)..(651): Ceres Seq. ID no. 6445558
MGQIENHSEIINYEKFRNTMSFRDRAPPRSSTASSIEDYGKSPMARTSNYANSFFDLEDSENDISFVCSGRPSTASSGRPSTSTGRSDISFVSSGRPSTSTTGSPSFIYDFPDSGLTPRESTSSGHSMRLGIRFNDTNIQHDFSFVSQDSGRSSCSCSPQNLEEVEAEMRRLKQELKHAIDMYGSACREALAAKQEAKELQRQKIEEEGWVQEGQLSEKSTKSIVEKERAHKAAKDASETAGKIAELETQRRAIEAAGSFSDSSLRYRRYVIGEIEEATNSFDKANKIGEGGYGPVYKGYLDHTPVAIKALKADAVQGRSQFQREVEVLSCIRHPHMVLLIGACPEYGVLVYEYMAKGSLADRLYKYGNTPPLSWELRFRIAAEVATGLLFLHQTKPEPIVHRDLKPGNILIDQNYVSKIGDVGLAKLVPAVAENVTQCHVSSTAGTFCYIDPEYQQTGMLGVKSDVYSFGILLLELLTAKRPTGLAYTVEQAMEQGKFKDMLDPAVPNWPVEEAMSLAKIALKCAQLRRKDRPDLGKEVLPELNKLRARADTNMEWMMFNLSRGRLTPNHSQVSLPPVDELSVCSDKSYTHSSTVSDTEKNSGALENHIFSIFFNIFTMCLIHQILQFTLFLFQTKTKRISIFCVLKEME

SEQ ID NO: 75626 - DNA, 762 bp, Arabidopsis thaliana
  misc_feature (1)..(762): Ceres Seq. ID no. 6445702
  misc_feature (1)..(762): Ortholog of  Ceres SEQ ID NO 13661768 as cited in SEQ ID NO 61427
  misc_feature (1)..(762): Ortholog of  Ceres SEQ ID NO 15179239 as cited in SEQ ID NO 0
atgtactcatcatattctctattcaaatgcctcgtttgtttctatatcttgggtatacaagtcctcatacatagcgtttcgtcccagaatcttactaatgcgtatttgcaccacaaatgcctcactcgtcaagggaaatataagccgagaagcccgtacgaggaaaaccttaattatctcatcgatcatatctctaagtatcattttcgggacgacacagcgcatggtgaggctccgaattccggcaactttgtattccaatgccgtggagactcctacgggtctatatgcggttcttgctatgccaccgctgtggccgggcttcgtaagagatgtcagagatacaaaggagcaataatatggtatgatcaatgttttctcaaagtaagtacgatcaactcccctccaacgaagatggattacgagaatactttttctatgcacaacccaaacaacatcaacggggatactcagttgttcaaccaaaagatgaagaatttcctctatgagctagcgctgaaagcggataaacccaaagcggacggtaccggtttgctatattacgcggcagggacgaagaggctcgggaagaataaactgtatgcaatggtgcagtgtactttagacatatttcattgtaaggtttgtttggaatggagtattaaggagctttcaaagtgttgtgaaggtaaacaaggagcgagagttttgggaacgagttgtaatgttaggtatgagttatacccttttattaggacctaa

SEQ ID NO: 75627 - protein, 253 aa, Arabidopsis thaliana
  peptide (1)..(253): Ceres Seq. ID no. 6445703
MYSSYSLFKCLVCFYILGIQVLIHSVSSQNLTNAYLHHKCLTRQGKYKPRSPYEENLNYLIDHISKYHFRDDTAHGEAPNSGNFVFQCRGDSYGSICGSCYATAVAGLRKRCQRYKGAIIWYDQCFLKVSTINSPPTKMDYENTFSMHNPNNINGDTQLFNQKMKNFLYELALKADKPKADGTGLLYYAAGTKRLGKNKLYAMVQCTLDIFHCKVCLEWSIKELSKCCEGKQGARVLGTSCNVRYELYPFIRT

SEQ ID NO: 75628 - DNA, 1086 bp, Arabidopsis thaliana
  misc_feature (1)..(1086): Ceres Seq. ID no. 6445788
  misc_feature (1)..(1086): Ortholog of  Ceres SEQ ID NO 14311568 as cited in SEQ ID NO 51732
  misc_feature (1)..(1086): Ortholog of  Ceres SEQ ID NO 14303877 as cited in SEQ ID NO 53500
  misc_feature (1)..(1086): Ortholog of  Ceres SEQ ID NO 15169781 as cited in SEQ ID NO 54829
  misc_feature (1)..(1086): Ortholog of  Ceres SEQ ID NO 15173757 as cited in SEQ ID NO 57537
  misc_feature (1)..(1086): Ortholog of  Ceres SEQ ID NO 13597743 as cited in SEQ ID NO 65452
  misc_feature (1)..(1086): Ortholog of  Ceres SEQ ID NO 13654231 as cited in SEQ ID NO 68285
atggcggcgtttgaaaacaccaacgaacgttttgttgttccaacttccaaggaatacagtatttgtgtgtttgagacagatttttgcagattctctcgttctgcattctctgttcttcttctgatgtatccatcaatcgaagacgatgatgatcttctcgctgctctttgttttgatcaaagcaatggagtagaagatccttatggatatatgcaaacaaatgaagataacatatttcaggattttgggtcttgtggtgtgaatctgatgcagccacaacaagaacaatttgattcttttaatggaaatcttgagcaagtttgtagtagctttagaggaggaaacaatggagttgtttatagtagtagcattggatcagcacaattggatttggctgcatcgtttagtggagttttgcagcaagagacacatcaagtctgtggctttagaggacaaaacgacgattctgcagtgcctcatttgcagcagcaacaaggacaggtgtttagtggtgtagtggaaatcaattcttcgtcatctgttggagctgttaaggaagagtttgaggaagaatgttcggggaagaggagacgaactggatcatgtagcaagccaggaaccaaagcctgtcgcgagaaactaagaagggaaaagctaaatgacaagttcatggacttgagctctgttttagagcctggcaggactccaaagacggataaatcagctatactcgacgatgcaatccgggttgtgaatcagcttagaggtgaagctcatgagcttcaagaaaccaaccaaaagcttctagaagagatcaagagtctaaaggcggataaaaacgagctacgagaggaaaagctggtgttgaaggcggagaaggagaagatggagcaacagttaaaatctatggtggttccatcaccaggtttcatgccctcccagcatccagcagctttccattcccataagatggcggtggcttacccttacggctactatcctccaaacatgccaatgtggtcacccttacctcctgctgaccgtgatacgtctcgtgatctcaaaaatcttcctcctgttgcttaa

SEQ ID NO: 75629 - protein, 361 aa, Arabidopsis thaliana
  peptide (1)..(361): Ceres Seq. ID no. 6445789
MAAFENTNERFVVPTSKEYSICVFETDFCRFSRSAFSVLLLMYPSIEDDDDLLAALCFDQSNGVEDPYGYMQTNEDNIFQDFGSCGVNLMQPQQEQFDSFNGNLEQVCSSFRGGNNGVVYSSSIGSAQLDLAASFSGVLQQETHQVCGFRGQNDDSAVPHLQQQQGQVFSGVVEINSSSSVGAVKEEFEEECSGKRRRTGSCSKPGTKACREKLRREKLNDKFMDLSSVLEPGRTPKTDKSAILDDAIRVVNQLRGEAHELQETNQKLLEEIKSLKADKNELREEKLVLKAEKEKMEQQLKSMVVPSPGFMPSQHPAAFHSHKMAVAYPYGYYPPNMPMWSPLPPADRDTSRDLKNLPPVA

SEQ ID NO: 75630 - protein, 320 aa, Arabidopsis thaliana; identical to SEQ ID NO: 38113
  peptide (1)..(320): Ceres Seq. ID no. 6445790

SEQ ID NO: 75631 - protein, 291 aa, Arabidopsis thaliana; identical to SEQ ID NO: 38114
  peptide (1)..(291): Ceres Seq. ID no. 6445791

SEQ ID NO: 75632 - DNA, 2106 bp, Arabidopsis thaliana
  misc_feature (1)..(2106): Ceres Seq. ID no. 6446000
  misc_feature (1)..(2106): Ortholog of  Ceres SEQ ID NO 12586556 as cited in SEQ ID NO 64667
  misc_feature (1)..(2106): Ortholog of  Ceres SEQ ID NO 13660894 as cited in SEQ ID NO 67475
atgaaagcgttgttagcctctctactagagagctctttaaactctttccaaaagctttcactcactcactgttacgctattaaatgtggttccatctcagatatatacgtatccaatcgaattttggattcttatataaaatttggcttcttgggttatgccaatatgttgttcgatgaaatgcctaagagagattccgtgtcttggaacacaatgatttctgggtacacaagctgtgggaaattggaggatgcatggtgtttatttacatgtatgaagagatctggatctgatgttgatgggtatagttttagtaggttgttgaaagggattgcttctgtgaaaaggttcgatcttggagagcaagtgcatggtttggttataaagggaggttatgagtgtaatgtgtatgttggaagttcgcttgttgatatgtatgcgaaatgtgaaagagttgaagatgcttttgaggcttttaaggagatttcagagcctaactctgtttcatggaatgctttgattgctggatttgtgcaagtgcgagatatcaagactgctttttggttgttgggtttgatggagatgaaagctgctgtgactatggatgctggcactttcgctccacttcttactttgcttgatgatcctatgttttgtaacttgttaaagcaagttcatgctaaggttttgaaactcgggcttcaacacgagatcactatatgcaatgcgatgatcagctcttatgcagattgtgggtcagtatcagatgcaaagagagtttttgatggcttgggtggctcaaaagacttgatttcgtggaattcgatgattgcaggtttctctaaacatgagctaaaggaatctgcttttgaactgtttattcaaatgcaaagacattgggtcgaaaccgacatttatacttacaccggcttgttaagcgcttgctctggcgaagaacatcaaatttttgggaagtctttgcatggtatggtaataaagaagggattggaacaagtaacttctgcaacaaatgcattgatctctatgtatattcagtttcctacaggcaccatggaagatgctctgtctctatttgaatccttaaaatctaaggatcttatctcttggaattcgatcattacagggttcgcccagaagggtctcagcgaggatgcggtaaagttctttagctacttaagatcctcagagataaaagtcgacgattacgccttctctgcacttctcagatcatgctcggacctagcaacactccaattaggtcagcagatccacgcgctcgccactaaatcaggcttcgtatcaaacgagtttgtaatcagttctctgatcgtgatgtactcaaaatgtggcataatcgagagtgcacgaaaatgcttccaacagatttcctccaaacacagcacagtagcttggaacgcaatgattcttggatacgctcaacatggtttaggccaagtctctcttgatctcttctcccaaatgtgtaaccaaaacgtgaagctagaccatgtaaccttcacagcaatccttacagcttgtagccacaccggtttaatacaagagggactcgagttgcttaatttaatggaaccggtttacaaaatccaacctcgaatggaacattacgcagctgcagttgatctcttaggcagagcagggctcgtgaacaaagcgaaagagttaatcgaatcaatgccgttgaatcctgatccaatggtattgaaaactttccttggagtttgcagggcttgtggagagatcgaaatggctactcaagtggctaaccatttgctagagattgaaccagaagatcattttacgtatgtttcgttgtctcatatgtatagtgatctcaagaaatgggaagagaaagcaagtgtgaagaagatgatgaaggagagaggtgtaaagaaagttccaggttggagctggattgagattagaaatcaagttaaggcctttaatgctgaagatcgatcaaatcctctttgtcaagatatatatatgatgattaaagacttgactcaggaaatgcagtggcttgattctgataatggggttgatgcagattcacttcatgcttaa

SEQ ID NO: 75633 - protein, 701 aa, Arabidopsis thaliana
  peptide (1)..(701): Ceres Seq. ID no. 6446001
MKALLASLLESSLNSFQKLSLTHCYAIKCGSISDIYVSNRILDSYIKFGFLGYANMLFDEMPKRDSVSWNTMISGYTSCGKLEDAWCLFTCMKRSGSDVDGYSFSRLLKGIASVKRFDLGEQVHGLVIKGGYECNVYVGSSLVDMYAKCERVEDAFEAFKEISEPNSVSWNALIAGFVQVRDIKTAFWLLGLMEMKAAVTMDAGTFAPLLTLLDDPMFCNLLKQVHAKVLKLGLQHEITICNAMISSYADCGSVSDAKRVFDGLGGSKDLISWNSMIAGFSKHELKESAFELFIQMQRHWVETDIYTYTGLLSACSGEEHQIFGKSLHGMVIKKGLEQVTSATNALISMYIQFPTGTMEDALSLFESLKSKDLISWNSIITGFAQKGLSEDAVKFFSYLRSSEIKVDDYAFSALLRSCSDLATLQLGQQIHALATKSGFVSNEFVISSLIVMYSKCGIIESARKCFQQISSKHSTVAWNAMILGYAQHGLGQVSLDLFSQMCNQNVKLDHVTFTAILTACSHTGLIQEGLELLNLMEPVYKIQPRMEHYAAAVDLLGRAGLVNKAKELIESMPLNPDPMVLKTFLGVCRACGEIEMATQVANHLLEIEPEDHFTYVSLSHMYSDLKKWEEKASVKKMMKERGVKKVPGWSWIEIRNQVKAFNAEDRSNPLCQDIYMMIKDLTQEMQWLDSDNGVDADSLHA

SEQ ID NO: 75634 - protein, 646 aa, Arabidopsis thaliana; identical to SEQ ID NO: 73290
  peptide (1)..(646): Ceres Seq. ID no. 6446002

SEQ ID NO: 75635 - protein, 641 aa, Arabidopsis thaliana; identical to SEQ ID NO: 73291
  peptide (1)..(641): Ceres Seq. ID no. 6446003

SEQ ID NO: 75636 - DNA, 1338 bp, Arabidopsis thaliana
  misc_feature (1)..(1338): Ceres Seq. ID no. 6446016
  misc_feature (1)..(1338): Ortholog of  Ceres SEQ ID NO 13594209 as cited in SEQ ID NO 59089
  misc_feature (1)..(1338): Ortholog of  Ceres SEQ ID NO 13502874 as cited in SEQ ID NO 66298
  misc_feature (1)..(1338): Ortholog of  Ceres SEQ ID NO 12614124 as cited in SEQ ID NO 68392
atggttaacattttgattctatcacttctcttccttgtcatcttgcttcttctcaccgccttcaaacgagcaaagcggcggcaacatcgaccaataccatctcctcctggttttccgatcataggaaacttacatcagctcggagaattaccacatcagtctctatggaagctctcaaagaagtatggtcctgtgatgcttttgaatcttggaaaggtcccaacagtcatactttcttcgtccgagacagcgaaacaagctctaagagactatgatctccattgttgtagccgtccttccttagcagggggaagagagctctcttacaacaaccgagacatatctttctctccttacaatgattattggaaagagctaaggaagctctgtactcaagagctcttcagtgctaaaaatattcactcaacacaacacatcaaggacgaggaggtcaagaaacttatcgtttcaatcgcggaatcagcttctttaaagactccgataaacttgaacaagaagtgtcttgctttaactgtaagtatagtatgtaggatagcatttggtgtgagttttgaaggaactgtgcttagcaatgacagtttcaacaagttaatccgtgaagcattcgaaatgttgggaagtttctctgcctcagattttataccgtacataggttggatcatcgatcggttcactggcttgcaagggcggagagaaaaaagcgacattcttctagcggggatagaaacttctgcaggaaccatggcatggacgatggcagaacttgcgaagaacccactagtgatgaggaaagttcaatctgaaatccgaaacaaatttgagaacagagaactaatcagcttcgaagacatagagcagcttcattacctgaaaacggtgattaaagaaacatggaggctacatcctccagcacctcttcttcttccaagagaagtaatgtctgagtttgagatcaacggctacacgatgcaacccaagacacagattcatgtcaatgtatgggctatcggacgtgatcccaatacctggaaagatcccgaggagtttcttccagagaggtttattgatagtaatattgatacaaaaggacagaactttgagttgctaccgtttggaggcggcaggagaatgtgtcctgcaatgtacatggggacaacaatggtggagtttggtcttgcgaatcttttgtatcattttgattggaagttaccagaaggcatgaaggttgaagatatggacatggaagaagctcctggactcactgtcaacaagaaaaatgaccttctacttgtgccagtgaagtatttagacaactga

SEQ ID NO: 75637 - protein, 445 aa, Arabidopsis thaliana
  peptide (1)..(445): Ceres Seq. ID no. 6446017
MVNILILSLLFLVILLLLTAFKRAKRRQHRPIPSPPGFPIIGNLHQLGELPHQSLWKLSKKYGPVMLLNLGKVPTVILSSSETAKQALRDYDLHCCSRPSLAGGRELSYNNRDISFSPYNDYWKELRKLCTQELFSAKNIHSTQHIKDEEVKKLIVSIAESASLKTPINLNKKCLALTVSIVCRIAFGVSFEGTVLSNDSFNKLIREAFEMLGSFSASDFIPYIGWIIDRFTGLQGRREKSDILLAGIETSAGTMAWTMAELAKNPLVMRKVQSEIRNKFENRELISFEDIEQLHYLKTVIKETWRLHPPAPLLLPREVMSEFEINGYTMQPKTQIHVNVWAIGRDPNTWKDPEEFLPERFIDSNIDTKGQNFELLPFGGGRRMCPAMYMGTTMVEFGLANLLYHFDWKLPEGMKVEDMDMEEAPGLTVNKKNDLLLVPVKYLDN

SEQ ID NO: 75638 - protein, 380 aa, Arabidopsis thaliana
  peptide (1)..(380): Ceres Seq. ID no. 6446018
MLLNLGKVPTVILSSSETAKQALRDYDLHCCSRPSLAGGRELSYNNRDISFSPYNDYWKELRKLCTQELFSAKNIHSTQHIKDEEVKKLIVSIAESASLKTPINLNKKCLALTVSIVCRIAFGVSFEGTVLSNDSFNKLIREAFEMLGSFSASDFIPYIGWIIDRFTGLQGRREKSDILLAGIETSAGTMAWTMAELAKNPLVMRKVQSEIRNKFENRELISFEDIEQLHYLKTVIKETWRLHPPAPLLLPREVMSEFEINGYTMQPKTQIHVNVWAIGRDPNTWKDPEEFLPERFIDSNIDTKGQNFELLPFGGGRRMCPAMYMGTTMVEFGLANLLYHFDWKLPEGMKVEDMDMEEAPGLTVNKKNDLLLVPVKYLDN

SEQ ID NO: 75639 - protein, 235 aa, Arabidopsis thaliana
  peptide (1)..(235): Ceres Seq. ID no. 6446019
MLGSFSASDFIPYIGWIIDRFTGLQGRREKSDILLAGIETSAGTMAWTMAELAKNPLVMRKVQSEIRNKFENRELISFEDIEQLHYLKTVIKETWRLHPPAPLLLPREVMSEFEINGYTMQPKTQIHVNVWAIGRDPNTWKDPEEFLPERFIDSNIDTKGQNFELLPFGGGRRMCPAMYMGTTMVEFGLANLLYHFDWKLPEGMKVEDMDMEEAPGLTVNKKNDLLLVPVKYLDN

SEQ ID NO: 75640 - DNA, 3003 bp, Arabidopsis thaliana
  misc_feature (1)..(3003): Ceres Seq. ID no. 6446020
  misc_feature (1)..(3003): Ortholog of  Ceres SEQ ID NO 15170151 as cited in SEQ ID NO 53069
  misc_feature (1)..(3003): Ortholog of  Ceres SEQ ID NO 13594209 as cited in SEQ ID NO 59089
  misc_feature (1)..(3003): Ortholog of  Ceres SEQ ID NO 14313084 as cited in SEQ ID NO 59183
  misc_feature (1)..(3003): Ortholog of  Ceres SEQ ID NO 14316039 as cited in SEQ ID NO 62062
  misc_feature (1)..(3003): Ortholog of  Ceres SEQ ID NO 14308041 as cited in SEQ ID NO 62601
  misc_feature (1)..(3003): Ortholog of  Ceres SEQ ID NO 14303546 as cited in SEQ ID NO 64893
  misc_feature (1)..(3003): Ortholog of  Ceres SEQ ID NO 15176783 as cited in SEQ ID NO 65590
  misc_feature (1)..(3003): Ortholog of  Ceres SEQ ID NO 14308007 as cited in SEQ ID NO 65760
  misc_feature (1)..(3003): Ortholog of  Ceres SEQ ID NO 14308019 as cited in SEQ ID NO 65849
  misc_feature (1)..(3003): Ortholog of  Ceres SEQ ID NO 15170163 as cited in SEQ ID NO 66262
  misc_feature (1)..(3003): Ortholog of  Ceres SEQ ID NO 13502874 as cited in SEQ ID NO 66298
  misc_feature (1)..(3003): Ortholog of  Ceres SEQ ID NO 14307944 as cited in SEQ ID NO 66503
  misc_feature (1)..(3003): Ortholog of  Ceres SEQ ID NO 12614124 as cited in SEQ ID NO 68392
atggctcacatttggcttctaccacttatctttctcgtctgtattcttctggccgttttcaaccacaagaaacatccgaaatatcgacagtttccatgtcctcctggcttcccgatcataggaaacttacatcagatcggagaattaccgcatcagactctatggaaactctcaaagaagtatggtccggtgatgcatttgatgcttggaagagtcccaacagtcgtagtttcttcttcggatacagcaagacaagttttgagagttcatgacctccattgttgtactcgtccaagcttgtcagggccaagagagctttcgtacaactatctggacattgctttctctccttatgatgattattggaaagaagttaggaagctctgtgttcaagaacttttcagtactaaacaagttcactcgattcaacctattaaggacgaggaggtcaagaaaatgatcgattcaattgcggaatcagcctctcagaagaatccggttaacttgaacaataagtgtcttgaattaacagtaagtgtagtatgcaggacagcttttggggttagttttgagggaactgtgctcaacagtgacagattcaacaaaatagtccgcgaggcgctcgagatgttgggaagcttttctgccgcggattttattccgtatgtcggatggatcatcgatgtgttgacgggtttgcaaggaaggagagaaagaagcaagagagatctcaatgcattctttgaacaaatgtttgatttgcataaagagggaaagaaagaagggaatgaagattttgtggacttgctcttaaggttggagaaagaagaggcagttcttggaaatgataaacttacaagaaaccatatcaaagcaatcttgctggatgttctacttgcgggaatcgatacttctgcaataacaatgacatgggcaatgacagaacttgcaagaaatccacgagtgatgaagaaagttcaatctgaaataagaactcaaatggggaacagatcaatgataagtttcgaagacatggatcagctagagtatctgaaaatggtgatcaaagaaacatggaggctacatcctacaacacctcttttgcttccaagagaagcaatgtctgaatttgatatcaacggctacactattcctgtcaagacacggcttcatgtgaatgtttgggctattggtcgtgatcctgatacttggaaagaccctgaagtgtttctcccggagaggtttatggataataacattgatgcaaaaggacaacattttgagctgttaccgtttgggggcggtcggagaatctgtcctgcaatatacatggggacaacaatggttgagtttggtctagctaatctcttgtatcattttgactggaagttaccagaaggcgtggaggttaaagatatcgacgtggaagaagctcctggactcactgtaaacaagaaaaacgagctcctacttgtgccagagatgagaagatcgtgtgaaatgacaaacatttggcttctgtcacttatcttcgtcatttgtattcttgtagccgtgttcaaccacaagaatcggaggaattatcaacggacaccaccgtctcctcctggctgtcctatcatcggaaacttgcatcaactcggagaattaccacatcaatctctatggaaactctccaaaaagtatggccctgtgatgcttttaaagcttggaagagtaccaacagtcatagtttcttcctctgaaacagcaaaacaagctttgaaaatccatgacctccattgttgtagtcgtccaggctttgcaggggcaagagagctctcttacaactatctagacattgctttttctccttatgatgattattggaaagaagtaaggaagctcgctgttcaagaacttttcagtagtaaacaagttcactctatacaaccgataaaggacgaggaggtcaagaaactgatcgattcaatctccgaatcagctgctcagaagactccgatcaacttgaacaagacattgctggctttaactgttagtgtggtctgcaggacagcgtttagtgtgaattttgagggaactgtgctcaacagtgaacgattcaataacatagtccgtgaggcgctcgagatgttgggaagcttttctgcctcagatttcattccgtatgtcggaaggatcatcgacttgttgacgggtttgcaaggacggcgagagagaagcatgagagatctcgatgctttctatgaacaaatgtttgatctgcataaacagaaaaaggaagaaggtagtgaagactttgtggacttgctgttgaggttggagaaagaagaagctgttcttggaaatgacaagctcactagaaaccatatcaaagcgatattgatggatgttcttctagcaggaatggatacttctgcaataaccatgacatgggcaatggcagaactcgcaaagaatccacgagtgatgaaaaaagttcaatccgaaatcagaagtcaaatcaagaacaaagaaagaatcagctttgatgacactgataagcttgagtacctcaaaatggttatcaaagaaacatggaggttacatcctacaacacctcttctaatcccaagggaagcaatgtctgaatttgagatcaacggctacacgattccagttaagacacggcttcacgtgaatgtatgggctattggtcgtgatcccgatacctggaaagaccctgaagtgtttctcccggagaggtttacggataataatattgatgcaaaaggacagcattttgagctgttaccgtttggaggcggccggagaatgtgtcctgcagtttatatggggacaacaatggtcgagtttggtttggctaatcttttgtatcattttgattggaagttaccagaaggcatgaaggttgacgatattgacatggaagaagctcccggactcactgtcaacaagaaaaacgagcttatacttgtgccaacgaagtttctagatccttaa

SEQ ID NO: 75641 - protein, 1000 aa, Arabidopsis thaliana
  peptide (1)..(1000): Ceres Seq. ID no. 6446021
MAHIWLLPLIFLVCILLAVFNHKKHPKYRQFPCPPGFPIIGNLHQIGELPHQTLWKLSKKYGPVMHLMLGRVPTVVVSSSDTARQVLRVHDLHCCTRPSLSGPRELSYNYLDIAFSPYDDYWKEVRKLCVQELFSTKQVHSIQPIKDEEVKKMIDSIAESASQKNPVNLNNKCLELTVSVVCRTAFGVSFEGTVLNSDRFNKIVREALEMLGSFSAADFIPYVGWIIDVLTGLQGRRERSKRDLNAFFEQMFDLHKEGKKEGNEDFVDLLLRLEKEEAVLGNDKLTRNHIKAILLDVLLAGIDTSAITMTWAMTELARNPRVMKKVQSEIRTQMGNRSMISFEDMDQLEYLKMVIKETWRLHPTTPLLLPREAMSEFDINGYTIPVKTRLHVNVWAIGRDPDTWKDPEVFLPERFMDNNIDAKGQHFELLPFGGGRRICPAIYMGTTMVEFGLANLLYHFDWKLPEGVEVKDIDVEEAPGLTVNKKNELLLVPEMRRSCEMTNIWLLSLIFVICILVAVFNHKNRRNYQRTPPSPPGCPIIGNLHQLGELPHQSLWKLSKKYGPVMLLKLGRVPTVIVSSSETAKQALKIHDLHCCSRPGFAGARELSYNYLDIAFSPYDDYWKEVRKLAVQELFSSKQVHSIQPIKDEEVKKLIDSISESAAQKTPINLNKTLLALTVSVVCRTAFSVNFEGTVLNSERFNNIVREALEMLGSFSASDFIPYVGRIIDLLTGLQGRRERSMRDLDAFYEQMFDLHKQKKEEGSEDFVDLLLRLEKEEAVLGNDKLTRNHIKAILMDVLLAGMDTSAITMTWAMAELAKNPRVMKKVQSEIRSQIKNKERISFDDTDKLEYLKMVIKETWRLHPTTPLLIPREAMSEFEINGYTIPVKTRLHVNVWAIGRDPDTWKDPEVFLPERFTDNNIDAKGQHFELLPFGGGRRMCPAVYMGTTMVEFGLANLLYHFDWKLPEGMKVDDIDMEEAPGLTVNKKNELILVPTKFLDP

SEQ ID NO: 75642 - protein, 936 aa, Arabidopsis thaliana
  peptide (1)..(936): Ceres Seq. ID no. 6446022
MHLMLGRVPTVVVSSSDTARQVLRVHDLHCCTRPSLSGPRELSYNYLDIAFSPYDDYWKEVRKLCVQELFSTKQVHSIQPIKDEEVKKMIDSIAESASQKNPVNLNNKCLELTVSVVCRTAFGVSFEGTVLNSDRFNKIVREALEMLGSFSAADFIPYVGWIIDVLTGLQGRRERSKRDLNAFFEQMFDLHKEGKKEGNEDFVDLLLRLEKEEAVLGNDKLTRNHIKAILLDVLLAGIDTSAITMTWAMTELARNPRVMKKVQSEIRTQMGNRSMISFEDMDQLEYLKMVIKETWRLHPTTPLLLPREAMSEFDINGYTIPVKTRLHVNVWAIGRDPDTWKDPEVFLPERFMDNNIDAKGQHFELLPFGGGRRICPAIYMGTTMVEFGLANLLYHFDWKLPEGVEVKDIDVEEAPGLTVNKKNELLLVPEMRRSCEMTNIWLLSLIFVICILVAVFNHKNRRNYQRTPPSPPGCPIIGNLHQLGELPHQSLWKLSKKYGPVMLLKLGRVPTVIVSSSETAKQALKIHDLHCCSRPGFAGARELSYNYLDIAFSPYDDYWKEVRKLAVQELFSSKQVHSIQPIKDEEVKKLIDSISESAAQKTPINLNKTLLALTVSVVCRTAFSVNFEGTVLNSERFNNIVREALEMLGSFSASDFIPYVGRIIDLLTGLQGRRERSMRDLDAFYEQMFDLHKQKKEEGSEDFVDLLLRLEKEEAVLGNDKLTRNHIKAILMDVLLAGMDTSAITMTWAMAELAKNPRVMKKVQSEIRSQIKNKERISFDDTDKLEYLKMVIKETWRLHPTTPLLIPREAMSEFEINGYTIPVKTRLHVNVWAIGRDPDTWKDPEVFLPERFTDNNIDAKGQHFELLPFGGGRRMCPAVYMGTTMVEFGLANLLYHFDWKLPEGMKVDDIDMEEAPGLTVNKKNELILVPTKFLDP

SEQ ID NO: 75643 - protein, 933 aa, Arabidopsis thaliana
  peptide (1)..(933): Ceres Seq. ID no. 6446023
MLGRVPTVVVSSSDTARQVLRVHDLHCCTRPSLSGPRELSYNYLDIAFSPYDDYWKEVRKLCVQELFSTKQVHSIQPIKDEEVKKMIDSIAESASQKNPVNLNNKCLELTVSVVCRTAFGVSFEGTVLNSDRFNKIVREALEMLGSFSAADFIPYVGWIIDVLTGLQGRRERSKRDLNAFFEQMFDLHKEGKKEGNEDFVDLLLRLEKEEAVLGNDKLTRNHIKAILLDVLLAGIDTSAITMTWAMTELARNPRVMKKVQSEIRTQMGNRSMISFEDMDQLEYLKMVIKETWRLHPTTPLLLPREAMSEFDINGYTIPVKTRLHVNVWAIGRDPDTWKDPEVFLPERFMDNNIDAKGQHFELLPFGGGRRICPAIYMGTTMVEFGLANLLYHFDWKLPEGVEVKDIDVEEAPGLTVNKKNELLLVPEMRRSCEMTNIWLLSLIFVICILVAVFNHKNRRNYQRTPPSPPGCPIIGNLHQLGELPHQSLWKLSKKYGPVMLLKLGRVPTVIVSSSETAKQALKIHDLHCCSRPGFAGARELSYNYLDIAFSPYDDYWKEVRKLAVQELFSSKQVHSIQPIKDEEVKKLIDSISESAAQKTPINLNKTLLALTVSVVCRTAFSVNFEGTVLNSERFNNIVREALEMLGSFSASDFIPYVGRIIDLLTGLQGRRERSMRDLDAFYEQMFDLHKQKKEEGSEDFVDLLLRLEKEEAVLGNDKLTRNHIKAILMDVLLAGMDTSAITMTWAMAELAKNPRVMKKVQSEIRSQIKNKERISFDDTDKLEYLKMVIKETWRLHPTTPLLIPREAMSEFEINGYTIPVKTRLHVNVWAIGRDPDTWKDPEVFLPERFTDNNIDAKGQHFELLPFGGGRRMCPAVYMGTTMVEFGLANLLYHFDWKLPEGMKVDDIDMEEAPGLTVNKKNELILVPTKFLDP

SEQ ID NO: 75644 - DNA, 1050 bp, Arabidopsis thaliana
  misc_feature (1)..(1050): Ceres Seq. ID no. 6447930
  misc_feature (1)..(1050): Ortholog of  Ceres SEQ ID NO 14303263 as cited in SEQ ID NO 1224
  misc_feature (1)..(1050): Ortholog of  Ceres SEQ ID NO 13597380 as cited in SEQ ID NO 64054
  misc_feature (1)..(1050): Ortholog of  Ceres SEQ ID NO 12625474 as cited in SEQ ID NO 64169
  misc_feature (1)..(1050): Ortholog of  Ceres SEQ ID NO 13597502 as cited in SEQ ID NO 64681
atgaagcttcaaattatatggctcgctttggttttaatcgccgttgagacttatgcagttaagcaagggaaaaacgtaacgatccccgcgctaatagtttttggagattcaataatggatacaggaaataacaataatcttcccactcttcttaaatgtaacttccctccatacggtaaagattatcctggaggctttgccactggaagattttctgatggaagagttccttctgatcttattgcggaaaaattgggattggttaagacattaccagcatatatgaatccatatttgaagccacatgatcttcttaaaggtgtaacatttgcatctggaggaaccggttatgatccattgacagcaaaaattatgtcagtgatatcggtgtgggatcaactcatatatttcaaagaatatatatcaaagatcaagaggcatttcggagaagaaaaagccaaagatatcttggaacatagtttctttctcgtggtgtctagtagcaatgaccttgctcacacttatttagctcaagctcatagatatgatcgtacctcttatgccaatttcttggctgactctgctgttcatttcgtgagagaattacataagcttggagctcgaaaaattggagtgtttagtgcagtccctgttggttgtgttccactccaaagaacagtttttggaggtttctttacaagaggatgtaatcaacctctaaacaatatggcaaaacaatttaacgcaagactttctccagcactagattctttagataaagagttggatggtgttattatttacattaatgtttatgatactctttttgacatgatccaacatcctaaaaaatatggttttgaggtggctgatagaggatgttgcggtaaaggactgctcacgatctcctatttatgtaactcattgaacccatttacgtgttctaactcttcagcttatatattttgggatagctatcatccaagtgaaagagcttatcaagttattgtcgacaatttacttgacaaatatttgagcaaagtatattga

SEQ ID NO: 75645 - protein, 349 aa, Arabidopsis thaliana
  peptide (1)..(349): Ceres Seq. ID no. 6447931
MKLQIIWLALVLIAVETYAVKQGKNVTIPALIVFGDSIMDTGNNNNLPTLLKCNFPPYGKDYPGGFATGRFSDGRVPSDLIAEKLGLVKTLPAYMNPYLKPHDLLKGVTFASGGTGYDPLTAKIMSVISVWDQLIYFKEYISKIKRHFGEEKAKDILEHSFFLVVSSSNDLAHTYLAQAHRYDRTSYANFLADSAVHFVRELHKLGARKIGVFSAVPVGCVPLQRTVFGGFFTRGCNQPLNNMAKQFNARLSPALDSLDKELDGVIIYINVYDTLFDMIQHPKKYGFEVADRGCCGKGLLTISYLCNSLNPFTCSNSSAYIFWDSYHPSERAYQVIVDNLLDKYLSKVY

SEQ ID NO: 75646 - protein, 311 aa, Arabidopsis thaliana
  peptide (1)..(311): Ceres Seq. ID no. 6447932
MDTGNNNNLPTLLKCNFPPYGKDYPGGFATGRFSDGRVPSDLIAEKLGLVKTLPAYMNPYLKPHDLLKGVTFASGGTGYDPLTAKIMSVISVWDQLIYFKEYISKIKRHFGEEKAKDILEHSFFLVVSSSNDLAHTYLAQAHRYDRTSYANFLADSAVHFVRELHKLGARKIGVFSAVPVGCVPLQRTVFGGFFTRGCNQPLNNMAKQFNARLSPALDSLDKELDGVIIYINVYDTLFDMIQHPKKYGFEVADRGCCGKGLLTISYLCNSLNPFTCSNSSAYIFWDSYHPSERAYQVIVDNLLDKYLSKVY

SEQ ID NO: 75647 - protein, 255 aa, Arabidopsis thaliana
  peptide (1)..(255): Ceres Seq. ID no. 6447933
MNPYLKPHDLLKGVTFASGGTGYDPLTAKIMSVISVWDQLIYFKEYISKIKRHFGEEKAKDILEHSFFLVVSSSNDLAHTYLAQAHRYDRTSYANFLADSAVHFVRELHKLGARKIGVFSAVPVGCVPLQRTVFGGFFTRGCNQPLNNMAKQFNARLSPALDSLDKELDGVIIYINVYDTLFDMIQHPKKYGFEVADRGCCGKGLLTISYLCNSLNPFTCSNSSAYIFWDSYHPSERAYQVIVDNLLDKYLSKVY

SEQ ID NO: 75648 - DNA, 1437 bp, Arabidopsis thaliana
  misc_feature (1)..(1437): Ceres Seq. ID no. 6448031
  misc_feature (1)..(1437): Ortholog of  Ceres SEQ ID NO 13654166 as cited in SEQ ID NO 68381
  misc_feature (1)..(1437): Ortholog of  Ceres SEQ ID NO 13599720 as cited in SEQ ID NO 0
atggccgatgatgagtcaagaaccatcctgttggagaagaacgaagactgccctggctgtatcattgatcgaaccaagcaacagcaacgaggcgttccttacttgcacctctccttcatctggctcgtgtcactctgcactgctcttccaatatcttcactgtttccatatatttatttcatgatcagagacttccatatagcaaaacaagaagaagatattggtttctatgctggttttgttggatcatcattcatgattggaagagctttgacatctattttctgggggaaattagctgatcgttatggtcgcaaacctattattctcattgggacattctcagtgatcatattcaataccctctttggtctaagcacaagtttctggcttgcaatttccgttagatttcttcttggctgcttcaattgtttacttggagttataagagcatatgcttcagaagtcgttagcgaagagtataacgctcttagtctttctgtcgtgagtacatcaagaggtataggattgatactaggtcctgctattggaggttatcttgctcagcctgcagaaaagtacccaaatatattttcccagagttcagtttttgggaggtttccatattttctgccgagcttagttatatccgtctatgctactgcggttctcatcgcttgctggtggcttcctgaaactcttcatacacgttgtagaattgcacaagggagacttaatccaacagagctaaacgatgatgaaagtagaggaggaggacttgatgaacagaaaataattaataagccaagtctcttgaggaatcgtccattgatggctatcatcattgtttattgtgttttttccctccaagagatagcatacaatgagatattctcactctgggctgttagtgaccgaagctatggaggattgagcttctcatctcaagatgttggtgaagttttagctatatcaggacttgggcttctggtgtttcaacttttggtatacccgccattggagaaatccgtgggactccttgcggttatacgtctttctgcggtattgctgataccgctgctttcgtgttacccctatatagctttgctttctggggtgactctccatttggtgataaattgtgcatccatcataaaaaacgctttgtctatctcacttgtcacaggactgtttatcatgttgaacaaagctgtgcctcagaatcagagaggtgctgctaatggcatttctatgaccgcgatgtctgttttcaaatcatttggccctgccggtggaggggtcttattctcatgggcgcaaaagagacaagacgctacattccttccaggtgatgagatggtgttcttggtgttgaatttggtacagctcgtaggattgatactaacgttcataccttacatttcccaaatccagtaa

SEQ ID NO: 75649 - protein, 478 aa, Arabidopsis thaliana
  peptide (1)..(478): Ceres Seq. ID no. 6448032
MADDESRTILLEKNEDCPGCIIDRTKQQQRGVPYLHLSFIWLVSLCTALPISSLFPYIYFMIRDFHIAKQEEDIGFYAGFVGSSFMIGRALTSIFWGKLADRYGRKPIILIGTFSVIIFNTLFGLSTSFWLAISVRFLLGCFNCLLGVIRAYASEVVSEEYNALSLSVVSTSRGIGLILGPAIGGYLAQPAEKYPNIFSQSSVFGRFPYFLPSLVISVYATAVLIACWWLPETLHTRCRIAQGRLNPTELNDDESRGGGLDEQKIINKPSLLRNRPLMAIIIVYCVFSLQEIAYNEIFSLWAVSDRSYGGLSFSSQDVGEVLAISGLGLLVFQLLVYPPLEKSVGLLAVIRLSAVLLIPLLSCYPYIALLSGVTLHLVINCASIIKNALSISLVTGLFIMLNKAVPQNQRGAANGISMTAMSVFKSFGPAGGGVLFSWAQKRQDATFLPGDEMVFLVLNLVQLVGLILTFIPYISQIQ

SEQ ID NO: 75650 - protein, 418 aa, Arabidopsis thaliana
  peptide (1)..(418): Ceres Seq. ID no. 6448033
MIRDFHIAKQEEDIGFYAGFVGSSFMIGRALTSIFWGKLADRYGRKPIILIGTFSVIIFNTLFGLSTSFWLAISVRFLLGCFNCLLGVIRAYASEVVSEEYNALSLSVVSTSRGIGLILGPAIGGYLAQPAEKYPNIFSQSSVFGRFPYFLPSLVISVYATAVLIACWWLPETLHTRCRIAQGRLNPTELNDDESRGGGLDEQKIINKPSLLRNRPLMAIIIVYCVFSLQEIAYNEIFSLWAVSDRSYGGLSFSSQDVGEVLAISGLGLLVFQLLVYPPLEKSVGLLAVIRLSAVLLIPLLSCYPYIALLSGVTLHLVINCASIIKNALSISLVTGLFIMLNKAVPQNQRGAANGISMTAMSVFKSFGPAGGGVLFSWAQKRQDATFLPGDEMVFLVLNLVQLVGLILTFIPYISQIQ

SEQ ID NO: 75651 - protein, 393 aa, Arabidopsis thaliana
  peptide (1)..(393): Ceres Seq. ID no. 6448034
MIGRALTSIFWGKLADRYGRKPIILIGTFSVIIFNTLFGLSTSFWLAISVRFLLGCFNCLLGVIRAYASEVVSEEYNALSLSVVSTSRGIGLILGPAIGGYLAQPAEKYPNIFSQSSVFGRFPYFLPSLVISVYATAVLIACWWLPETLHTRCRIAQGRLNPTELNDDESRGGGLDEQKIINKPSLLRNRPLMAIIIVYCVFSLQEIAYNEIFSLWAVSDRSYGGLSFSSQDVGEVLAISGLGLLVFQLLVYPPLEKSVGLLAVIRLSAVLLIPLLSCYPYIALLSGVTLHLVINCASIIKNALSISLVTGLFIMLNKAVPQNQRGAANGISMTAMSVFKSFGPAGGGVLFSWAQKRQDATFLPGDEMVFLVLNLVQLVGLILTFIPYISQIQ

SEQ ID NO: 75652 - DNA, 1158 bp, Arabidopsis thaliana
  misc_feature (1)..(1158): Ceres Seq. ID no. 6448306
  misc_feature (1)..(1158): Ortholog of  Ceres SEQ ID NO 13595351 as cited in SEQ ID NO 55934
  misc_feature (1)..(1158): Ortholog of  Ceres SEQ ID NO 13639645 as cited in SEQ ID NO 57488
atggagagtacggtggaaagagaggcgtggaaagctcacgtggcgatgatcggtgtgcaattgttcaacggaggatatcatgtcattaccaaagtggctctcaacgttggtgtaaaccaacttgtcttctgtgtctttcgtgatctcattgctctctccattcttgctcctcttgcttatatccgtgataagagaacaagacctcctttgaatcgacagtttctcttagctttcttcttccttggtttaacagggatatttggtaatcagcttttgttcctcattggtctgaattacaccaatccaacttatgctgcagccattcagccgtcgatcccggtttttactttcatcttggctctcattatgggaacagagagactgaatttattcaagctagaaggtcaagctaaggtaggaggcacactgatttgtgtcgctggggcggtgctgatggttttgtttcgtggactggctttgtttggggaaacagaggctgagtccttgggtcatggtgaatcaagacacactgaaacatctggacacttcatgtctggcttttttaatggacttgggcgatggaatttgggagttttgtgtttgattgggaattgcacttgcatggctgcttttcttgctattcaggctccggtcttaaagaagtatccggcgaatctttcagtcacagcatactcgtatttctttgggaccatgtttatggtgacatctgcttttttcatgactaatgagtcgacgaactggagtctcacaagatccgagttctttgcagttgtctacgcaggagtaatcgcgtctgctctcaactatggtctcttgacatggtcaaataagatcttgggtccttccttggttgctctctataatcctcttcaacccgcagcctcagctttcttgtccagaatcttccttggaagccctatctacttggggagcattttaggcggatgtgcaatcatagcaggtctttatagtgtcacctgggcatcttacaaagaaaagaaagcggcagcagcaatggctgtgatcccgatcacctcaaaggaagctgaacccttgatctacaaggaccataaaaacaaaccaataggacatctattcacaaaatctcccatctcttcaccaaaatccgatgattga

SEQ ID NO: 75653 - protein, 385 aa, Arabidopsis thaliana
  peptide (1)..(385): Ceres Seq. ID no. 6448307
MESTVEREAWKAHVAMIGVQLFNGGYHVITKVALNVGVNQLVFCVFRDLIALSILAPLAYIRDKRTRPPLNRQFLLAFFFLGLTGIFGNQLLFLIGLNYTNPTYAAAIQPSIPVFTFILALIMGTERLNLFKLEGQAKVGGTLICVAGAVLMVLFRGLALFGETEAESLGHGESRHTETSGHFMSGFFNGLGRWNLGVLCLIGNCTCMAAFLAIQAPVLKKYPANLSVTAYSYFFGTMFMVTSAFFMTNESTNWSLTRSEFFAVVYAGVIASALNYGLLTWSNKILGPSLVALYNPLQPAASAFLSRIFLGSPIYLGSILGGCAIIAGLYSVTWASYKEKKAAAAMAVIPITSKEAEPLIYKDHKNKPIGHLFTKSPISSPKSDD

SEQ ID NO: 75654 - protein, 370 aa, Arabidopsis thaliana
  peptide (1)..(370): Ceres Seq. ID no. 6448308
MIGVQLFNGGYHVITKVALNVGVNQLVFCVFRDLIALSILAPLAYIRDKRTRPPLNRQFLLAFFFLGLTGIFGNQLLFLIGLNYTNPTYAAAIQPSIPVFTFILALIMGTERLNLFKLEGQAKVGGTLICVAGAVLMVLFRGLALFGETEAESLGHGESRHTETSGHFMSGFFNGLGRWNLGVLCLIGNCTCMAAFLAIQAPVLKKYPANLSVTAYSYFFGTMFMVTSAFFMTNESTNWSLTRSEFFAVVYAGVIASALNYGLLTWSNKILGPSLVALYNPLQPAASAFLSRIFLGSPIYLGSILGGCAIIAGLYSVTWASYKEKKAAAAMAVIPITSKEAEPLIYKDHKNKPIGHLFTKSPISSPKSDD

SEQ ID NO: 75655 - protein, 263 aa, Arabidopsis thaliana
  peptide (1)..(263): Ceres Seq. ID no. 6448309
MGTERLNLFKLEGQAKVGGTLICVAGAVLMVLFRGLALFGETEAESLGHGESRHTETSGHFMSGFFNGLGRWNLGVLCLIGNCTCMAAFLAIQAPVLKKYPANLSVTAYSYFFGTMFMVTSAFFMTNESTNWSLTRSEFFAVVYAGVIASALNYGLLTWSNKILGPSLVALYNPLQPAASAFLSRIFLGSPIYLGSILGGCAIIAGLYSVTWASYKEKKAAAAMAVIPITSKEAEPLIYKDHKNKPIGHLFTKSPISSPKSDD

SEQ ID NO: 75656 - DNA, 1296 bp, Arabidopsis thaliana
  misc_feature (1)..(1296): Ceres Seq. ID no. 6448386
  misc_feature (1)..(1296): Ortholog of  Ceres SEQ ID NO 13654989 as cited in SEQ ID NO 63117
  misc_feature (1)..(1296): Ortholog of  Ceres SEQ ID NO 13655640 as cited in SEQ ID NO 63844
  misc_feature (1)..(1296): Ortholog of  Ceres SEQ ID NO 13584744 as cited in SEQ ID NO 69137
atggagaatccccatgtacttttgttgctaccacttatatcatctttatctattaatattccccttgttcaagctcaagctcaagttaacgatgtctattcaaacaccattgacatcttaaaatcaacagggttaataagtctccaaattccagttctcgaaattccaataaaatttgttgttcttgctgctgccattgtgatcattctcgtggtactggttctcatttgtgtgtgcagaaagaaaaaagcaccaagtcatgtcgaagatatacccccttcaccagtttcattaactactagtaaatctgaagactcgatcaagacaaaaaggaaaaagtttacttattcggaggttacagaaatgacaagtaactttcaaagagctcttggtgaaggaggctttggcattgtctatcatggttatttgaatggttcagaggaagtagccgttaaagtactctctcaaacatcatcacaaggctataaacatttcaaggcagaggttgaacttctactgagagttcaccacacgaacttggtaagccttgtcgggtattgcgatgaacgaggtcacttggctctcatctacgaatatatgtccaacgtagacttaaaacatcacttgtcaggaaagcatgatgtctctattttgaagtggagtactcgattaagaatagccattgatgccgcactaggattggaatacttacatattggttgtcgaccatcaatggtacatagagatgtcaaaagtacaaatatattgttggacgatcaatttactgccaaaattgcggattttgggctttcaagatctttccaactcggagatgaatctcatatttcaacagttgttgctggtactcctggataccttgatcctgaatattacagaacgggtcggttggctgagatgagcgatgtctacagcttcgggattgtgttattggagatgatgacaaaccaacgtgtgattgaccaaaaccgtgaaaagcgacacataacagaatgggtagctttagtgcttaacagaggagacattaccaagatcatggatcctaatctttacggcgattacaactcaaattctgtttggaaagctcttgaattggctatgtcatgtgcaaacccatcttccgaaaaacgaccaagcatgtcccaagttatcagcgtactaaaagagtgtcttacttctgaaaacttgatgagaaataagaatcatgacatggaatccgatagttcccttgaactgaccaagagctttgatacagaagttgtccctcgtgctaggtag

SEQ ID NO: 75657 - protein, 431 aa, Arabidopsis thaliana
  peptide (1)..(431): Ceres Seq. ID no. 6448387
MENPHVLLLLPLISSLSINIPLVQAQAQVNDVYSNTIDILKSTGLISLQIPVLEIPIKFVVLAAAIVIILVVLVLICVCRKKKAPSHVEDIPPSPVSLTTSKSEDSIKTKRKKFTYSEVTEMTSNFQRALGEGGFGIVYHGYLNGSEEVAVKVLSQTSSQGYKHFKAEVELLLRVHHTNLVSLVGYCDERGHLALIYEYMSNVDLKHHLSGKHDVSILKWSTRLRIAIDAALGLEYLHIGCRPSMVHRDVKSTNILLDDQFTAKIADFGLSRSFQLGDESHISTVVAGTPGYLDPEYYRTGRLAEMSDVYSFGIVLLEMMTNQRVIDQNREKRHITEWVALVLNRGDITKIMDPNLYGDYNSNSVWKALELAMSCANPSSEKRPSMSQVISVLKECLTSENLMRNKNHDMESDSSLELTKSFDTEVVPRAR

SEQ ID NO: 75658 - protein, 310 aa, Arabidopsis thaliana
  peptide (1)..(310): Ceres Seq. ID no. 6448388
MTSNFQRALGEGGFGIVYHGYLNGSEEVAVKVLSQTSSQGYKHFKAEVELLLRVHHTNLVSLVGYCDERGHLALIYEYMSNVDLKHHLSGKHDVSILKWSTRLRIAIDAALGLEYLHIGCRPSMVHRDVKSTNILLDDQFTAKIADFGLSRSFQLGDESHISTVVAGTPGYLDPEYYRTGRLAEMSDVYSFGIVLLEMMTNQRVIDQNREKRHITEWVALVLNRGDITKIMDPNLYGDYNSNSVWKALELAMSCANPSSEKRPSMSQVISVLKECLTSENLMRNKNHDMESDSSLELTKSFDTEVVPRAR

SEQ ID NO: 75659 - protein, 232 aa, Arabidopsis thaliana
  peptide (1)..(232): Ceres Seq. ID no. 6448389
MSNVDLKHHLSGKHDVSILKWSTRLRIAIDAALGLEYLHIGCRPSMVHRDVKSTNILLDDQFTAKIADFGLSRSFQLGDESHISTVVAGTPGYLDPEYYRTGRLAEMSDVYSFGIVLLEMMTNQRVIDQNREKRHITEWVALVLNRGDITKIMDPNLYGDYNSNSVWKALELAMSCANPSSEKRPSMSQVISVLKECLTSENLMRNKNHDMESDSSLELTKSFDTEVVPRAR

SEQ ID NO: 75660 - DNA, 1095 bp, Arabidopsis thaliana
  misc_feature (1)..(1095): Ceres Seq. ID no. 6448504
  misc_feature (1)..(1095): Ortholog of  Ceres SEQ ID NO 13598353 as cited in SEQ ID NO 68742
atgaagcgattcttcaagcccatagagaaggagaattctccggcggctaagaaaccctgcctttcgccggaaaagcgtgacggagacggagatggagttgaagaagagaagaaccagaacgagccgtccaagtttatgacgtggaacgctaatagcttcctccttcgggtgaaaaatgactggtctcagttctctaagttcgtctccgattttgaccccgatgtcatcgccatacaggaagtaaggatgcctgctgctggtggaaagggaaaacctaaaaaccatgaagagttgagtgatgacacgaaagttttgcgtgaggaaaaacagattttgacacgggctctctcaagtccaccatttggaaattatggggtttggtggtctctcgcggactcgaagtatgcagggacagctttgttagtgaaaaaatgtttcaagcctcgaaaagtttactttaacttggacaaattagcatctaaacatgaacctgatggtcgtgttatcttagctgaatttgagacatttcgtcttttgaatacgtattcgcctaacaatggttggaaagatgaagagaatgcgtttcagaggagaagaaaatgggacaagaggattgttgaattcctcaacaaaacatctgataaaccgctaatatggtgtggcgacttaaatgtcagtcatgaggagatagatgttagccacccagaattttttgctacagcaaagcttaatggttatgttcctccaaacaaagaggactgcggacagcctggatttacaccatctgagagaggacgcttcggggcaactataaaagaaggaaggcttgttgatgcataccggtatctacacaaggagcaagaaatggaaagtggcttctcatggtcggggaatcccattggaaagtaccggggaaagaggatgaggatcgactattttctggtctctgaacaactcaaagaccgtatagtttcttgtaagatgcacggtcgtgggatagaacttgaaggtttccatgggagtgatcattgtccggttacactcgagctttcgaagccatcttcagaaatggaacagaaccaggtgtcaaactaa

SEQ ID NO: 75661 - protein, 364 aa, Arabidopsis thaliana
  peptide (1)..(364): Ceres Seq. ID no. 6448505
MKRFFKPIEKENSPAAKKPCLSPEKRDGDGDGVEEEKNQNEPSKFMTWNANSFLLRVKNDWSQFSKFVSDFDPDVIAIQEVRMPAAGGKGKPKNHEELSDDTKVLREEKQILTRALSSPPFGNYGVWWSLADSKYAGTALLVKKCFKPRKVYFNLDKLASKHEPDGRVILAEFETFRLLNTYSPNNGWKDEENAFQRRRKWDKRIVEFLNKTSDKPLIWCGDLNVSHEEIDVSHPEFFATAKLNGYVPPNKEDCGQPGFTPSERGRFGATIKEGRLVDAYRYLHKEQEMESGFSWSGNPIGKYRGKRMRIDYFLVSEQLKDRIVSCKMHGRGIELEGFHGSDHCPVTLELSKPSSEMEQNQVSN

SEQ ID NO: 75662 - protein, 319 aa, Arabidopsis thaliana
  peptide (1)..(319): Ceres Seq. ID no. 6448506
MTWNANSFLLRVKNDWSQFSKFVSDFDPDVIAIQEVRMPAAGGKGKPKNHEELSDDTKVLREEKQILTRALSSPPFGNYGVWWSLADSKYAGTALLVKKCFKPRKVYFNLDKLASKHEPDGRVILAEFETFRLLNTYSPNNGWKDEENAFQRRRKWDKRIVEFLNKTSDKPLIWCGDLNVSHEEIDVSHPEFFATAKLNGYVPPNKEDCGQPGFTPSERGRFGATIKEGRLVDAYRYLHKEQEMESGFSWSGNPIGKYRGKRMRIDYFLVSEQLKDRIVSCKMHGRGIELEGFHGSDHCPVTLELSKPSSEMEQNQVSN

SEQ ID NO: 75663 - protein, 282 aa, Arabidopsis thaliana
  peptide (1)..(282): Ceres Seq. ID no. 6448507
MPAAGGKGKPKNHEELSDDTKVLREEKQILTRALSSPPFGNYGVWWSLADSKYAGTALLVKKCFKPRKVYFNLDKLASKHEPDGRVILAEFETFRLLNTYSPNNGWKDEENAFQRRRKWDKRIVEFLNKTSDKPLIWCGDLNVSHEEIDVSHPEFFATAKLNGYVPPNKEDCGQPGFTPSERGRFGATIKEGRLVDAYRYLHKEQEMESGFSWSGNPIGKYRGKRMRIDYFLVSEQLKDRIVSCKMHGRGIELEGFHGSDHCPVTLELSKPSSEMEQNQVSN

SEQ ID NO: 75664 - DNA, 999 bp, Arabidopsis thaliana
  misc_feature (1)..(999): Ceres Seq. ID no. 6448616
  misc_feature (1)..(999): Ortholog of  Ceres SEQ ID NO 13598527 as cited in SEQ ID NO 64914
atggcgacaaacttcaaatccctattaccagttatcgacatcagtcctttagtggtcaaatgtgatgatgccaacatggcggaggatgccggcgtggcggaggttgtgggaaagctggacagggcctgtcgggacgcaggattcttctacgtaattggtcatggaatatcggaggattttataaggaaggtgagagtgatgtcgcatcaattcttcgagcttccttatgaagagaaacttaagatcaagattactccagctgctggatacagaggatatcagagaatcggactaaacttaacgaatgggaaacaagatatgcacgaagccattgattgttacaaagagtttaagcaagggaagcatggggacattggaaaggttatggaaggggcaaaccagtggccagagaatcctcaagaatacaaagagttgatggaggagtatattaagctctgcatagatctttctagaaatatcttaaggggaatctcattagcccttggtggatcaccttatgagtttgagggaaagatgcttacagatccgttttggataatgcgtattcttggttatccaggtgtaaaccaagaaaatgttatcggatgtggagctcacactgactatggcttgttgtcacttataaatcaagatgatgacaaaactgctcttcaggtgagagacttggccggcgattggataccagttattccgatccctggatcatttgtctgcaacatcggtgacatgctaaagattctttctaacggagtttacgaatccacacttcatagagtgatcaataactctccccgataccgtgtttgcgtcggattcttttacgagacgaacttcgacgcagcggtggagccgttggatatcttcaaagagaagtacccaggaaaaggaacatcccaagttttcaaaagagttgtctatggggagcatctggttcacaaactccagaccacttttcaaaatttagtggaacacagttaa

SEQ ID NO: 75665 - protein, 332 aa, Arabidopsis thaliana
  peptide (1)..(332): Ceres Seq. ID no. 6448617
MATNFKSLLPVIDISPLVVKCDDANMAEDAGVAEVVGKLDRACRDAGFFYVIGHGISEDFIRKVRVMSHQFFELPYEEKLKIKITPAAGYRGYQRIGLNLTNGKQDMHEAIDCYKEFKQGKHGDIGKVMEGANQWPENPQEYKELMEEYIKLCIDLSRNILRGISLALGGSPYEFEGKMLTDPFWIMRILGYPGVNQENVIGCGAHTDYGLLSLINQDDDKTALQVRDLAGDWIPVIPIPGSFVCNIGDMLKILSNGVYESTLHRVINNSPRYRVCVGFFYETNFDAAVEPLDIFKEKYPGKGTSQVFKRVVYGEHLVHKLQTTFQNLVEHS

SEQ ID NO: 75666 - protein, 307 aa, Arabidopsis thaliana
  peptide (1)..(307): Ceres Seq. ID no. 6448618
MAEDAGVAEVVGKLDRACRDAGFFYVIGHGISEDFIRKVRVMSHQFFELPYEEKLKIKITPAAGYRGYQRIGLNLTNGKQDMHEAIDCYKEFKQGKHGDIGKVMEGANQWPENPQEYKELMEEYIKLCIDLSRNILRGISLALGGSPYEFEGKMLTDPFWIMRILGYPGVNQENVIGCGAHTDYGLLSLINQDDDKTALQVRDLAGDWIPVIPIPGSFVCNIGDMLKILSNGVYESTLHRVINNSPRYRVCVGFFYETNFDAAVEPLDIFKEKYPGKGTSQVFKRVVYGEHLVHKLQTTFQNLVEHS

SEQ ID NO: 75667 - protein, 266 aa, Arabidopsis thaliana
  peptide (1)..(266): Ceres Seq. ID no. 6448619
MSHQFFELPYEEKLKIKITPAAGYRGYQRIGLNLTNGKQDMHEAIDCYKEFKQGKHGDIGKVMEGANQWPENPQEYKELMEEYIKLCIDLSRNILRGISLALGGSPYEFEGKMLTDPFWIMRILGYPGVNQENVIGCGAHTDYGLLSLINQDDDKTALQVRDLAGDWIPVIPIPGSFVCNIGDMLKILSNGVYESTLHRVINNSPRYRVCVGFFYETNFDAAVEPLDIFKEKYPGKGTSQVFKRVVYGEHLVHKLQTTFQNLVEHS

SEQ ID NO: 75668 - DNA, 3219 bp, Arabidopsis thaliana
  misc_feature (1)..(3219): Ceres Seq. ID no. 6448704
  misc_feature (1)..(3219): Ortholog of  Ceres SEQ ID NO 13600310 as cited in SEQ ID NO 5086
  misc_feature (1)..(3219): Ortholog of  Ceres SEQ ID NO 14313863 as cited in SEQ ID NO 54791
  misc_feature (1)..(3219): Ortholog of  Ceres SEQ ID NO 15226111 as cited in SEQ ID NO 55604
atgggtataggagaggatcagatgcaaggatcgagtggtagggaagagaagatttttgtttctgttcgtctgaggccattaaatgtgagagaaagggcaaggaatgatgtggcagattgggagtgtatcaatgatgaaacggtcatatacaggagtcatctctctatatcagagcgttccatgtaccccactgcatacacatttgacagagtgtttggccctgagtgttctaccagggaggtgtatgatcaaggggcgaaggaagtggctctctctgttgtcagtggggttcatgctagtgtctttgcatatgggcaaacaagcagtggaaagacatacactatgattggtattacggattatgccttggctgatatatatgattacattgagaagcacaatgaaagagaattcattctgaagttctcagccatggagatctataatgagtctgtaagagacctcttgagtacagacattagtccactcagagttctagatgatcctgagaaaggaacagttgtcgagaaactcacggaggaaactctgcgggactggaatcattttaaggagcttttatcaatctgtatagctcaacggcaaattggagagacagctttaaatgaagttagttcccgctctcatcagattctgagattgacagttgaaagcacagcacgtgaatatttggcgaaggataaatttagtacactcacagcgacagtgaatttcattgatcttgctggaagtgaacgtgcatctcaatcattatcagctggcacaaggttgaaagaaggtggtcatataaaccgaagtttactaacactaggaactgtcattcgaaagctaagtaaaggaaaaaatgggcacattccattcagagattcaaagctgacacgcatacttcagacttccttgggaggaaacgccagaacttccataatctgcacactgagtcctgcaagagtacacgttgagcaatcaagaaacacattgttattcgcaagctgtgcaaaggaggtgacaacaaatgcacaagtcaacgtcgtcatgtctgataaagctctggttagacatttacagagagaattggctaaactggagagcgagttgagcagccctcgtcaagctcttgttgtgtctgacacaactgcattactgaaggagaaagacctccaaatcgaaaagctaaataaagaggtattccaactagcacaagaattagagagggcttattctcggattgaggatcttcaacagattattggagaagcaccacaacaagagatattatcaacagactcagaacagacaaacacaaatgtggttctgggacgtcagtaccccaagttacgggtgcgtagttcatgggagtctctaaatataacaccagagagtcccctatcagcgcaagcgtccattatgatttccccacaatcaaccgagcatggttctgacgagaatgttttccagctttcagacttgaggttgaattcgggtgcaagtagtccagctcaacaccttgcgtttgtaactcctggtaaattcactaaagttcgacttaatattcgtggggtagaaagtaaaaaccaactgcacattcacaagggggaatctgtagatcagtctcgtgttcagggggaacgattgcatgaaatggacgaaccaagtgaggtggattctgaagatacctgcacggaacttcaatgcatagaaacagagagtcctggtatcatcatgtatccagagccaaatatacttccagaccggtgtaaggctgtgagtgcactaccattatgtgaaccagagtcaaagaactcaagaccaccaacagaaactgcagaagaaaaagaagaaaaagaagaaacagaagaaaaagaggaagaagaagaagaaagagttaaggaagtcagtagtgtctctatccaaacaaaggagaaaagtggaccgatcaaagtctctccacgctgtgttttgtcacttactgacgaatcatttccggatgagtcttctaacctcaaaagagacccaacacatcaagattttgtcactccgtctcctgaaaagctttatgcttggcatcttgagagtaatgggcaaacggcgggaggcacggggtttactagaagccgaagctgcggagcaagctttgtatcaagctcttccttttctctgtctgagagagatgctaacacaccaccatgctggtatcagaatgaaagagctgagagcaacctgaaaccgtccaacagcaagaggccaccattgccaaagcatattagccggatgagcatgccagcaacttggttcgagaaagacttcaaccacacccaaagaatgccagctggtttagatggtgttaatatgataaagtcatcaccgaatggatcacaggtttctacctctaaatctcatgtgtatgcacgccagacaagtggtagagctttaatcagccaagacgaaggtgaagagactgttcctcagagggacaagcgaatcattcacctatcggttagttttcctaacttggtcaagcagagcttgcttttcgtttacctatacttgatggaggagatagagcaaaaattcttggctctaagatcgtcaaagagtttcaaggacgctgcggttgacccaatacaagactatttaaccatgccattgaactggccgttggagttcaaaagactcgagatggagataatagagctatggcatgcttgcaacgtttccttgtcacacagaagttacttcttccttctcttcagaggagatcagaaagattgcttgtacatggaggtcgaactccgtaggctcaagtacatcagagaaacctttacccacaataacaaagctattgaaaatggacgcactcttacatcaatgtccagcctgagggcgttgaacagggagaggtacaagctgagtcagctgatgcagaagaaactgacgaaagaggagagagagaacgtgttcttgagatggggtattgggctgaatacaaagcacagacggctccaactggcacatcgtctctggtcagagagcaaagatatggatcatgtccgagagagcgcctcagttgtgggaaagctcatggggttcgtggacatggatttggcatccaaggaaatgtttggcctcaacttctcacttagaccccgtgccaagaaatctagcctttggaaacgcagcgttttgtcgctctctattttgtaa

SEQ ID NO: 75669 - protein, 1072 aa, Arabidopsis thaliana
  peptide (1)..(1072): Ceres Seq. ID no. 6448705
MGIGEDQMQGSSGREEKIFVSVRLRPLNVRERARNDVADWECINDETVIYRSHLSISERSMYPTAYTFDRVFGPECSTREVYDQGAKEVALSVVSGVHASVFAYGQTSSGKTYTMIGITDYALADIYDYIEKHNEREFILKFSAMEIYNESVRDLLSTDISPLRVLDDPEKGTVVEKLTEETLRDWNHFKELLSICIAQRQIGETALNEVSSRSHQILRLTVESTAREYLAKDKFSTLTATVNFIDLAGSERASQSLSAGTRLKEGGHINRSLLTLGTVIRKLSKGKNGHIPFRDSKLTRILQTSLGGNARTSIICTLSPARVHVEQSRNTLLFASCAKEVTTNAQVNVVMSDKALVRHLQRELAKLESELSSPRQALVVSDTTALLKEKDLQIEKLNKEVFQLAQELERAYSRIEDLQQIIGEAPQQEILSTDSEQTNTNVVLGRQYPKLRVRSSWESLNITPESPLSAQASIMISPQSTEHGSDENVFQLSDLRLNSGASSPAQHLAFVTPGKFTKVRLNIRGVESKNQLHIHKGESVDQSRVQGERLHEMDEPSEVDSEDTCTELQCIETESPGIIMYPEPNILPDRCKAVSALPLCEPESKNSRPPTETAEEKEEKEETEEKEEEEEERVKEVSSVSIQTKEKSGPIKVSPRCVLSLTDESFPDESSNLKRDPTHQDFVTPSPEKLYAWHLESNGQTAGGTGFTRSRSCGASFVSSSSFSLSERDANTPPCWYQNERAESNLKPSNSKRPPLPKHISRMSMPATWFEKDFNHTQRMPAGLDGVNMIKSSPNGSQVSTSKSHVYARQTSGRALISQDEGEETVPQRDKRIIHLSVSFPNLVKQSLLFVYLYLMEEIEQKFLALRSSKSFKDAAVDPIQDYLTMPLNWPLEFKRLEMEIIELWHACNVSLSHRSYFFLLFRGDQKDCLYMEVELRRLKYIRETFTHNNKAIENGRTLTSMSSLRALNRERYKLSQLMQKKLTKEERENVFLRWGIGLNTKHRRLQLAHRLWSESKDMDHVRESASVVGKLMGFVDMDLASKEMFGLNFSLRPRAKKSSLWKRSVLSLSIL

SEQ ID NO: 75670 - protein, 1065 aa, Arabidopsis thaliana
  peptide (1)..(1065): Ceres Seq. ID no. 6448706
MQGSSGREEKIFVSVRLRPLNVRERARNDVADWECINDETVIYRSHLSISERSMYPTAYTFDRVFGPECSTREVYDQGAKEVALSVVSGVHASVFAYGQTSSGKTYTMIGITDYALADIYDYIEKHNEREFILKFSAMEIYNESVRDLLSTDISPLRVLDDPEKGTVVEKLTEETLRDWNHFKELLSICIAQRQIGETALNEVSSRSHQILRLTVESTAREYLAKDKFSTLTATVNFIDLAGSERASQSLSAGTRLKEGGHINRSLLTLGTVIRKLSKGKNGHIPFRDSKLTRILQTSLGGNARTSIICTLSPARVHVEQSRNTLLFASCAKEVTTNAQVNVVMSDKALVRHLQRELAKLESELSSPRQALVVSDTTALLKEKDLQIEKLNKEVFQLAQELERAYSRIEDLQQIIGEAPQQEILSTDSEQTNTNVVLGRQYPKLRVRSSWESLNITPESPLSAQASIMISPQSTEHGSDENVFQLSDLRLNSGASSPAQHLAFVTPGKFTKVRLNIRGVESKNQLHIHKGESVDQSRVQGERLHEMDEPSEVDSEDTCTELQCIETESPGIIMYPEPNILPDRCKAVSALPLCEPESKNSRPPTETAEEKEEKEETEEKEEEEEERVKEVSSVSIQTKEKSGPIKVSPRCVLSLTDESFPDESSNLKRDPTHQDFVTPSPEKLYAWHLESNGQTAGGTGFTRSRSCGASFVSSSSFSLSERDANTPPCWYQNERAESNLKPSNSKRPPLPKHISRMSMPATWFEKDFNHTQRMPAGLDGVNMIKSSPNGSQVSTSKSHVYARQTSGRALISQDEGEETVPQRDKRIIHLSVSFPNLVKQSLLFVYLYLMEEIEQKFLALRSSKSFKDAAVDPIQDYLTMPLNWPLEFKRLEMEIIELWHACNVSLSHRSYFFLLFRGDQKDCLYMEVELRRLKYIRETFTHNNKAIENGRTLTSMSSLRALNRERYKLSQLMQKKLTKEERENVFLRWGIGLNTKHRRLQLAHRLWSESKDMDHVRESASVVGKLMGFVDMDLASKEMFGLNFSLRPRAKKSSLWKRSVLSLSIL

SEQ ID NO: 75671 - protein, 1012 aa, Arabidopsis thaliana
  peptide (1)..(1012): Ceres Seq. ID no. 6448707
MYPTAYTFDRVFGPECSTREVYDQGAKEVALSVVSGVHASVFAYGQTSSGKTYTMIGITDYALADIYDYIEKHNEREFILKFSAMEIYNESVRDLLSTDISPLRVLDDPEKGTVVEKLTEETLRDWNHFKELLSICIAQRQIGETALNEVSSRSHQILRLTVESTAREYLAKDKFSTLTATVNFIDLAGSERASQSLSAGTRLKEGGHINRSLLTLGTVIRKLSKGKNGHIPFRDSKLTRILQTSLGGNARTSIICTLSPARVHVEQSRNTLLFASCAKEVTTNAQVNVVMSDKALVRHLQRELAKLESELSSPRQALVVSDTTALLKEKDLQIEKLNKEVFQLAQELERAYSRIEDLQQIIGEAPQQEILSTDSEQTNTNVVLGRQYPKLRVRSSWESLNITPESPLSAQASIMISPQSTEHGSDENVFQLSDLRLNSGASSPAQHLAFVTPGKFTKVRLNIRGVESKNQLHIHKGESVDQSRVQGERLHEMDEPSEVDSEDTCTELQCIETESPGIIMYPEPNILPDRCKAVSALPLCEPESKNSRPPTETAEEKEEKEETEEKEEEEEERVKEVSSVSIQTKEKSGPIKVSPRCVLSLTDESFPDESSNLKRDPTHQDFVTPSPEKLYAWHLESNGQTAGGTGFTRSRSCGASFVSSSSFSLSERDANTPPCWYQNERAESNLKPSNSKRPPLPKHISRMSMPATWFEKDFNHTQRMPAGLDGVNMIKSSPNGSQVSTSKSHVYARQTSGRALISQDEGEETVPQRDKRIIHLSVSFPNLVKQSLLFVYLYLMEEIEQKFLALRSSKSFKDAAVDPIQDYLTMPLNWPLEFKRLEMEIIELWHACNVSLSHRSYFFLLFRGDQKDCLYMEVELRRLKYIRETFTHNNKAIENGRTLTSMSSLRALNRERYKLSQLMQKKLTKEERENVFLRWGIGLNTKHRRLQLAHRLWSESKDMDHVRESASVVGKLMGFVDMDLASKEMFGLNFSLRPRAKKSSLWKRSVLSLSIL

SEQ ID NO: 75672 - DNA, 1569 bp, Arabidopsis thaliana
  misc_feature (1)..(1569): Ceres Seq. ID no. 6448720
  misc_feature (1)..(1569): Ortholog of  Ceres SEQ ID NO 12586556 as cited in SEQ ID NO 64667
  misc_feature (1)..(1569): Ortholog of  Ceres SEQ ID NO 13660894 as cited in SEQ ID NO 67475
atggcaaaagcttcctctattcgccaattcgtcacatccagattcatcgtccccggaacgggtctgcttaagggtttcaaacttgtcgaagattccaactctattacacacctcttccaagtccacgcgaggctaatcacctccggtaacttctgggattcatcttgggctatcagattgttgaagtcttcttcgcgttttggtgattctagctacaccgtttcgatataccgcagcattggcaagctttactgcgcaaatcccgtctttaaggcttatttggtctcgtcttctccgaaacaagcgttggggttttacttcgatatactaagatttggttttgttcctgattcatacaccttcgtttcgttgattagttgtattgagaagacttgttgcgttgattctggtaaaatgtgtcatgggcaagccattaagcatggatgcgatcaagttttgcctgttcaaaattcgttaatgcatatgtatacttgttgtggtgctttggatcttgcaaagaagctgtttgttgaaattcctaagagagatattgtgtcctggaactctataatagctgggatggtgaggaatggtgatgttttggctgcacacaagttgttcgatgaaatgcctgacaaaaacattatttcttggaatatcatgattagtgcttatttgggtgcgaataatcctggagtttccattagtttgttccgtgagatggtcagagcagggttccaaggaaatgagagtacgttggttttgttgttgaatgcttgtggtagatcagctagattgaaggaaggtaggtcggttcatgcttctttgataagaacctttctgaattcgagtgtagttattgatacagctcttattgacatgtatggaaagtgcaaggaagtaggtttagcacgtaggatattcgatagtctatctattagaaacaaagttacttggaatgtgatgatattggcacattgtcttcacgggcgtcctgaaggtgggctcgagttatttgaagccatgatcaatggtatgcttagacccgatgaagtgacatttgttggtgttctctgcggttgtgctagagctgggcttgtttctcaaggacaaagttactattctctgatggttgatgagttccagatcaaacccaactttggacaccaatggtgcatggctaatctttactccagcgccgggttccctgaagaagcagaggaagctctgaagaatctgccagatgaagatgtgacaccagaatctacaaagtgggcaaacttgctcagctcgtcgcgttttacaggaaacccgactctaggggagagcattgccaagtccctgatagagacagatcctttgaactacaagtattaccatttgctgatgaatatttacagtgttacgggacggtgggaggatgttaatagagtgagagagatggtgaaggagaggaaaataggacgaatacccgggtgtggccttgtggacttgaaggagatagtccatggccttagactaggatgcaaagaagcagaaaagacaaagagtagtaaaatccttgtttag

SEQ ID NO: 75673 - protein, 522 aa, Arabidopsis thaliana
  peptide (1)..(522): Ceres Seq. ID no. 6448721
MAKASSIRQFVTSRFIVPGTGLLKGFKLVEDSNSITHLFQVHARLITSGNFWDSSWAIRLLKSSSRFGDSSYTVSIYRSIGKLYCANPVFKAYLVSSSPKQALGFYFDILRFGFVPDSYTFVSLISCIEKTCCVDSGKMCHGQAIKHGCDQVLPVQNSLMHMYTCCGALDLAKKLFVEIPKRDIVSWNSIIAGMVRNGDVLAAHKLFDEMPDKNIISWNIMISAYLGANNPGVSISLFREMVRAGFQGNESTLVLLLNACGRSARLKEGRSVHASLIRTFLNSSVVIDTALIDMYGKCKEVGLARRIFDSLSIRNKVTWNVMILAHCLHGRPEGGLELFEAMINGMLRPDEVTFVGVLCGCARAGLVSQGQSYYSLMVDEFQIKPNFGHQWCMANLYSSAGFPEEAEEALKNLPDEDVTPESTKWANLLSSSRFTGNPTLGESIAKSLIETDPLNYKYYHLLMNIYSVTGRWEDVNRVREMVKERKIGRIPGCGLVDLKEIVHGLRLGCKEAEKTKSSKILV

SEQ ID NO: 75674 - protein, 384 aa, Arabidopsis thaliana
  peptide (1)..(384): Ceres Seq. ID no. 6448722
MCHGQAIKHGCDQVLPVQNSLMHMYTCCGALDLAKKLFVEIPKRDIVSWNSIIAGMVRNGDVLAAHKLFDEMPDKNIISWNIMISAYLGANNPGVSISLFREMVRAGFQGNESTLVLLLNACGRSARLKEGRSVHASLIRTFLNSSVVIDTALIDMYGKCKEVGLARRIFDSLSIRNKVTWNVMILAHCLHGRPEGGLELFEAMINGMLRPDEVTFVGVLCGCARAGLVSQGQSYYSLMVDEFQIKPNFGHQWCMANLYSSAGFPEEAEEALKNLPDEDVTPESTKWANLLSSSRFTGNPTLGESIAKSLIETDPLNYKYYHLLMNIYSVTGRWEDVNRVREMVKERKIGRIPGCGLVDLKEIVHGLRLGCKEAEKTKSSKILV

SEQ ID NO: 75675 - protein, 363 aa, Arabidopsis thaliana
  peptide (1)..(363): Ceres Seq. ID no. 6448723
MHMYTCCGALDLAKKLFVEIPKRDIVSWNSIIAGMVRNGDVLAAHKLFDEMPDKNIISWNIMISAYLGANNPGVSISLFREMVRAGFQGNESTLVLLLNACGRSARLKEGRSVHASLIRTFLNSSVVIDTALIDMYGKCKEVGLARRIFDSLSIRNKVTWNVMILAHCLHGRPEGGLELFEAMINGMLRPDEVTFVGVLCGCARAGLVSQGQSYYSLMVDEFQIKPNFGHQWCMANLYSSAGFPEEAEEALKNLPDEDVTPESTKWANLLSSSRFTGNPTLGESIAKSLIETDPLNYKYYHLLMNIYSVTGRWEDVNRVREMVKERKIGRIPGCGLVDLKEIVHGLRLGCKEAEKTKSSKILV

SEQ ID NO: 75676 - DNA, 1614 bp, Arabidopsis thaliana
  misc_feature (1)..(1614): Ceres Seq. ID no. 6448979
  misc_feature (1)..(1614): Ortholog of  Ceres SEQ ID NO 14311103 as cited in SEQ ID NO 52897
atgaatcactccacttctgaccagagcctctacatcgagagtgatgatggagatgacgagagaaaacacttgtccgacgatgaagacgacgatggaactctttctgatacttctgacgcttacaatcaaaaccaacatcatctgtctaaagctagcccatactcaacggcatggcctaagagttataggcaatcgattgatatgtttggaagtgtaccatcaccaaatttgggttttcttgctaattcttctatgtcgagaagaggaagctcattcatgtcttcgacactgacaagaagacatactccagaatcattaccttgtgttacaaagcctctcctagaagatgaagaagcaccaaaacataaacttagcactcattctttgcttccgtcgaaaccatcgtcatccatggtggtgtctcatgatatgggaatctccaatgatagctcctttggacaggctgttcttaatggagtgaatgttttatgtggggttggaatattgtcaacaccatatgctgtgaaggaaggaggatggttgggacttatcattctctttgcatttggtattctttgtttttacaccggtttgcttctgcggtactgcctcgacagccaccccgatgtccagacctatcctgatattggccatgccgcttttggttccaccggccgcatcctggtctccgtaatactctatatggagttatatgctatgagtgttgaatacataatattggaaggtgataatctttcatcaatgtttccaaatgctagtctaagtattggagggtttcacttagatgcgcctcgtctatttgctctgcttaccaccctcgctgttctcccaaccgtttggcttcgagatctcagcgtactaagttacatttcagctggaggggtgattgcatcagtgttggtggttttgtgcttgttttgggttggtttggttgatgatgttggtattcacagcaaaggaactccactaaacctcgcaacattaccggtttctgtaggactctatggttattgttactcaggacatggtgttttccctaatatttacacttcaatggccaaaccatctcaattttctgctgttctcttggcatcttttggaatttgtactcttatgtatgcgggtgttgctgttatgggatatagcatgtttggagaatcaacagaatcacagtttactcttaacttgcctcaagatttggttgcatctaagattgctttgtggactacaaaagaaagcacatatgctttgacattatctccagttgcaatgagtcttgaggagttaataccatcaaactatgggaagtcacgtttctacgcaatcgccattagaagtgcattagccatctctactctgctcgttggtcttgcgattcccttcttcggccttgtcatgtcactgattggatcattcttgacaatgctcattacgctgatactaccgccagcttgtttcttgagcatcttaaggaaaaaagtaacccctactcaggtgacaatctgtatcttaattatgacagtaggagcagtatgttcagtcattggcacatattcagcccttgcaaagatcattgagaagttgaacacctaa

SEQ ID NO: 75677 - protein, 537 aa, Arabidopsis thaliana
  peptide (1)..(537): Ceres Seq. ID no. 6448980
MNHSTSDQSLYIESDDGDDERKHLSDDEDDDGTLSDTSDAYNQNQHHLSKASPYSTAWPKSYRQSIDMFGSVPSPNLGFLANSSMSRRGSSFMSSTLTRRHTPESLPCVTKPLLEDEEAPKHKLSTHSLLPSKPSSSMVVSHDMGISNDSSFGQAVLNGVNVLCGVGILSTPYAVKEGGWLGLIILFAFGILCFYTGLLLRYCLDSHPDVQTYPDIGHAAFGSTGRILVSVILYMELYAMSVEYIILEGDNLSSMFPNASLSIGGFHLDAPRLFALLTTLAVLPTVWLRDLSVLSYISAGGVIASVLVVLCLFWVGLVDDVGIHSKGTPLNLATLPVSVGLYGYCYSGHGVFPNIYTSMAKPSQFSAVLLASFGICTLMYAGVAVMGYSMFGESTESQFTLNLPQDLVASKIALWTTKESTYALTLSPVAMSLEELIPSNYGKSRFYAIAIRSALAISTLLVGLAIPFFGLVMSLIGSFLTMLITLILPPACFLSILRKKVTPTQVTICILIMTVGAVCSVIGTYSALAKIIEKLNT

SEQ ID NO: 75678 - protein, 470 aa, Arabidopsis thaliana
  peptide (1)..(470): Ceres Seq. ID no. 6448981
MFGSVPSPNLGFLANSSMSRRGSSFMSSTLTRRHTPESLPCVTKPLLEDEEAPKHKLSTHSLLPSKPSSSMVVSHDMGISNDSSFGQAVLNGVNVLCGVGILSTPYAVKEGGWLGLIILFAFGILCFYTGLLLRYCLDSHPDVQTYPDIGHAAFGSTGRILVSVILYMELYAMSVEYIILEGDNLSSMFPNASLSIGGFHLDAPRLFALLTTLAVLPTVWLRDLSVLSYISAGGVIASVLVVLCLFWVGLVDDVGIHSKGTPLNLATLPVSVGLYGYCYSGHGVFPNIYTSMAKPSQFSAVLLASFGICTLMYAGVAVMGYSMFGESTESQFTLNLPQDLVASKIALWTTKESTYALTLSPVAMSLEELIPSNYGKSRFYAIAIRSALAISTLLVGLAIPFFGLVMSLIGSFLTMLITLILPPACFLSILRKKVTPTQVTICILIMTVGAVCSVIGTYSALAKIIEKLNT

SEQ ID NO: 75679 - protein, 453 aa, Arabidopsis thaliana
  peptide (1)..(453): Ceres Seq. ID no. 6448982
MSRRGSSFMSSTLTRRHTPESLPCVTKPLLEDEEAPKHKLSTHSLLPSKPSSSMVVSHDMGISNDSSFGQAVLNGVNVLCGVGILSTPYAVKEGGWLGLIILFAFGILCFYTGLLLRYCLDSHPDVQTYPDIGHAAFGSTGRILVSVILYMELYAMSVEYIILEGDNLSSMFPNASLSIGGFHLDAPRLFALLTTLAVLPTVWLRDLSVLSYISAGGVIASVLVVLCLFWVGLVDDVGIHSKGTPLNLATLPVSVGLYGYCYSGHGVFPNIYTSMAKPSQFSAVLLASFGICTLMYAGVAVMGYSMFGESTESQFTLNLPQDLVASKIALWTTKESTYALTLSPVAMSLEELIPSNYGKSRFYAIAIRSALAISTLLVGLAIPFFGLVMSLIGSFLTMLITLILPPACFLSILRKKVTPTQVTICILIMTVGAVCSVIGTYSALAKIIEKLNT

SEQ ID NO: 75680 - DNA, 1314 bp, Arabidopsis thaliana
  misc_feature (1)..(1314): Ceres Seq. ID no. 6449294
  misc_feature (1)..(1314): Ortholog of  Ceres SEQ ID NO 13654409 as cited in SEQ ID NO 68534
atggatgaagagtacgaggttattgttctcggcaccggtctcaaggagtgtatcctcagcggtctcctttccgtcgatggtgtcaaggtgcttcacatggacaggaatgactactatggtggagaatcaacttcccttaatctcaatcagctttggaagaagttcaggggagaagagaaggctcctgagcatttaggcgctagccgggattacaatgttgacatgatgcctaagtttatgatgggaaatggcaagcttgttcgtacccttattcatacagatgttacaaagtatttgtccttcaaagctgttgatggaagctatgttttcgtcaaaggaaaggttcaaaaggtgccagctactcctatggaggccctgaaatcttctctcatgggcatatttgagaaacgtcgagccggcaagtttttcagttttgttcaagaatacgatgagaaggacccaaaaacacacgatggaatggatttgaccagagttacaacaaaggaactgattgcgaaatatggtcttgatggcaacactattgactttattggtcacgcagtggcacttcacacgaatgaccaacatctcgaccaacccgcctttgatactgtaatgagaatgaagctctatgcggaatctcttgcacgtttccaaggaacatctccatatatttatcctctctatgggttgggagaactaccccaggcatttgcacgacttagtgctgtctatggtggcacatatatgttgaacaaacctgagtgcaaggtagagtttgacgagggaggtaaggttattggtgtaacatctgagggagagactgctaaatgcaaaaagattgtgtgtgacccttcatacctgccgaacaaggttaggaagattggcagggttgctcgggccatcgccattatgagccacccgattccgaacaccaatgattctcactcagtgcaggtcatcataccccagaaacagtatgtcttctgttgttcgtactcccacaacgttgctcccaagggaaaattcattgcatttgtgtctacagatgcagagactgataaccctcaaaccgaactaaagcctggaactgatcttttgggtcctgttgatgagatattcttcgacatgtatgatagatacgagcctgtcaacgagccagagttggacaactgctttatttcaacgagctatgatgctacaacacactttgagacaactgttgcggatgtgttgaacatgtataccctaatcaccggaaagcaactggacctaagtgttgacctgagtgccgcaagtgctgcagaggaatga

SEQ ID NO: 75681 - protein, 437 aa, Arabidopsis thaliana
  peptide (1)..(437): Ceres Seq. ID no. 6449295
MDEEYEVIVLGTGLKECILSGLLSVDGVKVLHMDRNDYYGGESTSLNLNQLWKKFRGEEKAPEHLGASRDYNVDMMPKFMMGNGKLVRTLIHTDVTKYLSFKAVDGSYVFVKGKVQKVPATPMEALKSSLMGIFEKRRAGKFFSFVQEYDEKDPKTHDGMDLTRVTTKELIAKYGLDGNTIDFIGHAVALHTNDQHLDQPAFDTVMRMKLYAESLARFQGTSPYIYPLYGLGELPQAFARLSAVYGGTYMLNKPECKVEFDEGGKVIGVTSEGETAKCKKIVCDPSYLPNKVRKIGRVARAIAIMSHPIPNTNDSHSVQVIIPQKQYVFCCSYSHNVAPKGKFIAFVSTDAETDNPQTELKPGTDLLGPVDEIFFDMYDRYEPVNEPELDNCFISTSYDATTHFETTVADVLNMYTLITGKQLDLSVDLSAASAAEE

SEQ ID NO: 75682 - protein, 405 aa, Arabidopsis thaliana
  peptide (1)..(405): Ceres Seq. ID no. 6449296
MDRNDYYGGESTSLNLNQLWKKFRGEEKAPEHLGASRDYNVDMMPKFMMGNGKLVRTLIHTDVTKYLSFKAVDGSYVFVKGKVQKVPATPMEALKSSLMGIFEKRRAGKFFSFVQEYDEKDPKTHDGMDLTRVTTKELIAKYGLDGNTIDFIGHAVALHTNDQHLDQPAFDTVMRMKLYAESLARFQGTSPYIYPLYGLGELPQAFARLSAVYGGTYMLNKPECKVEFDEGGKVIGVTSEGETAKCKKIVCDPSYLPNKVRKIGRVARAIAIMSHPIPNTNDSHSVQVIIPQKQYVFCCSYSHNVAPKGKFIAFVSTDAETDNPQTELKPGTDLLGPVDEIFFDMYDRYEPVNEPELDNCFISTSYDATTHFETTVADVLNMYTLITGKQLDLSVDLSAASAAEE

SEQ ID NO: 75683 - protein, 363 aa, Arabidopsis thaliana
  peptide (1)..(363): Ceres Seq. ID no. 6449297
MMPKFMMGNGKLVRTLIHTDVTKYLSFKAVDGSYVFVKGKVQKVPATPMEALKSSLMGIFEKRRAGKFFSFVQEYDEKDPKTHDGMDLTRVTTKELIAKYGLDGNTIDFIGHAVALHTNDQHLDQPAFDTVMRMKLYAESLARFQGTSPYIYPLYGLGELPQAFARLSAVYGGTYMLNKPECKVEFDEGGKVIGVTSEGETAKCKKIVCDPSYLPNKVRKIGRVARAIAIMSHPIPNTNDSHSVQVIIPQKQYVFCCSYSHNVAPKGKFIAFVSTDAETDNPQTELKPGTDLLGPVDEIFFDMYDRYEPVNEPELDNCFISTSYDATTHFETTVADVLNMYTLITGKQLDLSVDLSAASAAEE

SEQ ID NO: 75684 - DNA, 891 bp, Arabidopsis thaliana
  misc_feature (1)..(891): Ceres Seq. ID no. 6449692
  misc_feature (1)..(891): Ortholog of  Ceres SEQ ID NO 12616314 as cited in SEQ ID NO 64355
atgaagcatgtgaagcgtgaggccatacaaggcaaggtcgtctggatcacaggggctagccgtggaattggtgaaattcttgctaaacagtttgcaagtttagatgccaagcttattctctctgctaggaataaagctgaactggatcgggttaagagtgagcttaaaggtaaatttgcaccagaagatgtcaaggttttgcctttagatttagctagcggcgaagagtcactcaaacatgttgtagagcaagcagtgtcgcttttccctggagctggtgttgattatttggttcacaatgctgcctttgagcgtccgaaatccaaggcatcggatgcaagtgaggaaactctcaagactacattcgatgttaatgtctttgggacgatatctctgacaaagttggtagctcctcatatgctaaaacaaggagggggtcattttgttgtgataagcagtgctgcaggaaaggtaccatcacctggacaggctatatattctgcttcaaaacatgctcttcatggctacttccacagcttgcgttctgagttctgtcagaagggaatcaaggttaccgtcgtttgtcctggtccaatagaaacctggaatggtacaggaacatcaacttcggaagacagcaagtctcctgagaaacgtgtgtcatctgaacgatgtgcagagctgactataatcgctgcatctcataacttgaaggaagcttggatttcatatcagccagtactactcgtgatgtatctagtgcagtacatgccttcccttggcttctggctcatggacaaggttggaggaaagcgtgtggaggtcgcggaaaagaaaggcaacacatactcgtgggatttactgttcgggaagaagactaaaacaaactga

SEQ ID NO: 75685 - protein, 296 aa, Arabidopsis thaliana
  peptide (1)..(296): Ceres Seq. ID no. 6449693
MKHVKREAIQGKVVWITGASRGIGEILAKQFASLDAKLILSARNKAELDRVKSELKGKFAPEDVKVLPLDLASGEESLKHVVEQAVSLFPGAGVDYLVHNAAFERPKSKASDASEETLKTTFDVNVFGTISLTKLVAPHMLKQGGGHFVVISSAAGKVPSPGQAIYSASKHALHGYFHSLRSEFCQKGIKVTVVCPGPIETWNGTGTSTSEDSKSPEKRVSSERCAELTIIAASHNLKEAWISYQPVLLVMYLVQYMPSLGFWLMDKVGGKRVEVAEKKGNTYSWDLLFGKKTKTN

SEQ ID NO: 75686 - protein, 157 aa, Arabidopsis thaliana
  peptide (1)..(157): Ceres Seq. ID no. 6449694
MLKQGGGHFVVISSAAGKVPSPGQAIYSASKHALHGYFHSLRSEFCQKGIKVTVVCPGPIETWNGTGTSTSEDSKSPEKRVSSERCAELTIIAASHNLKEAWISYQPVLLVMYLVQYMPSLGFWLMDKVGGKRVEVAEKKGNTYSWDLLFGKKTKTN

SEQ ID NO: 75687 - DNA, 978 bp, Arabidopsis thaliana
  misc_feature (1)..(978): Ceres Seq. ID no. 6449781
  misc_feature (1)..(978): Ortholog of  Ceres SEQ ID NO 15178797 as cited in SEQ ID NO 1152
  misc_feature (1)..(978): Ortholog of  Ceres SEQ ID NO 15175688 as cited in SEQ ID NO 60465
  misc_feature (1)..(978): Ortholog of  Ceres SEQ ID NO 13495628 as cited in SEQ ID NO 60727
atgaagctctttgttcatctctctatcttcttctccatcctcttcatcactctcccatcttcttacactgcaccgaaaaatgacaagaatgccctccttcaaatcaagaaagcacttggcaatcctccccttctatcctcctggaacccccgaaccgactgttgtaccggctggaccggcgtcgaatgcactaaccgtcgcgttaccggtctcagcgttacctccggcgaagtctccggtcagatctcgtaccagatcggcgacctcgttgacctccgtacactagatttcagctacctgccacacctcaccggaaacatcccacgcaccatcaccaaactcaagaacctcaacactctctacttgaagcacactagtctctccggtccgattcctgattacatcagcgagctcaagagcctcacgttcttggacctttcttttaaccaatttaccggtccaattcccggttcgctatctcagatgccgaagcttgaagccattcaaatcaacgataataagctaaccggttctataccaaactctttcggttcttttgttggcaacgtccctaatctctacttgtctaacaataagctgtcaggaaaaataccggaatcgttgtctaaatacgacttcaacgcagtggatttgtcgggaaatggtttcgaaggagatgcctttatgttcttcggacggaacaaaacaacagtacgagtggatttgtcgagaaacatgtttaatttcgatctcgtcaaggttaagttcgctagaagcatagtttcgttggatctgagccagaaccatatctacgggaagataccaccagcactgactaaactacacctcgagcatttcaacgtgagcgacaaccatctctgcggaaaaatcccaagtggcggtctacttcagacctttgaaccatctgccttcgctcacaacatctgtctttgtggaactccccttaaggcttgttaa

SEQ ID NO: 75688 - protein, 325 aa, Arabidopsis thaliana
  peptide (1)..(325): Ceres Seq. ID no. 6449782
MKLFVHLSIFFSILFITLPSSYTAPKNDKNALLQIKKALGNPPLLSSWNPRTDCCTGWTGVECTNRRVTGLSVTSGEVSGQISYQIGDLVDLRTLDFSYLPHLTGNIPRTITKLKNLNTLYLKHTSLSGPIPDYISELKSLTFLDLSFNQFTGPIPGSLSQMPKLEAIQINDNKLTGSIPNSFGSFVGNVPNLYLSNNKLSGKIPESLSKYDFNAVDLSGNGFEGDAFMFFGRNKTTVRVDLSRNMFNFDLVKVKFARSIVSLDLSQNHIYGKIPPALTKLHLEHFNVSDNHLCGKIPSGGLLQTFEPSAFAHNICLCGTPLKAC

SEQ ID NO: 75689 - protein, 164 aa, Arabidopsis thaliana; identical to SEQ ID NO: 31013
  peptide (1)..(164): Ceres Seq. ID no. 6449783

SEQ ID NO: 75690 - DNA, 2757 bp, Arabidopsis thaliana
  misc_feature (1)..(2757): Ceres Seq. ID no. 6449828
  misc_feature (1)..(2757): Ortholog of  Ceres SEQ ID NO 14306557 as cited in SEQ ID NO 53442
atgcctctcagactagatatcaagagaaagtttgctcaacgatcagagagagtcaaatctgttgatctgcatcctactgaaccatggattctagcaagtttgtattctggaaccgtgtgtatttggaactaccagacacagacgattacaaaatccttcgaggtgacggaattgccagttaggtcggccaagtttattccgcgcaagcaatgggttgtggctggagcggatgatatgtacatccgtgtatacaattacaatacaatggacaaggtcaaagtatttgaggctcattcggattacattaggtgtgtagctgtccatccgacccttccatatgtgctgtcatcttctgatgatatgctcataaagctttgggactgggaaaacggttgggcttgtactcagatatttgagggacattcgcactatgtgatgcaagtggtatttaatccaaaagataccaacacttttgccagtgcttcgcttgatcgtaccataaagatatggaatcttggttccccagacccaaattttacactggatgctcatcagaaaggagtcaactgtgtagattatttcacagggggtgataaaccctatctaattaccggctctgatgatcatactgctaaggtatgggactatcaaaccaaaagttgtgtccagacgctagatgggcacacacacaatgtttctgccgtatgtttccatccagagcttccaataataatcacaggttctgaggatggcactgttcgcatttggcacgccactacctacaggctagaaaacacattaaattatggtctcgagagagtttgggccattggttacatcaaaagttctcggcgggttgtgattggatatgatgaaggaaccatcatggttaaacttggacgagaaattcctgtcgctagcatggacagtagcggaaaaatcatatgggctaagcataatgaaattcaaaccgcaaacatcaaaagtattggtgcaggttacgaggctactgatggagaaagacttcccttgtctgttaaagagttggggacctgtgatctttatccacaaagcttgaagcacaaccctaatgggaggtttgtcgtagtctgcggtgatggagagtacataatctacactgctttggcgtggagaaatagatcttttgggtctggcctggaatttgtttggtcatctgagggggaatgtgcggttagagaaagctcatcaaagataaagatattcagtaaaaatttccaggaaaggaagagtatccggcctactttctcagctgagaagatttttggaggaaccttgttagcaatgtgttcgaatgatttcatctgcttctatgattgggccgaatgcaggctgattcaacaaattgatgtcaccgtaaagaatctttattgggctgaaagtggtgatttagtagccattgctagtgatacgtcattctacatcttgaagtacaatcgagagttggtttcctcgcattttgatagtggaagaccaactgatgaagagggtgttgaggatgcttttgaggttctccacgagaatgatgaacgtgttaggaccggtatatgggttggggactgcttcatttacaacaactcttcttggaagcttaactattgtgttggaggcgaggtaaccacaatgtatcatttggaccgcccaatgtatttgttaggctatattgccaaccaaagccgggtttacttggtagacaaagaattcaatgtcataggatataccctgctgcttagcctgattgaatacaagactcttgtgatgcgaggcgatttggatagagccaatcaaattttacctacaattcctaaagagcagcataacaatgttgctcatttcttggaatctcggggaatgattgaagatgctttagaaattgcgacagatccagactacaaatttgatctggccatacaactgggtagacttgaaattgcaaaggaaattgctgaagaagtacagagcgagtctaaatggaagcagttaggagagttagccatgtcctcggggaagctgcaattggccgaggattgcatgaagtacgctatggatttgagtggtttgttactactatattcttctttgggagatgctgaaggggtgtcaaaacttgcatgccttgctaaggaacaggggaagaacaatgttgcctttctttgcttatttacgctgggtagattggaagattgtctgcagttattggtggagagtaaccggataccagaagctgctctgatggcacgttcttatcttccaagcaaagtttcggagatagtagctctatggagggaagatctcagcaaggttaatccaaaagcagctgaatctttagctgatcctgaagagtactcaaatctttttgaggattggcaagttgctctttctgttgaagcgaacactgcagagacaaggggagtttataccgctgcagaaaattatccatcccatgccgataaaccttccattacccttgtggaagcctttagaaacctgcaagttgaagcagaggaatcacttgaaaatggaaacatcgatcacgaggtagcagaagaaaacggtcatgtagagaatgaaggagatgaagaggaacaacaggaagaagaagtgaatgaagaagagggagttgtggatgcagactctacggacggtgctgtacttgttaatggaagtgagggtgaggaagagtggggtacgaataacaaaggaaacccatcagcctaa

SEQ ID NO: 75691 - protein, 918 aa, Arabidopsis thaliana
  peptide (1)..(918): Ceres Seq. ID no. 6449829
MPLRLDIKRKFAQRSERVKSVDLHPTEPWILASLYSGTVCIWNYQTQTITKSFEVTELPVRSAKFIPRKQWVVAGADDMYIRVYNYNTMDKVKVFEAHSDYIRCVAVHPTLPYVLSSSDDMLIKLWDWENGWACTQIFEGHSHYVMQVVFNPKDTNTFASASLDRTIKIWNLGSPDPNFTLDAHQKGVNCVDYFTGGDKPYLITGSDDHTAKVWDYQTKSCVQTLDGHTHNVSAVCFHPELPIIITGSEDGTVRIWHATTYRLENTLNYGLERVWAIGYIKSSRRVVIGYDEGTIMVKLGREIPVASMDSSGKIIWAKHNEIQTANIKSIGAGYEATDGERLPLSVKELGTCDLYPQSLKHNPNGRFVVVCGDGEYIIYTALAWRNRSFGSGLEFVWSSEGECAVRESSSKIKIFSKNFQERKSIRPTFSAEKIFGGTLLAMCSNDFICFYDWAECRLIQQIDVTVKNLYWAESGDLVAIASDTSFYILKYNRELVSSHFDSGRPTDEEGVEDAFEVLHENDERVRTGIWVGDCFIYNNSSWKLNYCVGGEVTTMYHLDRPMYLLGYIANQSRVYLVDKEFNVIGYTLLLSLIEYKTLVMRGDLDRANQILPTIPKEQHNNVAHFLESRGMIEDALEIATDPDYKFDLAIQLGRLEIAKEIAEEVQSESKWKQLGELAMSSGKLQLAEDCMKYAMDLSGLLLLYSSLGDAEGVSKLACLAKEQGKNNVAFLCLFTLGRLEDCLQLLVESNRIPEAALMARSYLPSKVSEIVALWREDLSKVNPKAAESLADPEEYSNLFEDWQVALSVEANTAETRGVYTAAENYPSHADKPSITLVEAFRNLQVEAEESLENGNIDHEVAEENGHVENEGDEEEQQEEEVNEEEGVVDADSTDGAVLVNGSEGEEEWGTNNKGNPSA

SEQ ID NO: 75692 - protein, 840 aa, Arabidopsis thaliana; identical to SEQ ID NO: 73271
  peptide (1)..(840): Ceres Seq. ID no. 6449830

SEQ ID NO: 75693 - protein, 830 aa, Arabidopsis thaliana; identical to SEQ ID NO: 73272
  peptide (1)..(830): Ceres Seq. ID no. 6449831

SEQ ID NO: 75694 - DNA, 1470 bp, Arabidopsis thaliana
  misc_feature (1)..(1470): Ceres Seq. ID no. 6449951
  misc_feature (1)..(1470): Ortholog of  Ceres SEQ ID NO 15174599 as cited in SEQ ID NO 53646
  misc_feature (1)..(1470): Ortholog of  Ceres SEQ ID NO 15174646 as cited in SEQ ID NO 54499
atggactccaattgcattcagttcctccatgacaagacgattctcgtcaccggtgttcccggtttcctcgccaaagtgtttgtggagaaaatattgaggattcaaccaaaggtaaagaagcttttccttcttttgagagcagcagacaatgaatcagccatgcaacggtttcacagtgaggttttggagaaagatctttttagagtgttgaaaaacgctttaggtgatgagaatctgaaagctttcataacagaaaaagtcgtacctattcccggtgatatatccgttgataatttgggagtgaagggttctgatctcttacaacatatgtggaatgagattgatatcattgtcaatgtagccgccacaacgaactttgatgaaagatatgatgttggtcttagcgtcaacacatttggaccgctcaatgtcctcaactttgccaagaagtgtgttaaaggacagttgcttcttcatgtttcaaccgcgtatgtgcgcggagagaagtctggacttttacatgagaaaacatttcacatgggggagacattgaacggacatagaaaattagtcattgagaccgaaatggagctaatgaaacaaaaactgaaagagctacagaaacaaaattgttcagaagaagagatttcacagtctatgaaagatcttggaatgtcaagggcaaagcttcatggatggccaaacacatatgtgtttaccaaatcaatgggagagatgcttcttggtaattatagagaaaaccttcccatcgttatcatccgtcccacaatgatcactagcactttttcagaaccatttcccggttggatcgaagggttaagaaccatagacagtgtgattgttgcatatggcaaaggaaggcttaaatgttttcttgcagatccaaactcagtccttgatcttatacctgtggacatggtcgcaaacgcaatggtcacggctgcggcaatacacgcagggaagctaggttcccagaccgtgtaccatgtcggatcatcttgtaaaaacccgatcacattcgaacagattcatgatctcgcggctagctacttcacgaaaaaccctcttgttagacgcgatggttcatctatactagtctccaaaggaactatcttgtccacaatggctcagttcagtttctacatgacccttcgttacaagctacctttgcagatgttgcgattgatatatgtaatttatccttggtggaatggtaataaatataaagacattgaccgcaagattaagctggcgatgcggttggtcgacctctacagaccttatgtcttatttgacgatacgaatactgagaaactgcggttgaaaagaaaggagattaataaagaaatgtatggtttgtttgaatttgatccaaagtctattgattgggaggattatatgacgaccattcatattcccggcctcatcacctatgtactcaaaaaataa

SEQ ID NO: 75695 - protein, 489 aa, Arabidopsis thaliana
  peptide (1)..(489): Ceres Seq. ID no. 6449952
MDSNCIQFLHDKTILVTGVPGFLAKVFVEKILRIQPKVKKLFLLLRAADNESAMQRFHSEVLEKDLFRVLKNALGDENLKAFITEKVVPIPGDISVDNLGVKGSDLLQHMWNEIDIIVNVAATTNFDERYDVGLSVNTFGPLNVLNFAKKCVKGQLLLHVSTAYVRGEKSGLLHEKTFHMGETLNGHRKLVIETEMELMKQKLKELQKQNCSEEEISQSMKDLGMSRAKLHGWPNTYVFTKSMGEMLLGNYRENLPIVIIRPTMITSTFSEPFPGWIEGLRTIDSVIVAYGKGRLKCFLADPNSVLDLIPVDMVANAMVTAAAIHAGKLGSQTVYHVGSSCKNPITFEQIHDLAASYFTKNPLVRRDGSSILVSKGTILSTMAQFSFYMTLRYKLPLQMLRLIYVIYPWWNGNKYKDIDRKIKLAMRLVDLYRPYVLFDDTNTEKLRLKRKEINKEMYGLFEFDPKSIDWEDYMTTIHIPGLITYVLKK

SEQ ID NO: 75696 - protein, 436 aa, Arabidopsis thaliana
  peptide (1)..(436): Ceres Seq. ID no. 6449953
MQRFHSEVLEKDLFRVLKNALGDENLKAFITEKVVPIPGDISVDNLGVKGSDLLQHMWNEIDIIVNVAATTNFDERYDVGLSVNTFGPLNVLNFAKKCVKGQLLLHVSTAYVRGEKSGLLHEKTFHMGETLNGHRKLVIETEMELMKQKLKELQKQNCSEEEISQSMKDLGMSRAKLHGWPNTYVFTKSMGEMLLGNYRENLPIVIIRPTMITSTFSEPFPGWIEGLRTIDSVIVAYGKGRLKCFLADPNSVLDLIPVDMVANAMVTAAAIHAGKLGSQTVYHVGSSCKNPITFEQIHDLAASYFTKNPLVRRDGSSILVSKGTILSTMAQFSFYMTLRYKLPLQMLRLIYVIYPWWNGNKYKDIDRKIKLAMRLVDLYRPYVLFDDTNTEKLRLKRKEINKEMYGLFEFDPKSIDWEDYMTTIHIPGLITYVLKK

SEQ ID NO: 75697 - protein, 380 aa, Arabidopsis thaliana
  peptide (1)..(380): Ceres Seq. ID no. 6449954
MWNEIDIIVNVAATTNFDERYDVGLSVNTFGPLNVLNFAKKCVKGQLLLHVSTAYVRGEKSGLLHEKTFHMGETLNGHRKLVIETEMELMKQKLKELQKQNCSEEEISQSMKDLGMSRAKLHGWPNTYVFTKSMGEMLLGNYRENLPIVIIRPTMITSTFSEPFPGWIEGLRTIDSVIVAYGKGRLKCFLADPNSVLDLIPVDMVANAMVTAAAIHAGKLGSQTVYHVGSSCKNPITFEQIHDLAASYFTKNPLVRRDGSSILVSKGTILSTMAQFSFYMTLRYKLPLQMLRLIYVIYPWWNGNKYKDIDRKIKLAMRLVDLYRPYVLFDDTNTEKLRLKRKEINKEMYGLFEFDPKSIDWEDYMTTIHIPGLITYVLKK

SEQ ID NO: 75698 - DNA, 1345 bp, Arabidopsis thaliana
  misc_feature (1)..(1345): Ceres Seq. ID no. 6450166
  misc_feature (1)..(1345): Ortholog of  Ceres SEQ ID NO 13595861 as cited in SEQ ID NO 58153
  misc_feature (1)..(1345): Ortholog of  Ceres SEQ ID NO 13584292 as cited in SEQ ID NO 63687
tcagctaatatcaagtaacgtggaaaggatttgttccgtcaaaggttggtgattatacagagactgagttcctgataagttggattgagcttgttttcatttgcggatctttgagaaaaaagtttgcaactttatggctctggaacaacaacatgtttgtgaaaagcggcttcaagccaagaccttttctacccaagagtttcagttgactctcaattgggatgatttaacttgtcccatttgtttggatttccctcacaatggtgtgcttctccagtgttcttcttacggaaacggttgccgtgcttttgtctgcaatactgatcaccttcactctaactgtttggatcgtttcattagcgcctgtggtactgaatcacctcctgctcctgatgagcctcgctctaaggttttagaagagagttgcaaacctgtgtgtccactgtgtagaggagaagttactggctggcttgttgtagaagaagctcgtcttcgtcttgatgagaaaaaacgttgctgtgaggaagaacgatgcaggtttatgggtacttacttggagcttcgcaaacatgctcagtcagagcatccggattctcgtccttcagaaattgatccagcacggaagcttgactgggagaatttccagcagtcgtctgaaataatcgacgtgttgagcacaattcactcagaagttccaagaggagtggttttaggggactatgtgatcgaatatggagatgatgacacaggagatgaatttgaggatgttcccaacaatgaaggaaactggtggacatcttgtattctctatcaaatgtttgacaatataaggaatgccaggaatcgaagaagatcaagaatgagtgagagtaggagagggagtcgccgctctagctatgagaattccaactctgatgacagctcagtagcatccatagagtttccggagtatagagtagatgagatcgatgacgagttcatcagcacaagtggagctaacagaagtagctctatgcaccaaagttcaagaaggcgtcgaacccgcttctatgaaaattagtcagctggaaaatgaagcgaagcaaatgatgcagaccagcctatttgtagccagtgttcttggttttggacctctttcttctttttctttttgtttctacacataaattttattttaggtttgtcttgtgacattactcgcagcagtcgcagcctttgtacaaaaactaaacaaaaagcctttttgggatattgtagtacccttttgtcgttgtctcttctttgttttacatgcatctctggacaatgtagatattgagagtaaatcagaagtcaacgttcgtgt

SEQ ID NO: 75699 - protein, 308 aa, Arabidopsis thaliana; identical to SEQ ID NO: 42779
  peptide (1)..(308): Ceres Seq. ID no. 6450167

SEQ ID NO: 75700 - protein, 172 aa, Arabidopsis thaliana; identical to SEQ ID NO: 42780
  peptide (1)..(172): Ceres Seq. ID no. 6450168

SEQ ID NO: 75701 - DNA, 1044 bp, Arabidopsis thaliana
  misc_feature (1)..(1044): Ceres Seq. ID no. 6450265
  misc_feature (1)..(1044): Ortholog of  Ceres SEQ ID NO 15226198 as cited in SEQ ID NO 62150
atggcgtcgatgatgtttactgattgctcctcctccacaacgtcgcgtctcatccatttatacaaccgcaatggtgttttcctcccccgcccgagcgtcagccaattcagcttacggacaactgcgtctacttggcgctgcactctctccattcgctcctcttcttctccatctgcgattgtaattgatggaaaggctgaggccaaaaagattagagatgatatcaaaatcgaagtttcaagaatgaaggaatcaatcggtgtggttcctggtttagcagtaatccttaacaaggaatccgctacttacgtgaggaacaagaaaatagcttgtgaatccgtcggaattaaatcagtccaagttcgtctagctgaagattcatcagaagaagaggtgttgaaatatgtatcaggattcaatgatgatccttctgttcacggagtccttgttcagttgcctctaccatcgcatatggatgaacagaacatattgaatgcggttagtatagagaaggacgttgatggatttcacccgctaaatattggacggcttgccatgcgtggtagagaacctttattcgttccatgtactccaaaaggatgcatcgagttgttgcacagatacaacattgaattcaaaggcaaaagagcagttgttattggaaggagtaacattgttggtatgccagctgctctgttgctgcagaaggaggatgcaaccgttagcattatccattcaagaaccatgaaccctgaagaactcacaagacaagctgatatcctaatctcagctgttgggaaaccaaacatggtcagaggaagctggataaaaccgggtgcagtcctcatcgatgttgggattaaacctgttgaggatccaagtgctgccggtggagagcggttggttggagacatttgctatgtggaggctagcaaaattgcatcagccatcacacctgttcctggtgatgtaggaccaatgaccatagccatgcttctatccaacactttaacatcagccaagagaattcacaacttccagtga

SEQ ID NO: 75702 - protein, 347 aa, Arabidopsis thaliana
  peptide (1)..(347): Ceres Seq. ID no. 6450266
MASMMFTDCSSSTTSRLIHLYNRNGVFLPRPSVSQFSLRTTASTWRCTLSIRSSSSPSAIVIDGKAEAKKIRDDIKIEVSRMKESIGVVPGLAVILNKESATYVRNKKIACESVGIKSVQVRLAEDSSEEEVLKYVSGFNDDPSVHGVLVQLPLPSHMDEQNILNAVSIEKDVDGFHPLNIGRLAMRGREPLFVPCTPKGCIELLHRYNIEFKGKRAVVIGRSNIVGMPAALLLQKEDATVSIIHSRTMNPEELTRQADILISAVGKPNMVRGSWIKPGAVLIDVGIKPVEDPSAAGGERLVGDICYVEASKIASAITPVPGDVGPMTIAMLLSNTLTSAKRIHNFQ

SEQ ID NO: 75703 - protein, 344 aa, Arabidopsis thaliana
  peptide (1)..(344): Ceres Seq. ID no. 6450267
MMFTDCSSSTTSRLIHLYNRNGVFLPRPSVSQFSLRTTASTWRCTLSIRSSSSPSAIVIDGKAEAKKIRDDIKIEVSRMKESIGVVPGLAVILNKESATYVRNKKIACESVGIKSVQVRLAEDSSEEEVLKYVSGFNDDPSVHGVLVQLPLPSHMDEQNILNAVSIEKDVDGFHPLNIGRLAMRGREPLFVPCTPKGCIELLHRYNIEFKGKRAVVIGRSNIVGMPAALLLQKEDATVSIIHSRTMNPEELTRQADILISAVGKPNMVRGSWIKPGAVLIDVGIKPVEDPSAAGGERLVGDICYVEASKIASAITPVPGDVGPMTIAMLLSNTLTSAKRIHNFQ

SEQ ID NO: 75704 - protein, 343 aa, Arabidopsis thaliana
  peptide (1)..(343): Ceres Seq. ID no. 6450268
MFTDCSSSTTSRLIHLYNRNGVFLPRPSVSQFSLRTTASTWRCTLSIRSSSSPSAIVIDGKAEAKKIRDDIKIEVSRMKESIGVVPGLAVILNKESATYVRNKKIACESVGIKSVQVRLAEDSSEEEVLKYVSGFNDDPSVHGVLVQLPLPSHMDEQNILNAVSIEKDVDGFHPLNIGRLAMRGREPLFVPCTPKGCIELLHRYNIEFKGKRAVVIGRSNIVGMPAALLLQKEDATVSIIHSRTMNPEELTRQADILISAVGKPNMVRGSWIKPGAVLIDVGIKPVEDPSAAGGERLVGDICYVEASKIASAITPVPGDVGPMTIAMLLSNTLTSAKRIHNFQ

SEQ ID NO: 75705 - DNA, 579 bp, Arabidopsis thaliana
  misc_feature (1)..(579): Ceres Seq. ID no. 6450614
  misc_feature (1)..(579): Ortholog of  Ceres SEQ ID NO 14316436 as cited in SEQ ID NO 59213
atgacgttagagagttacgccggcgatgttcacacggtaccacaatcggagaactcgatggaggagagaggcggcggtgagcttttcgtgccacctcttaacttcgctatggtcgataatggaattttccgttctggttttcctgaacccgtcagtttcagctttctccagtctttatatttgtgtcctgaggcatatccagaggtgaatagagagtttgcaaaatcaaatgggatccaagtttttcaatttggaattgaaagatgcaaggaaccatttgttaatatccctgacgaggtaatccgagaagccttacaagtacttctagatacagagaatcatcctgtcttgattcattgcaaaagtggaaagcatcggacgggatgtcttgtaggttgtgtgaggaagattcaaagatggtgtttgtcttctatcttcgacgagtaccaaagattcgcagctgcgaaagctagaatctcagaccagagattcatggagctctttgacatctccaatctaaagcatacaccactttccttctcatgctccaagaggtatactaatactattgattactga

SEQ ID NO: 75706 - protein, 192 aa, Arabidopsis thaliana
  peptide (1)..(192): Ceres Seq. ID no. 6450615
MTLESYAGDVHTVPQSENSMEERGGGELFVPPLNFAMVDNGIFRSGFPEPVSFSFLQSLYLCPEAYPEVNREFAKSNGIQVFQFGIERCKEPFVNIPDEVIREALQVLLDTENHPVLIHCKSGKHRTGCLVGCVRKIQRWCLSSIFDEYQRFAAAKARISDQRFMELFDISNLKHTPLSFSCSKRYTNTIDY

SEQ ID NO: 75707 - protein, 173 aa, Arabidopsis thaliana
  peptide (1)..(173): Ceres Seq. ID no. 6450616
MEERGGGELFVPPLNFAMVDNGIFRSGFPEPVSFSFLQSLYLCPEAYPEVNREFAKSNGIQVFQFGIERCKEPFVNIPDEVIREALQVLLDTENHPVLIHCKSGKHRTGCLVGCVRKIQRWCLSSIFDEYQRFAAAKARISDQRFMELFDISNLKHTPLSFSCSKRYTNTIDY

SEQ ID NO: 75708 - protein, 156 aa, Arabidopsis thaliana
  peptide (1)..(156): Ceres Seq. ID no. 6450617
MVDNGIFRSGFPEPVSFSFLQSLYLCPEAYPEVNREFAKSNGIQVFQFGIERCKEPFVNIPDEVIREALQVLLDTENHPVLIHCKSGKHRTGCLVGCVRKIQRWCLSSIFDEYQRFAAAKARISDQRFMELFDISNLKHTPLSFSCSKRYTNTIDY

SEQ ID NO: 75709 - DNA, 1764 bp, Arabidopsis thaliana
  misc_feature (1)..(1764): Ceres Seq. ID no. 6451947
  misc_feature (1)..(1764): Ortholog of  Ceres SEQ ID NO 12586556 as cited in SEQ ID NO 64667
  misc_feature (1)..(1764): Ortholog of  Ceres SEQ ID NO 13660894 as cited in SEQ ID NO 67475
atgcttatccctcactatcttcatcagctccagctctgcgccaggaatcgaaccctaaccactgctaaagccctccatgcccacatcgtcaagctcgggatcgttcaatgttgccctttggccaacacacttgtcaatgtctatgggaaatgcggtgctgcttctcatgctctccaggtgttcgacgaaatgcctcatagagatcacatcgcctgggcctcggttctcacagctcttaatcaagccaatctctctggtaagacactatcagtattttcttcagtgggttcgagctctgggttgcgtcctgatgattttgtgttctcggctcttgttaaggcttgtgctaacttaggatctattgatcacgggaggcaagttcattgccattttatagtctctgagtatgctaatgatgaagttgttaagtcttcactggttgatatgtatgctaaatgtggattgcttaatagtgctaaagcagttttcgattctataagagtgaaaaacaccatttcatggactgcaatggtatctggatatgctaaaagcggaagaaaggaagaaagtgggaaagggcttgaagctttttctgttttcactgaaatgaggagagaaagagttgacattttggatcctttagttctttcgagcatcgttggcgcttgtgctaatttggcagcttctatagcggggaggcaggttcatgggttggttatagctctaggatttgattcttgtgtgtttattagtaacgcccttatcgatatgtacgctaaatgcagcgatgttatagctgcaaaggatattttcagtaggatgcgtcacagagatgtagtttcatggacatcgcttatagttggaatggctcagcacgggcaggctgagaaggcattagcgttgtatgatgacatggtttctcacggtgtaaagcccaatgaggtcacatttgttgggttgatatatgcgtgtagccatgtcggttttgttgagaaaggccgtgagcttttccaatcaatgactaaggactatggaattcgcccatctttgcagcattatacatgcttattggatcttctcggtcgctctggactccttgatgaggctgagaacttaattcatacaatgccgtttcctccagatgaaccaacatgggctgctttacttagcgcttgcaagcgccagggacgaggtcagatgggtataagaatcgctgatcatctcgtaagcagctttaaactgaaagatccatcgacttatatacttttatcaaacatctatgcaagtgcttctttgtggggaaaagtatcagaagcaagaaggaaactaggagaaatggaagttagaaaggatccagggcacagtagcgtcgaggtacggaaagaaaccgaagtgttttacgcaggagaaacatctcatcctctaaaagaagacatttttcgattgcttaagaagctagaggaagaaatgaggataagaaatggttatgttcctgatactagttggatcctacacgacatggatgagcaagagaaagaaaagcttttgttttggcatagcgaacgatccgctgttgcatacggattgcttaaagctgttccgggaactcctatacggattgtgaaaaatctaagggtttgtggagattgtcatgttgttctgaaacatataagtgagattacagaaagagagattatagttagagatgcgactagatatcatcattttaagggaggaaaatgttcctgcaatgacttctggtaa

SEQ ID NO: 75710 - protein, 587 aa, Arabidopsis thaliana
  peptide (1)..(587): Ceres Seq. ID no. 6451948
MLIPHYLHQLQLCARNRTLTTAKALHAHIVKLGIVQCCPLANTLVNVYGKCGAASHALQVFDEMPHRDHIAWASVLTALNQANLSGKTLSVFSSVGSSSGLRPDDFVFSALVKACANLGSIDHGRQVHCHFIVSEYANDEVVKSSLVDMYAKCGLLNSAKAVFDSIRVKNTISWTAMVSGYAKSGRKEESGKGLEAFSVFTEMRRERVDILDPLVLSSIVGACANLAASIAGRQVHGLVIALGFDSCVFISNALIDMYAKCSDVIAAKDIFSRMRHRDVVSWTSLIVGMAQHGQAEKALALYDDMVSHGVKPNEVTFVGLIYACSHVGFVEKGRELFQSMTKDYGIRPSLQHYTCLLDLLGRSGLLDEAENLIHTMPFPPDEPTWAALLSACKRQGRGQMGIRIADHLVSSFKLKDPSTYILLSNIYASASLWGKVSEARRKLGEMEVRKDPGHSSVEVRKETEVFYAGETSHPLKEDIFRLLKKLEEEMRIRNGYVPDTSWILHDMDEQEKEKLLFWHSERSAVAYGLLKAVPGTPIRIVKNLRVCGDCHVVLKHISEITEREIIVRDATRYHHFKGGKCSCNDFW

SEQ ID NO: 75711 - protein, 524 aa, Arabidopsis thaliana
  peptide (1)..(524): Ceres Seq. ID no. 6451949
MPHRDHIAWASVLTALNQANLSGKTLSVFSSVGSSSGLRPDDFVFSALVKACANLGSIDHGRQVHCHFIVSEYANDEVVKSSLVDMYAKCGLLNSAKAVFDSIRVKNTISWTAMVSGYAKSGRKEESGKGLEAFSVFTEMRRERVDILDPLVLSSIVGACANLAASIAGRQVHGLVIALGFDSCVFISNALIDMYAKCSDVIAAKDIFSRMRHRDVVSWTSLIVGMAQHGQAEKALALYDDMVSHGVKPNEVTFVGLIYACSHVGFVEKGRELFQSMTKDYGIRPSLQHYTCLLDLLGRSGLLDEAENLIHTMPFPPDEPTWAALLSACKRQGRGQMGIRIADHLVSSFKLKDPSTYILLSNIYASASLWGKVSEARRKLGEMEVRKDPGHSSVEVRKETEVFYAGETSHPLKEDIFRLLKKLEEEMRIRNGYVPDTSWILHDMDEQEKEKLLFWHSERSAVAYGLLKAVPGTPIRIVKNLRVCGDCHVVLKHISEITEREIIVRDATRYHHFKGGKCSCNDFW

SEQ ID NO: 75712 - protein, 439 aa, Arabidopsis thaliana
  peptide (1)..(439): Ceres Seq. ID no. 6451950
MYAKCGLLNSAKAVFDSIRVKNTISWTAMVSGYAKSGRKEESGKGLEAFSVFTEMRRERVDILDPLVLSSIVGACANLAASIAGRQVHGLVIALGFDSCVFISNALIDMYAKCSDVIAAKDIFSRMRHRDVVSWTSLIVGMAQHGQAEKALALYDDMVSHGVKPNEVTFVGLIYACSHVGFVEKGRELFQSMTKDYGIRPSLQHYTCLLDLLGRSGLLDEAENLIHTMPFPPDEPTWAALLSACKRQGRGQMGIRIADHLVSSFKLKDPSTYILLSNIYASASLWGKVSEARRKLGEMEVRKDPGHSSVEVRKETEVFYAGETSHPLKEDIFRLLKKLEEEMRIRNGYVPDTSWILHDMDEQEKEKLLFWHSERSAVAYGLLKAVPGTPIRIVKNLRVCGDCHVVLKHISEITEREIIVRDATRYHHFKGGKCSCNDFW

SEQ ID NO: 75713 - DNA, 2055 bp, Arabidopsis thaliana
  misc_feature (1)..(2055): Ceres Seq. ID no. 6452034
  misc_feature (1)..(2055): Ortholog of  Ceres SEQ ID NO 12586556 as cited in SEQ ID NO 64667
  misc_feature (1)..(2055): Ortholog of  Ceres SEQ ID NO 13660894 as cited in SEQ ID NO 67475
atgagcctcctctccgcggacgcacttgggttacttctcaagaatgcaatctccgcgagttccatgcgtttgggtcgcgtcgttcacgcaagaatcgtcaaaaccctcgattcaccaccacctccgtttctcgcgaactatctcatcaacatgtactcaaaactcgaccatccggaatcagcccgactcgttctccgactcactcctgcacgaaacgtcgtctcttggacttcacttatctccggacttgctcagaacggtcatttctccaccgctttggttgaattcttcgagatgcgacgagaaggtgttgttccaaatgacttcactttcccttgtgcttttaaagctgtggcttctctgcgtttacccgttactgggaagcagattcatgcgcttgctgtgaagtgtggtaggatacttgatgtgtttgttgggtgtagtgcttttgatatgtattgcaaaactaggcttagagatgatgcacggaagttgttcgatgaaattcctgagaggaaccttgaaacttggaatgcttttatatctaactctgtgactgatggaaggcctagggaagctattgaagcgtttattgagtttagaaggattgatgggcacccgaattcgataactttttgtgctttccttaatgcttgttcggattggttacacttgaatctaggaatgcagttacacgggcttgtgttacgaagtgggtttgatacagacgtctctgtttgcaatgggttgattgatttctatggaaagtgtaagcagatacgtagcagtgagattatctttactgaaatgggaactaaaaatgctgtttcttggtgttcattggttgctgcatatgtgcagaatcatgaggatgagaaggcgtctgtattatatttacgctcaaggaaggatattgttgagacctctgattttatgatatcaagtgttctgagtgcgtgtgctggtatggctggtcttgagttgggaagatcgatacatgctcacgctgtgaaggcgtgtgttgaaaggactatatttgttggaagtgccctcgttgacatgtatggaaaatgtggatgtatagaagattcagaacaagcgtttgatgagatgcctgagaagaacttagtgactcggaattcattgatcggaggatatgctcatcagggtcaggttgatatggcattggctttatttgaagaaatggcaccacgtggatgtggtccaactccaaattatatgacttttgtgtccttgctttccgcttgtagtagagcaggggctgtggaaaatggtatgaagatatttgattcgatgaggagtacttatggcattgagccaggggctgagcattattcatgcatcgtggacatgctagggcgagcgggaatggtagaacgggcttatgaattcataaagaaaatgccaattcaaccgacaatttcggtttggggtgctcttcagaatgcttgtaggatgcatggtaagccacagctgggattactagcagctgagaaccttttcaaactcgaccctaaggattcaggcaaccacgttctgctttccaatacgtttgcagcggctgggaggtgggcggaagccaacaccgtaagagaggagctgaaaggcgtagggatcaagaaaggagccggatacagttggatcacagtgaagaaccaagtccatgcctttcaagccaaggacagatcccacatactgaacaaagaaattcaaacaacgctggccaagctaaggaacgaaatggaagctgcagggtacaaacccgacctgaaactctcgctttacgatctggaggaagaagaaaaagcagcagaagtctcgcaccacagtgagaaactggctctagcatttggattgttatctttaccactcagtgtcccaatcagaatcaccaagaaccttagaatctgcggagattgccacagcttcttcaagtttgtctctgggagtgttaaacgagagatcattgtgagagacaataaccggtttcatcggtttaaagatgggatatgttcttgtaaggattattggtaa

SEQ ID NO: 75714 - protein, 684 aa, Arabidopsis thaliana
  peptide (1)..(684): Ceres Seq. ID no. 6452035
MSLLSADALGLLLKNAISASSMRLGRVVHARIVKTLDSPPPPFLANYLINMYSKLDHPESARLVLRLTPARNVVSWTSLISGLAQNGHFSTALVEFFEMRREGVVPNDFTFPCAFKAVASLRLPVTGKQIHALAVKCGRILDVFVGCSAFDMYCKTRLRDDARKLFDEIPERNLETWNAFISNSVTDGRPREAIEAFIEFRRIDGHPNSITFCAFLNACSDWLHLNLGMQLHGLVLRSGFDTDVSVCNGLIDFYGKCKQIRSSEIIFTEMGTKNAVSWCSLVAAYVQNHEDEKASVLYLRSRKDIVETSDFMISSVLSACAGMAGLELGRSIHAHAVKACVERTIFVGSALVDMYGKCGCIEDSEQAFDEMPEKNLVTRNSLIGGYAHQGQVDMALALFEEMAPRGCGPTPNYMTFVSLLSACSRAGAVENGMKIFDSMRSTYGIEPGAEHYSCIVDMLGRAGMVERAYEFIKKMPIQPTISVWGALQNACRMHGKPQLGLLAAENLFKLDPKDSGNHVLLSNTFAAAGRWAEANTVREELKGVGIKKGAGYSWITVKNQVHAFQAKDRSHILNKEIQTTLAKLRNEMEAAGYKPDLKLSLYDLEEEEKAAEVSHHSEKLALAFGLLSLPLSVPIRITKNLRICGDCHSFFKFVSGSVKREIIVRDNNRFHRFKDGICSCKDYW

SEQ ID NO: 75715 - protein, 663 aa, Arabidopsis thaliana
  peptide (1)..(663): Ceres Seq. ID no. 6452036
MRLGRVVHARIVKTLDSPPPPFLANYLINMYSKLDHPESARLVLRLTPARNVVSWTSLISGLAQNGHFSTALVEFFEMRREGVVPNDFTFPCAFKAVASLRLPVTGKQIHALAVKCGRILDVFVGCSAFDMYCKTRLRDDARKLFDEIPERNLETWNAFISNSVTDGRPREAIEAFIEFRRIDGHPNSITFCAFLNACSDWLHLNLGMQLHGLVLRSGFDTDVSVCNGLIDFYGKCKQIRSSEIIFTEMGTKNAVSWCSLVAAYVQNHEDEKASVLYLRSRKDIVETSDFMISSVLSACAGMAGLELGRSIHAHAVKACVERTIFVGSALVDMYGKCGCIEDSEQAFDEMPEKNLVTRNSLIGGYAHQGQVDMALALFEEMAPRGCGPTPNYMTFVSLLSACSRAGAVENGMKIFDSMRSTYGIEPGAEHYSCIVDMLGRAGMVERAYEFIKKMPIQPTISVWGALQNACRMHGKPQLGLLAAENLFKLDPKDSGNHVLLSNTFAAAGRWAEANTVREELKGVGIKKGAGYSWITVKNQVHAFQAKDRSHILNKEIQTTLAKLRNEMEAAGYKPDLKLSLYDLEEEEKAAEVSHHSEKLALAFGLLSLPLSVPIRITKNLRICGDCHSFFKFVSGSVKREIIVRDNNRFHRFKDGICSCKDYW

SEQ ID NO: 75716 - protein, 634 aa, Arabidopsis thaliana
  peptide (1)..(634): Ceres Seq. ID no. 6452037
MYSKLDHPESARLVLRLTPARNVVSWTSLISGLAQNGHFSTALVEFFEMRREGVVPNDFTFPCAFKAVASLRLPVTGKQIHALAVKCGRILDVFVGCSAFDMYCKTRLRDDARKLFDEIPERNLETWNAFISNSVTDGRPREAIEAFIEFRRIDGHPNSITFCAFLNACSDWLHLNLGMQLHGLVLRSGFDTDVSVCNGLIDFYGKCKQIRSSEIIFTEMGTKNAVSWCSLVAAYVQNHEDEKASVLYLRSRKDIVETSDFMISSVLSACAGMAGLELGRSIHAHAVKACVERTIFVGSALVDMYGKCGCIEDSEQAFDEMPEKNLVTRNSLIGGYAHQGQVDMALALFEEMAPRGCGPTPNYMTFVSLLSACSRAGAVENGMKIFDSMRSTYGIEPGAEHYSCIVDMLGRAGMVERAYEFIKKMPIQPTISVWGALQNACRMHGKPQLGLLAAENLFKLDPKDSGNHVLLSNTFAAAGRWAEANTVREELKGVGIKKGAGYSWITVKNQVHAFQAKDRSHILNKEIQTTLAKLRNEMEAAGYKPDLKLSLYDLEEEEKAAEVSHHSEKLALAFGLLSLPLSVPIRITKNLRICGDCHSFFKFVSGSVKREIIVRDNNRFHRFKDGICSCKDYW

SEQ ID NO: 75717 - DNA, 828 bp, Arabidopsis thaliana
  misc_feature (1)..(828): Ceres Seq. ID no. 6452060
  misc_feature (1)..(828): Ortholog of  Ceres SEQ ID NO 12612333 as cited in SEQ ID NO 56421
atggcgcttcttcacaagcaaaacatttcctttgtgatactcctcctcctcggtctccttgccgtctcttatgcttgtgattgtagtgaccctcctaaaccatcaccacaccctgttaaaccgccaaaacatcccgctaaaccacctaagccccctaccgttaaaccacctactcacaccccaaagcctcccactgtgaagcctccacctccatacattccatgccctcctccgccctatactccaaaacctccaaccgtgaagccaccaccacctccctacgtgaagccaccaccacctcccactgtgaagccaccaccacctccttacgtgaagccaccaccaccccctaccgtgaagccaccaccaccacccacgccgtatactccaccaccacccacgccgtatactcctccaccacccacggtgaagccaccaccaccaccggtcgttaccccaccaccgccaacaccaaccccagaggcgccatgtccgccaccaccaccaacaccatatcctcctccgcctaaaccggaaacttgtccaatcgacgcactgaaactaggcgcatgtgtggacgtgctaggcggtttgattcacatcggactagggaaaagctacgctaaggcaaagtgttgcccacttcttgacgacttagtgggtcttgacgcggcggtttgtctctgcaccaccattagagcgaagcttctcaacattgacctcattatcccaattgctctagaggttcttgtcgactgtggtaagactcctccacctcgtggcttcaagtgtcctactccgctaaaaaggactcctctcttgggttga

SEQ ID NO: 75718 - protein, 275 aa, Arabidopsis thaliana
  peptide (1)..(275): Ceres Seq. ID no. 6452061
MALLHKQNISFVILLLLGLLAVSYACDCSDPPKPSPHPVKPPKHPAKPPKPPTVKPPTHTPKPPTVKPPPPYIPCPPPPYTPKPPTVKPPPPPYVKPPPPPTVKPPPPPYVKPPPPPTVKPPPPPTPYTPPPPTPYTPPPPTVKPPPPPVVTPPPPTPTPEAPCPPPPPTPYPPPPKPETCPIDALKLGACVDVLGGLIHIGLGKSYAKAKCCPLLDDLVGLDAAVCLCTTIRAKLLNIDLIIPIALEVLVDCGKTPPPRGFKCPTPLKRTPLLG

SEQ ID NO: 75719 - DNA, 996 bp, Arabidopsis thaliana
  misc_feature (1)..(996): Ceres Seq. ID no. 6452512
  misc_feature (1)..(996): Ortholog of  Ceres SEQ ID NO 14312333 as cited in SEQ ID NO 54757
  misc_feature (1)..(996): Ortholog of  Ceres SEQ ID NO 15168584 as cited in SEQ ID NO 57127
atgcaagagttagactcttctaacgatgaatgggtgaaagaacttgaaggagagaacgaggaatcgaaattcacagggaggagattagttaaaaagtcgatttctgttcctgaattggtagacgaagttgaagaagatctcgacgattttacagaacctgcggatgattttaatgacaaagtagggaagaagagacagaggaagaagaaagatgagtctggtcttgagaagacaaaaaagaacaagaagcaaaattccgaagaggttcaagagatgtgggattcaattacgaacaacactaactcacagtatggtgataaggtcgtagtaaaacctcctaagaaaaaagatgaagatgctgaggagataaaaaaactgttcagtcttaggaaaaagaagagcaagtgcgataaaacctccatggagattgggatgcaagtagaacaagtgatggcgaatcttgaaatcgcggtagaagacgacgtaatttgtaacagagaaggaaaacccgccattaataaactcatgaagttacctcttctcaatgaaactctctcaaagaaacctcttcaaggtgagttcttagaccatggagtacttaaccttctcaagaattggctcgagccgcttcctgatggtagcttgccgaatataaacatccgcagtgccgttttgatgattctcaacgattttcgtatcgatcttgatcaagactctagaagagaacagttgatcaagagcggtctcgggaaggtcataatgttcttatcaaaatcagatgaagaaactacacctaataggagactcgctaatgatataatcaacaaatggggccgtatcatttataataagagcacaagatatgataacatgtttactcaggaggaacttgatgagcaacggcaaatactattaagaagacagaccaaaacagctcctaaggtgtctggaacaagagctagagactttaatacagatattgacctttatgagtaa

SEQ ID NO: 75720 - protein, 331 aa, Arabidopsis thaliana
  peptide (1)..(331): Ceres Seq. ID no. 6452513
MQELDSSNDEWVKELEGENEESKFTGRRLVKKSISVPELVDEVEEDLDDFTEPADDFNDKVGKKRQRKKKDESGLEKTKKNKKQNSEEVQEMWDSITNNTNSQYGDKVVVKPPKKKDEDAEEIKKLFSLRKKKSKCDKTSMEIGMQVEQVMANLEIAVEDDVICNREGKPAINKLMKLPLLNETLSKKPLQGEFLDHGVLNLLKNWLEPLPDGSLPNINIRSAVLMILNDFRIDLDQDSRREQLIKSGLGKVIMFLSKSDEETTPNRRLANDIINKWGRIIYNKSTRYDNMFTQEELDEQRQILLRRQTKTAPKVSGTRARDFNTDIDLYE

SEQ ID NO: 75721 - protein, 240 aa, Arabidopsis thaliana
  peptide (1)..(240): Ceres Seq. ID no. 6452514
MWDSITNNTNSQYGDKVVVKPPKKKDEDAEEIKKLFSLRKKKSKCDKTSMEIGMQVEQVMANLEIAVEDDVICNREGKPAINKLMKLPLLNETLSKKPLQGEFLDHGVLNLLKNWLEPLPDGSLPNINIRSAVLMILNDFRIDLDQDSRREQLIKSGLGKVIMFLSKSDEETTPNRRLANDIINKWGRIIYNKSTRYDNMFTQEELDEQRQILLRRQTKTAPKVSGTRARDFNTDIDLYE

SEQ ID NO: 75722 - protein, 191 aa, Arabidopsis thaliana
  peptide (1)..(191): Ceres Seq. ID no. 6452515
MEIGMQVEQVMANLEIAVEDDVICNREGKPAINKLMKLPLLNETLSKKPLQGEFLDHGVLNLLKNWLEPLPDGSLPNINIRSAVLMILNDFRIDLDQDSRREQLIKSGLGKVIMFLSKSDEETTPNRRLANDIINKWGRIIYNKSTRYDNMFTQEELDEQRQILLRRQTKTAPKVSGTRARDFNTDIDLYE

SEQ ID NO: 75723 - DNA, 1482 bp, Arabidopsis thaliana
  misc_feature (1)..(1482): Ceres Seq. ID no. 6452552
  misc_feature (1)..(1482): Ortholog of  Ceres SEQ ID NO 13596984 as cited in SEQ ID NO 63196
atggcttcacaaaccaaactcaagaaacctaattctcattttagcctttgtactttcctcttcttcaccgtcctctttaccataccggctctctttctcctccgcacctccacttgctcctcctccaccgctgcagtctcctcctcctcctctgacacaaaccagccaccgtggtctggcgacctccaaaccgcccaatttgcctggaaccgccttgatttctccttaaccaaccctcctcccaaaacactaaaactcgctgttttctcccggaaatggcccacgggtcccaatcctggcggcatggaacgccacgccttcactctatacaccgccttagctcgccgtggacaccgtgtccacgttttcacctctcccttagaccaatcccctgaaaccaacaaaatcccccctgtttccgaccaaatcatttaccctataatccattctcacggcgacgcggagcccggaaaatggcggtacaacaaggcatgggagctttaccaagaagaaaacaagaaagaacctttcgatgcggttcactctgaaagtgttgctttacctcactggatcgcccgggaggttccaaacctcgctgtatcctggcacggcattgcgttagagagcttacaatcaagtatttaccaagacctgatccgtaaaccagacgaaccaagatcacaaggcttcaatgcaagtctatacggtgccgtgcttcccaagatactggacgaaatcagattcttccacaactacgctcaccacatcgctatcagcgatagctgcggagaaatgctaagagacgtttaccaaatccctgagaaaagggttcatgtgatcctcaatggagtcgacgagaacggattcacatcagacaagaagctacgtactctgtttaggtcaaaattagggttaccagaaaactcatcagcgattgttttaggagctgctgggagattagtcaaagacaaaggacatccattgctcttcgaagctttcgcgaaaataatccaaacgtattcaaatgtttacctcgtagtagctggatcagggccatgggagcaacgttacaaggaattaggggaaaaagtttccattttgggatctctaaacccaaatgagctcaagggtttctacaacgggatcgatttgttcgtgaatccaacgcttagaccacaaggtcttgatttaacgttaatggaagcgatgttgagtggtaaaccagtgatggcatctaggtacgcaagcataaagaggactatagtggtgaatgatgagtttgggtttatgtttgcgccaaatgtggaagctttgacggcggttatggaggttgctgtggctgaaggagcggagagattggcggagagaggaaggaagtgtaaagagtatgctgcggagatgtttacggcgagtaaaatggctttggcttatgagaggctttttctttgtattaatgatcagaaattttgtatttacccttaa

SEQ ID NO: 75724 - protein, 493 aa, Arabidopsis thaliana
  peptide (1)..(493): Ceres Seq. ID no. 6452553
MASQTKLKKPNSHFSLCTFLFFTVLFTIPALFLLRTSTCSSSTAAVSSSSSDTNQPPWSGDLQTAQFAWNRLDFSLTNPPPKTLKLAVFSRKWPTGPNPGGMERHAFTLYTALARRGHRVHVFTSPLDQSPETNKIPPVSDQIIYPIIHSHGDAEPGKWRYNKAWELYQEENKKEPFDAVHSESVALPHWIAREVPNLAVSWHGIALESLQSSIYQDLIRKPDEPRSQGFNASLYGAVLPKILDEIRFFHNYAHHIAISDSCGEMLRDVYQIPEKRVHVILNGVDENGFTSDKKLRTLFRSKLGLPENSSAIVLGAAGRLVKDKGHPLLFEAFAKIIQTYSNVYLVVAGSGPWEQRYKELGEKVSILGSLNPNELKGFYNGIDLFVNPTLRPQGLDLTLMEAMLSGKPVMASRYASIKRTIVVNDEFGFMFAPNVEALTAVMEVAVAEGAERLAERGRKCKEYAAEMFTASKMALAYERLFLCINDQKFCIYP

SEQ ID NO: 75725 - protein, 392 aa, Arabidopsis thaliana
  peptide (1)..(392): Ceres Seq. ID no. 6452554
MERHAFTLYTALARRGHRVHVFTSPLDQSPETNKIPPVSDQIIYPIIHSHGDAEPGKWRYNKAWELYQEENKKEPFDAVHSESVALPHWIAREVPNLAVSWHGIALESLQSSIYQDLIRKPDEPRSQGFNASLYGAVLPKILDEIRFFHNYAHHIAISDSCGEMLRDVYQIPEKRVHVILNGVDENGFTSDKKLRTLFRSKLGLPENSSAIVLGAAGRLVKDKGHPLLFEAFAKIIQTYSNVYLVVAGSGPWEQRYKELGEKVSILGSLNPNELKGFYNGIDLFVNPTLRPQGLDLTLMEAMLSGKPVMASRYASIKRTIVVNDEFGFMFAPNVEALTAVMEVAVAEGAERLAERGRKCKEYAAEMFTASKMALAYERLFLCINDQKFCIYP

SEQ ID NO: 75726 - DNA, 5556 bp, Arabidopsis thaliana
  misc_feature (1)..(5556): Ceres Seq. ID no. 6452822
  misc_feature (1)..(5556): Ortholog of  Ceres SEQ ID NO 13635680 as cited in SEQ ID NO 578
atggctcctccggtaaaccaagccgccgcaaacgattctctaccagagtcggccgaactcagtgacgcgatagctccgccgttgccagaacctccttcggtgacttccttggcgacgcgaatgacagctgctgagaaagagatgctctatctgcgtgacgcagtcacccagatcctccgaaaccagatcttcggcgttcctcgtgaaggccacaacactccgatgggtttttcatcccctgttccgggagtacagtttcctgcttctcaaactccaagtcacgacattcaaaaccgcgactttatgtgtacacctccgttacaacagcagtgtccttcaccacgtcttcgaacagagacaccacaaaggacggtggagttgcctgcttatgagggtggtaacgcagaagattggctctttcgtttggagcagtgtttcctttccaatcagaccctagaggaggacaagttagaaaaggccatatcttgtttgacaggagcagcagtgacttggtggagatgctcaaaggagcgagaacagatctatacttggagagattttcaggagaaattcagagtgcgtttcagaccaagtagaggcagttcggctattgatcacctattgaacataaggcagacagggagtgtcgatgagtatcgtgaaagatttgaagagcttgtggtagacttacctcatgtgacagctgatatcttggaatctgccttcttgaatgggttgaggagaagcctcaaggaccaagttgtccgttgcagacctgtaaacctcaccgatattgtggagatcgcaagactcattgaggcacaggagggtaacaacccgagctaccaggtgaggactcaaccgcgagtcaccttgcctcctaacccaaccactgcagtggcaaggccgtttgaaagagcacaatctagaccatcttttgtgcctactaaagacacaaacaaagcttcgggtagcggtacttctggaggcaatagtaacccatgtcgtcattgtggtgaccgatggtttacagggcatcgctgcaagcagcaaagactcaagagcctagaggttacagaagaggaacaagaggaaagtcccctcattgaagagctcaatgagccattaacagaagaaaaaggtgaacctgaagaagaaaaagaacactccatgagaatgagaggctacataggcagaactaaagtagtgatacttattgattctcgcgccacttgtaacttcattagcgaagatttggtgagagctagagactggataatcactcctacccgtagttttggtgtgcgagcgggaggtggcaggataattagaagtagtggcaaatgtgtggatgtcagactagaggtccagggcatcgaattcagagaagatttctacttgtttgatttgggggagttagatgtagtacttgggttctcttgctggcagataggcagaacatgggtttcgctgtatggagatccggatttgagtactcatcaggtttcgatgagagccatgaaacgagtggtgaagtatacaggagttgcttatcttcttgagctagcttccctgtttgataaccaagcgcaagaggaacagacttccatcactcctatgattcaacaaatcttggaccactatcaacatgtatttcagatgccacaggccttgcctcctacacgtaacaaggaacacgcaatcacgttaaaggaaggtacctctccggttaatctcaggccatacaggtattcctttgaccaaaaggatgagattgagaagcttgtcactgagatgctgagaagtcaagtgatcagacctagtgtcagccctttttcaagtccagtgttgttggttaagaagaaggatgggggctggacgttttgcgtagattacagggcgctgaatgaagcaaccataccagacagatacccaattccggtaatagaagagcttctagatgagctaaagggagccacagttttctccaaattggatttgaaatctggatatcaccaaatcagaatgaagatgagtgacgtggagaaaacagctttcaagactcatcaagggcattatgaattcttggtaatgccctttggattaaccaatgccccctctacctttcatagtgttatgaatgacctctttaggccatacttaaggaagttcgtgttagttttcttcgacgacattcttgtctatagcccggatatggagtctcacctgaaacatttagagatagttctgcaactgcttaaactccaccgactctacgcaaacttgaagaaatgctcttttggcagtacacagatcgcatacttaggccatataatctcagctgaaggtgtctctgctgatcctgaaaaggtggaggcaatgttgtgttggccattgcctaaatcagtcacagagttgcgtggatttctaggccttacaggctactatcgtcggtttgtcaagaactacgggcagatagcaaggccactaacggatcagcttaagaagagcgggttccaatggaatgaggcagccacaaaagcgtttcaggcactgaaggaagcagtcacgaatctgccagtattggtcttacctgactttaatcaagagtttacagtggagacggacgcttctggggttggaataggggctgtgttgtcccaaaacagaaggcctatagcgttcttgagccaggcattttcaagtcaaggtcggattaaatctgtgtatgaaagagaattgttggcgattgtgagagcaatgactaagtggaaacattatctgtccagcaaggagtttgttattaagacagatcagagaagtctaaggcatctcttggaacaaaagtctgtatcaactattcaacaacgttgggcttctaagctaagtgggttgaagtatcgcatagaatacaaacctggagtcgacaacaaagtggccgatgctctctctaggaaaccaccgcaggaaaggtttgctcagttcaccttaacggctccacaaacaatagatattggcgctttaaaagaagaaatcatggctgataaagagttgcgtcagttggttgatacttggcaacaagggcagagtacagaatctgaattttcagtgaaagctgggttggtttacaggaagggagccttggttatccctacaggatctcccttcattccaaagctactagagaagtttcacactagtgcaatgggtggccacgaaggagcgttgaagactttcaagagactcactagtgaggtctattggaagggcatgcgaaaagatacagtggaatacattcgaggatgccaaatctgtcaagagaacaagtactccaccttgtcacccgcgggtttgctctccccattccccattccacaacagatttggagcgatattagcttggattttgtacaaggattaccgtcttcgaaaggattcaactgcatcttggtggtcgtggataggctaagcaaatacagtcactttattccgttgaagcacccgtttactgcaaaggtggtagcagaggcctttataagagatgttgttaagttgcatgggtttccaactacaatggtgtctgatagagacaaggtcttcctcagcaccttctggtctgaattattcaagatacacggcactgaattgagaaagagtactgcctaccacccccaaacggatgggcagacagaagttgttaataggtgcttggagtcatttttgagatgctttgcaggccgacgaccctcttcttggatgcaatggctaccttgggccgagtactggtataacacctcttatcacactgcaacaaagacgaccccattcatggcggtttatggaagagagcccccagcaattctcagatatggggacacacctacagcaaatgcagtcgtcgaagaattactcaaggacagagatgggttgttgctagagctgagagaaaacttggagctagctcagaaacaaatgaagaaagtcgcggacaaacacaggagagatgttgagttcaaggagggcgatttggtctacttaaaactgaggccgtatcgacaagggtcgttggtacacagaaaaaacgagaagctctcgcagcgatactatggaccctaccaggtgattagcaagattggtaaggtcgcatacaaactcaggctaccggattacagtcaaattcatccggtgttccatgtgtcccagctgaaaccagcggttcctccctctttcactgctcaagaactgcccaagattgtgactccttctttagagtgggcgacggagccagaaaagcttctggatatcagacagagtagaacaacagacggtgccgacgtcttggttcaatggagtggcatgtcagctttggaggcaacgtgggagccattagtgactctagtgaagcaattcccgagcttcgatcttgaggacaagatcggtcttctgcgagggagcattgataggctaagggttccactagctactatgagaaagagaatgagaactggcgggagaaaagctaaagctatggagaagtatttgaaaaaggtgttggattttcattttgagaggttttgctctgtgtccttgtccaatctgaatgtatatgcatgccttgtttgtggaaagtacttccaaggaagaagccagaagtctcatgcttatacgcatagcttagaagcaggacaccacgtttacatcaatcttctgacagagaaggtttattgtcttcctgatagttacgagatcaatgacccttctttggatgacattcgccatgttttaaacccaaggtttagtagagcacaagtaaacgagcttgacaagaataggcagtggtctagggctcttgatggctccgactatcttccaggaatggtggggttgaacaacatacaaaagacagagtttgtgaatgttacaatccagtcgttgatgagagttactcctttaaggaatttcttccacattcctgaaaattatcagcactgcaagtctcctcttgttcactgttttggggaactaactcgcaagatttggcatgctcgaaactttaaaggacaggtgagtccacatgagttcttgcaagctgtcatgaaagccagcaagaaacgctttcggattggccaacaatcagatccagtagagtttatgtcgtggctcctcaacactttgcacatggatcttagaacttcaaaggacgccagcagtatcatccacaagtgcttccagggtgagttggaggttgtgaaagagtttcaaggcaatgaaaacaaagaaatctccaggatgtcttttctgatgctcggtctagatttgccaccgcctcctcttttcaaagatgtcatggagaaaaacattattccgcaggttgctctatttgatttattgaagaagtttgatggagaaactgtgacagaggtggttcggcctaagctggccagaatgagataccgtgtaatcaaatctcctcgttacttgatgttccatatggttcggttcaagaagaataacttcttcaaagagaagaaccctacattgggtgagtctgtttga

SEQ ID NO: 75727 - protein, 1851 aa, Arabidopsis thaliana
  peptide (1)..(1851): Ceres Seq. ID no. 6452823
MAPPVNQAAANDSLPESAELSDAIAPPLPEPPSVTSLATRMTAAEKEMLYLRDAVTQILRNQIFGVPREGHNTPMGFSSPVPGVQFPASQTPSHDIQNRDFMCTPPLQQQCPSPRLRTETPQRTVELPAYEGGNAEDWLFRLEQCFLSNQTLEEDKLEKAISCLTGAAVTWWRCSKEREQIYTWRDFQEKFRVRFRPSRGSSAIDHLLNIRQTGSVDEYRERFEELVVDLPHVTADILESAFLNGLRRSLKDQVVRCRPVNLTDIVEIARLIEAQEGNNPSYQVRTQPRVTLPPNPTTAVARPFERAQSRPSFVPTKDTNKASGSGTSGGNSNPCRHCGDRWFTGHRCKQQRLKSLEVTEEEQEESPLIEELNEPLTEEKGEPEEEKEHSMRMRGYIGRTKVVILIDSRATCNFISEDLVRARDWIITPTRSFGVRAGGGRIIRSSGKCVDVRLEVQGIEFREDFYLFDLGELDVVLGFSCWQIGRTWVSLYGDPDLSTHQVSMRAMKRVVKYTGVAYLLELASLFDNQAQEEQTSITPMIQQILDHYQHVFQMPQALPPTRNKEHAITLKEGTSPVNLRPYRYSFDQKDEIEKLVTEMLRSQVIRPSVSPFSSPVLLVKKKDGGWTFCVDYRALNEATIPDRYPIPVIEELLDELKGATVFSKLDLKSGYHQIRMKMSDVEKTAFKTHQGHYEFLVMPFGLTNAPSTFHSVMNDLFRPYLRKFVLVFFDDILVYSPDMESHLKHLEIVLQLLKLHRLYANLKKCSFGSTQIAYLGHIISAEGVSADPEKVEAMLCWPLPKSVTELRGFLGLTGYYRRFVKNYGQIARPLTDQLKKSGFQWNEAATKAFQALKEAVTNLPVLVLPDFNQEFTVETDASGVGIGAVLSQNRRPIAFLSQAFSSQGRIKSVYERELLAIVRAMTKWKHYLSSKEFVIKTDQRSLRHLLEQKSVSTIQQRWASKLSGLKYRIEYKPGVDNKVADALSRKPPQERFAQFTLTAPQTIDIGALKEEIMADKELRQLVDTWQQGQSTESEFSVKAGLVYRKGALVIPTGSPFIPKLLEKFHTSAMGGHEGALKTFKRLTSEVYWKGMRKDTVEYIRGCQICQENKYSTLSPAGLLSPFPIPQQIWSDISLDFVQGLPSSKGFNCILVVVDRLSKYSHFIPLKHPFTAKVVAEAFIRDVVKLHGFPTTMVSDRDKVFLSTFWSELFKIHGTELRKSTAYHPQTDGQTEVVNRCLESFLRCFAGRRPSSWMQWLPWAEYWYNTSYHTATKTTPFMAVYGREPPAILRYGDTPTANAVVEELLKDRDGLLLELRENLELAQKQMKKVADKHRRDVEFKEGDLVYLKLRPYRQGSLVHRKNEKLSQRYYGPYQVISKIGKVAYKLRLPDYSQIHPVFHVSQLKPAVPPSFTAQELPKIVTPSLEWATEPEKLLDIRQSRTTDGADVLVQWSGMSALEATWEPLVTLVKQFPSFDLEDKIGLLRGSIDRLRVPLATMRKRMRTGGRKAKAMEKYLKKVLDFHFERFCSVSLSNLNVYACLVCGKYFQGRSQKSHAYTHSLEAGHHVYINLLTEKVYCLPDSYEINDPSLDDIRHVLNPRFSRAQVNELDKNRQWSRALDGSDYLPGMVGLNNIQKTEFVNVTIQSLMRVTPLRNFFHIPENYQHCKSPLVHCFGELTRKIWHARNFKGQVSPHEFLQAVMKASKKRFRIGQQSDPVEFMSWLLNTLHMDLRTSKDASSIIHKCFQGELEVVKEFQGNENKEISRMSFLMLGLDLPPPPLFKDVMEKNIIPQVALFDLLKKFDGETVTEVVRPKLARMRYRVIKSPRYLMFHMVRFKKNNFFKEKNPTLGESV

SEQ ID NO: 75728 - protein, 1811 aa, Arabidopsis thaliana
  peptide (1)..(1811): Ceres Seq. ID no. 6452824
MTAAEKEMLYLRDAVTQILRNQIFGVPREGHNTPMGFSSPVPGVQFPASQTPSHDIQNRDFMCTPPLQQQCPSPRLRTETPQRTVELPAYEGGNAEDWLFRLEQCFLSNQTLEEDKLEKAISCLTGAAVTWWRCSKEREQIYTWRDFQEKFRVRFRPSRGSSAIDHLLNIRQTGSVDEYRERFEELVVDLPHVTADILESAFLNGLRRSLKDQVVRCRPVNLTDIVEIARLIEAQEGNNPSYQVRTQPRVTLPPNPTTAVARPFERAQSRPSFVPTKDTNKASGSGTSGGNSNPCRHCGDRWFTGHRCKQQRLKSLEVTEEEQEESPLIEELNEPLTEEKGEPEEEKEHSMRMRGYIGRTKVVILIDSRATCNFISEDLVRARDWIITPTRSFGVRAGGGRIIRSSGKCVDVRLEVQGIEFREDFYLFDLGELDVVLGFSCWQIGRTWVSLYGDPDLSTHQVSMRAMKRVVKYTGVAYLLELASLFDNQAQEEQTSITPMIQQILDHYQHVFQMPQALPPTRNKEHAITLKEGTSPVNLRPYRYSFDQKDEIEKLVTEMLRSQVIRPSVSPFSSPVLLVKKKDGGWTFCVDYRALNEATIPDRYPIPVIEELLDELKGATVFSKLDLKSGYHQIRMKMSDVEKTAFKTHQGHYEFLVMPFGLTNAPSTFHSVMNDLFRPYLRKFVLVFFDDILVYSPDMESHLKHLEIVLQLLKLHRLYANLKKCSFGSTQIAYLGHIISAEGVSADPEKVEAMLCWPLPKSVTELRGFLGLTGYYRRFVKNYGQIARPLTDQLKKSGFQWNEAATKAFQALKEAVTNLPVLVLPDFNQEFTVETDASGVGIGAVLSQNRRPIAFLSQAFSSQGRIKSVYERELLAIVRAMTKWKHYLSSKEFVIKTDQRSLRHLLEQKSVSTIQQRWASKLSGLKYRIEYKPGVDNKVADALSRKPPQERFAQFTLTAPQTIDIGALKEEIMADKELRQLVDTWQQGQSTESEFSVKAGLVYRKGALVIPTGSPFIPKLLEKFHTSAMGGHEGALKTFKRLTSEVYWKGMRKDTVEYIRGCQICQENKYSTLSPAGLLSPFPIPQQIWSDISLDFVQGLPSSKGFNCILVVVDRLSKYSHFIPLKHPFTAKVVAEAFIRDVVKLHGFPTTMVSDRDKVFLSTFWSELFKIHGTELRKSTAYHPQTDGQTEVVNRCLESFLRCFAGRRPSSWMQWLPWAEYWYNTSYHTATKTTPFMAVYGREPPAILRYGDTPTANAVVEELLKDRDGLLLELRENLELAQKQMKKVADKHRRDVEFKEGDLVYLKLRPYRQGSLVHRKNEKLSQRYYGPYQVISKIGKVAYKLRLPDYSQIHPVFHVSQLKPAVPPSFTAQELPKIVTPSLEWATEPEKLLDIRQSRTTDGADVLVQWSGMSALEATWEPLVTLVKQFPSFDLEDKIGLLRGSIDRLRVPLATMRKRMRTGGRKAKAMEKYLKKVLDFHFERFCSVSLSNLNVYACLVCGKYFQGRSQKSHAYTHSLEAGHHVYINLLTEKVYCLPDSYEINDPSLDDIRHVLNPRFSRAQVNELDKNRQWSRALDGSDYLPGMVGLNNIQKTEFVNVTIQSLMRVTPLRNFFHIPENYQHCKSPLVHCFGELTRKIWHARNFKGQVSPHEFLQAVMKASKKRFRIGQQSDPVEFMSWLLNTLHMDLRTSKDASSIIHKCFQGELEVVKEFQGNENKEISRMSFLMLGLDLPPPPLFKDVMEKNIIPQVALFDLLKKFDGETVTEVVRPKLARMRYRVIKSPRYLMFHMVRFKKNNFFKEKNPTLGESV

SEQ ID NO: 75729 - protein, 1804 aa, Arabidopsis thaliana
  peptide (1)..(1804): Ceres Seq. ID no. 6452825
MLYLRDAVTQILRNQIFGVPREGHNTPMGFSSPVPGVQFPASQTPSHDIQNRDFMCTPPLQQQCPSPRLRTETPQRTVELPAYEGGNAEDWLFRLEQCFLSNQTLEEDKLEKAISCLTGAAVTWWRCSKEREQIYTWRDFQEKFRVRFRPSRGSSAIDHLLNIRQTGSVDEYRERFEELVVDLPHVTADILESAFLNGLRRSLKDQVVRCRPVNLTDIVEIARLIEAQEGNNPSYQVRTQPRVTLPPNPTTAVARPFERAQSRPSFVPTKDTNKASGSGTSGGNSNPCRHCGDRWFTGHRCKQQRLKSLEVTEEEQEESPLIEELNEPLTEEKGEPEEEKEHSMRMRGYIGRTKVVILIDSRATCNFISEDLVRARDWIITPTRSFGVRAGGGRIIRSSGKCVDVRLEVQGIEFREDFYLFDLGELDVVLGFSCWQIGRTWVSLYGDPDLSTHQVSMRAMKRVVKYTGVAYLLELASLFDNQAQEEQTSITPMIQQILDHYQHVFQMPQALPPTRNKEHAITLKEGTSPVNLRPYRYSFDQKDEIEKLVTEMLRSQVIRPSVSPFSSPVLLVKKKDGGWTFCVDYRALNEATIPDRYPIPVIEELLDELKGATVFSKLDLKSGYHQIRMKMSDVEKTAFKTHQGHYEFLVMPFGLTNAPSTFHSVMNDLFRPYLRKFVLVFFDDILVYSPDMESHLKHLEIVLQLLKLHRLYANLKKCSFGSTQIAYLGHIISAEGVSADPEKVEAMLCWPLPKSVTELRGFLGLTGYYRRFVKNYGQIARPLTDQLKKSGFQWNEAATKAFQALKEAVTNLPVLVLPDFNQEFTVETDASGVGIGAVLSQNRRPIAFLSQAFSSQGRIKSVYERELLAIVRAMTKWKHYLSSKEFVIKTDQRSLRHLLEQKSVSTIQQRWASKLSGLKYRIEYKPGVDNKVADALSRKPPQERFAQFTLTAPQTIDIGALKEEIMADKELRQLVDTWQQGQSTESEFSVKAGLVYRKGALVIPTGSPFIPKLLEKFHTSAMGGHEGALKTFKRLTSEVYWKGMRKDTVEYIRGCQICQENKYSTLSPAGLLSPFPIPQQIWSDISLDFVQGLPSSKGFNCILVVVDRLSKYSHFIPLKHPFTAKVVAEAFIRDVVKLHGFPTTMVSDRDKVFLSTFWSELFKIHGTELRKSTAYHPQTDGQTEVVNRCLESFLRCFAGRRPSSWMQWLPWAEYWYNTSYHTATKTTPFMAVYGREPPAILRYGDTPTANAVVEELLKDRDGLLLELRENLELAQKQMKKVADKHRRDVEFKEGDLVYLKLRPYRQGSLVHRKNEKLSQRYYGPYQVISKIGKVAYKLRLPDYSQIHPVFHVSQLKPAVPPSFTAQELPKIVTPSLEWATEPEKLLDIRQSRTTDGADVLVQWSGMSALEATWEPLVTLVKQFPSFDLEDKIGLLRGSIDRLRVPLATMRKRMRTGGRKAKAMEKYLKKVLDFHFERFCSVSLSNLNVYACLVCGKYFQGRSQKSHAYTHSLEAGHHVYINLLTEKVYCLPDSYEINDPSLDDIRHVLNPRFSRAQVNELDKNRQWSRALDGSDYLPGMVGLNNIQKTEFVNVTIQSLMRVTPLRNFFHIPENYQHCKSPLVHCFGELTRKIWHARNFKGQVSPHEFLQAVMKASKKRFRIGQQSDPVEFMSWLLNTLHMDLRTSKDASSIIHKCFQGELEVVKEFQGNENKEISRMSFLMLGLDLPPPPLFKDVMEKNIIPQVALFDLLKKFDGETVTEVVRPKLARMRYRVIKSPRYLMFHMVRFKKNNFFKEKNPTLGESV

SEQ ID NO: 75730 - DNA, 729 bp, Arabidopsis thaliana
  misc_feature (1)..(729): Ceres Seq. ID no. 6453354
  misc_feature (1)..(729): Ortholog of  Ceres SEQ ID NO 14307583 as cited in SEQ ID NO 163
  misc_feature (1)..(729): Ortholog of  Ceres SEQ ID NO 15224302 as cited in SEQ ID NO 53942
  misc_feature (1)..(729): Ortholog of  Ceres SEQ ID NO 14306297 as cited in SEQ ID NO 56907
atgacaactggccgaccaaataatattttagcattgaaaatttctactagatcaagctctctcactgtcggagagcaattctgcgccgtctttatacctttctttgccattatcgatgtcctagtttcctccgtcggacaatgcttcgattgccgcagcacatcgcctcggacattttcagtcaatgaagttgaagctttgtatgagctattcaagaaattgagctgttcaattattgatgacggcttgattcacaaggaagagcttagactggcgctgttccaagctccatatggtgagaacctctttcttgatagggtttttgatttgttcgatgaaaagaagaatggggttattgagtttgaggaattcatccatgcactcagtgtctttcatccctatgcatcaatccaggagaagaccgattttgcatttaggctctatgatctaagacaaactggattcattgagcgagaagaggtgcaacaaatggtttctgctattctcttggaatctgatatgatgctatccgatgaacttctgaccatgattattgataaaacatttgctgatgcagattctgacaaagacggtaaaattagtaaggatgaatggaatgtctatgtgcataaacatcctagcttgttgaagaatatgactcttccttacctaaaggatgtgacgacagcattcccaagttttatattcaacactgaggttgaagactga

SEQ ID NO: 75731 - protein, 242 aa, Arabidopsis thaliana
  peptide (1)..(242): Ceres Seq. ID no. 6453355
MTTGRPNNILALKISTRSSSLTVGEQFCAVFIPFFAIIDVLVSSVGQCFDCRSTSPRTFSVNEVEALYELFKKLSCSIIDDGLIHKEELRLALFQAPYGENLFLDRVFDLFDEKKNGVIEFEEFIHALSVFHPYASIQEKTDFAFRLYDLRQTGFIEREEVQQMVSAILLESDMMLSDELLTMIIDKTFADADSDKDGKISKDEWNVYVHKHPSLLKNMTLPYLKDVTTAFPSFIFNTEVED

SEQ ID NO: 75732 - DNA, 900 bp, Arabidopsis thaliana
  misc_feature (1)..(900): Ceres Seq. ID no. 6453435
  misc_feature (1)..(900): Ortholog of  Ceres SEQ ID NO 13584646 as cited in SEQ ID NO 60715
atgtctagttatatgcaccctcttctagggcaagaactgcatctacagagacctgaagattccagaaccccacctgatcaaaataacatggaacttaacagatctgaagcagacgaagcaaaggccgagaccactcccaccggtggagccaccagctcagccacagcctctggctcttcctccggacgtcgtccacgtggtcgtcctgcaggttccaaaaacaaacccaaacctccgacgattataactagagatagtcctaacgtccttagatcacacgttcttgaagtcacctccggttcggacatatccgaggcagtctccacctacgccactcgtcgcggctgcggcgtttgcattataagcggcacgggtgcggtcactaacgtcacgatacggcaacctgcggctccggctggtggaggtgtgattaccctgcatggtcggtttgacattttgtctttgaccggtactgcgcttccaccgcctgcaccaccgggagcaggaggtttgacggtgtatctagccggaggtcaaggacaagttgtaggagggaatgtggctggttcgttaattgcttcgggaccggtagtgttgatggctgcttcttttgcaaacgcagtttatgataggttaccgattgaagaggaagaaaccccaccgccgagaaccaccggggtgcagcagcagcagccggaggcgtctcagtcgtcggaggttacggggagtggggcccaggcgtgtgagtcaaacctccaaggtggaaatggtggaggaggtgttgctttctacaatcttggaatgaatatgaacaattttcaattctccgggggagatatttacggtatgagcggcggtagcggaggaggtggtggcggtgcgactagacccgcgttttag

SEQ ID NO: 75733 - protein, 299 aa, Arabidopsis thaliana
  peptide (1)..(299): Ceres Seq. ID no. 6453436
MSSYMHPLLGQELHLQRPEDSRTPPDQNNMELNRSEADEAKAETTPTGGATSSATASGSSSGRRPRGRPAGSKNKPKPPTIITRDSPNVLRSHVLEVTSGSDISEAVSTYATRRGCGVCIISGTGAVTNVTIRQPAAPAGGGVITLHGRFDILSLTGTALPPPAPPGAGGLTVYLAGGQGQVVGGNVAGSLIASGPVVLMAASFANAVYDRLPIEEEETPPPRTTGVQQQQPEASQSSEVTGSGAQACESNLQGGNGGGGVAFYNLGMNMNNFQFSGGDIYGMSGGSGGGGGGATRPAF

SEQ ID NO: 75734 - protein, 295 aa, Arabidopsis thaliana
  peptide (1)..(295): Ceres Seq. ID no. 6453437
MHPLLGQELHLQRPEDSRTPPDQNNMELNRSEADEAKAETTPTGGATSSATASGSSSGRRPRGRPAGSKNKPKPPTIITRDSPNVLRSHVLEVTSGSDISEAVSTYATRRGCGVCIISGTGAVTNVTIRQPAAPAGGGVITLHGRFDILSLTGTALPPPAPPGAGGLTVYLAGGQGQVVGGNVAGSLIASGPVVLMAASFANAVYDRLPIEEEETPPPRTTGVQQQQPEASQSSEVTGSGAQACESNLQGGNGGGGVAFYNLGMNMNNFQFSGGDIYGMSGGSGGGGGGATRPAF

SEQ ID NO: 75735 - protein, 270 aa, Arabidopsis thaliana; identical to SEQ ID NO: 69657
  peptide (1)..(270): Ceres Seq. ID no. 6453438

SEQ ID NO: 75736 - DNA, 1017 bp, Arabidopsis thaliana
  misc_feature (1)..(1017): Ceres Seq. ID no. 6453546
  misc_feature (1)..(1017): Ortholog of  Ceres SEQ ID NO 12336358 as cited in SEQ ID NO 20733
  misc_feature (1)..(1017): Ortholog of  Ceres SEQ ID NO 12623467 as cited in SEQ ID NO 60951
  misc_feature (1)..(1017): Ortholog of  Ceres SEQ ID NO 14309133 as cited in SEQ ID NO 0
atggtgatgatgaagaagcttttgtcgaaccgtttgttcaatatgtcaaaaacggcgtcgcaaagtctcatgaactgtcgtacttcgtcttcttcttcgttagccatgcgaactagggttcctaaagatataggagaagccacgattgatccagagcctggagatttgacgatttctcagaggtttttgaataaattctccatgaatgggattgatacgacttcgaagatgtctattggggagagtctgatggagaagcttaaagaaatggatatgaacaaggatcggattcgattagacggactttctcatccgaaggaggagacgttagggcttactgtgcaagacgtgaagaagttgctaagagcagcagagatcgaagttattaaaacgaagctgatggagacaggaaaaatctggattcgttactcagatttcttaggtgtttgtagtgattcttctttggatccttctcaaggagctttgatcgctaagatgcttgatgattcaggaaacgttatcgttatgggaaactctgtttgtttaagacctcatcagttaaccaaatccatagaggggcttcttcctttatcacaaatccataacccgaatgacccaagaagaaaggagctaaatgagcttgaagctataaagacggtcattgaccaaaaagcacattctttggtgagaagagagctttgggctggtttgggttacttgatcatccaaaccgcagggtttatgaggctaacgttttgggacctgacatgggatgttatggaaccgatctgtttctatgtctcatcggtatatttcatggcgggttacacatttttcctcaagacatcgagagagccttcctttcaaggtttttaccaaagcaggtttgaggctaaacaaaggaaactgatgcaatctgaggattttgatgttgggaggtatgatgagctgaaaaagctgtttaatcccaagccttcaggtgctgttcccaagattcttggatctctacagaattga

SEQ ID NO: 75737 - protein, 338 aa, Arabidopsis thaliana
  peptide (1)..(338): Ceres Seq. ID no. 6453547
MVMMKKLLSNRLFNMSKTASQSLMNCRTSSSSSLAMRTRVPKDIGEATIDPEPGDLTISQRFLNKFSMNGIDTTSKMSIGESLMEKLKEMDMNKDRIRLDGLSHPKEETLGLTVQDVKKLLRAAEIEVIKTKLMETGKIWIRYSDFLGVCSDSSLDPSQGALIAKMLDDSGNVIVMGNSVCLRPHQLTKSIEGLLPLSQIHNPNDPRRKELNELEAIKTVIDQKAHSLVRRELWAGLGYLIIQTAGFMRLTFWDLTWDVMEPICFYVSSVYFMAGYTFFLKTSREPSFQGFYQSRFEAKQRKLMQSEDFDVGRYDELKKLFNPKPSGAVPKILGSLQN

SEQ ID NO: 75738 - protein, 336 aa, Arabidopsis thaliana
  peptide (1)..(336): Ceres Seq. ID no. 6453548
MMKKLLSNRLFNMSKTASQSLMNCRTSSSSSLAMRTRVPKDIGEATIDPEPGDLTISQRFLNKFSMNGIDTTSKMSIGESLMEKLKEMDMNKDRIRLDGLSHPKEETLGLTVQDVKKLLRAAEIEVIKTKLMETGKIWIRYSDFLGVCSDSSLDPSQGALIAKMLDDSGNVIVMGNSVCLRPHQLTKSIEGLLPLSQIHNPNDPRRKELNELEAIKTVIDQKAHSLVRRELWAGLGYLIIQTAGFMRLTFWDLTWDVMEPICFYVSSVYFMAGYTFFLKTSREPSFQGFYQSRFEAKQRKLMQSEDFDVGRYDELKKLFNPKPSGAVPKILGSLQN

SEQ ID NO: 75739 - protein, 335 aa, Arabidopsis thaliana
  peptide (1)..(335): Ceres Seq. ID no. 6453549
MKKLLSNRLFNMSKTASQSLMNCRTSSSSSLAMRTRVPKDIGEATIDPEPGDLTISQRFLNKFSMNGIDTTSKMSIGESLMEKLKEMDMNKDRIRLDGLSHPKEETLGLTVQDVKKLLRAAEIEVIKTKLMETGKIWIRYSDFLGVCSDSSLDPSQGALIAKMLDDSGNVIVMGNSVCLRPHQLTKSIEGLLPLSQIHNPNDPRRKELNELEAIKTVIDQKAHSLVRRELWAGLGYLIIQTAGFMRLTFWDLTWDVMEPICFYVSSVYFMAGYTFFLKTSREPSFQGFYQSRFEAKQRKLMQSEDFDVGRYDELKKLFNPKPSGAVPKILGSLQN

SEQ ID NO: 75740 - DNA, 975 bp, Arabidopsis thaliana
  misc_feature (1)..(975): Ceres Seq. ID no. 6453622
  misc_feature (1)..(975): Ortholog of  Ceres SEQ ID NO 14307619 as cited in SEQ ID NO 20411
atgtggttcttcagggacaaaggtttcgatgatccgagtatcgacaagatgttgagaaaatgcaaacagttggaaaaggctcaaagcgatgtggcatcagaaaactgggactacctgagtaacattgttggtatccaagagagaaaactcccttacatcgtctctcgatgccccaaaatcctgactttacgcctcgatgagagactcatcccgatggtcgagtgcctctccagtcttggaaggaatcctcgggaagttgcttccgccattaccaaatttcctccaatactctctcatagcgtggaggagaaactctgtccccttcttgctttctttcaagcgttaggtgtgcctgagactcaacttggcaaaatgatactttttaacccaaggcttatcagctacagcatcgacaccaagctgacagtgatcgtcagctttcttgctagccttggccttgatcaagatgggatgattggcaaagttctggtgaagaacccatttcttatggggtacagtgttgataaaaggttacggcctaccactgaattcttgaaatcatccgttggcctgagtgaggatggcattaagtcggtggtcatgaatttcccacaacttttgtgcagagacgttaacaagattctcaaaccaaattatgattatttgaaggagtgtgggtttggagattcccagatagcaaccatggtcactggttatccccaaatcttgattaagagtgttaagaattcactacagcctaggatcagattcctcgtccaggtgatgggaagaggcatggatgaagtggcttcttatcctgaattctttcaccatggattgaagaagaaggtcgaatcgaggtttaaacttgtcaaaaagaacaacattgactgcagccttagagaaatgctggactgtaacacaaagaaattccatgagaagtttggcttttcggaggtaactgcaagcttctag

SEQ ID NO: 75741 - protein, 324 aa, Arabidopsis thaliana
  peptide (1)..(324): Ceres Seq. ID no. 6453623
MWFFRDKGFDDPSIDKMLRKCKQLEKAQSDVASENWDYLSNIVGIQERKLPYIVSRCPKILTLRLDERLIPMVECLSSLGRNPREVASAITKFPPILSHSVEEKLCPLLAFFQALGVPETQLGKMILFNPRLISYSIDTKLTVIVSFLASLGLDQDGMIGKVLVKNPFLMGYSVDKRLRPTTEFLKSSVGLSEDGIKSVVMNFPQLLCRDVNKILKPNYDYLKECGFGDSQIATMVTGYPQILIKSVKNSLQPRIRFLVQVMGRGMDEVASYPEFFHHGLKKKVESRFKLVKKNNIDCSLREMLDCNTKKFHEKFGFSEVTASF

SEQ ID NO: 75742 - protein, 308 aa, Arabidopsis thaliana
  peptide (1)..(308): Ceres Seq. ID no. 6453624
MLRKCKQLEKAQSDVASENWDYLSNIVGIQERKLPYIVSRCPKILTLRLDERLIPMVECLSSLGRNPREVASAITKFPPILSHSVEEKLCPLLAFFQALGVPETQLGKMILFNPRLISYSIDTKLTVIVSFLASLGLDQDGMIGKVLVKNPFLMGYSVDKRLRPTTEFLKSSVGLSEDGIKSVVMNFPQLLCRDVNKILKPNYDYLKECGFGDSQIATMVTGYPQILIKSVKNSLQPRIRFLVQVMGRGMDEVASYPEFFHHGLKKKVESRFKLVKKNNIDCSLREMLDCNTKKFHEKFGFSEVTASF

SEQ ID NO: 75743 - protein, 253 aa, Arabidopsis thaliana
  peptide (1)..(253): Ceres Seq. ID no. 6453625
MVECLSSLGRNPREVASAITKFPPILSHSVEEKLCPLLAFFQALGVPETQLGKMILFNPRLISYSIDTKLTVIVSFLASLGLDQDGMIGKVLVKNPFLMGYSVDKRLRPTTEFLKSSVGLSEDGIKSVVMNFPQLLCRDVNKILKPNYDYLKECGFGDSQIATMVTGYPQILIKSVKNSLQPRIRFLVQVMGRGMDEVASYPEFFHHGLKKKVESRFKLVKKNNIDCSLREMLDCNTKKFHEKFGFSEVTASF

SEQ ID NO: 75744 - DNA, 3201 bp, Arabidopsis thaliana
  misc_feature (1)..(3201): Ceres Seq. ID no. 6453682
  misc_feature (1)..(3201): Ortholog of  Ceres SEQ ID NO 14303524 as cited in SEQ ID NO 59500
  misc_feature (1)..(3201): Ortholog of  Ceres SEQ ID NO 14313220 as cited in SEQ ID NO 66007
  misc_feature (1)..(3201): Ortholog of  Ceres SEQ ID NO 13658778 as cited in SEQ ID NO 66511
atgaatactggtggtcggctcattgctggctctcacaacagaaacgaattcgttctcattaacgccgatgagagtgccagaatacgatcagtacaagaactgagtgggcaaacatgtcaaatctgtggagatgaaatcgaattaacggttagcagtgagctctttgttgcttgcaacgaatgcgcattcccggtttgtagaccatgctatgagtatgaacgtagagaaggaaatcaagcttgtcctcagtgcaaaactcgatacaaaaggattaaaggtagtccacgggttgatggagatgatgaagaagaagaagacattgatgatcttgagtatgagtttgatcatgggatggaccctgaacatgccgctgaagccgcactctcttcacgccttaacaccggtcgtggtggattggattcagctccacctggctctcagattcctcttttgacttattgtgatgaagatgctgatatgtattctgatcgtcatgctcttatcgtgcctccttcaacgggatatgggaatcgcgtctatcctgcaccgtttacagattcttctgcacctccacaggcgagatcaatggttcctcagaaagatattgcggaatatggttatggaagtgttgcttggaaggaccgtatggaagtttggaagagacgacaaggcgaaaagcttcaagtcattaagcatgaaggaggaaacaatggtcgaggaagacaacctctctcaagaaagctacctattcgttcaagcagaataaatccttacaggatgttaattctgtgtcgcctcgcgattcttggtcttttctttcattatagaattctccatccagtcaatgatgcatatggattatggttaacgtcagttatatgcgagatatggtttgcagtgtcttggattcttgatcaattccccaaatggtatcctatagaacgtgaaacatacctcgatagactctctctcaggtacgagaaggaaggaaaaccgtcaggattagcacctgttgatgtttttgttagtacagtggatccgttgaaagagccacccttgattacagcaaacacagttctttccattctagcagttgattatcctgtggataaggttgcgtgttatgtatcagacgatggtgcagctatgcttacatttgaagctctctctgatacagctgagtttgctagaaaatgggttcctttttgtaagaagtttaatatcgagccacgagctcctgagtggtatttttctcagaagatggattacctgaagaacaaagttcatcctgcttttgtcagggaacgtcgtgctatgaagagagattatgaggagtttaaagtgaagataaatgcactggttgctactgcacagaaagtgcctgaggaaggttggactatgcaagatggaactccttggcctggaaacaacgtccgtgaccatcctggaatgattcaggtgttcttgggtcatagtggagttcgtgatacggatggtaatgagttaccacgtctagtgtatgtttctcgtgagaagcggcctggatttgatcaccacaagaaagctggagctatgaattccttgatccgagtctctgctgttctatcaaacgctccttaccttcttaatgtcgattgtgatcactacatcaacaacagcaaagcaattagagaatctatgtgtttcatgatggacccgcaatcgggaaagaaagtttgttatgttcagtttccgcagagatttgatgggattgatagacatgatagatactcaaaccgtaacgttgtgttctttgatattaacatgaaaggtcttgatgggatacaaggaccgatatatgtcgggacaggttgtgtgtttagaagacaggctctttatggttttgatgcaccaaagaagaagaaaccaccaggcaaaacctgtaactgttggcctaaatggtgttgtttgtgttgtgggttgagaaagaagagtaaaacgaaagccaaagataagaaaactaacactaaagagacttcaaagcagattcatgcgctagagaatgtcgacgaaggtgttatcgtcccagtgtcaaatgttgagaagagatctgaagcaacacaattgaaattggagaagaagtttggacaatctccggttttcgttgcctctgctgttctacagaacggtggagttccccgtaacgcaagccccgcatgtttgttaagagaagccattcaagttattagctgcgggtacgaagataaaaccgaatggggaaaagagatcgggtggatttatggatcggtgactgaagatatcctgacgggtttcaagatgcattgccatggatggagatctgtgtactgtatgcctaagcgtgcagcttttaaaggatctgctcctattaacttgtcagatcgtcttcatcaagttctacgttgggctcttggctctgtagagattttcttgagcagacattgtccgatatggtatggttatggtggtggtttaaaatggttggagagattctcttacatcaactctgtcgtctatccttggacttcacttccattgatcgtctattgttctctccccgcggtttgtttactcacaggaaaattcatcgtccctgagataagcaactacgcaggtatactcttcatgctcatgttcatatccatagcagtaactggaatcctcgaaatgcaatggggaggtgtcggaatcgatgattggtggagaaacgagcagttttgggtaatcggaggggcctcctcgcatctatttgctctgtttcaaggtttgctcaaagttctagccggagttaacacgaatttcacagtcacttcaaaagcagcagacgatggagctttctctgagctttacatcttcaagtggacaactttgttgattcctccgacaacacttctgatcattaacatcattggagttattgtcggcgtttctgatgccattagcaatggctatgactcatggggacctctctttgggagacttttcttcgctctttgggtcattgttcatttatacccattcctcaagggaatgcttgggaagcaagacaaaatgcctacgattattgtggtctggtctattcttctagcttcgatcttgacactcttgtgggtcagagttaacccgtttgtggctaaagggggaccagtgttggagatctgtggtctgaattgtggaaactaa

SEQ ID NO: 75745 - protein, 1066 aa, Arabidopsis thaliana
  peptide (1)..(1066): Ceres Seq. ID no. 6453683
MNTGGRLIAGSHNRNEFVLINADESARIRSVQELSGQTCQICGDEIELTVSSELFVACNECAFPVCRPCYEYERREGNQACPQCKTRYKRIKGSPRVDGDDEEEEDIDDLEYEFDHGMDPEHAAEAALSSRLNTGRGGLDSAPPGSQIPLLTYCDEDADMYSDRHALIVPPSTGYGNRVYPAPFTDSSAPPQARSMVPQKDIAEYGYGSVAWKDRMEVWKRRQGEKLQVIKHEGGNNGRGRQPLSRKLPIRSSRINPYRMLILCRLAILGLFFHYRILHPVNDAYGLWLTSVICEIWFAVSWILDQFPKWYPIERETYLDRLSLRYEKEGKPSGLAPVDVFVSTVDPLKEPPLITANTVLSILAVDYPVDKVACYVSDDGAAMLTFEALSDTAEFARKWVPFCKKFNIEPRAPEWYFSQKMDYLKNKVHPAFVRERRAMKRDYEEFKVKINALVATAQKVPEEGWTMQDGTPWPGNNVRDHPGMIQVFLGHSGVRDTDGNELPRLVYVSREKRPGFDHHKKAGAMNSLIRVSAVLSNAPYLLNVDCDHYINNSKAIRESMCFMMDPQSGKKVCYVQFPQRFDGIDRHDRYSNRNVVFFDINMKGLDGIQGPIYVGTGCVFRRQALYGFDAPKKKKPPGKTCNCWPKWCCLCCGLRKKSKTKAKDKKTNTKETSKQIHALENVDEGVIVPVSNVEKRSEATQLKLEKKFGQSPVFVASAVLQNGGVPRNASPACLLREAIQVISCGYEDKTEWGKEIGWIYGSVTEDILTGFKMHCHGWRSVYCMPKRAAFKGSAPINLSDRLHQVLRWALGSVEIFLSRHCPIWYGYGGGLKWLERFSYINSVVYPWTSLPLIVYCSLPAVCLLTGKFIVPEISNYAGILFMLMFISIAVTGILEMQWGGVGIDDWWRNEQFWVIGGASSHLFALFQGLLKVLAGVNTNFTVTSKAADDGAFSELYIFKWTTLLIPPTTLLIINIIGVIVGVSDAISNGYDSWGPLFGRLFFALWVIVHLYPFLKGMLGKQDKMPTIIVVWSILLASILTLLWVRVNPFVAKGGPVLEICGLNCGN

SEQ ID NO: 75746 - protein, 949 aa, Arabidopsis thaliana
  peptide (1)..(949): Ceres Seq. ID no. 6453684
MDPEHAAEAALSSRLNTGRGGLDSAPPGSQIPLLTYCDEDADMYSDRHALIVPPSTGYGNRVYPAPFTDSSAPPQARSMVPQKDIAEYGYGSVAWKDRMEVWKRRQGEKLQVIKHEGGNNGRGRQPLSRKLPIRSSRINPYRMLILCRLAILGLFFHYRILHPVNDAYGLWLTSVICEIWFAVSWILDQFPKWYPIERETYLDRLSLRYEKEGKPSGLAPVDVFVSTVDPLKEPPLITANTVLSILAVDYPVDKVACYVSDDGAAMLTFEALSDTAEFARKWVPFCKKFNIEPRAPEWYFSQKMDYLKNKVHPAFVRERRAMKRDYEEFKVKINALVATAQKVPEEGWTMQDGTPWPGNNVRDHPGMIQVFLGHSGVRDTDGNELPRLVYVSREKRPGFDHHKKAGAMNSLIRVSAVLSNAPYLLNVDCDHYINNSKAIRESMCFMMDPQSGKKVCYVQFPQRFDGIDRHDRYSNRNVVFFDINMKGLDGIQGPIYVGTGCVFRRQALYGFDAPKKKKPPGKTCNCWPKWCCLCCGLRKKSKTKAKDKKTNTKETSKQIHALENVDEGVIVPVSNVEKRSEATQLKLEKKFGQSPVFVASAVLQNGGVPRNASPACLLREAIQVISCGYEDKTEWGKEIGWIYGSVTEDILTGFKMHCHGWRSVYCMPKRAAFKGSAPINLSDRLHQVLRWALGSVEIFLSRHCPIWYGYGGGLKWLERFSYINSVVYPWTSLPLIVYCSLPAVCLLTGKFIVPEISNYAGILFMLMFISIAVTGILEMQWGGVGIDDWWRNEQFWVIGGASSHLFALFQGLLKVLAGVNTNFTVTSKAADDGAFSELYIFKWTTLLIPPTTLLIINIIGVIVGVSDAISNGYDSWGPLFGRLFFALWVIVHLYPFLKGMLGKQDKMPTIIVVWSILLASILTLLWVRVNPFVAKGGPVLEICGLNCGN

SEQ ID NO: 75747 - protein, 907 aa, Arabidopsis thaliana
  peptide (1)..(907): Ceres Seq. ID no. 6453685
MYSDRHALIVPPSTGYGNRVYPAPFTDSSAPPQARSMVPQKDIAEYGYGSVAWKDRMEVWKRRQGEKLQVIKHEGGNNGRGRQPLSRKLPIRSSRINPYRMLILCRLAILGLFFHYRILHPVNDAYGLWLTSVICEIWFAVSWILDQFPKWYPIERETYLDRLSLRYEKEGKPSGLAPVDVFVSTVDPLKEPPLITANTVLSILAVDYPVDKVACYVSDDGAAMLTFEALSDTAEFARKWVPFCKKFNIEPRAPEWYFSQKMDYLKNKVHPAFVRERRAMKRDYEEFKVKINALVATAQKVPEEGWTMQDGTPWPGNNVRDHPGMIQVFLGHSGVRDTDGNELPRLVYVSREKRPGFDHHKKAGAMNSLIRVSAVLSNAPYLLNVDCDHYINNSKAIRESMCFMMDPQSGKKVCYVQFPQRFDGIDRHDRYSNRNVVFFDINMKGLDGIQGPIYVGTGCVFRRQALYGFDAPKKKKPPGKTCNCWPKWCCLCCGLRKKSKTKAKDKKTNTKETSKQIHALENVDEGVIVPVSNVEKRSEATQLKLEKKFGQSPVFVASAVLQNGGVPRNASPACLLREAIQVISCGYEDKTEWGKEIGWIYGSVTEDILTGFKMHCHGWRSVYCMPKRAAFKGSAPINLSDRLHQVLRWALGSVEIFLSRHCPIWYGYGGGLKWLERFSYINSVVYPWTSLPLIVYCSLPAVCLLTGKFIVPEISNYAGILFMLMFISIAVTGILEMQWGGVGIDDWWRNEQFWVIGGASSHLFALFQGLLKVLAGVNTNFTVTSKAADDGAFSELYIFKWTTLLIPPTTLLIINIIGVIVGVSDAISNGYDSWGPLFGRLFFALWVIVHLYPFLKGMLGKQDKMPTIIVVWSILLASILTLLWVRVNPFVAKGGPVLEICGLNCGN

SEQ ID NO: 75748 - DNA, 1524 bp, Arabidopsis thaliana
  misc_feature (1)..(1524): Ceres Seq. ID no. 6453913
  misc_feature (1)..(1524): Ortholog of  Ceres SEQ ID NO 13504578 as cited in SEQ ID NO 59850
atgaaaggaaaccaaaaagactcatcggagaaacccatatgggatcggagctcatcgggtatatccatgacccgacccggtcgattaataatctggctcatcctcttcatctccgtcacttacatcatctacactctcaagatcgtctccactacacacccttgcgaagatctaacctccgagtcaattctccaacaaagaccggagaaaaaagcggttacagtaacggttaaggcggttccggcggagcaagaagcaacggatctaaaccatgtggttttcggtattgctgcgtcgtcgaagctatggaaacaaaggaaagagtatatcaagatttggtataagccaaagaaaatgagaggctacgtgtggttagacgaagaggtaaagataaaatccgaaaccggagatcaagaaagtctcccgtcggtgagaatctccggtgatacgtcgtcgtttccttatactaacaaacaaggacaccgatcagcgattaggatctcgaggattgtttcggaaacgttgatgagtcttgattctgagtcgaagaagaacgtgaggtggttcgtgatgggtgatgatgatacggtttttgtaacggataatttaattagggttttgaggaagtatgatcatgaacagatgtattatatagggagcttgtcggaatctcatttgcagaacattattttctcttatggaatggcttatggtggaggaggttttgcgattagttatccattggctgtggctttgagtaagatgcaagatcagtgtattcagaggtatccggctttgtatggttctgatgatcggatgcaagcttgtatggctgagcttggtgttccattgactaaagagatcggttttcaccaatacgacgttcatgggaatctcttcggcctcctagctgcccatccgataacaccgtttgtatcgatgcaccatcttgatgttgtggaaccgatttttccaaacatgactcgtgttcgcgctatcaagaaactaaccacaccgatgaagattgattcggctgcgcttctccaacaatcaatatgctatgacaaacacaaaagctggactatttcagtctcgtggggatttgcggtccaggtgttccgtggatcattctctccccgggaaatggaaatgccatctagaactttcttgaattggtacaaaagagcggattacaccgcctacgcattcaatactaggcccgtgagtcgcaatcattgccaaaaaccgtttgtttttcacatgtcgagtgcaaaatttgacccgcagttgaacacgacggttagcgaatacacgagacatcgggttccgcaaccggcttgtcgatgggatatggctaacccagaggagatcaacactatagtcgtctacaaaaaacccgatcctcacctatggaacagatcacctagaagaaactgttgcagagtattacaaacaaagaggaataatacattatggatcaatgttggtgtatgtagagcaggtgaagtcactgaagtaaagtaa

SEQ ID NO: 75749 - protein, 507 aa, Arabidopsis thaliana
  peptide (1)..(507): Ceres Seq. ID no. 6453914
MKGNQKDSSEKPIWDRSSSGISMTRPGRLIIWLILFISVTYIIYTLKIVSTTHPCEDLTSESILQQRPEKKAVTVTVKAVPAEQEATDLNHVVFGIAASSKLWKQRKEYIKIWYKPKKMRGYVWLDEEVKIKSETGDQESLPSVRISGDTSSFPYTNKQGHRSAIRISRIVSETLMSLDSESKKNVRWFVMGDDDTVFVTDNLIRVLRKYDHEQMYYIGSLSESHLQNIIFSYGMAYGGGGFAISYPLAVALSKMQDQCIQRYPALYGSDDRMQACMAELGVPLTKEIGFHQYDVHGNLFGLLAAHPITPFVSMHHLDVVEPIFPNMTRVRAIKKLTTPMKIDSAALLQQSICYDKHKSWTISVSWGFAVQVFRGSFSPREMEMPSRTFLNWYKRADYTAYAFNTRPVSRNHCQKPFVFHMSSAKFDPQLNTTVSEYTRHRVPQPACRWDMANPEEINTIVVYKKPDPHLWNRSPRRNCCRVLQTKRNNTLWINVGVCRAGEVTEVK

SEQ ID NO: 75750 - protein, 485 aa, Arabidopsis thaliana
  peptide (1)..(485): Ceres Seq. ID no. 6453915
MTRPGRLIIWLILFISVTYIIYTLKIVSTTHPCEDLTSESILQQRPEKKAVTVTVKAVPAEQEATDLNHVVFGIAASSKLWKQRKEYIKIWYKPKKMRGYVWLDEEVKIKSETGDQESLPSVRISGDTSSFPYTNKQGHRSAIRISRIVSETLMSLDSESKKNVRWFVMGDDDTVFVTDNLIRVLRKYDHEQMYYIGSLSESHLQNIIFSYGMAYGGGGFAISYPLAVALSKMQDQCIQRYPALYGSDDRMQACMAELGVPLTKEIGFHQYDVHGNLFGLLAAHPITPFVSMHHLDVVEPIFPNMTRVRAIKKLTTPMKIDSAALLQQSICYDKHKSWTISVSWGFAVQVFRGSFSPREMEMPSRTFLNWYKRADYTAYAFNTRPVSRNHCQKPFVFHMSSAKFDPQLNTTVSEYTRHRVPQPACRWDMANPEEINTIVVYKKPDPHLWNRSPRRNCCRVLQTKRNNTLWINVGVCRAGEVTEVK

SEQ ID NO: 75751 - protein, 389 aa, Arabidopsis thaliana
  peptide (1)..(389): Ceres Seq. ID no. 6453916
MRGYVWLDEEVKIKSETGDQESLPSVRISGDTSSFPYTNKQGHRSAIRISRIVSETLMSLDSESKKNVRWFVMGDDDTVFVTDNLIRVLRKYDHEQMYYIGSLSESHLQNIIFSYGMAYGGGGFAISYPLAVALSKMQDQCIQRYPALYGSDDRMQACMAELGVPLTKEIGFHQYDVHGNLFGLLAAHPITPFVSMHHLDVVEPIFPNMTRVRAIKKLTTPMKIDSAALLQQSICYDKHKSWTISVSWGFAVQVFRGSFSPREMEMPSRTFLNWYKRADYTAYAFNTRPVSRNHCQKPFVFHMSSAKFDPQLNTTVSEYTRHRVPQPACRWDMANPEEINTIVVYKKPDPHLWNRSPRRNCCRVLQTKRNNTLWINVGVCRAGEVTEVK

SEQ ID NO: 75752 - DNA, 3777 bp, Arabidopsis thaliana
  misc_feature (1)..(3777): Ceres Seq. ID no. 6454027
  misc_feature (1)..(3777): Ortholog of  Ceres SEQ ID NO 14312351 as cited in SEQ ID NO 55278
  misc_feature (1)..(3777): Ortholog of  Ceres SEQ ID NO 13655237 as cited in SEQ ID NO 62892
atggtatctgatgcagatgcttccacatcttcatcttccattgatattatgccttctgctaatattcaaaatgatgtccctgaaccttctgttcacacatcgcataggagaacacgaaagcctgcttatcttcaagattactactgtcattcagtagcttctttaaccattcatgatatttcccagtttctctcttatgaaaaagtttctccactttaccattctttcttggtttgtattgccaaagctaaagaaccctcaacctacaatgaagcgaaagaatttcttgtgtggtgtggtgctatggatgatgaaattggtgcaatggagactactcacacttgggaaatctgtactctacctcccaataagaagcctattggttgcaaatgggtgtataagataaaatacaactcggatggcaccattgaacgttataaggcacggttggttgccaagggttacacacagcaggaaggtatcgattttattgagactttctctccagtctgcaaactcacatctgtcaagctcattcttgcgatctctgccatctataattttactcttcatcaactggacatttccaatgcgttccttaatggtgatttggatgaagagatctatatgaagcttcctcctggatatgctgctagacagggggactctctccctcccaatgctgtgtgttacctcaagaagtccatttatgggcttaaacaagcctccagacaatggtttttaaagttttctgttacactcattggttttggttttgtgcagtcccattctgaccatacctacttcttgaagatcactgctacacttttcttatgtgtcttagtgtatgttgacgacatcatcatttgcagtaacaatgatgcagctgttgatgagttgaagtcccagctgaaaagttgttttaaactcagggatcttggccctttgaaatactttcttggcttagaaattgctagatccgctgctggcattaacatttgtcaaagaaagtatgcattggatcttttggatgaaacaggtctcttgggttgtaagccgtctagtgttcctatggatcccagcgtcactttctctgctcattcaggtggtgactttgtggatgctaaagcttacagacgtctcattggtcgcctcatgtatcttcagattactcgtcttgacatcagctttgcagtcaacaagctcagtcaattctctgaagctcctcgccttgcacatcaacaggctgtcatgaagattctgcattacattaaaggcactgttggtcaaggtctgttttattcttctcaagctgaaatgcaacttcaagttttctctgatgcttcatttcagtcatgcaaggacactagacgctctacaaatggttattgtatgtttttgggaacttctctcatttcctggaaatccaagaagcagcaggtggtctccaagtcttctgctgaagctgagtatcgtgctctctcttttgctacagatgagatgatgtggttagctcaattcttcagggaactccagcttcctctctccaagcctacacttctcttctgtgacaacactgcagcaattcacatcgccaccaatgcagttttccacgagcgcaccaaacacatcgaaagtgactgccacagcgttcgtgagaggttggttgcaggtttgttcaaattgattcatgttaattctcatttacaacttgcagatccgtttaccaagccactctatcctactcctttcaagcttatgatgagcaagatggctggtttagaggctctgatctgtttcattttccttttccttttctcattcctcactagcttcaaagcttctgctcaaaatcctttttacctaaatcatgattgtccaaataggacaacttactcaagtaacagcacttactccaccaatctcaaaacccttttgtcctcttttgcttcccgcaacgcctcttactccaccggattccaaaacatcagggcgggacaaacccccgacagggtcaccggacttttcctttgtcgcggagacctatccccggaagtttgcagtaactgcgttgccttctccgttaacgaatcgttaactcggtgtccaaatcagagagaagctgtgttctattacgaagagtgcatactcagatactctcacaagaattttctatcgacagttacatacgaaggagaacttatcatgaggaaccccaataatatttcttctattcaaaatcaaagagaccagtttatagatttggttcaatctaatatgaaccaagctgccaatgaagcagccaacagttctagaaaattctctacgataaagaccgaattgacctcactccagactttgtatgggcttgttcaatgcactcctgatctcgcaagacaagattgctttagctgtctgacaagttccatcaatagaatgatgccactttttagaattggagcaagacagttttggccaagttgtaattcaaggtacgagctttacgcgttctacaacgaaaccgccattggaacaccatcaccaccaccactgtttccggggtctacgcctccgttgacatccccttcaatacctgggaaaagtgggaattcaacagtgttagtggtagccattgttgtgctggctgttctgcttttcatagctttagttggttattgtttccttgcacagagaacaaagaagacttttgacacagcatctgcatcggaggtaggagatgatatggcaaccgcagactcactacagctcgactatagaacaatccaaactgcaacaaatgattttgcagagagtaataagattggtcgaggtggttttggtgaggtttacaagggtacattttcaaatgggaaagaagttgcggtgaagagattgtcgaaaaattcaagacaaggcgaagcggagttcaagaccgaggttgttgtagttgccaagcttcaacacagaaatttggttaggcttcttggattttcattacaaggagaggaaagaattttggtctacgagtatatgcctaacaaaagccttgattgcttactatttgaccctacaaagcaaactcagctggactggatgcagcgatacaatatcattggaggaattgctcgggggattctatatcttcatcaagattcacggctcacaatcatacaccgtgaccttaaagcaagtaacattctcctagatgcggatataaatccgaaaattgcagattttggaatggctaggatcttcggattggaccaaacccaggataacacaagccgaatagttggtacctacggttacatggctcccgagtatgcgatgcatggccaattctcaatgaaatctgatgtctatagcttcggagtgttagttcttgagattataagtggtaggaagaatagtagcttcgacgagtcagacggcgcacaagacttgctcacacatacttggaggctttggactaacagaacagcattagacctcgtggatccacttatagcaaataactgccagaatagcgaagtggttcgatgcatccatatcggtcttttatgtgttcaagaagatcctgcaaagcgtccgacaatatcaaccgttttcatgatgctcactagtaatactgtgaccttaccagtgcctcggcaaccagggtttttcattcaaagtagtcccgtaaaggacccgactgattcagatcagtctaccacgaccaagtctactccagcatctattgacgatgaattgatcactgatttatatccgcgctaa

SEQ ID NO: 75753 - protein, 1258 aa, Arabidopsis thaliana
  peptide (1)..(1258): Ceres Seq. ID no. 6454028
MVSDADASTSSSSIDIMPSANIQNDVPEPSVHTSHRRTRKPAYLQDYYCHSVASLTIHDISQFLSYEKVSPLYHSFLVCIAKAKEPSTYNEAKEFLVWCGAMDDEIGAMETTHTWEICTLPPNKKPIGCKWVYKIKYNSDGTIERYKARLVAKGYTQQEGIDFIETFSPVCKLTSVKLILAISAIYNFTLHQLDISNAFLNGDLDEEIYMKLPPGYAARQGDSLPPNAVCYLKKSIYGLKQASRQWFLKFSVTLIGFGFVQSHSDHTYFLKITATLFLCVLVYVDDIIICSNNDAAVDELKSQLKSCFKLRDLGPLKYFLGLEIARSAAGINICQRKYALDLLDETGLLGCKPSSVPMDPSVTFSAHSGGDFVDAKAYRRLIGRLMYLQITRLDISFAVNKLSQFSEAPRLAHQQAVMKILHYIKGTVGQGLFYSSQAEMQLQVFSDASFQSCKDTRRSTNGYCMFLGTSLISWKSKKQQVVSKSSAEAEYRALSFATDEMMWLAQFFRELQLPLSKPTLLFCDNTAAIHIATNAVFHERTKHIESDCHSVRERLVAGLFKLIHVNSHLQLADPFTKPLYPTPFKLMMSKMAGLEALICFIFLFLFSFLTSFKASAQNPFYLNHDCPNRTTYSSNSTYSTNLKTLLSSFASRNASYSTGFQNIRAGQTPDRVTGLFLCRGDLSPEVCSNCVAFSVNESLTRCPNQREAVFYYEECILRYSHKNFLSTVTYEGELIMRNPNNISSIQNQRDQFIDLVQSNMNQAANEAANSSRKFSTIKTELTSLQTLYGLVQCTPDLARQDCFSCLTSSINRMMPLFRIGARQFWPSCNSRYELYAFYNETAIGTPSPPPLFPGSTPPLTSPSIPGKSGNSTVLVVAIVVLAVLLFIALVGYCFLAQRTKKTFDTASASEVGDDMATADSLQLDYRTIQTATNDFAESNKIGRGGFGEVYKGTFSNGKEVAVKRLSKNSRQGEAEFKTEVVVVAKLQHRNLVRLLGFSLQGEERILVYEYMPNKSLDCLLFDPTKQTQLDWMQRYNIIGGIARGILYLHQDSRLTIIHRDLKASNILLDADINPKIADFGMARIFGLDQTQDNTSRIVGTYGYMAPEYAMHGQFSMKSDVYSFGVLVLEIISGRKNSSFDESDGAQDLLTHTWRLWTNRTALDLVDPLIANNCQNSEVVRCIHIGLLCVQEDPAKRPTISTVFMMLTSNTVTLPVPRQPGFFIQSSPVKDPTDSDQSTTTKSTPASIDDELITDLYPR

SEQ ID NO: 75754 - protein, 1242 aa, Arabidopsis thaliana
  peptide (1)..(1242): Ceres Seq. ID no. 6454029
MPSANIQNDVPEPSVHTSHRRTRKPAYLQDYYCHSVASLTIHDISQFLSYEKVSPLYHSFLVCIAKAKEPSTYNEAKEFLVWCGAMDDEIGAMETTHTWEICTLPPNKKPIGCKWVYKIKYNSDGTIERYKARLVAKGYTQQEGIDFIETFSPVCKLTSVKLILAISAIYNFTLHQLDISNAFLNGDLDEEIYMKLPPGYAARQGDSLPPNAVCYLKKSIYGLKQASRQWFLKFSVTLIGFGFVQSHSDHTYFLKITATLFLCVLVYVDDIIICSNNDAAVDELKSQLKSCFKLRDLGPLKYFLGLEIARSAAGINICQRKYALDLLDETGLLGCKPSSVPMDPSVTFSAHSGGDFVDAKAYRRLIGRLMYLQITRLDISFAVNKLSQFSEAPRLAHQQAVMKILHYIKGTVGQGLFYSSQAEMQLQVFSDASFQSCKDTRRSTNGYCMFLGTSLISWKSKKQQVVSKSSAEAEYRALSFATDEMMWLAQFFRELQLPLSKPTLLFCDNTAAIHIATNAVFHERTKHIESDCHSVRERLVAGLFKLIHVNSHLQLADPFTKPLYPTPFKLMMSKMAGLEALICFIFLFLFSFLTSFKASAQNPFYLNHDCPNRTTYSSNSTYSTNLKTLLSSFASRNASYSTGFQNIRAGQTPDRVTGLFLCRGDLSPEVCSNCVAFSVNESLTRCPNQREAVFYYEECILRYSHKNFLSTVTYEGELIMRNPNNISSIQNQRDQFIDLVQSNMNQAANEAANSSRKFSTIKTELTSLQTLYGLVQCTPDLARQDCFSCLTSSINRMMPLFRIGARQFWPSCNSRYELYAFYNETAIGTPSPPPLFPGSTPPLTSPSIPGKSGNSTVLVVAIVVLAVLLFIALVGYCFLAQRTKKTFDTASASEVGDDMATADSLQLDYRTIQTATNDFAESNKIGRGGFGEVYKGTFSNGKEVAVKRLSKNSRQGEAEFKTEVVVVAKLQHRNLVRLLGFSLQGEERILVYEYMPNKSLDCLLFDPTKQTQLDWMQRYNIIGGIARGILYLHQDSRLTIIHRDLKASNILLDADINPKIADFGMARIFGLDQTQDNTSRIVGTYGYMAPEYAMHGQFSMKSDVYSFGVLVLEIISGRKNSSFDESDGAQDLLTHTWRLWTNRTALDLVDPLIANNCQNSEVVRCIHIGLLCVQEDPAKRPTISTVFMMLTSNTVTLPVPRQPGFFIQSSPVKDPTDSDQSTTTKSTPASIDDELITDLYPR

SEQ ID NO: 75755 - protein, 1157 aa, Arabidopsis thaliana
  peptide (1)..(1157): Ceres Seq. ID no. 6454030
MDDEIGAMETTHTWEICTLPPNKKPIGCKWVYKIKYNSDGTIERYKARLVAKGYTQQEGIDFIETFSPVCKLTSVKLILAISAIYNFTLHQLDISNAFLNGDLDEEIYMKLPPGYAARQGDSLPPNAVCYLKKSIYGLKQASRQWFLKFSVTLIGFGFVQSHSDHTYFLKITATLFLCVLVYVDDIIICSNNDAAVDELKSQLKSCFKLRDLGPLKYFLGLEIARSAAGINICQRKYALDLLDETGLLGCKPSSVPMDPSVTFSAHSGGDFVDAKAYRRLIGRLMYLQITRLDISFAVNKLSQFSEAPRLAHQQAVMKILHYIKGTVGQGLFYSSQAEMQLQVFSDASFQSCKDTRRSTNGYCMFLGTSLISWKSKKQQVVSKSSAEAEYRALSFATDEMMWLAQFFRELQLPLSKPTLLFCDNTAAIHIATNAVFHERTKHIESDCHSVRERLVAGLFKLIHVNSHLQLADPFTKPLYPTPFKLMMSKMAGLEALICFIFLFLFSFLTSFKASAQNPFYLNHDCPNRTTYSSNSTYSTNLKTLLSSFASRNASYSTGFQNIRAGQTPDRVTGLFLCRGDLSPEVCSNCVAFSVNESLTRCPNQREAVFYYEECILRYSHKNFLSTVTYEGELIMRNPNNISSIQNQRDQFIDLVQSNMNQAANEAANSSRKFSTIKTELTSLQTLYGLVQCTPDLARQDCFSCLTSSINRMMPLFRIGARQFWPSCNSRYELYAFYNETAIGTPSPPPLFPGSTPPLTSPSIPGKSGNSTVLVVAIVVLAVLLFIALVGYCFLAQRTKKTFDTASASEVGDDMATADSLQLDYRTIQTATNDFAESNKIGRGGFGEVYKGTFSNGKEVAVKRLSKNSRQGEAEFKTEVVVVAKLQHRNLVRLLGFSLQGEERILVYEYMPNKSLDCLLFDPTKQTQLDWMQRYNIIGGIARGILYLHQDSRLTIIHRDLKASNILLDADINPKIADFGMARIFGLDQTQDNTSRIVGTYGYMAPEYAMHGQFSMKSDVYSFGVLVLEIISGRKNSSFDESDGAQDLLTHTWRLWTNRTALDLVDPLIANNCQNSEVVRCIHIGLLCVQEDPAKRPTISTVFMMLTSNTVTLPVPRQPGFFIQSSPVKDPTDSDQSTTTKSTPASIDDELITDLYPR

SEQ ID NO: 75756 - DNA, 900 bp, Arabidopsis thaliana
  misc_feature (1)..(900): Ceres Seq. ID no. 6454057
  misc_feature (1)..(900): Ortholog of  Ceres SEQ ID NO 13596609 as cited in SEQ ID NO 63070
  misc_feature (1)..(900): Ortholog of  Ceres SEQ ID NO 12616895 as cited in SEQ ID NO 63909
  misc_feature (1)..(900): Ortholog of  Ceres SEQ ID NO 13598574 as cited in SEQ ID NO 69083
atgaacagaatgagcaatacagtgataggattcttgaatatcctaacactaatttcctccatagttctattaggatcagctctatggatgggtaggagcaaaacgacatgcgagcattttcttcagaagccacttttgatcttaggcctagctatcttgatcttgtcagtagctggtctagtcggtgcatgttgtgacgtggcttgggtcttgtgggtgtacctcttcttcatggtcttcatcatagtcgcactcatgggtttgaccttgtttggattcatagtgactagccatagtggtggtgtggttgtcgatggtagggtttataaagagtttaagcttgaagcatatcacccttggcttaagacaagggtggtagatactaattattgggttactataaagacttgtctcttgggctcagtcacttgttccaagctcgctctttggactcctcttgattatctccaaaaagacttatctcctcttcagtctggatgctgcaaaccaccgacgtcgtgcgtttacaacacggacacggtgatacaacaagaccctgattgttaccggtggaacaacgcagcgacggtgctctgctatgattgtgacacgtgtagagctggcgttttagagactgtacgtcgcgattggcacaaactctctctagtgaacgtcattgttgttattttcctcatagctgtttactgtgttggctgttgcgcgtttaaaaacgccaaacgccctcaacattacggcttcccttatggacgttacggcatgtccaaatccagacctggatgggaacagtcctggtttgttctcttttctaatgcaacaattatttttattattttcgcggcatgtaggtcaaggtggtggcatgggagagatcggtattag

SEQ ID NO: 75757 - protein, 299 aa, Arabidopsis thaliana
  peptide (1)..(299): Ceres Seq. ID no. 6454058
MNRMSNTVIGFLNILTLISSIVLLGSALWMGRSKTTCEHFLQKPLLILGLAILILSVAGLVGACCDVAWVLWVYLFFMVFIIVALMGLTLFGFIVTSHSGGVVVDGRVYKEFKLEAYHPWLKTRVVDTNYWVTIKTCLLGSVTCSKLALWTPLDYLQKDLSPLQSGCCKPPTSCVYNTDTVIQQDPDCYRWNNAATVLCYDCDTCRAGVLETVRRDWHKLSLVNVIVVIFLIAVYCVGCCAFKNAKRPQHYGFPYGRYGMSKSRPGWEQSWFVLFSNATIIFIIFAACRSRWWHGRDRY

SEQ ID NO: 75758 - protein, 296 aa, Arabidopsis thaliana
  peptide (1)..(296): Ceres Seq. ID no. 6454059
MSNTVIGFLNILTLISSIVLLGSALWMGRSKTTCEHFLQKPLLILGLAILILSVAGLVGACCDVAWVLWVYLFFMVFIIVALMGLTLFGFIVTSHSGGVVVDGRVYKEFKLEAYHPWLKTRVVDTNYWVTIKTCLLGSVTCSKLALWTPLDYLQKDLSPLQSGCCKPPTSCVYNTDTVIQQDPDCYRWNNAATVLCYDCDTCRAGVLETVRRDWHKLSLVNVIVVIFLIAVYCVGCCAFKNAKRPQHYGFPYGRYGMSKSRPGWEQSWFVLFSNATIIFIIFAACRSRWWHGRDRY

SEQ ID NO: 75759 - protein, 270 aa, Arabidopsis thaliana
  peptide (1)..(270): Ceres Seq. ID no. 6454060
MGRSKTTCEHFLQKPLLILGLAILILSVAGLVGACCDVAWVLWVYLFFMVFIIVALMGLTLFGFIVTSHSGGVVVDGRVYKEFKLEAYHPWLKTRVVDTNYWVTIKTCLLGSVTCSKLALWTPLDYLQKDLSPLQSGCCKPPTSCVYNTDTVIQQDPDCYRWNNAATVLCYDCDTCRAGVLETVRRDWHKLSLVNVIVVIFLIAVYCVGCCAFKNAKRPQHYGFPYGRYGMSKSRPGWEQSWFVLFSNATIIFIIFAACRSRWWHGRDRY

SEQ ID NO: 75760 - DNA, 1160 bp, Arabidopsis thaliana
  misc_feature (1)..(1160): Ceres Seq. ID no. 6454081
  misc_feature (1)..(1160): Ortholog of  Ceres SEQ ID NO 13594252 as cited in SEQ ID NO 57528
  misc_feature (1)..(1160): Ortholog of  Ceres SEQ ID NO 14305682 as cited in SEQ ID NO 59267
  misc_feature (1)..(1160): Ortholog of  Ceres SEQ ID NO 14315060 as cited in SEQ ID NO 60039
  misc_feature (1)..(1160): Ortholog of  Ceres SEQ ID NO 13594430 as cited in SEQ ID NO 60181
  misc_feature (1)..(1160): Ortholog of  Ceres SEQ ID NO 13597809 as cited in SEQ ID NO 64598
  misc_feature (1)..(1160): Ortholog of  Ceres SEQ ID NO 14313544 as cited in SEQ ID NO 68424
  misc_feature (1)..(1160): Ortholog of  Ceres SEQ ID NO 12617960 as cited in SEQ ID NO 69051
  misc_feature (1)..(1160): Ortholog of  Ceres SEQ ID NO 13589401 as cited in SEQ ID NO 0
aaaaactttgggaagcagctaaaatactgtgttctttgtttcttccatcgaaatcgaaaaaagctaagatctttgcgttttgaaacgatggcggaagaacataagcatgatgaatctgtgatcgctcctgagccagctgttgaggttgtggagagagaatcgttgatggataagaagaagaagactaagaagccctcttctccttcgtcttctatgaaatcgaaagtttaccgcttgttcggacgagagcagcctgttcataaggttctcggcggtggaaagccggctgatatattcatgtggaagaacaagaagatgtctggtggtgtacttggtggtgctacagctgcttgggttgtgtttgaattgatggagtaccatcttctcactctgctttgccacgtgatgattgttgttctcgctgtgctgtttttgtggtctaatgccactatgttcattaacaagtcccctccaaagattcctgaagttcatatccctgaagaacctattcttcagcttgcgtctgggctcagaatcgagatcaaccgtggattctcttctctccgtgaaattgcatcaggaagggatctcaagaaattcctcattgctattgccgggttatgggttctctcaatcttgggcggttgcttcaacttcttgacattggcatacatagctcttgtgttgctcttcacggttcctcttgcctacgacaagtatgaagacaaagtcgacccattaggtgagaaagcaatgatcgagctcaagaagcagtatgcagtgttggatgagaaggtgttgagcaagatcccacttgggccgttgaagaacaagaagaaagattaggggtttacacaaggttgtccgtggctagcaaaacgggtgttgtgaaatggtatcgaagtaatgtgttttgggcgtttttttaggtggctctttcggttatgtgaatgaacttggaattttcctgactggtttgttctgttgtttatgtcattgttgatcagcgtcgagggataaaagtagtgatatttcttctctctctaagcctctatataactaagaatttcaagatatttgaattttgcaatctcgtggttaatgttgttctttctctatattctcctctttcattacatttgtaaaatggaatcaatgtc

SEQ ID NO: 75761 - protein, 281 aa, Arabidopsis thaliana
  peptide (1)..(281): Ceres Seq. ID no. 6454082
KNFGKQLKYCVLCFFHRNRKKLRSLRFETMAEEHKHDESVIAPEPAVEVVERESLMDKKKKTKKPSSPSSSMKSKVYRLFGREQPVHKVLGGGKPADIFMWKNKKMSGGVLGGATAAWVVFELMEYHLLTLLCHVMIVVLAVLFLWSNATMFINKSPPKIPEVHIPEEPILQLASGLRIEINRGFSSLREIASGRDLKKFLIAIAGLWVLSILGGCFNFLTLAYIALVLLFTVPLAYDKYEDKVDPLGEKAMIELKKQYAVLDEKVLSKIPLGPLKNKKKD

SEQ ID NO: 75762 - protein, 252 aa, Arabidopsis thaliana
  peptide (1)..(252): Ceres Seq. ID no. 6454083
MAEEHKHDESVIAPEPAVEVVERESLMDKKKKTKKPSSPSSSMKSKVYRLFGREQPVHKVLGGGKPADIFMWKNKKMSGGVLGGATAAWVVFELMEYHLLTLLCHVMIVVLAVLFLWSNATMFINKSPPKIPEVHIPEEPILQLASGLRIEINRGFSSLREIASGRDLKKFLIAIAGLWVLSILGGCFNFLTLAYIALVLLFTVPLAYDKYEDKVDPLGEKAMIELKKQYAVLDEKVLSKIPLGPLKNKKKD

SEQ ID NO: 75763 - protein, 226 aa, Arabidopsis thaliana
  peptide (1)..(226): Ceres Seq. ID no. 6454084
MDKKKKTKKPSSPSSSMKSKVYRLFGREQPVHKVLGGGKPADIFMWKNKKMSGGVLGGATAAWVVFELMEYHLLTLLCHVMIVVLAVLFLWSNATMFINKSPPKIPEVHIPEEPILQLASGLRIEINRGFSSLREIASGRDLKKFLIAIAGLWVLSILGGCFNFLTLAYIALVLLFTVPLAYDKYEDKVDPLGEKAMIELKKQYAVLDEKVLSKIPLGPLKNKKKD

SEQ ID NO: 75764 - DNA, 572 bp, Arabidopsis thaliana
  misc_feature (1)..(572): Ceres Seq. ID no. 6454339
  misc_feature (1)..(572): Ortholog of  Ceres SEQ ID NO 12388487 as cited in SEQ ID NO 20511
atcctctcctttctctctctagatttttatcccctttccctctctctctctctctctcctagggttttcgtctctctcgttcactgttaatagtcttaacggagaggtttgattagcctccgggaagattctactgcgaactttggacacatctctctctgccatggcggctgagaagttaagggacttgagccagccgattgacgtcggtgtgctcgatgccactgttgcggccttctttgttaccggatctaaagaagaggtgcttcaatttctctgggttttgacttgttcaaggggctcgaccaatgattagtctatttcgcgggtctgttttattgtttgagcgtcttcttctcgattgggtgtgaggagtaggaattaggagcgtttcgttgttagggttttagcactctgatacatctttgtcttaagacgcttgtttcgggcagctcgagttttcaatttggatttttagggtcctagagttttagtaatgtattgaattacaatggtttagttgctcactgagactcgagattggtgaattaagtcccttgttcttttgtcgc

SEQ ID NO: 75765 - protein, 50 aa, Arabidopsis thaliana; identical to SEQ ID NO: 37200
  peptide (1)..(50): Ceres Seq. ID no. 6454340

SEQ ID NO: 75766 - DNA, 1571 bp, Arabidopsis thaliana
  misc_feature (1)..(1571): Ceres Seq. ID no. 6454366
  misc_feature (1)..(1571): Ortholog of  Ceres SEQ ID NO 13638029 as cited in SEQ ID NO 58406
aattggtttagcgcgacaagagcatcaacgcaatggtgggaacatcaagctcctccgccggcgaccacacccacaccgtcgtgataaatgccctaactagtcggggctggtgcttcagagacgtcgaatacttgaaatccctggtcactgaaatctcttccttgatcggcggcggcaataaaacaggcgccatcgtggagtcagtggaggcggagctgcttaacatggatattaagttaatcggaggtaaatccctcccggacccgaccgagttacgcaggtgttctcatcttcaaggccccaaagttctccagataagttatgttagggatgttacaagaagtagcgcagaggaatttgtgggaagttccactggtaaacgagtgctaaaattcgctctgactgacgggaagaccgaaatatccgcgcttgagtactctcatataccaacgattaacaatgatgtcactcctggtactaaggtacgtctagaaaataaggctgtgatacgtgatggtctagtatgtttgactccaaaagaggtgactgtcttgggcggttatgtgcaatcactcactgaagaatggcagatgaagaaaaaatacgctagtttggctcgatctcaggaaagcaaagctggtgatggccctcctccatttgaggagttgaagattcgaacaggttcccatcaccgcgattacaacaagacgacttctagaaacaatgtacctattgctgcagaaagctctgtaaaacatgccggtggagaaaaaggtgaaagtagtgaagttgatgggaacaaaagaggcacaaataagaatatacagaggaatcctgcagattctgatccgaaaatatctgtcgaagttgaaaatcaggaaaagcgaagcagttccgatacacgacctaaacaagtggtggaagctgttcctttacagaaccaagcggctgcgcagatacttcttgagaagatgaaacattctagttcaaatgataggcaataccaaggaagaagaggtaggggtagaggtagaggtagagggagggggagagaagaagaagactctgcagtatttacactagatgagtgggaaaagaggaatactggtgggggggctcttccaacagctaaccatccaagcgacactacccgcgatgaagatcttgcatggcagcttcagaatcagtttgatctggaagactcttatgggcaggagatgcctggagccggggcagcggatatcagaatgaatatgtttgattacggaagaacagaagataacttcggccatggaaggggaagaggaggaggaagaggaaggggtagagggcgaggacatagacggggaagaggacgtgtgtagattgtaatgaaatcatccaggcttgtggtaattaaacaaaacttcatcatttacatctgtatatctttatgtatgttttagagtaaacatgtatcttattacatattttagagcattattactcatgtatgctttggttctcacaggtgtggcagcgctgaatctgtacatgtttgttttagggtgattcagaatttcagattttcg

SEQ ID NO: 75767 - protein, 443 aa, Arabidopsis thaliana; identical to SEQ ID NO: 25876
  peptide (1)..(443): Ceres Seq. ID no. 6454367

SEQ ID NO: 75768 - protein, 379 aa, Arabidopsis thaliana; identical to SEQ ID NO: 25877
  peptide (1)..(379): Ceres Seq. ID no. 6454368

SEQ ID NO: 75769 - protein, 257 aa, Arabidopsis thaliana; identical to SEQ ID NO: 25878
  peptide (1)..(257): Ceres Seq. ID no. 6454369

SEQ ID NO: 75770 - DNA, 750 bp, Arabidopsis thaliana
  misc_feature (1)..(750): Ceres Seq. ID no. 6454403
  misc_feature (1)..(750): Ortholog of  Ceres SEQ ID NO 15174384 as cited in SEQ ID NO 0
acacatttttttttcttcactcggactgatatgagtagccaaatcgctttgtcaccggccatcgccgccgccattcgccgtccgtcctctcacgactgtctatccgcttccgccactactgctaccgccacccccatggctctcaaatcttgcatcgtcgcacctctctcgctattcacctctcaatctcaaatcaaacactcaagctcaagaaaaacttctcgaaccacgattcgatgcgatgtagcgataaaatccgcagattcgataaacgcagacgccaatccttcgtcctcaccgtcatcagaggaagaaatcgaagcggaagcgaaggcgaagataggatctagggttagagtaactgcaccgttgaaggtttatcatgtaaatcgagttccagaggttgatttagaaggtatggaaggtaaactcaaagattacgttgctgtttggaaagggaaacgaatctcagctaatcttccttataagattgagttcttcaaagaaattgaaggtcgtggtcttgttaaatttgtttcacatcttaaggaagatgagttcgagttcattgatcagtgatgaaacaagaaagacaatttttgttttcctttctcagtgtttgtttttgtttgttgtgtttactggaacctgggaatggagaatgatttgtatgtagtgtgatgtgtattcaacctttagcaatcatatacataagggtttcttcactctctatttatgttgatttgattc

SEQ ID NO: 75771 - protein, 192 aa, Arabidopsis thaliana
  peptide (1)..(192): Ceres Seq. ID no. 6454404
THFFFFTRTDMSSQIALSPAIAAAIRRPSSHDCLSASATTATATPMALKSCIVAPLSLFTSQSQIKHSSSRKTSRTTIRCDVAIKSADSINADANPSSSPSSEEEIEAEAKAKIGSRVRVTAPLKVYHVNRVPEVDLEGMEGKLKDYVAVWKGKRISANLPYKIEFFKEIEGRGLVKFVSHLKEDEFEFIDQ

SEQ ID NO: 75772 - protein, 182 aa, Arabidopsis thaliana
  peptide (1)..(182): Ceres Seq. ID no. 6454405
MSSQIALSPAIAAAIRRPSSHDCLSASATTATATPMALKSCIVAPLSLFTSQSQIKHSSSRKTSRTTIRCDVAIKSADSINADANPSSSPSSEEEIEAEAKAKIGSRVRVTAPLKVYHVNRVPEVDLEGMEGKLKDYVAVWKGKRISANLPYKIEFFKEIEGRGLVKFVSHLKEDEFEFIDQ

SEQ ID NO: 75773 - protein, 147 aa, Arabidopsis thaliana; identical to SEQ ID NO: 27062
  peptide (1)..(147): Ceres Seq. ID no. 6454406

SEQ ID NO: 75774 - DNA, 982 bp, Arabidopsis thaliana
  misc_feature (1)..(982): Ceres Seq. ID no. 6454422
  misc_feature (1)..(982): Ortholog of  Ceres SEQ ID NO 15170395 as cited in SEQ ID NO 58055
acaaattcactttccacaattaatctatctctctctttatctccctcacacctcagccttctgtgttcgtctttatctctctcccaaatctcaattttggactcgtctgcttttgtttatataaacacttctcttcttcttcaatctccacacacaccacacaaaaccacctaccttcttcgatttctccagaaatcctccttcaagttcatactcatggaagaagctaaagtggaagcaaaagatggtaccatctccgtagcttctgcattttccggtcaccaacaagctgttcacgatagcgaccataaattcctaacgcaagctgttgaagaagcttacaagggagtggactgtggtgatggtggcccatttggtgcggtgattgtgcataataacgaggttgtcgctagctgccacaatatggttttgaaatatactgacccaactgcacatgctgaagtcactgccattagagaggcatgtaagaaacttaacaaaatcgagttatcagaatgcgagatttacgcatcttgtgagccatgtccgatgtgcttcggagccatccatctctcgagactcaagaggttggtttatggagccaaagccgaagcagctatagccatcgggtttgatgacttcatagctgatgctttgagaggcacgggggtttaccagaaatctagtctggagatcaagaaagcagacgggaatggcgctgcgattgcggagcaagttttccagaacacaaaggagaagttccgtttatactaaagcacttctccattaccacattcttcttcttcttctccttcatgatggtaattagaagtagtagaagaagaactgcacttgctttaacttaaataaatctctgtttcaaattgttcattttaaaaacagaaggaaacgaaaaaaaaaatcaatttcggttcttgttgacacgatttgtaatttcttttcttcatttgaattgaactgg

SEQ ID NO: 75775 - protein, 257 aa, Arabidopsis thaliana
  peptide (1)..(257): Ceres Seq. ID no. 6454423
TNSLSTINLSLSLSPSHLSLLCSSLSLSQISILDSSAFVYINTSLLLQSPHTPHKTTYLLRFLQKSSFKFILMEEAKVEAKDGTISVASAFSGHQQAVHDSDHKFLTQAVEEAYKGVDCGDGGPFGAVIVHNNEVVASCHNMVLKYTDPTAHAEVTAIREACKKLNKIELSECEIYASCEPCPMCFGAIHLSRLKRLVYGAKAEAAIAIGFDDFIADALRGTGVYQKSSLEIKKADGNGAAIAEQVFQNTKEKFRLY

SEQ ID NO: 75776 - protein, 185 aa, Arabidopsis thaliana; identical to SEQ ID NO: 23876
  peptide (1)..(185): Ceres Seq. ID no. 6454424

SEQ ID NO: 75777 - DNA, 1141 bp, Arabidopsis thaliana
  misc_feature (1)..(1141): Ceres Seq. ID no. 6454435
  misc_feature (1)..(1141): Ortholog of  Ceres SEQ ID NO 14303282 as cited in SEQ ID NO 0
attatctgggcagttgttggaacatacacgagctggtgagcgtgttgctgttgattcgagaaagcgtaaccctgctgattttgcattatggaaggcggcaaagcctgatgagccaagttgggagagcccttggggtccaggaagaccaggatggcacatcgagtgcagtgcaatgagtgttcattatctgtctccgaaatttgatattcatggaggtggtgcagatcttaaattcccgcatcatgaaaatgagatcgcccagacatgtgctgcatgtgaggatagtggtgtaaattactggttgcataatgggcatgtcactatcaacaacgagaagatggcaaaatcaaagcacaactttaaaacgattagagaaataaccgctagctaccatccattggctctgaggcacttcttgatgagtgcacagtaccggtctcctctgagtttcactgcctcgcagctagagagttcgtcagaagctttatactatgtttaccagactttacaagatcttgatgaaggtctgtcaccatatcaagacgcattgtctgaagatggtggaaaatctgaacaaactgcagaaggaaaagacatcattaagaagcagcgaatgtcaatgcttgtgtcactcgttgagattgagaaagcagcaagggaagttcttgatgtacttggtttactcactacactgagctatgccgagattttgaaagaaatgaaactaaaaacactaataagagcagaaattggagaagaaggtatttcgcagttaatagaagaaaggataacagccaggaagaataaagatttcgcgaaaagtgatgagattagagagaaactgacaagaaaaggaatagcgttaatggacattggcaaagaaactgtatggagaccatgcttcccttctcaggctgattccagcacttgagcttagagcagagtcatggagatagttaacggtttcttcatttctctaactcttcttctttagccttttgtttgaggctctttctttataactctgtttttggaattgtgcaatgacttcaaaatatacacttgttgctgtttgttgtattcttaccattcacaatgacattgtaacaatattgttactttggatattggttctatagcc

SEQ ID NO: 75778 - protein, 309 aa, Arabidopsis thaliana
  peptide (1)..(309): Ceres Seq. ID no. 6454436
LSGQLLEHTRAGERVAVDSRKRNPADFALWKAAKPDEPSWESPWGPGRPGWHIECSAMSVHYLSPKFDIHGGGADLKFPHHENEIAQTCAACEDSGVNYWLHNGHVTINNEKMAKSKHNFKTIREITASYHPLALRHFLMSAQYRSPLSFTASQLESSSEALYYVYQTLQDLDEGLSPYQDALSEDGGKSEQTAEGKDIIKKQRMSMLVSLVEIEKAAREVLDVLGLLTTLSYAEILKEMKLKTLIRAEIGEEGISQLIEERITARKNKDFAKSDEIREKLTRKGIALMDIGKETVWRPCFPSQADSST

SEQ ID NO: 75779 - protein, 252 aa, Arabidopsis thaliana
  peptide (1)..(252): Ceres Seq. ID no. 6454437
MSVHYLSPKFDIHGGGADLKFPHHENEIAQTCAACEDSGVNYWLHNGHVTINNEKMAKSKHNFKTIREITASYHPLALRHFLMSAQYRSPLSFTASQLESSSEALYYVYQTLQDLDEGLSPYQDALSEDGGKSEQTAEGKDIIKKQRMSMLVSLVEIEKAAREVLDVLGLLTTLSYAEILKEMKLKTLIRAEIGEEGISQLIEERITARKNKDFAKSDEIREKLTRKGIALMDIGKETVWRPCFPSQADSST

SEQ ID NO: 75780 - protein, 197 aa, Arabidopsis thaliana
  peptide (1)..(197): Ceres Seq. ID no. 6454438
MAKSKHNFKTIREITASYHPLALRHFLMSAQYRSPLSFTASQLESSSEALYYVYQTLQDLDEGLSPYQDALSEDGGKSEQTAEGKDIIKKQRMSMLVSLVEIEKAAREVLDVLGLLTTLSYAEILKEMKLKTLIRAEIGEEGISQLIEERITARKNKDFAKSDEIREKLTRKGIALMDIGKETVWRPCFPSQADSST

SEQ ID NO: 75781 - DNA, 1091 bp, Arabidopsis thaliana
  misc_feature (1)..(1091): Ceres Seq. ID no. 6454481
  misc_feature (1)..(1091): Ortholog of  Ceres SEQ ID NO 14304359 as cited in SEQ ID NO 52581
gttagctgcgaaacaagatgctgttacagtcatagaagtcttatgcgtacacgactccgatttcaaaatctgaacggaatataaactctcgacgacgaaaatctcaaaaaccccaaaatctcctccaactccgagttatggctacatgttccctcttaccaccaccgtctttttctccgcgccggcgattctgtagtttttctcacaatcgccggtctctaccttcaatattcagtttcaacaaagagcgtgtctcacgaagagtcttctgtagctccaaagagaacgatataaacagagatcggaatcagtctacaggaattcaagtctacggcgaaatcgagaggttattaacagagactgtaaaaaattctcagagtagctccggtggatcctctgattggtcagaagttgagggagcatgggtgctgaaaccaagaaactcgaaaccgaagatggttgttcatttcattggcggtatatttgtcggtgcagcaccacagcttacttatcgattgtttctcgagagattagcggagaagagaagattttgttccaaaaccagaagaaacaagacgccttataagatcctactatggaatctctaggaatctgttgataaaattcgaggatgattcaatagatgaaacatcaatcctagctcaggtgcttggtgtggaatcatccataagctcaaagctagacatgtctatccgtacactgcccggagatcacggtctccctctgcaacaggctcttccggatgttccaccaggaatggcagaagcggtgaatcgaggaagtgagtttttagcgaatattgctgtcgggactccgtgggaatctatggctaaagaggttggaggttcgctgggaatggactcgaagatccttcgtgctgacatgtccaaagatcttgcgcagctcgttgatgcaatcacttcttggatgatttcaaatatgggtccaaagcttctgagaccataatgttttctcatgtacacaaaacatacaaaaatctattaacacagggcgattgcatactatttaatgtaatgtaactgtatatattataacatgaagagtttggt

SEQ ID NO: 75782 - protein, 156 aa, Arabidopsis thaliana
  peptide (1)..(156): Ceres Seq. ID no. 6454482
MATCSLLPPPSFSPRRRFCSFSHNRRSLPSIFSFNKERVSRRVFCSSKENDINRDRNQSTGIQVYGEIERLLTETVKNSQSSSGGSSDWSEVEGAWVLKPRNSKPKMVVHFIGGIFVGAAPQLTYRLFLERLAEKRRFCSKTRRNKTPYKILLWNL

SEQ ID NO: 75783 - protein, 93 aa, Arabidopsis thaliana
  peptide (1)..(93): Ceres Seq. ID no. 6454483
MSIRTLPGDHGLPLQQALPDVPPGMAEAVNRGSEFLANIAVGTPWESMAKEVGGSLGMDSKILRADMSKDLAQLVDAITSWMISNMGPKLLRP

SEQ ID NO: 75784 - DNA, 1272 bp, Arabidopsis thaliana
  misc_feature (1)..(1272): Ceres Seq. ID no. 6454534
  misc_feature (1)..(1272): Ortholog of  Ceres SEQ ID NO 15180558 as cited in SEQ ID NO 0
atggcgtcaacggaaggccttatgcctatcacccgggcttttctcgcttcttactacgacaaatatcctttctctcctctttccgacgacgtttctcggctttcctctgacatggcatctctgattaagctattgaccgtccaatctcccccttcacaaggggaaacttccctgattgacgaagcaaaccgtcagccccctcacaaaattgatgagaatatgtggaaaaatagggagcagatggaggagatactgtttcttctgtcaccatctcgctggcctgttcagcttcgggaaccttccacatccgaagatgctgaattcgcttctattttgcggactctcaaggacagttttgataacgcattcactgctatgatttccttccagacgaagaattccgagcgcatattcagcacagtaatgacctacatgcctcaagatttccggggaacgctcatcagacagcagaaggagaggtcggagaggaacaaacaggcggaggttgatgcgttggtcagctctggagggagcatacgcgacacatatgctcttctttggaagcagcaaatggagaggaggaggcagttggctcagctaggctctgccactggtgtctacaaaaccctggtcaagtacttggtaggggttccacaggtgttgttggattttattcgacaaataaacgatgatgatggtctcacaaaaatggtgatcgcaattcgggttttcctaacacttctgtgggaaagatatgataccttcaaactgagtaaagaccaaatgaatctcctgtctgaagctgctatagtctacacttctgagtttgaaagattcgtcacatttatcagcgatgtattcgccaattcccccttctttatttcagctgatacagctggcatattgtggtcaagggacaatgaggagtacaaggagataatcgttcaagctgggagaacctatgagatctcattgatggtggaatctgaaaattcgtatattgcttgggatttctctttgatgcaaggcaagataagcatggatatcggatttagcgtggagtacataaatgcttcaggggaaaagactctgatattaccttaccgtcggtatgaagctgaccagggcaacttctctacgctaatggctggaaactacaaacttgtttgggataattcatattcaactttcttcaaaaagactcttcgatataaggtggattgcatagcaccagtagtggagccggatccagagccggagccgttaaactga

SEQ ID NO: 75785 - protein, 423 aa, Arabidopsis thaliana
  peptide (1)..(423): Ceres Seq. ID no. 6454535
MASTEGLMPITRAFLASYYDKYPFSPLSDDVSRLSSDMASLIKLLTVQSPPSQGETSLIDEANRQPPHKIDENMWKNREQMEEILFLLSPSRWPVQLREPSTSEDAEFASILRTLKDSFDNAFTAMISFQTKNSERIFSTVMTYMPQDFRGTLIRQQKERSERNKQAEVDALVSSGGSIRDTYALLWKQQMERRRQLAQLGSATGVYKTLVKYLVGVPQVLLDFIRQINDDDGLTKMVIAIRVFLTLLWERYDTFKLSKDQMNLLSEAAIVYTSEFERFVTFISDVFANSPFFISADTAGILWSRDNEEYKEIIVQAGRTYEISLMVESENSYIAWDFSLMQGKISMDIGFSVEYINASGEKTLILPYRRYEADQGNFSTLMAGNYKLVWDNSYSTFFKKTLRYKVDCIAPVVEPDPEPEPLN

SEQ ID NO: 75786 - protein, 416 aa, Arabidopsis thaliana
  peptide (1)..(416): Ceres Seq. ID no. 6454536
MPITRAFLASYYDKYPFSPLSDDVSRLSSDMASLIKLLTVQSPPSQGETSLIDEANRQPPHKIDENMWKNREQMEEILFLLSPSRWPVQLREPSTSEDAEFASILRTLKDSFDNAFTAMISFQTKNSERIFSTVMTYMPQDFRGTLIRQQKERSERNKQAEVDALVSSGGSIRDTYALLWKQQMERRRQLAQLGSATGVYKTLVKYLVGVPQVLLDFIRQINDDDGLTKMVIAIRVFLTLLWERYDTFKLSKDQMNLLSEAAIVYTSEFERFVTFISDVFANSPFFISADTAGILWSRDNEEYKEIIVQAGRTYEISLMVESENSYIAWDFSLMQGKISMDIGFSVEYINASGEKTLILPYRRYEADQGNFSTLMAGNYKLVWDNSYSTFFKKTLRYKVDCIAPVVEPDPEPEPLN

SEQ ID NO: 75787 - protein, 386 aa, Arabidopsis thaliana
  peptide (1)..(386): Ceres Seq. ID no. 6454537
MASLIKLLTVQSPPSQGETSLIDEANRQPPHKIDENMWKNREQMEEILFLLSPSRWPVQLREPSTSEDAEFASILRTLKDSFDNAFTAMISFQTKNSERIFSTVMTYMPQDFRGTLIRQQKERSERNKQAEVDALVSSGGSIRDTYALLWKQQMERRRQLAQLGSATGVYKTLVKYLVGVPQVLLDFIRQINDDDGLTKMVIAIRVFLTLLWERYDTFKLSKDQMNLLSEAAIVYTSEFERFVTFISDVFANSPFFISADTAGILWSRDNEEYKEIIVQAGRTYEISLMVESENSYIAWDFSLMQGKISMDIGFSVEYINASGEKTLILPYRRYEADQGNFSTLMAGNYKLVWDNSYSTFFKKTLRYKVDCIAPVVEPDPEPEPLN

SEQ ID NO: 75788 - DNA, 2577 bp, Arabidopsis thaliana
  misc_feature (1)..(2577): Ceres Seq. ID no. 6454651
  misc_feature (1)..(2577): Ortholog of  Ceres SEQ ID NO 15177692 as cited in SEQ ID NO 52664
  misc_feature (1)..(2577): Ortholog of  Ceres SEQ ID NO 14303959 as cited in SEQ ID NO 53709
atgggttcatttgccggaaagtgtgaaatagttgaagaaaaagaagaccgtcaaaactcgattggttactcagcgaaatcaaccactattccacattctagatcaagcattgtcgacgacaaggatctggagcgaccggtactgaaattaggttacagaggttcactagaagatgacataaaccaacttttcgagtctataagcattcgaacatcaggaatgattccttcttaccaagttggtgcaactagtagcagtagaaacaacactcctttacaacggaatgctttgaagagtcccgcgaatcccgcaggacctcgatcgcctagcaagagaaatgcggaaccagcgacgttaaaacaagctttgagagatttatgcgtcactaaggcatcggaaaccgcagctaccaaacggattcctaagagtactagtactggaggctcagtttatggttcggttttggttgaaccgggaagtggagctagcgaagaagggaaagcggttcttgtcgagttactcggcgaggatcaaagcagttcatcggatagtatatcgcagcagcttcgtcttctgaagatacattcttctagccaaaactctcagacatcaaagcggtattgcgatgagatgacaatacttaaaaaacacaagaacctgtctcttgacgaccaagaaatgagtatcgagaacaagaacttcggttcatcatcgcccggatcaggaaacaacaagaccgtggttggactgaaatcagttagaaaagtgaggttgttgtatgccaatacaccgagttccaccatagttaacgggaagagagtggctaagttaaccagaaccattccaagaggaggaggagctaaacctgcactaaggaacaaaggttccatgaagaagaaggctacaaatgtgtatgatgaagtagatggcttctatgatcccattgcaaaggaacttctctgccatagatgccatttctctttgaagaacactgcagctaaggaagatccctctaaagattcacttgtagaaccacatgagatctgtgctaaagatgaattggcttctgatttctccagctcaagctatgagagctcgcatgagatcagtagcgtggagattggttctttcagtgagaaatctgttgtgatgaatccagatagtcctccaaacaaactcagtttaggcggagcagccattgaagatgtcaacgaaaactcagaaatcataaacaaaggcgacggatacaacagttcaaccacgagtatcagcgaggaagaagtacaacaacagagtaataatataatgacaaggtctagctttggaaacagacctcatatgtctaaggatgtgagatgggaagctattcagcatataagggcacaacacgggcttggttcattgggtcttaggcatttcaatcttctgaagaagctcggctgcggagatattggaacggtttatctcgctgagctcacgggaacaaactgtttgtttgctataaaagtgatggataatgaattcttggagagaaggaacaagatgtctagggctcaaactgagaaagatattctcaaaatgcttgatcacccgtttcttccaacgttatacgctcacttcacttcggataacttatcttgtttggtcatggaatgttgtccgggaggtgatttacatgtcttaaggcagaagcagcccggaaggtggtttcccgagccagcagctaggttctatgtcgcggaggtgcttcttgcattggagtatttgcatatgctcggggtaatataccgagatttgaagcccgagaacattttggtacgtgatgatggacatatcatggtgacagattttgatctctctttgaggtgtaccgtgagcccaacgcttctaaactcatcatctccactccatgcggatgcaatgagactctcttcgggtagccgcactggatctaactgcatcgagccatcgtgtttccgccctaaactctcccgcggatcagggcccaagaaaaaaggcaaacaacaccgcatgatgatgaaaaaactcaagaaatctgacctaatcgcgcggttcaaatcattgccacagctcgtggcagaaccaacagatgcgagatcaaactcttttgttggaacacacgagtatctcgcgcccgagatcattaaaggagaaggtcacggtgctgcggttgactggtggacatttgggatctttctatatgagcttctttacgggaaaactccattcaaaggagctactaatgaggagactatagctaatgtggtgcttcagagcttgaagtttcctgataaccctaatgtgagtttccaagctaaggatcttataagaggtttgttggtcaaggaacctgagaaccggttagggacagagaaaggagcagcggagataaaacggcatgcgttcttcgaaggcttgaactgggcgttgatccggtgtgcgatcccgcctgagcttccggatttctatgactatggagttcctaatcaagaagggaaaagcaattacttagattgcaaggcagttggggaacatcttgagtttgagttattctag

SEQ ID NO: 75789 - protein, 858 aa, Arabidopsis thaliana
  peptide (1)..(858): Ceres Seq. ID no. 6454652
MGSFAGKCEIVEEKEDRQNSIGYSAKSTTIPHSRSSIVDDKDLERPVLKLGYRGSLEDDINQLFESISIRTSGMIPSYQVGATSSSRNNTPLQRNALKSPANPAGPRSPSKRNAEPATLKQALRDLCVTKASETAATKRIPKSTSTGGSVYGSVLVEPGSGASEEGKAVLVELLGEDQSSSSDSISQQLRLLKIHSSSQNSQTSKRYCDEMTILKKHKNLSLDDQEMSIENKNFGSSSPGSGNNKTVVGLKSVRKVRLLYANTPSSTIVNGKRVAKLTRTIPRGGGAKPALRNKGSMKKKATNVYDEVDGFYDPIAKELLCHRCHFSLKNTAAKEDPSKDSLVEPHEICAKDELASDFSSSSYESSHEISSVEIGSFSEKSVVMNPDSPPNKLSLGGAAIEDVNENSEIINKGDGYNSSTTSISEEEVQQQSNNIMTRSSFGNRPHMSKDVRWEAIQHIRAQHGLGSLGLRHFNLLKKLGCGDIGTVYLAELTGTNCLFAIKVMDNEFLERRNKMSRAQTEKDILKMLDHPFLPTLYAHFTSDNLSCLVMECCPGGDLHVLRQKQPGRWFPEPAARFYVAEVLLALEYLHMLGVIYRDLKPENILVRDDGHIMVTDFDLSLRCTVSPTLLNSSSPLHADAMRLSSGSRTGSNCIEPSCFRPKLSRGSGPKKKGKQHRMMMKKLKKSDLIARFKSLPQLVAEPTDARSNSFVGTHEYLAPEIIKGEGHGAAVDWWTFGIFLYELLYGKTPFKGATNEETIANVVLQSLKFPDNPNVSFQAKDLIRGLLVKEPENRLGTEKGAAEIKRHAFFEGLNWALIRCAIPPELPDFYDYGVPNQEGKSNYLDCKAVGEHLEFELF

SEQ ID NO: 75790 - protein, 785 aa, Arabidopsis thaliana
  peptide (1)..(785): Ceres Seq. ID no. 6454653
MIPSYQVGATSSSRNNTPLQRNALKSPANPAGPRSPSKRNAEPATLKQALRDLCVTKASETAATKRIPKSTSTGGSVYGSVLVEPGSGASEEGKAVLVELLGEDQSSSSDSISQQLRLLKIHSSSQNSQTSKRYCDEMTILKKHKNLSLDDQEMSIENKNFGSSSPGSGNNKTVVGLKSVRKVRLLYANTPSSTIVNGKRVAKLTRTIPRGGGAKPALRNKGSMKKKATNVYDEVDGFYDPIAKELLCHRCHFSLKNTAAKEDPSKDSLVEPHEICAKDELASDFSSSSYESSHEISSVEIGSFSEKSVVMNPDSPPNKLSLGGAAIEDVNENSEIINKGDGYNSSTTSISEEEVQQQSNNIMTRSSFGNRPHMSKDVRWEAIQHIRAQHGLGSLGLRHFNLLKKLGCGDIGTVYLAELTGTNCLFAIKVMDNEFLERRNKMSRAQTEKDILKMLDHPFLPTLYAHFTSDNLSCLVMECCPGGDLHVLRQKQPGRWFPEPAARFYVAEVLLALEYLHMLGVIYRDLKPENILVRDDGHIMVTDFDLSLRCTVSPTLLNSSSPLHADAMRLSSGSRTGSNCIEPSCFRPKLSRGSGPKKKGKQHRMMMKKLKKSDLIARFKSLPQLVAEPTDARSNSFVGTHEYLAPEIIKGEGHGAAVDWWTFGIFLYELLYGKTPFKGATNEETIANVVLQSLKFPDNPNVSFQAKDLIRGLLVKEPENRLGTEKGAAEIKRHAFFEGLNWALIRCAIPPELPDFYDYGVPNQEGKSNYLDCKAVGEHLEFELF

SEQ ID NO: 75791 - protein, 648 aa, Arabidopsis thaliana
  peptide (1)..(648): Ceres Seq. ID no. 6454654
MTILKKHKNLSLDDQEMSIENKNFGSSSPGSGNNKTVVGLKSVRKVRLLYANTPSSTIVNGKRVAKLTRTIPRGGGAKPALRNKGSMKKKATNVYDEVDGFYDPIAKELLCHRCHFSLKNTAAKEDPSKDSLVEPHEICAKDELASDFSSSSYESSHEISSVEIGSFSEKSVVMNPDSPPNKLSLGGAAIEDVNENSEIINKGDGYNSSTTSISEEEVQQQSNNIMTRSSFGNRPHMSKDVRWEAIQHIRAQHGLGSLGLRHFNLLKKLGCGDIGTVYLAELTGTNCLFAIKVMDNEFLERRNKMSRAQTEKDILKMLDHPFLPTLYAHFTSDNLSCLVMECCPGGDLHVLRQKQPGRWFPEPAARFYVAEVLLALEYLHMLGVIYRDLKPENILVRDDGHIMVTDFDLSLRCTVSPTLLNSSSPLHADAMRLSSGSRTGSNCIEPSCFRPKLSRGSGPKKKGKQHRMMMKKLKKSDLIARFKSLPQLVAEPTDARSNSFVGTHEYLAPEIIKGEGHGAAVDWWTFGIFLYELLYGKTPFKGATNEETIANVVLQSLKFPDNPNVSFQAKDLIRGLLVKEPENRLGTEKGAAEIKRHAFFEGLNWALIRCAIPPELPDFYDYGVPNQEGKSNYLDCKAVGEHLEFELF

SEQ ID NO: 75792 - DNA, 1269 bp, Arabidopsis thaliana
  misc_feature (1)..(1269): Ceres Seq. ID no. 6454655
  misc_feature (1)..(1269): Ortholog of  Ceres SEQ ID NO 14306420 as cited in SEQ ID NO 53854
  misc_feature (1)..(1269): Ortholog of  Ceres SEQ ID NO 14306410 as cited in SEQ ID NO 53870
atgattgaacagggtgattataatcgcacaattcaactgaatatgatcaacgttactgcaacgagtaataacgtctcttctacggcatcattggaaccaaagaaaagaagagttcttagcaatttagagaagatagaattcaagctacaaaaagctcgagcctccattaaagccgcttcgatggatgatcccgtggacgacccggactatgttcctcttggtcctatgtattggaacgctaaggtctttcatcggagttacttggagatggagaaacaattcaagatatatgtatacaaagaaggcgagccaccgttgttccatgacggtccatgcaaaagcatctactctatggaaggaagtttcatctatgagatagaaaccgatacacgttttcggaccaataatcccgacaaggctcatgttttttatctaccatttagtgtcgtcaagatggtaagatacgtgtatgaacgaaattcccgcgatttcagccccatccgaaatacagtcaaggattacatcaatcttgtgggtgataaatacccatattggaaccgcagcatcggagccgatcatttcatactttcttgtcacgattggggtcctgaggcaagcttctctcatccacatctaggacataattcgattagagctttgtgcaatgccaacacgtcagagagattcaaaccaagaaaagatgtgtcgataccggagatcaatctaaggacgggatccttaactggattggtcggtggaccgtcaccttccagccgtcccatcctcgccttctttgcagggggtgtacacggaccggtaaggccagtcttgctccagcattgggagaacaaagataatgacattagagtccacaagtatctccctagaggaacgtcttattctgacatgatgcggaacagcaagttctgcatttgtcctagcggttatgaggttgcgagcccgaggatcgtggaggcactctactcgggttgcgtcccggttttgataaactcaggatatgttcctccgttcagcgatgtactgaactggagatcgttctcggtgatcgtttcagtggaagacataccgaatttgaaaacgatattgacatctatatcgccgagacagtacttaaggatgtacagaagagtgttgaaggtaaggagacattttgaggtgaattctccggctaagaggtttgatgtgtttcatatgattcttcattcgatttgggtgaggagattgaatgtgaagattcgtgaagtctaa

SEQ ID NO: 75793 - protein, 422 aa, Arabidopsis thaliana
  peptide (1)..(422): Ceres Seq. ID no. 6454656
MIEQGDYNRTIQLNMINVTATSNNVSSTASLEPKKRRVLSNLEKIEFKLQKARASIKAASMDDPVDDPDYVPLGPMYWNAKVFHRSYLEMEKQFKIYVYKEGEPPLFHDGPCKSIYSMEGSFIYEIETDTRFRTNNPDKAHVFYLPFSVVKMVRYVYERNSRDFSPIRNTVKDYINLVGDKYPYWNRSIGADHFILSCHDWGPEASFSHPHLGHNSIRALCNANTSERFKPRKDVSIPEINLRTGSLTGLVGGPSPSSRPILAFFAGGVHGPVRPVLLQHWENKDNDIRVHKYLPRGTSYSDMMRNSKFCICPSGYEVASPRIVEALYSGCVPVLINSGYVPPFSDVLNWRSFSVIVSVEDIPNLKTILTSISPRQYLRMYRRVLKVRRHFEVNSPAKRFDVFHMILHSIWVRRLNVKIREV

SEQ ID NO: 75794 - protein, 408 aa, Arabidopsis thaliana
  peptide (1)..(408): Ceres Seq. ID no. 6454657
MINVTATSNNVSSTASLEPKKRRVLSNLEKIEFKLQKARASIKAASMDDPVDDPDYVPLGPMYWNAKVFHRSYLEMEKQFKIYVYKEGEPPLFHDGPCKSIYSMEGSFIYEIETDTRFRTNNPDKAHVFYLPFSVVKMVRYVYERNSRDFSPIRNTVKDYINLVGDKYPYWNRSIGADHFILSCHDWGPEASFSHPHLGHNSIRALCNANTSERFKPRKDVSIPEINLRTGSLTGLVGGPSPSSRPILAFFAGGVHGPVRPVLLQHWENKDNDIRVHKYLPRGTSYSDMMRNSKFCICPSGYEVASPRIVEALYSGCVPVLINSGYVPPFSDVLNWRSFSVIVSVEDIPNLKTILTSISPRQYLRMYRRVLKVRRHFEVNSPAKRFDVFHMILHSIWVRRLNVKIREV

SEQ ID NO: 75795 - protein, 362 aa, Arabidopsis thaliana
  peptide (1)..(362): Ceres Seq. ID no. 6454658
MDDPVDDPDYVPLGPMYWNAKVFHRSYLEMEKQFKIYVYKEGEPPLFHDGPCKSIYSMEGSFIYEIETDTRFRTNNPDKAHVFYLPFSVVKMVRYVYERNSRDFSPIRNTVKDYINLVGDKYPYWNRSIGADHFILSCHDWGPEASFSHPHLGHNSIRALCNANTSERFKPRKDVSIPEINLRTGSLTGLVGGPSPSSRPILAFFAGGVHGPVRPVLLQHWENKDNDIRVHKYLPRGTSYSDMMRNSKFCICPSGYEVASPRIVEALYSGCVPVLINSGYVPPFSDVLNWRSFSVIVSVEDIPNLKTILTSISPRQYLRMYRRVLKVRRHFEVNSPAKRFDVFHMILHSIWVRRLNVKIREV

SEQ ID NO: 75796 - DNA, 2097 bp, Arabidopsis thaliana
  misc_feature (1)..(2097): Ceres Seq. ID no. 6454698
  misc_feature (1)..(2097): Ortholog of  Ceres SEQ ID NO 13655640 as cited in SEQ ID NO 63844
atgggtactgcaagatccataatctcatttatgctcgtgctcttcttgcttttgaccatccctactcgagctcaaagaacaacaacggagactccaaaaacagagtttattttccgaggttttagcggaaaccaatcaaatattgtgacaacgggagctgcgacgatcaaactcgacggactattgaggctcactgaccgaaactcaaacgttaccggtacatctttctaccacaaacctgtgagattgctggagactaatacaagttccacaaactccacaatccgttcttttagcacttccttcgtatttgtcatcatccctacaagctctagcaacggaggttttggcttcaccttcacgctatctccaacccctgatcgtaccggagccgaatccgcacagtacttgggacttctcaacaaagcaaacgacgggaattcgacgaatcacgtttttgctgtggaattcgacacagtgcaaggttttaaagacggtgccgatagaacaggcaatcacatcggtctgaatttcaacagtttaacatctgatgtccaagaaccggtcgtgtattacgacaacgaagatcctaaccggaaagaggatttcccactacagagtggcgatccaatccgagcaattttggattacgatgggccaactcaaacgctaaacttaactgtctacccggctaacttgaagtctagacccgtaaggcctttgatctcgcgacctgttccaaagttgtcgcaaatcgtgcaagaagaaatgtatgttggattcacagcagctacagggagagatcagtcgagtgctcactacgtcatgggctggagtttttctagcggcggtgatcttctaactgaagatacgcttgacctcttggaacttcctcgtccgcctccgaacacggcgaagaagagaggttacaattctcaagtactcgctctgatcgtagctctatcgggagtaacagtgatcttgcttgcgttactcttctttttcgtgatgtacaagaaacgattgcaacaaggagaggttcttgaagactgggaaatcaatcatcctcatagacttagatataaagatctctacgctgctacggatggattcaaggagaataggattgtcggaactggaggatttggaaccgttttccgaggaaacttatcgtcaccttcgtctgatcaaatcgccgtgaagaagataactccgaatagtatgcaaggtgttcgagaattcatcgcagagatcgagagtttggggagattaaggcataagaatctggtcaaccttcaaggatggtgcaagcaaaaaaacgatctcttgttaatttatgattatatccctaacggaagcttagactcgctgctctacagtagaccaagacagagcggtgttgttttgtcgtggaacgcacgttttaagattgctaaaggaatcgcgtctggtttgttgtatctccatgaagaatgggaaaaggttgtgattcacagagacataaaacctagcaacgttttgattgaggacgatatgaatcctaggttgggagattttggactcgcgaggctttacgaacgcggatcgcaatcgaacacgaccgtagtcgtgggcacaattgggtacatggcaccagagctagcacgcaacggcaaatcttcgtctgcgtctgatgtttttgcgtttggcgttttgttattagagatagtctccgggagaagaccgactgactcagggacattcttcttggccgattgggttatggaattgcacgcgagaggagagattctccatgcggtggatccgagacttggatttggttacgacggcgttgaggcacggcttgctcttgttgtgggattgctctgttgccatcaaagaccgacgtctcggccgtccatgagaacggtgcttaggtatttgaacggagatgatgatgtacctgaaattgataacgattggggatactcggattcttcaagaagcgatttaggatccaactttgaaggatatgtttcatcggatagggcttcgagctcagtcccatctttctccgttacaagggtttcttctagttctgttatcagtggtagatag

SEQ ID NO: 75797 - protein, 698 aa, Arabidopsis thaliana
  peptide (1)..(698): Ceres Seq. ID no. 6454699
MGTARSIISFMLVLFLLLTIPTRAQRTTTETPKTEFIFRGFSGNQSNIVTTGAATIKLDGLLRLTDRNSNVTGTSFYHKPVRLLETNTSSTNSTIRSFSTSFVFVIIPTSSSNGGFGFTFTLSPTPDRTGAESAQYLGLLNKANDGNSTNHVFAVEFDTVQGFKDGADRTGNHIGLNFNSLTSDVQEPVVYYDNEDPNRKEDFPLQSGDPIRAILDYDGPTQTLNLTVYPANLKSRPVRPLISRPVPKLSQIVQEEMYVGFTAATGRDQSSAHYVMGWSFSSGGDLLTEDTLDLLELPRPPPNTAKKRGYNSQVLALIVALSGVTVILLALLFFFVMYKKRLQQGEVLEDWEINHPHRLRYKDLYAATDGFKENRIVGTGGFGTVFRGNLSSPSSDQIAVKKITPNSMQGVREFIAEIESLGRLRHKNLVNLQGWCKQKNDLLLIYDYIPNGSLDSLLYSRPRQSGVVLSWNARFKIAKGIASGLLYLHEEWEKVVIHRDIKPSNVLIEDDMNPRLGDFGLARLYERGSQSNTTVVVGTIGYMAPELARNGKSSSASDVFAFGVLLLEIVSGRRPTDSGTFFLADWVMELHARGEILHAVDPRLGFGYDGVEARLALVVGLLCCHQRPTSRPSMRTVLRYLNGDDDVPEIDNDWGYSDSSRSDLGSNFEGYVSSDRASSSVPSFSVTRVSSSSVISGR

SEQ ID NO: 75798 - protein, 688 aa, Arabidopsis thaliana; identical to SEQ ID NO: 71234
  peptide (1)..(688): Ceres Seq. ID no. 6454700

SEQ ID NO: 75799 - protein, 442 aa, Arabidopsis thaliana; identical to SEQ ID NO: 71235
  peptide (1)..(442): Ceres Seq. ID no. 6454701

SEQ ID NO: 75800 - DNA, 906 bp, Arabidopsis thaliana
  misc_feature (1)..(906): Ceres Seq. ID no. 6454770
  misc_feature (1)..(906): Ortholog of  Ceres SEQ ID NO 14302780 as cited in SEQ ID NO 65368
atgagttgtcggagattcttctcgatcccggtccttttggtgattctggtgatgggtttcgtgtattacgtcacactgtttgttttcatcgatgattgggttggtttacaaagctcagctgggaaattaaacgccttactcttcagcttattggcgtctctctgtctcttctcgctctcaatttgcgttcttgtagatccaggtcgtgttcctgcatcttatgctcctgatgttgaggactctggctggtccaatagtaacgtgaaagtcgatggcttttttctttggtgttacaaaaggaggtttgatgttggtgttaagcttaggaagaatggctttatcgttgatgctgttacagaaacaaggaaatgtgataagtgctttgcatataagcctcttcggactcaccattgccgggtttgcagaagatgcgtcttgaagatggaccatcattgcctctggataaataactgtgttggttatgcaaactataaggctttcttcattcttgtgttttatgcaaccgtggcttccatctactctacagtgttgctggtttgctgtgcattcaagaacggagattcctatgcgggaaatgttccgctcaaaactttcattgtttcttgtgggatcttcatgatcggactaagcataacacttgggactctcctttgttggcatatctacctcatcacacacaatatgaccaccattgagcattatgattcaaagcgggcctcatggttagctagaaaatcaggacaaagctataggcatcaattcgatgttggcttttacaaaaacctcacctcggtgttaggccctaacatgatcaaatggctatgccccacatttactaggaatcctgaagacggtattagcttttctgcatcgagagacagctag

SEQ ID NO: 75801 - protein, 301 aa, Arabidopsis thaliana
  peptide (1)..(301): Ceres Seq. ID no. 6454771
MSCRRFFSIPVLLVILVMGFVYYVTLFVFIDDWVGLQSSAGKLNALLFSLLASLCLFSLSICVLVDPGRVPASYAPDVEDSGWSNSNVKVDGFFLWCYKRRFDVGVKLRKNGFIVDAVTETRKCDKCFAYKPLRTHHCRVCRRCVLKMDHHCLWINNCVGYANYKAFFILVFYATVASIYSTVLLVCCAFKNGDSYAGNVPLKTFIVSCGIFMIGLSITLGTLLCWHIYLITHNMTTIEHYDSKRASWLARKSGQSYRHQFDVGFYKNLTSVLGPNMIKWLCPTFTRNPEDGISFSASRDS

SEQ ID NO: 75802 - protein, 284 aa, Arabidopsis thaliana; identical to SEQ ID NO: 71485
  peptide (1)..(284): Ceres Seq. ID no. 6454772

SEQ ID NO: 75803 - protein, 154 aa, Arabidopsis thaliana; identical to SEQ ID NO: 71486
  peptide (1)..(154): Ceres Seq. ID no. 6454773

SEQ ID NO: 75804 - DNA, 1884 bp, Arabidopsis thaliana
  misc_feature (1)..(1884): Ceres Seq. ID no. 6454783
  misc_feature (1)..(1884): Ortholog of  Ceres SEQ ID NO 12586556 as cited in SEQ ID NO 64667
  misc_feature (1)..(1884): Ortholog of  Ceres SEQ ID NO 13660894 as cited in SEQ ID NO 67475
atgaacattcttggtttcacggtgaacttcttgatccgatgcaaagtcttacccagaagaagcaatacgagttctctctcccgaaacatctccgtactcgccagttatgatcaggaggaagtatcaccgggacgatatagcaatgagttttcgaatcgtaacttggtgcacgaaattttacagctttgtgctagaaacggagctgttatggaagcaaaagcttgccatgggaagattattcgtattgatttggagggagatgttactctgttgaatgttcttattaatgcttattccaagtgtggttttgtggagcttgcccgccaagtgtttgatggaatgcttgagagaagcttggtttcttggaacaccatgattggtttgtatacacggaatagaatggagtcagaagcattggatattttcttggagatgcgaaacgaagggtttaagtttagtgaattcactatatcgagtgttctttctgcttgtggggtaaattgtgatgccttggaatgcaaaaaattgcattgtttgtcagtgaagacatgtattgacttgaacttgtatgttggtactgctttgcttgatctttacgcaaaatgtgggatgatcaaggatgcagtgcaggttttcgagtctatgcaggacaagagttcagttacatggagttctatggtggcaggttatgttcagaacaagaattatgaagaggcactccttctttaccgtcgagctcagagaatgagtttagagcagaatcagttcacattatcttcagtaatttgcgcttgttcaaatctggcagctttaatagaagggaaacagatgcatgctgttatatgtaagtccgggtttggttctaatgtctttgtggcatcctctgcagtagatatgtatgctaaatgtggaagcttgagagagtcttatattattttctcggaagtgcaagagaagaatcttgagctttggaacacgatcatctcggggtttgcaaagcatgctcgtcctaaggaagtgatgatcttgtttgagaaaatgcaacaagatggaatgcacccaaatgaggttacttttagttccttgttatcggtttgtggtcacacgggtttggtcgaggaaggaaggagatttttcaaactcatgagaaccacttacggtctgtcgcctaatgtggttcattactcatgtatggttgatattcttggtcgtgctggtctattgtctgaagcgtacgagttgataaagtctattcctttcgatcctacagcttccatttggggttctcttctagcttcttgtcgagtctacaaaaatctcgagctggcagaagttgcagccgagaaactattcgaattagaaccagaaaacgccggtaatcacgtcttactatccaatatatacgcggcaaacaaacagtgggaggaaatcgccaagtcaaggaagcttttaagggactgcgacgtgaagaaagtaagaggaaaaagttggattgacattaaagacaaggtccatactttcagtgttggagagagcggtcatccgagaatccgtgagatctgttcgacgctagacaatctagtaatcaaattcagaaagtttggatataaaccaagcgtagaacacgagctgcacgatgtggagataggaaagaaagaggagcttttgatgcagcatagtgagaagctggcattggtttttgggttaatgtgtttaccagagagttctccagtgaggattatgaagaatctgaggatttgtgtggattgccatgagttcatgaaggctgcatcaatggctacaagaagatttatcattgttagagatgttaataggtttcaccatttcagtgatggtcattgttcttgtggcgatttttggtga

SEQ ID NO: 75805 - protein, 627 aa, Arabidopsis thaliana
  peptide (1)..(627): Ceres Seq. ID no. 6454784
MNILGFTVNFLIRCKVLPRRSNTSSLSRNISVLASYDQEEVSPGRYSNEFSNRNLVHEILQLCARNGAVMEAKACHGKIIRIDLEGDVTLLNVLINAYSKCGFVELARQVFDGMLERSLVSWNTMIGLYTRNRMESEALDIFLEMRNEGFKFSEFTISSVLSACGVNCDALECKKLHCLSVKTCIDLNLYVGTALLDLYAKCGMIKDAVQVFESMQDKSSVTWSSMVAGYVQNKNYEEALLLYRRAQRMSLEQNQFTLSSVICACSNLAALIEGKQMHAVICKSGFGSNVFVASSAVDMYAKCGSLRESYIIFSEVQEKNLELWNTIISGFAKHARPKEVMILFEKMQQDGMHPNEVTFSSLLSVCGHTGLVEEGRRFFKLMRTTYGLSPNVVHYSCMVDILGRAGLLSEAYELIKSIPFDPTASIWGSLLASCRVYKNLELAEVAAEKLFELEPENAGNHVLLSNIYAANKQWEEIAKSRKLLRDCDVKKVRGKSWIDIKDKVHTFSVGESGHPRIREICSTLDNLVIKFRKFGYKPSVEHELHDVEIGKKEELLMQHSEKLALVFGLMCLPESSPVRIMKNLRICVDCHEFMKAASMATRRFIIVRDVNRFHHFSDGHCSCGDFW

SEQ ID NO: 75806 - protein, 558 aa, Arabidopsis thaliana
  peptide (1)..(558): Ceres Seq. ID no. 6454785
MEAKACHGKIIRIDLEGDVTLLNVLINAYSKCGFVELARQVFDGMLERSLVSWNTMIGLYTRNRMESEALDIFLEMRNEGFKFSEFTISSVLSACGVNCDALECKKLHCLSVKTCIDLNLYVGTALLDLYAKCGMIKDAVQVFESMQDKSSVTWSSMVAGYVQNKNYEEALLLYRRAQRMSLEQNQFTLSSVICACSNLAALIEGKQMHAVICKSGFGSNVFVASSAVDMYAKCGSLRESYIIFSEVQEKNLELWNTIISGFAKHARPKEVMILFEKMQQDGMHPNEVTFSSLLSVCGHTGLVEEGRRFFKLMRTTYGLSPNVVHYSCMVDILGRAGLLSEAYELIKSIPFDPTASIWGSLLASCRVYKNLELAEVAAEKLFELEPENAGNHVLLSNIYAANKQWEEIAKSRKLLRDCDVKKVRGKSWIDIKDKVHTFSVGESGHPRIREICSTLDNLVIKFRKFGYKPSVEHELHDVEIGKKEELLMQHSEKLALVFGLMCLPESSPVRIMKNLRICVDCHEFMKAASMATRRFIIVRDVNRFHHFSDGHCSCGDFW

SEQ ID NO: 75807 - protein, 514 aa, Arabidopsis thaliana
  peptide (1)..(514): Ceres Seq. ID no. 6454786
MLERSLVSWNTMIGLYTRNRMESEALDIFLEMRNEGFKFSEFTISSVLSACGVNCDALECKKLHCLSVKTCIDLNLYVGTALLDLYAKCGMIKDAVQVFESMQDKSSVTWSSMVAGYVQNKNYEEALLLYRRAQRMSLEQNQFTLSSVICACSNLAALIEGKQMHAVICKSGFGSNVFVASSAVDMYAKCGSLRESYIIFSEVQEKNLELWNTIISGFAKHARPKEVMILFEKMQQDGMHPNEVTFSSLLSVCGHTGLVEEGRRFFKLMRTTYGLSPNVVHYSCMVDILGRAGLLSEAYELIKSIPFDPTASIWGSLLASCRVYKNLELAEVAAEKLFELEPENAGNHVLLSNIYAANKQWEEIAKSRKLLRDCDVKKVRGKSWIDIKDKVHTFSVGESGHPRIREICSTLDNLVIKFRKFGYKPSVEHELHDVEIGKKEELLMQHSEKLALVFGLMCLPESSPVRIMKNLRICVDCHEFMKAASMATRRFIIVRDVNRFHHFSDGHCSCGDFW

SEQ ID NO: 75808 - DNA, 1836 bp, Arabidopsis thaliana
  misc_feature (1)..(1836): Ceres Seq. ID no. 6454859
  misc_feature (1)..(1836): Ortholog of  Ceres SEQ ID NO 13574398 as cited in SEQ ID NO 0
atggagaatttagtgaagagctgcgcagggatcgagaagaaaagaagcaatttgactccatcgatggaagatatacttacagagtcaaaggagagaagcagcactagcggagcgagctacgaaagctcctccaccaccaccgtcgcttcgtcttctccaccaccaccaccgtcgcagattctgggttggccgattagaaaagcttcatttcggaaaaattcgaaggagagtgttaattttgatcataagaaattaacccttcacgatgattctgggtttaaagcgaaagagatgaattctgcagatgtggagatgatgaaggagagatttgcaaagttgttacttggtgaagatatgtcaggttctggtaaaggtgtgtgtacggctttagctatctccaacgccataacaaatctctgtgctacgattttcgggcaactatggagattagagccactttcaagcgaaaagaaggagatgtggagaagggaaatggagtggattcttagtgttagtgatcacatcgtcgagttaacaccttcaacacaaacttatccagacggcaacaagtttgaggtcatgacttgtcgaccaagatttgatcttttcatcaacctccctgctctccgtaaactagacaatatgcttctcgatatattggcgagtttcaagaaaactgagttctggtatgttgatcaagggatcgttgcttcggaaaacgatggctcagcttctttccgcagaaagattcagcgccaagaggagaaatggtggttgcctgttcctcgtttagcaccgaatggtcttactgaagaagcaagaacagaattgaatcataagagggaatgtgcgacgcagatacttaaagctgcaatggctattaacagccttgctttaaccgaaatggatgttcctaaatcataccttgaaacccttccaaagaacggtaggtcctgccttggggatgttatctacaggtatgtaacatctgacaaattttctgcggagtctcttctcgattgccttgatctgtcctctgagcatattgctcttgatatcgcaaaccgtgtggaagcttcgatatatgtttggaggagaagagttcaaacaaaacttggagtcaacaataatacttcaagcactactccaaagttaacatgggaaatggtcaaagaactaatggctgctggtgacaaaaggggattgcttgtggagagatcggaaactctcttacgttgcttgaagcagcggtttccttctctaacgcagacttctctagacataagcaagattcaatggaacaaggatattgggaaatcaatcctcgaaagctactcaagggctttggagagcttagcatcaaacatcatagcacgaatcgatgatttactctacgtggacgacttaacaaagcaatcagatgataacaatcttttgtcaagtccagcggtcagcagcattatagctcacaagaaagtagtaccactcccttatctaatatctgcatcaggaactccatatagaacaagcttctcaacaacaccaggcttctctccttcaatgattagccccaagaaaggagagaggagaacaccttactccagcaaggacactaacaaaatcattgagaaaggtcttccttctcgaggatatggagtgagaagagtcttgaacaattatcttggcatggaatcaaaactgaaaatatgcgttaatccgtcagataatgcagatacagcagtgattaaccaaatcagcaaagacgtggaagaagagaagaaaagaaactcaacatcagtccatcaaaagggtcctccaaagtacactgtctcttaa

SEQ ID NO: 75809 - protein, 611 aa, Arabidopsis thaliana
  peptide (1)..(611): Ceres Seq. ID no. 6454860
MENLVKSCAGIEKKRSNLTPSMEDILTESKERSSTSGASYESSSTTTVASSSPPPPPSQILGWPIRKASFRKNSKESVNFDHKKLTLHDDSGFKAKEMNSADVEMMKERFAKLLLGEDMSGSGKGVCTALAISNAITNLCATIFGQLWRLEPLSSEKKEMWRREMEWILSVSDHIVELTPSTQTYPDGNKFEVMTCRPRFDLFINLPALRKLDNMLLDILASFKKTEFWYVDQGIVASENDGSASFRRKIQRQEEKWWLPVPRLAPNGLTEEARTELNHKRECATQILKAAMAINSLALTEMDVPKSYLETLPKNGRSCLGDVIYRYVTSDKFSAESLLDCLDLSSEHIALDIANRVEASIYVWRRRVQTKLGVNNNTSSTTPKLTWEMVKELMAAGDKRGLLVERSETLLRCLKQRFPSLTQTSLDISKIQWNKDIGKSILESYSRALESLASNIIARIDDLLYVDDLTKQSDDNNLLSSPAVSSIIAHKKVVPLPYLISASGTPYRTSFSTTPGFSPSMISPKKGERRTPYSSKDTNKIIEKGLPSRGYGVRRVLNNYLGMESKLKICVNPSDNADTAVINQISKDVEEEKKRNSTSVHQKGPPKYTVS

SEQ ID NO: 75810 - protein, 590 aa, Arabidopsis thaliana
  peptide (1)..(590): Ceres Seq. ID no. 6454861
MEDILTESKERSSTSGASYESSSTTTVASSSPPPPPSQILGWPIRKASFRKNSKESVNFDHKKLTLHDDSGFKAKEMNSADVEMMKERFAKLLLGEDMSGSGKGVCTALAISNAITNLCATIFGQLWRLEPLSSEKKEMWRREMEWILSVSDHIVELTPSTQTYPDGNKFEVMTCRPRFDLFINLPALRKLDNMLLDILASFKKTEFWYVDQGIVASENDGSASFRRKIQRQEEKWWLPVPRLAPNGLTEEARTELNHKRECATQILKAAMAINSLALTEMDVPKSYLETLPKNGRSCLGDVIYRYVTSDKFSAESLLDCLDLSSEHIALDIANRVEASIYVWRRRVQTKLGVNNNTSSTTPKLTWEMVKELMAAGDKRGLLVERSETLLRCLKQRFPSLTQTSLDISKIQWNKDIGKSILESYSRALESLASNIIARIDDLLYVDDLTKQSDDNNLLSSPAVSSIIAHKKVVPLPYLISASGTPYRTSFSTTPGFSPSMISPKKGERRTPYSSKDTNKIIEKGLPSRGYGVRRVLNNYLGMESKLKICVNPSDNADTAVINQISKDVEEEKKRNSTSVHQKGPPKYTVS

SEQ ID NO: 75811 - protein, 514 aa, Arabidopsis thaliana
  peptide (1)..(514): Ceres Seq. ID no. 6454862
MNSADVEMMKERFAKLLLGEDMSGSGKGVCTALAISNAITNLCATIFGQLWRLEPLSSEKKEMWRREMEWILSVSDHIVELTPSTQTYPDGNKFEVMTCRPRFDLFINLPALRKLDNMLLDILASFKKTEFWYVDQGIVASENDGSASFRRKIQRQEEKWWLPVPRLAPNGLTEEARTELNHKRECATQILKAAMAINSLALTEMDVPKSYLETLPKNGRSCLGDVIYRYVTSDKFSAESLLDCLDLSSEHIALDIANRVEASIYVWRRRVQTKLGVNNNTSSTTPKLTWEMVKELMAAGDKRGLLVERSETLLRCLKQRFPSLTQTSLDISKIQWNKDIGKSILESYSRALESLASNIIARIDDLLYVDDLTKQSDDNNLLSSPAVSSIIAHKKVVPLPYLISASGTPYRTSFSTTPGFSPSMISPKKGERRTPYSSKDTNKIIEKGLPSRGYGVRRVLNNYLGMESKLKICVNPSDNADTAVINQISKDVEEEKKRNSTSVHQKGPPKYTVS

SEQ ID NO: 75812 - DNA, 831 bp, Arabidopsis thaliana
  misc_feature (1)..(831): Ceres Seq. ID no. 6454871
  misc_feature (1)..(831): Ortholog of  Ceres SEQ ID NO 13638877 as cited in SEQ ID NO 55794
  misc_feature (1)..(831): Ortholog of  Ceres SEQ ID NO 13656156 as cited in SEQ ID NO 64620
atgattagtccggaccagaacggtgtaaagaaggtgattgagtacaaattcaacgaagaggacaaaaaggtcaaaatcactaccacgacccgtgttcagaagcgagctctcaccaaacaagccgtggagcgacggagctggaataagttcggagacgcagctcatgaagaatccagtagttacctcacaatgcgttcaacagaggatatcatcttggaacgaattagagctcctggtagcaacgcggaacagtcgaccgtatcaggagatagcatgtctcagttgggcaaaccgggtgcggtcctcatggtctgcaggttatgccaaaagaaaggtgaccactggacatcaagatgcccacagaaggatctcttatccttaatggacgagcctttaacagcagaaacttctacatcgaccataactggaactggcagggcggcttatgtcccgccaagcatgagagaaggtgcagacagaaaagctggtggttcagacatgaggagtagacatgatgagaactctgtccgtgtgactaatttgtctgaagatacccgtggaccagatttgatggagttgtttcgtccgtttggtgctgtaacccgttgtcatgtagccattgatcagaagacaagcatgagcagaggatttggttttgtcagttttgtgagcagggaagatgcacagcgagcaatcaacaaattgaatggctatggttatgataacctcattcttagggttgaatggtccactcctaaaacccaattagatccgttttcattcgctgattataataatctttgtaagttgttgaatatatgtcattcatga

SEQ ID NO: 75813 - protein, 276 aa, Arabidopsis thaliana
  peptide (1)..(276): Ceres Seq. ID no. 6454872
MISPDQNGVKKVIEYKFNEEDKKVKITTTTRVQKRALTKQAVERRSWNKFGDAAHEESSSYLTMRSTEDIILERIRAPGSNAEQSTVSGDSMSQLGKPGAVLMVCRLCQKKGDHWTSRCPQKDLLSLMDEPLTAETSTSTITGTGRAAYVPPSMREGADRKAGGSDMRSRHDENSVRVTNLSEDTRGPDLMELFRPFGAVTRCHVAIDQKTSMSRGFGFVSFVSREDAQRAINKLNGYGYDNLILRVEWSTPKTQLDPFSFADYNNLCKLLNICHS

SEQ ID NO: 75814 - protein, 213 aa, Arabidopsis thaliana
  peptide (1)..(213): Ceres Seq. ID no. 6454873
MRSTEDIILERIRAPGSNAEQSTVSGDSMSQLGKPGAVLMVCRLCQKKGDHWTSRCPQKDLLSLMDEPLTAETSTSTITGTGRAAYVPPSMREGADRKAGGSDMRSRHDENSVRVTNLSEDTRGPDLMELFRPFGAVTRCHVAIDQKTSMSRGFGFVSFVSREDAQRAINKLNGYGYDNLILRVEWSTPKTQLDPFSFADYNNLCKLLNICHS

SEQ ID NO: 75815 - protein, 185 aa, Arabidopsis thaliana
  peptide (1)..(185): Ceres Seq. ID no. 6454874
MSQLGKPGAVLMVCRLCQKKGDHWTSRCPQKDLLSLMDEPLTAETSTSTITGTGRAAYVPPSMREGADRKAGGSDMRSRHDENSVRVTNLSEDTRGPDLMELFRPFGAVTRCHVAIDQKTSMSRGFGFVSFVSREDAQRAINKLNGYGYDNLILRVEWSTPKTQLDPFSFADYNNLCKLLNICHS

SEQ ID NO: 75816 - DNA, 1377 bp, Arabidopsis thaliana
  misc_feature (1)..(1377): Ceres Seq. ID no. 6454904
  misc_feature (1)..(1377): Ortholog of  Ceres SEQ ID NO 15177043 as cited in SEQ ID NO 57425
atggatcgccgcatctatggtggctccgccgtcattcatctctttctcttcttctccgtcctaatcttctccgccgcatctgcattatccaagaaccagtctccttcttccgggtcgggtcagatcaactccaactctgtcctcgtagctcttcttgactctcgttacactgagctagctgagctcgtcgagaaagctcttctccttcagacacttgaagacgctgttggtcgtcacaatattaccatttttgctcctcgcaatgaagctcttgagcgtgaccttgaccctgagttcaagcggttcttgctcgagccaggtaatctcaaatctctgcaaacactcctcatgttccacattatacccaatcgggtcgggtcgaaccaatggccttcagaagaatcgggtcgggtcaagcaccacacgctagggaacgatcaggtccgtttgagcaacggacaaggaaaaaagatggttgatttagctgagattatccgacccgatgatttgacccgacccgacggattgatccacgggattgaacggcttctcattcctcgctctgttcaagaagatttcaatcgccgtcgtagccttcaatcaatctccgccgtcttacctgaaggagctcctgaagttgacccgagaaccaaccgtctcaagaaacccgcagctccagtacccgccggatctccaccagctcttccgatccaatccgctatggcccctggtccgtcgctagctccggcaccagctccgggacctggaggcaagcagcaccacttcgacggtgaggctcaagtcaaagatttcatccatacactgttacattacggcggttacaacgagatggcagatattctcgtgaatctgacgtcactcgcgacagagatgggacggttggtgtcagaaggctatgtgttaacggttttggctcctaacgatgaagcaatggcgaaattgaccacggatcagctgagtgagccaggagcaccggagcagatcgtatactaccatataatccctgagtatcaaacggaggagagtatgtacaattctgttaggagatttgggaaggtgaagttcgatacgttgcgttttcctcataaggttgcggctaaggaagctgatggttccgttaagtttggtgacggtgagaagtcggcgtatttgtttgatcctgatatctatacggacggtcggatttcggttcaggggattgacggtgttttgtttccacaagaggaggaggttgttgaatcggttaagaaaccggttaagaaaattgttcagccgagaagagggaaattgttggaagtagcctgtagtatgcttggtgcttttggcaaggacacttatctcagcaaatgccggtga

SEQ ID NO: 75817 - protein, 458 aa, Arabidopsis thaliana
  peptide (1)..(458): Ceres Seq. ID no. 6454905
MDRRIYGGSAVIHLFLFFSVLIFSAASALSKNQSPSSGSGQINSNSVLVALLDSRYTELAELVEKALLLQTLEDAVGRHNITIFAPRNEALERDLDPEFKRFLLEPGNLKSLQTLLMFHIIPNRVGSNQWPSEESGRVKHHTLGNDQVRLSNGQGKKMVDLAEIIRPDDLTRPDGLIHGIERLLIPRSVQEDFNRRRSLQSISAVLPEGAPEVDPRTNRLKKPAAPVPAGSPPALPIQSAMAPGPSLAPAPAPGPGGKQHHFDGEAQVKDFIHTLLHYGGYNEMADILVNLTSLATEMGRLVSEGYVLTVLAPNDEAMAKLTTDQLSEPGAPEQIVYYHIIPEYQTEESMYNSVRRFGKVKFDTLRFPHKVAAKEADGSVKFGDGEKSAYLFDPDIYTDGRISVQGIDGVLFPQEEEVVESVKKPVKKIVQPRRGKLLEVACSMLGAFGKDTYLSKCR

SEQ ID NO: 75818 - protein, 342 aa, Arabidopsis thaliana
  peptide (1)..(342): Ceres Seq. ID no. 6454906
MFHIIPNRVGSNQWPSEESGRVKHHTLGNDQVRLSNGQGKKMVDLAEIIRPDDLTRPDGLIHGIERLLIPRSVQEDFNRRRSLQSISAVLPEGAPEVDPRTNRLKKPAAPVPAGSPPALPIQSAMAPGPSLAPAPAPGPGGKQHHFDGEAQVKDFIHTLLHYGGYNEMADILVNLTSLATEMGRLVSEGYVLTVLAPNDEAMAKLTTDQLSEPGAPEQIVYYHIIPEYQTEESMYNSVRRFGKVKFDTLRFPHKVAAKEADGSVKFGDGEKSAYLFDPDIYTDGRISVQGIDGVLFPQEEEVVESVKKPVKKIVQPRRGKLLEVACSMLGAFGKDTYLSKCR

SEQ ID NO: 75819 - protein, 301 aa, Arabidopsis thaliana
  peptide (1)..(301): Ceres Seq. ID no. 6454907
MVDLAEIIRPDDLTRPDGLIHGIERLLIPRSVQEDFNRRRSLQSISAVLPEGAPEVDPRTNRLKKPAAPVPAGSPPALPIQSAMAPGPSLAPAPAPGPGGKQHHFDGEAQVKDFIHTLLHYGGYNEMADILVNLTSLATEMGRLVSEGYVLTVLAPNDEAMAKLTTDQLSEPGAPEQIVYYHIIPEYQTEESMYNSVRRFGKVKFDTLRFPHKVAAKEADGSVKFGDGEKSAYLFDPDIYTDGRISVQGIDGVLFPQEEEVVESVKKPVKKIVQPRRGKLLEVACSMLGAFGKDTYLSKCR

SEQ ID NO: 75820 - DNA, 1314 bp, Arabidopsis thaliana
  misc_feature (1)..(1314): Ceres Seq. ID no. 6455122
  misc_feature (1)..(1314): Ortholog of  Ceres SEQ ID NO 13654409 as cited in SEQ ID NO 68534
atggatgaagagtatgatgtgattgtccttgggactggtcttaaggagtgtatccttagtggcctcctctctgtcgatggcctcaaggtactacatatggatagaaacgactactatggaggagaatcatcctctcttaacctcactcagctatggaagcgttttaggggaagtgacactcctgaagaaaatcttggagcaagcagagaatacaatgtcgatatgatcccaaagtttataatggctaatggactccttgttcaaaccctaatccacaccgatgttaccaagtatcttaactttaaggccgttgatggtagctttgtctacaagaaaggcaagatctacaaagtcccagccactgatgtggaagccctgaaatcgccattgatgggtcttttcgagaagcgacgtgcgagaaagttctttatctatgtgcaagactatgatgagaaggatcctaagtctcacgaaggacttgacctaagcaaagtcactgctagagagatcatctcaaagtatggacttgaagatgacacaatcgacttcatagggcatgccttagcgcttcacaacgatgatgactacttggatcaacccgccattgattttgttaagagaatcaagctctatgcggagtctctggctcgattccaaggaggatccccttacatctatccgttgtacggtctaggagagctgccacaggcttttgcacgtttgagtgctgtgtacggtgggacttacatgctcaacaagcccgaatgcaaggtagagtttgatggttctggaaaagctattggtgtcacttctgcaggagaaactgctaaatgcaagaaagttgtatgtgatccttcttacctgtctgaaaaggttaagaaagttggaaaagtaactcgagcggtgtgtataatgagccatcctattccagacacaaatgatgctcactcggttcaaatcattcttcctcagaagtacttgttctgttgctcatacgctcacaatgtggcaccaaagggcaaatacatagcttttgtctctgcagaagctgaaactgacaatccagaagaggagcttaaacccggaatcgaattgcttggacctactgatgagatcttctatcattcttatgacacatacgttccaaccaatattcaagaagaagataactgtttcatctctgctacttacgatgcaacaacacatttcgagagtacagttgtagatgtacttgacatgtacaccaagatcactggaaagactcttgatttgtctgtggacttgagtgctgcaagtgctgctgcagagaattga

SEQ ID NO: 75821 - protein, 437 aa, Arabidopsis thaliana
  peptide (1)..(437): Ceres Seq. ID no. 6455123
MDEEYDVIVLGTGLKECILSGLLSVDGLKVLHMDRNDYYGGESSSLNLTQLWKRFRGSDTPEENLGASREYNVDMIPKFIMANGLLVQTLIHTDVTKYLNFKAVDGSFVYKKGKIYKVPATDVEALKSPLMGLFEKRRARKFFIYVQDYDEKDPKSHEGLDLSKVTAREIISKYGLEDDTIDFIGHALALHNDDDYLDQPAIDFVKRIKLYAESLARFQGGSPYIYPLYGLGELPQAFARLSAVYGGTYMLNKPECKVEFDGSGKAIGVTSAGETAKCKKVVCDPSYLSEKVKKVGKVTRAVCIMSHPIPDTNDAHSVQIILPQKYLFCCSYAHNVAPKGKYIAFVSAEAETDNPEEELKPGIELLGPTDEIFYHSYDTYVPTNIQEEDNCFISATYDATTHFESTVVDVLDMYTKITGKTLDLSVDLSAASAAAEN

SEQ ID NO: 75822 - protein, 405 aa, Arabidopsis thaliana
  peptide (1)..(405): Ceres Seq. ID no. 6455124
MDRNDYYGGESSSLNLTQLWKRFRGSDTPEENLGASREYNVDMIPKFIMANGLLVQTLIHTDVTKYLNFKAVDGSFVYKKGKIYKVPATDVEALKSPLMGLFEKRRARKFFIYVQDYDEKDPKSHEGLDLSKVTAREIISKYGLEDDTIDFIGHALALHNDDDYLDQPAIDFVKRIKLYAESLARFQGGSPYIYPLYGLGELPQAFARLSAVYGGTYMLNKPECKVEFDGSGKAIGVTSAGETAKCKKVVCDPSYLSEKVKKVGKVTRAVCIMSHPIPDTNDAHSVQIILPQKYLFCCSYAHNVAPKGKYIAFVSAEAETDNPEEELKPGIELLGPTDEIFYHSYDTYVPTNIQEEDNCFISATYDATTHFESTVVDVLDMYTKITGKTLDLSVDLSAASAAAEN

SEQ ID NO: 75823 - protein, 363 aa, Arabidopsis thaliana
  peptide (1)..(363): Ceres Seq. ID no. 6455125
MIPKFIMANGLLVQTLIHTDVTKYLNFKAVDGSFVYKKGKIYKVPATDVEALKSPLMGLFEKRRARKFFIYVQDYDEKDPKSHEGLDLSKVTAREIISKYGLEDDTIDFIGHALALHNDDDYLDQPAIDFVKRIKLYAESLARFQGGSPYIYPLYGLGELPQAFARLSAVYGGTYMLNKPECKVEFDGSGKAIGVTSAGETAKCKKVVCDPSYLSEKVKKVGKVTRAVCIMSHPIPDTNDAHSVQIILPQKYLFCCSYAHNVAPKGKYIAFVSAEAETDNPEEELKPGIELLGPTDEIFYHSYDTYVPTNIQEEDNCFISATYDATTHFESTVVDVLDMYTKITGKTLDLSVDLSAASAAAEN

SEQ ID NO: 75824 - DNA, 501 bp, Arabidopsis thaliana
  misc_feature (1)..(501): Ceres Seq. ID no. 6455132
  misc_feature (1)..(501): Ortholog of  Ceres SEQ ID NO 15173047 as cited in SEQ ID NO 61816
  misc_feature (1)..(501): Ortholog of  Ceres SEQ ID NO 13591134 as cited in SEQ ID NO 63820
  misc_feature (1)..(501): Ortholog of  Ceres SEQ ID NO 15178530 as cited in SEQ ID NO 67823
  misc_feature (1)..(501): Ortholog of  Ceres SEQ ID NO 13599565 as cited in SEQ ID NO 0
atgcctcgaggaagctccggaggaagatctagctaccgtccttctcgccctgcagctgcacgaagcccgcctcctcaatctgtgaaccgtgctcctcctccagcaacagctcagcctagtagcggtggttctttcttaggcaatattggtgcatccataactgaaggtctggcttggggtactggaactgcatttggacacagggttgtggattctgtgatgggtccacgaacctttaagcacgaaaccgttgtttctcaggttccatctgctgcaaataccatgactgcttgtgacattcactccaaggctttccaagattgcgtcaaccattttggaagcgacatcagtaagtgccagttctacatggacatgctgagtgaatgcaagaagaattctggttccgtgtgcctcaacgattatgaaacagacatcagtaagtgccagctctacatgaacatgttgtctgggtgcaagaagagttccaagttggactcttaa

SEQ ID NO: 75825 - protein, 166 aa, Arabidopsis thaliana
  peptide (1)..(166): Ceres Seq. ID no. 6455133
MPRGSSGGRSSYRPSRPAAARSPPPQSVNRAPPPATAQPSSGGSFLGNIGASITEGLAWGTGTAFGHRVVDSVMGPRTFKHETVVSQVPSAANTMTACDIHSKAFQDCVNHFGSDISKCQFYMDMLSECKKNSGSVCLNDYETDISKCQLYMNMLSGCKKSSKLDS

SEQ ID NO: 75826 - protein, 93 aa, Arabidopsis thaliana
  peptide (1)..(93): Ceres Seq. ID no. 6455134
MGPRTFKHETVVSQVPSAANTMTACDIHSKAFQDCVNHFGSDISKCQFYMDMLSECKKNSGSVCLNDYETDISKCQLYMNMLSGCKKSSKLDS

SEQ ID NO: 75827 - DNA, 3177 bp, Arabidopsis thaliana
  misc_feature (1)..(3177): Ceres Seq. ID no. 6455168
  misc_feature (1)..(3177): Ortholog of  Ceres SEQ ID NO 14311156 as cited in SEQ ID NO 54767
  misc_feature (1)..(3177): Ortholog of  Ceres SEQ ID NO 14313220 as cited in SEQ ID NO 66007
  misc_feature (1)..(3177): Ortholog of  Ceres SEQ ID NO 13658778 as cited in SEQ ID NO 66511
atgaatactggtggtcggctcatcgctggttctcacaataggaatgagttcgtgttgattaatgcagacgagagtgccagaattagatcagtggaagaactaagtggacaaacatgtcaaatctgtggagatgagattgagctaagtgttgatggagagtcttttgtggcatgtaatgaatgtgctttccctgtctgtagaccttgctatgagtatgagagacgagaaggaaaccaatcttgtcctcagtgcaaaactcgttacaagcgcatcaaaggaagtccaagggttgaaggagatgaggaggatgatggaattgatgatcttgattttgagtttgattatagtaggagtggccttgaatctgaaactttctctcgccgcaactcggagtttgatttggcctctgctccacctggctcacagattcctttgttaacttatggagaggaggacgttgaaatttcttctgatagtcatgctctcattgtttctccatcacctggccatatccatagggttcatcaacctcattttcctgaccccgctgcacatccaagaccaatggtacctcagaaagaccttgcggtctatggatatggaagtgttgcgtggaaggatcgtatggaggagtggaagagaaagcagaacgaaaaatatcaggtggttaaacatgatggagattctagtcttggagacggagatgatcctttgtctaggaaagtaccgataaagtcgagcaaaataaatccgtacaggatgctaattgttctgcgtcttgtgattctcggtctctttttccattaccgtattcttcaccccgtcaatgatgcttacgccttgtggctaatatctgtgatatgcgaaatatggtttgcggtttcatgggttcttgatcagttccctaaatggtatcctatagaaagagagacatacttggacaggctctcattgaggtacgaaaaagaagggaaaccatctgaactagctggtgttgatgtttttgtgagtacagtggatccgatgaaagagcctccgcttattacagcaaacactgttctgtctattcttgcggttgattatccggtagacagagttgcctgttatgtttctgatgatggtgctgctatgcttacttttgaagccctttcagaaacagcagagtttgctaggaaatgggttcctttctgtaagaaatacactatcgagccacgagctcccgaatggtatttttgccacaagatggattatttaaagaataaagttcaccctgcatttgttagggaacgccgagccatgaagagagattatgaagaattcaaggttaagatcaatgctttagttgcgactgcacagaaagtgcctgaagaaggttggactatgcaagacggtactccttggcccggtaataacgtgcgagatcaccctggcatgatccaggtattccttggaaataacggtgtccgcgatgtagaaaacaacgagttgcctcggctggtttatgtttctcgtgagaagagacccggatttgaccatcacaagaaggctggagccatgaactccctgatacgagtctctggagttctatcaaatgctccttatcttctaaatgtcgattgtgatcactacatcaataatagcaaagctcttagagaagcaatgtgtttcatgatggatcctcagtcgggaaagaaaatttgttatgttcaattccctcaaagattcgatgggattgataaaagtgacagatactctaatcgtaatgttgtattcttcgatattaatatgaaaggtttggatggattacaagggcctatatacgtgggaaccgggtgtgtttttaggagacaagcactttatggatttgatgcgccaaaaaagaagaagactaagcgtatgacttgcaattgctggcctaagtggtgtttgttttgttgtggtctaagaaagaatcgtaagtcaaagacaacggataagaaaaagaagaacagggaagcctcaaagcagatacacgcgctagaaaatatcgaagagggcaccaaaggcactaatgatgcggcgaaatcaccagaggcggcacaattgaagttggagaagaagtttggacagtctcctgtttttgttgcgtctgctggtatggagaatggtgggcttgctaggaatgcgagtccagcttctctgcttagagaagccatccaagtcattagttgtggatacgaagataaaaccgaatggggaaaagagattgggtggatctacggttctgtcaccgaggatatccttacgggtttcaagatgcattctcatggctggagatcggtttactgtacacctaagataccggcctttaaaggatcagcacctatcaatctttctgaccgtcttcatcaagttcttcggtgggcgctcgggtctgttgagattttcttgagcagacattgtcctatttggtatggttatggaggtggtttgaaatggcttgagagattgtcttacatcaactctgtggtttatccatggacctctattccactccttgtttactgttctctcccagctatctgtcttctcaccggaaaattcatcgtccctgagattagcaactatgcaagtatcctcttcatggcacttttcgggtcgattgctgtaacgggcattctcgagatgcaatggggtaaagtagggatcgatgattggtggagaaacgaacagttttgggtgattggaggtgtttcagctcatctctttgctctcttccaaggtctcctaaaggttttagccggtgttgagacaaacttcacagttacatctaaagcagcagatgatggtgaattctctgagctttacatcttcaaatggacatcactcttgatccctccaaccacactactcatcataaacgtaatcggagtcattgtgggaatatctgatgcgatcagtaacggatatgactcgtggggtcctcttttcggaagattgttctttgccttttgggtcatcctccatctatatcctttccttaaaggtctgcttgggaaacaagacagaatgcctacaatcattcttgtctggtcgatccttctcgcctctatccttacgcttctttgggtacgagtcaatccgtttgtggcgaaaggcggtcctatcctcgagatatgtggcttggactgcctttga

SEQ ID NO: 75828 - protein, 1058 aa, Arabidopsis thaliana
  peptide (1)..(1058): Ceres Seq. ID no. 6455169
MNTGGRLIAGSHNRNEFVLINADESARIRSVEELSGQTCQICGDEIELSVDGESFVACNECAFPVCRPCYEYERREGNQSCPQCKTRYKRIKGSPRVEGDEEDDGIDDLDFEFDYSRSGLESETFSRRNSEFDLASAPPGSQIPLLTYGEEDVEISSDSHALIVSPSPGHIHRVHQPHFPDPAAHPRPMVPQKDLAVYGYGSVAWKDRMEEWKRKQNEKYQVVKHDGDSSLGDGDDPLSRKVPIKSSKINPYRMLIVLRLVILGLFFHYRILHPVNDAYALWLISVICEIWFAVSWVLDQFPKWYPIERETYLDRLSLRYEKEGKPSELAGVDVFVSTVDPMKEPPLITANTVLSILAVDYPVDRVACYVSDDGAAMLTFEALSETAEFARKWVPFCKKYTIEPRAPEWYFCHKMDYLKNKVHPAFVRERRAMKRDYEEFKVKINALVATAQKVPEEGWTMQDGTPWPGNNVRDHPGMIQVFLGNNGVRDVENNELPRLVYVSREKRPGFDHHKKAGAMNSLIRVSGVLSNAPYLLNVDCDHYINNSKALREAMCFMMDPQSGKKICYVQFPQRFDGIDKSDRYSNRNVVFFDINMKGLDGLQGPIYVGTGCVFRRQALYGFDAPKKKKTKRMTCNCWPKWCLFCCGLRKNRKSKTTDKKKKNREASKQIHALENIEEGTKGTNDAAKSPEAAQLKLEKKFGQSPVFVASAGMENGGLARNASPASLLREAIQVISCGYEDKTEWGKEIGWIYGSVTEDILTGFKMHSHGWRSVYCTPKIPAFKGSAPINLSDRLHQVLRWALGSVEIFLSRHCPIWYGYGGGLKWLERLSYINSVVYPWTSIPLLVYCSLPAICLLTGKFIVPEISNYASILFMALFGSIAVTGILEMQWGKVGIDDWWRNEQFWVIGGVSAHLFALFQGLLKVLAGVETNFTVTSKAADDGEFSELYIFKWTSLLIPPTTLLIINVIGVIVGISDAISNGYDSWGPLFGRLFFAFWVILHLYPFLKGLLGKQDRMPTIILVWSILLASILTLLWVRVNPFVAKGGPILEICGLDCL

SEQ ID NO: 75829 - protein, 870 aa, Arabidopsis thaliana
  peptide (1)..(870): Ceres Seq. ID no. 6455170
MVPQKDLAVYGYGSVAWKDRMEEWKRKQNEKYQVVKHDGDSSLGDGDDPLSRKVPIKSSKINPYRMLIVLRLVILGLFFHYRILHPVNDAYALWLISVICEIWFAVSWVLDQFPKWYPIERETYLDRLSLRYEKEGKPSELAGVDVFVSTVDPMKEPPLITANTVLSILAVDYPVDRVACYVSDDGAAMLTFEALSETAEFARKWVPFCKKYTIEPRAPEWYFCHKMDYLKNKVHPAFVRERRAMKRDYEEFKVKINALVATAQKVPEEGWTMQDGTPWPGNNVRDHPGMIQVFLGNNGVRDVENNELPRLVYVSREKRPGFDHHKKAGAMNSLIRVSGVLSNAPYLLNVDCDHYINNSKALREAMCFMMDPQSGKKICYVQFPQRFDGIDKSDRYSNRNVVFFDINMKGLDGLQGPIYVGTGCVFRRQALYGFDAPKKKKTKRMTCNCWPKWCLFCCGLRKNRKSKTTDKKKKNREASKQIHALENIEEGTKGTNDAAKSPEAAQLKLEKKFGQSPVFVASAGMENGGLARNASPASLLREAIQVISCGYEDKTEWGKEIGWIYGSVTEDILTGFKMHSHGWRSVYCTPKIPAFKGSAPINLSDRLHQVLRWALGSVEIFLSRHCPIWYGYGGGLKWLERLSYINSVVYPWTSIPLLVYCSLPAICLLTGKFIVPEISNYASILFMALFGSIAVTGILEMQWGKVGIDDWWRNEQFWVIGGVSAHLFALFQGLLKVLAGVETNFTVTSKAADDGEFSELYIFKWTSLLIPPTTLLIINVIGVIVGISDAISNGYDSWGPLFGRLFFAFWVILHLYPFLKGLLGKQDRMPTIILVWSILLASILTLLWVRVNPFVAKGGPILEICGLDCL

SEQ ID NO: 75830 - protein, 850 aa, Arabidopsis thaliana
  peptide (1)..(850): Ceres Seq. ID no. 6455171
MEEWKRKQNEKYQVVKHDGDSSLGDGDDPLSRKVPIKSSKINPYRMLIVLRLVILGLFFHYRILHPVNDAYALWLISVICEIWFAVSWVLDQFPKWYPIERETYLDRLSLRYEKEGKPSELAGVDVFVSTVDPMKEPPLITANTVLSILAVDYPVDRVACYVSDDGAAMLTFEALSETAEFARKWVPFCKKYTIEPRAPEWYFCHKMDYLKNKVHPAFVRERRAMKRDYEEFKVKINALVATAQKVPEEGWTMQDGTPWPGNNVRDHPGMIQVFLGNNGVRDVENNELPRLVYVSREKRPGFDHHKKAGAMNSLIRVSGVLSNAPYLLNVDCDHYINNSKALREAMCFMMDPQSGKKICYVQFPQRFDGIDKSDRYSNRNVVFFDINMKGLDGLQGPIYVGTGCVFRRQALYGFDAPKKKKTKRMTCNCWPKWCLFCCGLRKNRKSKTTDKKKKNREASKQIHALENIEEGTKGTNDAAKSPEAAQLKLEKKFGQSPVFVASAGMENGGLARNASPASLLREAIQVISCGYEDKTEWGKEIGWIYGSVTEDILTGFKMHSHGWRSVYCTPKIPAFKGSAPINLSDRLHQVLRWALGSVEIFLSRHCPIWYGYGGGLKWLERLSYINSVVYPWTSIPLLVYCSLPAICLLTGKFIVPEISNYASILFMALFGSIAVTGILEMQWGKVGIDDWWRNEQFWVIGGVSAHLFALFQGLLKVLAGVETNFTVTSKAADDGEFSELYIFKWTSLLIPPTTLLIINVIGVIVGISDAISNGYDSWGPLFGRLFFAFWVILHLYPFLKGLLGKQDRMPTIILVWSILLASILTLLWVRVNPFVAKGGPILEICGLDCL

SEQ ID NO: 75831 - DNA, 1071 bp, Arabidopsis thaliana
  misc_feature (1)..(1071): Ceres Seq. ID no. 6455449
  misc_feature (1)..(1071): Ortholog of  Ceres SEQ ID NO 13598741 as cited in SEQ ID NO 62749
  misc_feature (1)..(1071): Ortholog of  Ceres SEQ ID NO 12587535 as cited in SEQ ID NO 64020
atggcgatatggtttcagagaattttcctgttgcttctcgtttcctgttgcgcctcttcagattttttggaaaatccagacttcgaatctccaccgttaaacttacctacaaactcaaatgctagctctgtatcgctggatcagaacagtacactcccgggatggacattccaagggacagtgctttatgttgaactgcctgataccggacacgcggttcagctcggtgaagatggcaagatcaatcaaacattcattgccaaaggtgatgaattgaactacatcctcacattcgcactgatccacgcaggccagaactgtacaagctctgctggtctcagtgtctcggggccagacagcaatgcggtcttttcttacagacaaaactacagtaaggtttcatggcagagctacagtcataacttgggtagttgggggaatggtgagcctattaacttagttcttgaaagtcaggcaatagattctgattctgatacaaactccacatgttggcctatcattgacacattgcttatcaagactgttggtgtaacattggtccaagacagtggtaacctcttaatcaatggtggatttgagtctggacctggtttcttgcccaactcaaccgatggagttctgattgacgcggttccaagcctgattcaatcaccattaaggcagtggtctgtcataggaacagtcagatacatagactcggagcacttccatgtcccagaaggcaaagctgcaatagaaattctgtctaacacagctccatctggcatacagacagcaacaaaaggcacaagtgaaggttcaagatacaacctcacatttaccttaggcgatgctaacgatgcgtgcagaggacatttcgtggtgggtgctcaagctggctccgtaactcaaaacttcacattggagagtaatgggactggctctggtgagaagtttgggttagtgtttgaagcagacaaagatgcagcacagataagtttcaccagctactcagttacaatgacaaaagagaatgttgtttgtggtcctgtgattgatgaagtgatgtga

SEQ ID NO: 75832 - protein, 356 aa, Arabidopsis thaliana
  peptide (1)..(356): Ceres Seq. ID no. 6455450
MAIWFQRIFLLLLVSCCASSDFLENPDFESPPLNLPTNSNASSVSLDQNSTLPGWTFQGTVLYVELPDTGHAVQLGEDGKINQTFIAKGDELNYILTFALIHAGQNCTSSAGLSVSGPDSNAVFSYRQNYSKVSWQSYSHNLGSWGNGEPINLVLESQAIDSDSDTNSTCWPIIDTLLIKTVGVTLVQDSGNLLINGGFESGPGFLPNSTDGVLIDAVPSLIQSPLRQWSVIGTVRYIDSEHFHVPEGKAAIEILSNTAPSGIQTATKGTSEGSRYNLTFTLGDANDACRGHFVVGAQAGSVTQNFTLESNGTGSGEKFGLVFEADKDAAQISFTSYSVTMTKENVVCGPVIDEVM

SEQ ID NO: 75833 - DNA, 987 bp, Arabidopsis thaliana
  misc_feature (1)..(987): Ceres Seq. ID no. 6455496
  misc_feature (1)..(987): Ortholog of  Ceres SEQ ID NO 13595414 as cited in SEQ ID NO 56539
  misc_feature (1)..(987): Ortholog of  Ceres SEQ ID NO 14314396 as cited in SEQ ID NO 60048
atggtccccttttggactacagtttctcgaaatggctcatcagactcagagacgactctccaatctgcttcaaaagccacaaaacagtataaatatccttctcttcgtccctctcatcgcctgtctctcctcttcctcttcccgttccatttatccgcaaacggagcttgttttcggtgcacctgcttcagccacttcaaacttgaactgagaaggatgggaaacgaatcatatgaagacgccatcgaagctctcaagaatgagaaggatgatctgaaggatgtagctgcggccaaggtgaagaagatcacggcggagcttcaggcagcctcgtcatcggacagcaaatcttttgatcccgtcgaacgaattaaggaaggcttcgtcaccttcaagaaggagaaatacgagaccaatcctgctttgtatggtgagctcgccaaaggtcaaagcccaaagtacatggtgtttgcttgttcggactcacgagtgtgcccatcacacgtactagacttccatcctggagatgccttcgtggttcgtaatatcgccaatatggttcctccttttgacaaggtcaaatatgcaggagttggagccgccattgaatacgctgtcttgcaccttaaggtggaaaacattgtggtgatagggcacagtgcatgtggtggcatcaaggggcttatgtcatttcctcttgacggaaacaactctactgacttcatagaggattgggtcaaaatctgtttaccagcaaagtcaaaagttttggcagaaagtgaaagttcagcatttgaagaccaatgtggccgatgcgaaagggaggcagtgaatgtgtcactagcaaacctattgacatatccatttgtgagagaaggagttgtgaaaggaacacttgctttgaagggaggctactatgactttgttaatggctcctttgagctttgggagctccagtttggaatttcccccgttcattctatatga

SEQ ID NO: 75834 - protein, 328 aa, Arabidopsis thaliana
  peptide (1)..(328): Ceres Seq. ID no. 6455497
MVPFWTTVSRNGSSDSETTLQSASKATKQYKYPSLRPSHRLSLLFLFPFHLSANGACFRCTCFSHFKLELRRMGNESYEDAIEALKNEKDDLKDVAAAKVKKITAELQAASSSDSKSFDPVERIKEGFVTFKKEKYETNPALYGELAKGQSPKYMVFACSDSRVCPSHVLDFHPGDAFVVRNIANMVPPFDKVKYAGVGAAIEYAVLHLKVENIVVIGHSACGGIKGLMSFPLDGNNSTDFIEDWVKICLPAKSKVLAESESSAFEDQCGRCEREAVNVSLANLLTYPFVREGVVKGTLALKGGYYDFVNGSFELWELQFGISPVHSI

SEQ ID NO: 75835 - protein, 256 aa, Arabidopsis thaliana
  peptide (1)..(256): Ceres Seq. ID no. 6455498
MGNESYEDAIEALKNEKDDLKDVAAAKVKKITAELQAASSSDSKSFDPVERIKEGFVTFKKEKYETNPALYGELAKGQSPKYMVFACSDSRVCPSHVLDFHPGDAFVVRNIANMVPPFDKVKYAGVGAAIEYAVLHLKVENIVVIGHSACGGIKGLMSFPLDGNNSTDFIEDWVKICLPAKSKVLAESESSAFEDQCGRCEREAVNVSLANLLTYPFVREGVVKGTLALKGGYYDFVNGSFELWELQFGISPVHSI

SEQ ID NO: 75836 - protein, 174 aa, Arabidopsis thaliana; identical to SEQ ID NO: 46818
  peptide (1)..(174): Ceres Seq. ID no. 6455499

SEQ ID NO: 75837 - DNA, 1386 bp, Arabidopsis thaliana
  misc_feature (1)..(1386): Ceres Seq. ID no. 6455510
  misc_feature (1)..(1386): Ortholog of  Ceres SEQ ID NO 15176949 as cited in SEQ ID NO 58700
atgttcttgtttttctctgttttgggaacagagattgtaagtgggcttgtgacaaatgtagcatcgatactctggaaatggttatggtctcttcaaacatccacaaccacaacaaccaccacaaaatctggtgtttctagccgttcgatggtgaaatacgaaagtggatataacatggagacagtttttgatggaagtaagcttgggattgagccctatgcgattgaagtttcccctaatggaggagagcttattgtcttggattctgagaacagtaacatccacaaaatctccatgcctctttctagatatggtaaaccaaagctactctctggttcacaagaaggctacacaggacatgtcgatgggaaactcaaagaagcgagaatgaatcgtcctcgaggattagccatggacgacagggggaacatctacgtcgccgatactatcaatatggccatacgcaagatcagcgatgacggagtctcaaccatcgccgctggaggaagatggagcggtggatctaaagaggagtcaatgagattctccgatgactttgatttaatatatgtctcttcaagctgctctcttctagtcattgatcgagggaatcaattgattaaagagattcagcttcacgatcatgactgttctcaaccggaacccgacacagatagtctccatcttggaaccgctttgctggttgctgctgtgttctttgggtatatgttagcattattagttcgtagggtacgatcgctgttctcttcgtctagccatgatactaagagtaagagacatgtagcaacaccgagcatgacaatggctccgtaccaacgttatccaagaccggtacgacagccattaatcccacctcaacatgaatcggaaaaagaagaaggatttctcggttcgcttggaaagctagtcgtgaaaaccggttcttcggtttccgagatgatgtccggttctagaaatgtaattcccccaaactttcatcagtaccaccatcagcaagaaccgaaccaatggccggtacaagagagtttcgctataccggaagaagatggaccaccagctttagaaccgagatcaggtacaaatccagataaaccctaccttagagcacaaggaaccaaccaaaaccggtcttattaccaagactatgatcaataccaaaaccagcagaaacgcaatgtgaacgatacagcgtcgttcgaagataaccgagagaagaacgagattgtttttggggcagttcaggagcaggacggtcgccgagaagccatggtgatcaaggccgttgatttcaacgaagccattaacgatcagcgcaatctacggcccagaattaattatatgggatattcttcacaagtttactga

SEQ ID NO: 75838 - protein, 461 aa, Arabidopsis thaliana
  peptide (1)..(461): Ceres Seq. ID no. 6455511
MFLFFSVLGTEIVSGLVTNVASILWKWLWSLQTSTTTTTTTKSGVSSRSMVKYESGYNMETVFDGSKLGIEPYAIEVSPNGGELIVLDSENSNIHKISMPLSRYGKPKLLSGSQEGYTGHVDGKLKEARMNRPRGLAMDDRGNIYVADTINMAIRKISDDGVSTIAAGGRWSGGSKEESMRFSDDFDLIYVSSSCSLLVIDRGNQLIKEIQLHDHDCSQPEPDTDSLHLGTALLVAAVFFGYMLALLVRRVRSLFSSSSHDTKSKRHVATPSMTMAPYQRYPRPVRQPLIPPQHESEKEEGFLGSLGKLVVKTGSSVSEMMSGSRNVIPPNFHQYHHQQEPNQWPVQESFAIPEEDGPPALEPRSGTNPDKPYLRAQGTNQNRSYYQDYDQYQNQQKRNVNDTASFEDNREKNEIVFGAVQEQDGRREAMVIKAVDFNEAINDQRNLRPRINYMGYSSQVY

SEQ ID NO: 75839 - protein, 412 aa, Arabidopsis thaliana
  peptide (1)..(412): Ceres Seq. ID no. 6455512
MVKYESGYNMETVFDGSKLGIEPYAIEVSPNGGELIVLDSENSNIHKISMPLSRYGKPKLLSGSQEGYTGHVDGKLKEARMNRPRGLAMDDRGNIYVADTINMAIRKISDDGVSTIAAGGRWSGGSKEESMRFSDDFDLIYVSSSCSLLVIDRGNQLIKEIQLHDHDCSQPEPDTDSLHLGTALLVAAVFFGYMLALLVRRVRSLFSSSSHDTKSKRHVATPSMTMAPYQRYPRPVRQPLIPPQHESEKEEGFLGSLGKLVVKTGSSVSEMMSGSRNVIPPNFHQYHHQQEPNQWPVQESFAIPEEDGPPALEPRSGTNPDKPYLRAQGTNQNRSYYQDYDQYQNQQKRNVNDTASFEDNREKNEIVFGAVQEQDGRREAMVIKAVDFNEAINDQRNLRPRINYMGYSSQVY

SEQ ID NO: 75840 - protein, 403 aa, Arabidopsis thaliana
  peptide (1)..(403): Ceres Seq. ID no. 6455513
METVFDGSKLGIEPYAIEVSPNGGELIVLDSENSNIHKISMPLSRYGKPKLLSGSQEGYTGHVDGKLKEARMNRPRGLAMDDRGNIYVADTINMAIRKISDDGVSTIAAGGRWSGGSKEESMRFSDDFDLIYVSSSCSLLVIDRGNQLIKEIQLHDHDCSQPEPDTDSLHLGTALLVAAVFFGYMLALLVRRVRSLFSSSSHDTKSKRHVATPSMTMAPYQRYPRPVRQPLIPPQHESEKEEGFLGSLGKLVVKTGSSVSEMMSGSRNVIPPNFHQYHHQQEPNQWPVQESFAIPEEDGPPALEPRSGTNPDKPYLRAQGTNQNRSYYQDYDQYQNQQKRNVNDTASFEDNREKNEIVFGAVQEQDGRREAMVIKAVDFNEAINDQRNLRPRINYMGYSSQVY

SEQ ID NO: 75841 - DNA, 1095 bp, Arabidopsis thaliana
  misc_feature (1)..(1095): Ceres Seq. ID no. 6455709
  misc_feature (1)..(1095): Ortholog of  Ceres SEQ ID NO 13596891 as cited in SEQ ID NO 62868
  misc_feature (1)..(1095): Ortholog of  Ceres SEQ ID NO 12617235 as cited in SEQ ID NO 63990
  misc_feature (1)..(1095): Ortholog of  Ceres SEQ ID NO 13655371 as cited in SEQ ID NO 68945
atgacgacggcgacgaacaagcaagttatattgaaagactacgtgagtggtttccctacggaatccaatttcgatttcactaccaccaccgtcgaacttagggttccggaaggtactaactctgttctggtgaagaacctatacttgtcatgcgatccttacatgagaatttgcatggggaaacctaatccttccactgctgctcttgctcaagcttacactcccggccaaaaactacatgacaatttggtgttcttgaagactctgagaagaaattgtgtctcttcggccaatagaagggtacggagtgtctacagtgatagaatctgggcattcagattacaaaaaaggagacctactctggggtatagttgcatgggaggagtacagtgttatcacttgactcacgagcatttcaagatccaacatactgatgttccattgtcttactacactggacttctcggtatgcctggtatgaccgcatatgttgggttttatgagatctgttctccaaagaaaggagagacagtttatgtgtcagctgcatctggtgctgttggtcagcttgtgggacaatttgctaagatgatgggctgttatgttgttggaagtgctggtagcaaagaaaaggttgatctcctgaagaccaagtttgggtttgattatgcatttaactacaaggaagaacctgaccttagtgctgcgctcaaaaggtgtttccctaatggcattgacatatactttgagaatgtaggaggcaaaatgctagatgcagtgcttatgaacatgaacatgcacgggcgtatcgctgtctgtggaatgatctcacagtacaatcttgagaaccaagaaggtgtacacaacctatccaacataatctacaaacgaatccgcattcaaggctttgtagtgtctgatttctacgacgaatactcaaagttcttggagtttctgcatccgcacattaaagaagggaagataacgtacgtggaagatgtagctgatgggctcgagaaaggtcctgaagctctcgtgggactcttccatggtaagaatgttgggaaacaagttgttgttattgctcgtgaatga

SEQ ID NO: 75842 - protein, 364 aa, Arabidopsis thaliana
  peptide (1)..(364): Ceres Seq. ID no. 6455710
MTTATNKQVILKDYVSGFPTESNFDFTTTTVELRVPEGTNSVLVKNLYLSCDPYMRICMGKPNPSTAALAQAYTPGQKLHDNLVFLKTLRRNCVSSANRRVRSVYSDRIWAFRLQKRRPTLGYSCMGGVQCYHLTHEHFKIQHTDVPLSYYTGLLGMPGMTAYVGFYEICSPKKGETVYVSAASGAVGQLVGQFAKMMGCYVVGSAGSKEKVDLLKTKFGFDYAFNYKEEPDLSAALKRCFPNGIDIYFENVGGKMLDAVLMNMNMHGRIAVCGMISQYNLENQEGVHNLSNIIYKRIRIQGFVVSDFYDEYSKFLEFLHPHIKEGKITYVEDVADGLEKGPEALVGLFHGKNVGKQVVVIARE

SEQ ID NO: 75843 - protein, 310 aa, Arabidopsis thaliana
  peptide (1)..(310): Ceres Seq. ID no. 6455711
MRICMGKPNPSTAALAQAYTPGQKLHDNLVFLKTLRRNCVSSANRRVRSVYSDRIWAFRLQKRRPTLGYSCMGGVQCYHLTHEHFKIQHTDVPLSYYTGLLGMPGMTAYVGFYEICSPKKGETVYVSAASGAVGQLVGQFAKMMGCYVVGSAGSKEKVDLLKTKFGFDYAFNYKEEPDLSAALKRCFPNGIDIYFENVGGKMLDAVLMNMNMHGRIAVCGMISQYNLENQEGVHNLSNIIYKRIRIQGFVVSDFYDEYSKFLEFLHPHIKEGKITYVEDVADGLEKGPEALVGLFHGKNVGKQVVVIARE

SEQ ID NO: 75844 - protein, 306 aa, Arabidopsis thaliana
  peptide (1)..(306): Ceres Seq. ID no. 6455712
MGKPNPSTAALAQAYTPGQKLHDNLVFLKTLRRNCVSSANRRVRSVYSDRIWAFRLQKRRPTLGYSCMGGVQCYHLTHEHFKIQHTDVPLSYYTGLLGMPGMTAYVGFYEICSPKKGETVYVSAASGAVGQLVGQFAKMMGCYVVGSAGSKEKVDLLKTKFGFDYAFNYKEEPDLSAALKRCFPNGIDIYFENVGGKMLDAVLMNMNMHGRIAVCGMISQYNLENQEGVHNLSNIIYKRIRIQGFVVSDFYDEYSKFLEFLHPHIKEGKITYVEDVADGLEKGPEALVGLFHGKNVGKQVVVIARE

SEQ ID NO: 75845 - DNA, 3234 bp, Arabidopsis thaliana
  misc_feature (1)..(3234): Ceres Seq. ID no. 6455717
  misc_feature (1)..(3234): Ortholog of  Ceres SEQ ID NO 12388487 as cited in SEQ ID NO 20511
atggcggctgagaagttaagggacttgagccagccgattgacgtcggtgtgctcgatgccactgttgcggccttctttgttaccggatctaaagaagagagagctgctgcggaccagattttgcgggatttgcaggctaatccagatatgtggcttcaagttgtccacattctacaaaatacaaacagcttggataccaagttctttgctctgcaggttctagaaggtgttataaagtatagatggaatgcactgcctgttgaacaacgagatggaatgaaaaattacatctcagaggttattgtacagctctcgagtaatgaagcatctttcagatcagaaaggctctatgtcaacaagctaaatgtcattttggtccagatcgtgaaacatgattggccggcaaagtggacaagcttcattcctgatctagttgcagctgctaaaactagcgaaactatctgcgaaaattgcatggccattttgaaactcctaagtgaagaggtttttgatttctcaagaggagaaatgactcagcagaagattaaagagctgaaacaatctctaaacagtgagtttaaactcattcatgagttatgcctatatgtcctctcagcttctcaaagacaggatcttatacgtgcaacactgtctgcattgcatgcctatctttcctggattccattgggttacatttttgagtctactttgcttgagaccctccttaaattttttcctgtgccagcatataggaacctcactattcaatgtctgaccgaggtcgcagctcttaatttcggggacttctacaatgttcaatatgtcaaaatgtataccatatttatagggcagctgcggataattctcccaccgagtacaaagatccctgaggcatattccagtggaagtggtgaagaacaagcatttatccagaacctggcactatttttcacttcctttttcaagtttcatattcgagtcctagaatcaacgccagaagttgtctctttgttactcgctggtctagaatatctcattaatatatcttatgttgacgacactgaagtatttaaggtttgtttggactattggaactcgttggtgttggagctatttgatgcgcatcataattctgataaccctgcagtaagtgcaagcctgatgggtttgcagcctttccttcctggtatggttgatggccttggttctcaagtcatgcagcggcgtcaactttattctcacccaatgtccaaattaagagggttaatgattaaccgcatggcgaagcctgaagaagtgcttattgttgaagatgaaaatgggaacatcgttcgtgaaaccatgaaggacaatgatgttcttgtccaatataagataatgcgggagacattaatctacctctcacaccttgaccatgatgataccgagaagcagatgttgaggaagctaaacaaacaattaagtggggaggaatgggcatggaacaatttgaacactttgtgctgggctattgggtctatttccggatctatggcagaagatcaggaaaacaggtttttggtgatggtcattcgtgatttgttgaatttatgtgaaattaccaagggaaaagacaataaagccgttattgcaactgaatttctgcctaggtatgtcgttggccagtatccaagattcttaagggcccattggaagtttttgaagacagttgtgaacaagttgtttgaattcatgcatgaaacacatcctggtgttcaggacatggcctgtgatacattcttgaaaatagttcaaaagtgcaagcgaaaattcgttattgtacaggttggagagaatgaaccatttgtatctgaacttctaacaggccttgcaacaactgttcaagatcttgagcctcatcaaatacactcattttatgaatcagttggtaatatgatccaagcagaatcagatcctcagaagagagatgaatatctccagaggttgatggcactccccaaccagaaatgggcagaaatcataggacaggcacgccacagtgtagaattcctcaaggatcaagttgtgatacgtacagtgctaaacatcctacagactaatactagtgctgctacttcactgggaacatacttcttatcccaaatttccttgattttcttggatatgttgaatgtatacagaatgtacagtgagcttgtgtcaaccaacattactgagggaggaccatatgcttccaagacatcttttgtaaaactcttaagatcggttaagagggaaacacttaagctgatagaaacctttttagacaaagctgaagaccagccacacatagggaaacaatttgtgccgccaatgatggaatcagtacttggtgactatgcgaggaatgtgcctgatgctagggaatccgaagttctttcactctttgcaacgattataaacaagtacaaggcaacaatgttagacgacgtgcctcacatatttgaagctgtattccagtgtacattggagatgataactaagaactttgaagattatccagaacaccgcctcaagtttttctcattactccgtgctattgctacgttttgtttccctgccttgataaagttatcaagtccgcaactgaagctagtgatggattcaattatctgggcatttagacatactgagagaaatattgctgaaaccgggcttaatcttttgcttgagatgctgaaaaactttcagcaatctgaattttgtaatcaattctaccggtcatactttatgcaaatcgagcaagaaatatttgccgttttgaccgataccttccataagcctggcttcaagctacatgtgttggtgctgcagcaactgttttgcctgcctgagagcggtgctttgacagaacccttgtgggatgctacaaccgttccttacccgtatccggacaacgttgcatttgttcgcgaatacaccattaagctactgagctcttcattcccaaacatgactgcagcagaggtcacacaatttgtgaatggactatacgagtctagaaatgacccgtctggatttaagaataacattcgtgacttccttgtacagtctaaggagttttccgctcaggataacaaagatctctatgctgaggaagcagctgcacagagagagagagaacgtcaaagaatgctttcaattcctgggcttattgctcctaatgagattcaagacgagatggtggactcataa

SEQ ID NO: 75846 - protein, 1077 aa, Arabidopsis thaliana
  peptide (1)..(1077): Ceres Seq. ID no. 6455718
MAAEKLRDLSQPIDVGVLDATVAAFFVTGSKEERAAADQILRDLQANPDMWLQVVHILQNTNSLDTKFFALQVLEGVIKYRWNALPVEQRDGMKNYISEVIVQLSSNEASFRSERLYVNKLNVILVQIVKHDWPAKWTSFIPDLVAAAKTSETICENCMAILKLLSEEVFDFSRGEMTQQKIKELKQSLNSEFKLIHELCLYVLSASQRQDLIRATLSALHAYLSWIPLGYIFESTLLETLLKFFPVPAYRNLTIQCLTEVAALNFGDFYNVQYVKMYTIFIGQLRIILPPSTKIPEAYSSGSGEEQAFIQNLALFFTSFFKFHIRVLESTPEVVSLLLAGLEYLINISYVDDTEVFKVCLDYWNSLVLELFDAHHNSDNPAVSASLMGLQPFLPGMVDGLGSQVMQRRQLYSHPMSKLRGLMINRMAKPEEVLIVEDENGNIVRETMKDNDVLVQYKIMRETLIYLSHLDHDDTEKQMLRKLNKQLSGEEWAWNNLNTLCWAIGSISGSMAEDQENRFLVMVIRDLLNLCEITKGKDNKAVIATEFLPRYVVGQYPRFLRAHWKFLKTVVNKLFEFMHETHPGVQDMACDTFLKIVQKCKRKFVIVQVGENEPFVSELLTGLATTVQDLEPHQIHSFYESVGNMIQAESDPQKRDEYLQRLMALPNQKWAEIIGQARHSVEFLKDQVVIRTVLNILQTNTSAATSLGTYFLSQISLIFLDMLNVYRMYSELVSTNITEGGPYASKTSFVKLLRSVKRETLKLIETFLDKAEDQPHIGKQFVPPMMESVLGDYARNVPDARESEVLSLFATIINKYKATMLDDVPHIFEAVFQCTLEMITKNFEDYPEHRLKFFSLLRAIATFCFPALIKLSSPQLKLVMDSIIWAFRHTERNIAETGLNLLLEMLKNFQQSEFCNQFYRSYFMQIEQEIFAVLTDTFHKPGFKLHVLVLQQLFCLPESGALTEPLWDATTVPYPYPDNVAFVREYTIKLLSSSFPNMTAAEVTQFVNGLYESRNDPSGFKNNIRDFLVQSKEFSAQDNKDLYAEEAAAQRERERQRMLSIPGLIAPNEIQDEMVDS

SEQ ID NO: 75847 - protein, 1028 aa, Arabidopsis thaliana
  peptide (1)..(1028): Ceres Seq. ID no. 6455719
MWLQVVHILQNTNSLDTKFFALQVLEGVIKYRWNALPVEQRDGMKNYISEVIVQLSSNEASFRSERLYVNKLNVILVQIVKHDWPAKWTSFIPDLVAAAKTSETICENCMAILKLLSEEVFDFSRGEMTQQKIKELKQSLNSEFKLIHELCLYVLSASQRQDLIRATLSALHAYLSWIPLGYIFESTLLETLLKFFPVPAYRNLTIQCLTEVAALNFGDFYNVQYVKMYTIFIGQLRIILPPSTKIPEAYSSGSGEEQAFIQNLALFFTSFFKFHIRVLESTPEVVSLLLAGLEYLINISYVDDTEVFKVCLDYWNSLVLELFDAHHNSDNPAVSASLMGLQPFLPGMVDGLGSQVMQRRQLYSHPMSKLRGLMINRMAKPEEVLIVEDENGNIVRETMKDNDVLVQYKIMRETLIYLSHLDHDDTEKQMLRKLNKQLSGEEWAWNNLNTLCWAIGSISGSMAEDQENRFLVMVIRDLLNLCEITKGKDNKAVIATEFLPRYVVGQYPRFLRAHWKFLKTVVNKLFEFMHETHPGVQDMACDTFLKIVQKCKRKFVIVQVGENEPFVSELLTGLATTVQDLEPHQIHSFYESVGNMIQAESDPQKRDEYLQRLMALPNQKWAEIIGQARHSVEFLKDQVVIRTVLNILQTNTSAATSLGTYFLSQISLIFLDMLNVYRMYSELVSTNITEGGPYASKTSFVKLLRSVKRETLKLIETFLDKAEDQPHIGKQFVPPMMESVLGDYARNVPDARESEVLSLFATIINKYKATMLDDVPHIFEAVFQCTLEMITKNFEDYPEHRLKFFSLLRAIATFCFPALIKLSSPQLKLVMDSIIWAFRHTERNIAETGLNLLLEMLKNFQQSEFCNQFYRSYFMQIEQEIFAVLTDTFHKPGFKLHVLVLQQLFCLPESGALTEPLWDATTVPYPYPDNVAFVREYTIKLLSSSFPNMTAAEVTQFVNGLYESRNDPSGFKNNIRDFLVQSKEFSAQDNKDLYAEEAAAQRERERQRMLSIPGLIAPNEIQDEMVDS

SEQ ID NO: 75848 - protein, 985 aa, Arabidopsis thaliana
  peptide (1)..(985): Ceres Seq. ID no. 6455720
MKNYISEVIVQLSSNEASFRSERLYVNKLNVILVQIVKHDWPAKWTSFIPDLVAAAKTSETICENCMAILKLLSEEVFDFSRGEMTQQKIKELKQSLNSEFKLIHELCLYVLSASQRQDLIRATLSALHAYLSWIPLGYIFESTLLETLLKFFPVPAYRNLTIQCLTEVAALNFGDFYNVQYVKMYTIFIGQLRIILPPSTKIPEAYSSGSGEEQAFIQNLALFFTSFFKFHIRVLESTPEVVSLLLAGLEYLINISYVDDTEVFKVCLDYWNSLVLELFDAHHNSDNPAVSASLMGLQPFLPGMVDGLGSQVMQRRQLYSHPMSKLRGLMINRMAKPEEVLIVEDENGNIVRETMKDNDVLVQYKIMRETLIYLSHLDHDDTEKQMLRKLNKQLSGEEWAWNNLNTLCWAIGSISGSMAEDQENRFLVMVIRDLLNLCEITKGKDNKAVIATEFLPRYVVGQYPRFLRAHWKFLKTVVNKLFEFMHETHPGVQDMACDTFLKIVQKCKRKFVIVQVGENEPFVSELLTGLATTVQDLEPHQIHSFYESVGNMIQAESDPQKRDEYLQRLMALPNQKWAEIIGQARHSVEFLKDQVVIRTVLNILQTNTSAATSLGTYFLSQISLIFLDMLNVYRMYSELVSTNITEGGPYASKTSFVKLLRSVKRETLKLIETFLDKAEDQPHIGKQFVPPMMESVLGDYARNVPDARESEVLSLFATIINKYKATMLDDVPHIFEAVFQCTLEMITKNFEDYPEHRLKFFSLLRAIATFCFPALIKLSSPQLKLVMDSIIWAFRHTERNIAETGLNLLLEMLKNFQQSEFCNQFYRSYFMQIEQEIFAVLTDTFHKPGFKLHVLVLQQLFCLPESGALTEPLWDATTVPYPYPDNVAFVREYTIKLLSSSFPNMTAAEVTQFVNGLYESRNDPSGFKNNIRDFLVQSKEFSAQDNKDLYAEEAAAQRERERQRMLSIPGLIAPNEIQDEMVDS

SEQ ID NO: 75849 - DNA, 1845 bp, Arabidopsis thaliana
  misc_feature (1)..(1845): Ceres Seq. ID no. 6455872
  misc_feature (1)..(1845): Ortholog of  Ceres SEQ ID NO 15177316 as cited in SEQ ID NO 52739
atgttcaccaaacttactgtaaagcctgaaactttcttccttcttcttctttgcttcattcaaattaatctttcaagaaccagcggagttgtctcagatctagtgataaaaacttgtgttctcaaagtgaatattcattgtgatggttgtaagcagaaagtgaagaaaatcttgcagaaaattgaaggtgttttcacgacaaagatagacgcagagctagggaaagtgactgtatctggaaacgtcgacccatcagttcttatcaagaagctcttgaaatctggtaaacatgccgaaatctggggagctcccaagggaggatctaacaacaatcagaaccaacccaacttggccaatcagttcaaagccatgcagattgatcatggcggcaaaggcggtggcggtggtggtggaggccctgctaacaataacaaaggccaaaagatcggtggaggcggtggtggaggaggaggcggcggcggaggtggtggtggcggaccaccgaagatggttattccacagttaacaccacaacagatgcagcagttgaatcctcaacagcttcagcagctacaacaacttcagcagatgaaagggtttcaagatctgaagcttcctcctcagttaaagggtggtccaggtccgggacctggctctgttcctatgaacaagaatcctcagatgcctaataatcctaatcagaaggctgtgaagttcaatgttcctgatgatgatgatgaggaagattttagtgatgaattcgatgatgagtttgatgaagatgacgacgagtttgatgatgatttggaagatgatgagtttgacgaccacccacctccgcctaacaaaatgaagcctatgatgggtggtggtaacatgatcatgcctaataacatgatgcctaacatgatgatgcctaacgctcaacaaatgttaaacgctcataagaatggtggtggtcctggacccgccggaggtaaaattgagggtaaaggtatgccttttccggttcaaatgggcggcggtggtggaggtcccggtggtaagaagggaggtcccggtggaggcgggggtaatatggggaatcagaaccaaggaggaggaggcaagaacggtggaaaaggcggtggtggacatccgttagatggaaaaatgggcggcggaggtggcggtcccaacggtaataaaggaggtggcggagtccagatgaacggaggtcccaacggtgggaaaaagggtggtggtggaggcggcggcggaggaggaggacccatgagtggaggcctcccgccaggtttccggccaatgggaggcggtggtggtggagggggaggacctcagagcatgagtatgccaatgggcggtgcaatgggtggtccaatgggaagtctaccacaaatgggtggtggtcccggtccaatgagtaataatatgcaggcggttcaaggattacccgcaatgggtccaggaggtggtggtggcggtggcccatccgcagaagcaccaccaggatatttccaaggccaagtctccggaaacggcggaggcggacaagactcaatgccgggaaacccctacttacaacagcagcaacagcaacaacaacaacaatacttagcggcggttatgaaccagcaacgatccatgggaaacgaacggttccagccgatgatgtacgctagaccaccgccagctgtcaactatatgccaccacaaccgcaaccgcaccaacaacatccatacccgtatccatatccgtatccaccccagtatccgcctcacaatggtgaccagtattctgattacttcaatgacgagaacacatcaagctgcaatattatgtga

SEQ ID NO: 75850 - protein, 614 aa, Arabidopsis thaliana
  peptide (1)..(614): Ceres Seq. ID no. 6455873
MFTKLTVKPETFFLLLLCFIQINLSRTSGVVSDLVIKTCVLKVNIHCDGCKQKVKKILQKIEGVFTTKIDAELGKVTVSGNVDPSVLIKKLLKSGKHAEIWGAPKGGSNNNQNQPNLANQFKAMQIDHGGKGGGGGGGGPANNNKGQKIGGGGGGGGGGGGGGGGGPPKMVIPQLTPQQMQQLNPQQLQQLQQLQQMKGFQDLKLPPQLKGGPGPGPGSVPMNKNPQMPNNPNQKAVKFNVPDDDDEEDFSDEFDDEFDEDDDEFDDDLEDDEFDDHPPPPNKMKPMMGGGNMIMPNNMMPNMMMPNAQQMLNAHKNGGGPGPAGGKIEGKGMPFPVQMGGGGGGPGGKKGGPGGGGGNMGNQNQGGGGKNGGKGGGGHPLDGKMGGGGGGPNGNKGGGGVQMNGGPNGGKKGGGGGGGGGGGPMSGGLPPGFRPMGGGGGGGGGPQSMSMPMGGAMGGPMGSLPQMGGGPGPMSNNMQAVQGLPAMGPGGGGGGGPSAEAPPGYFQGQVSGNGGGGQDSMPGNPYLQQQQQQQQQQYLAAVMNQQRSMGNERFQPMMYARPPPAVNYMPPQPQPHQQHPYPYPYPYPPQYPPHNGDQYSDYFNDENTSSCNIM

SEQ ID NO: 75851 - protein, 491 aa, Arabidopsis thaliana
  peptide (1)..(491): Ceres Seq. ID no. 6455874
MQIDHGGKGGGGGGGGPANNNKGQKIGGGGGGGGGGGGGGGGGPPKMVIPQLTPQQMQQLNPQQLQQLQQLQQMKGFQDLKLPPQLKGGPGPGPGSVPMNKNPQMPNNPNQKAVKFNVPDDDDEEDFSDEFDDEFDEDDDEFDDDLEDDEFDDHPPPPNKMKPMMGGGNMIMPNNMMPNMMMPNAQQMLNAHKNGGGPGPAGGKIEGKGMPFPVQMGGGGGGPGGKKGGPGGGGGNMGNQNQGGGGKNGGKGGGGHPLDGKMGGGGGGPNGNKGGGGVQMNGGPNGGKKGGGGGGGGGGGPMSGGLPPGFRPMGGGGGGGGGPQSMSMPMGGAMGGPMGSLPQMGGGPGPMSNNMQAVQGLPAMGPGGGGGGGPSAEAPPGYFQGQVSGNGGGGQDSMPGNPYLQQQQQQQQQQYLAAVMNQQRSMGNERFQPMMYARPPPAVNYMPPQPQPHQQHPYPYPYPYPPQYPPHNGDQYSDYFNDENTSSCNIM

SEQ ID NO: 75852 - protein, 445 aa, Arabidopsis thaliana
  peptide (1)..(445): Ceres Seq. ID no. 6455875
MVIPQLTPQQMQQLNPQQLQQLQQLQQMKGFQDLKLPPQLKGGPGPGPGSVPMNKNPQMPNNPNQKAVKFNVPDDDDEEDFSDEFDDEFDEDDDEFDDDLEDDEFDDHPPPPNKMKPMMGGGNMIMPNNMMPNMMMPNAQQMLNAHKNGGGPGPAGGKIEGKGMPFPVQMGGGGGGPGGKKGGPGGGGGNMGNQNQGGGGKNGGKGGGGHPLDGKMGGGGGGPNGNKGGGGVQMNGGPNGGKKGGGGGGGGGGGPMSGGLPPGFRPMGGGGGGGGGPQSMSMPMGGAMGGPMGSLPQMGGGPGPMSNNMQAVQGLPAMGPGGGGGGGPSAEAPPGYFQGQVSGNGGGGQDSMPGNPYLQQQQQQQQQQYLAAVMNQQRSMGNERFQPMMYARPPPAVNYMPPQPQPHQQHPYPYPYPYPPQYPPHNGDQYSDYFNDENTSSCNIM

SEQ ID NO: 75853 - DNA, 660 bp, Arabidopsis thaliana
  misc_feature (1)..(660): Ceres Seq. ID no. 6455963
  misc_feature (1)..(660): Ortholog of  Ceres SEQ ID NO 14311392 as cited in SEQ ID NO 58307
  misc_feature (1)..(660): Ortholog of  Ceres SEQ ID NO 13599348 as cited in SEQ ID NO 0
atgctgagtaggttgtcaaggcgttgctactgcacttcttctgttcatcggccatggctgtttctaggactgggcaatccaggtgacaaatacaaaggaactagacacaacattggattcgaaatgattgatgttttcgctgagtcagtggggattcaaatgaacttggtaaatttcaaggctataatgggacaaggtttcgtggcagatcttcccgtcatccttgcaaaaccgcaaacctacatgaacttgagcggtgaatcaagtggacctctcgcagcttattacaagttacctctcaatcgtgtgcttgtggttcatgatgacatgcaattgccatgtggtgttcttcgtcttcaagaaaaaggaggccatggatgtcacaacgggttaaaaagtgtaatgaaccatttccgaggcaacagggaatttgcaaggctacgaatcggaattggaaagcctccgggacaaatggacccaaaggcgttcttgttgcagaagttcagcatgccagctcgtgaacggatggataaagctttagcagaaggggtggatgctctgaagctcgtcttggctaaagactttggagaaagctggagattgttcaatgtggaacagaagtacaaacacttaaaacaacacacaatactatcagcttga

SEQ ID NO: 75854 - protein, 219 aa, Arabidopsis thaliana
  peptide (1)..(219): Ceres Seq. ID no. 6455964
MLSRLSRRCYCTSSVHRPWLFLGLGNPGDKYKGTRHNIGFEMIDVFAESVGIQMNLVNFKAIMGQGFVADLPVILAKPQTYMNLSGESSGPLAAYYKLPLNRVLVVHDDMQLPCGVLRLQEKGGHGCHNGLKSVMNHFRGNREFARLRIGIGKPPGQMDPKAFLLQKFSMPARERMDKALAEGVDALKLVLAKDFGESWRLFNVEQKYKHLKQHTILSA

SEQ ID NO: 75855 - protein, 178 aa, Arabidopsis thaliana
  peptide (1)..(178): Ceres Seq. ID no. 6455965
MIDVFAESVGIQMNLVNFKAIMGQGFVADLPVILAKPQTYMNLSGESSGPLAAYYKLPLNRVLVVHDDMQLPCGVLRLQEKGGHGCHNGLKSVMNHFRGNREFARLRIGIGKPPGQMDPKAFLLQKFSMPARERMDKALAEGVDALKLVLAKDFGESWRLFNVEQKYKHLKQHTILSA

SEQ ID NO: 75856 - protein, 166 aa, Arabidopsis thaliana
  peptide (1)..(166): Ceres Seq. ID no. 6455966
MNLVNFKAIMGQGFVADLPVILAKPQTYMNLSGESSGPLAAYYKLPLNRVLVVHDDMQLPCGVLRLQEKGGHGCHNGLKSVMNHFRGNREFARLRIGIGKPPGQMDPKAFLLQKFSMPARERMDKALAEGVDALKLVLAKDFGESWRLFNVEQKYKHLKQHTILSA

SEQ ID NO: 75857 - DNA, 1452 bp, Arabidopsis thaliana
  misc_feature (1)..(1452): Ceres Seq. ID no. 6456162
  misc_feature (1)..(1452): Ortholog of  Ceres SEQ ID NO 15174599 as cited in SEQ ID NO 53646
  misc_feature (1)..(1452): Ortholog of  Ceres SEQ ID NO 15174646 as cited in SEQ ID NO 54499
atggaatccaattgtgttcaatttctcggtaacaagaccattctcatcacaggagctcctggttttcttgccaaggttttggtagagaaaatactaaggttgcaaccaaatgtgaagaagatataccttctgttgagagctcccgacgaaaaatcagccatgcaacgcctacgtagtgaggttatggagatcgacctttttaaagtgttgaggaacaatctaggagaagacaatttgaatgccttgatgcgggaaaaaattgtgccggttccaggtgatatatcgatcgataatttgggattgaaagacactgatctcatacaacgtatgtggagtgagattgatatcataatcaacatagcagccacaacaaatttcgatgaaagatatgatattggtcttggcatcaacacatttggagccctgaatgttctcaacttcgccaaaaagtgtgttaaaggacaattgcttctccatgtctcaaccgcgtatataagcggtgaacaacctggattgttactagagaaaccattcaagatgggggagactctcagcggggatcgggaactagacatcaatatagaacatgatctaatgaaacaaaaattgaaagagcttcaagattgttctgatgaagagatctcgcaaacaatgaaagattttggaatggcaagggcaaagcttcatggatggccaaatacatatgtattcaccaaagcaatgggagagatgctaatgggaaaatacagagaaaatttgccacttgttatcatacgtccaacaatgattactagtactattgccgaaccattccccggttggattgaagggttgaaaacattagacagtgtgattgttgcatatggtaaaggaaggcttaaatgttttcttgcggattcaaactcagtctttgaccttataccggcagacatggtagtaaatgcgatggttgcagccgcgacagctcattcgggagacaccgggattcaggcaatatatcatgttggttcgtcttgtaagaatccagtcacgtttggacaacttcacgatttcacggctcgttacttcgctaaacgtcctttgattggtcggaatggctcgccaatcatagtggtcaaaggaaccattctgtccactatggctcaattcagcctctacatgacccttcgttacaagcttcctctacagatacttcgattgatcaatatagtttatccatggagtcacggagataactacagtgacctaagccgcaaaatcaagctagctatgcgactagttgagctttaccaatttgatgatttaaataccgaaagactgcgaatgaaaagaaaggagaatatcaaagagttagatggatcgttcgagttcgatcccaagtccattgattgggacaattatatcacaaacacccacattcctggcctcatcacccatgtgcttaaacaataa

SEQ ID NO: 75858 - protein, 483 aa, Arabidopsis thaliana
  peptide (1)..(483): Ceres Seq. ID no. 6456163
MESNCVQFLGNKTILITGAPGFLAKVLVEKILRLQPNVKKIYLLLRAPDEKSAMQRLRSEVMEIDLFKVLRNNLGEDNLNALMREKIVPVPGDISIDNLGLKDTDLIQRMWSEIDIIINIAATTNFDERYDIGLGINTFGALNVLNFAKKCVKGQLLLHVSTAYISGEQPGLLLEKPFKMGETLSGDRELDINIEHDLMKQKLKELQDCSDEEISQTMKDFGMARAKLHGWPNTYVFTKAMGEMLMGKYRENLPLVIIRPTMITSTIAEPFPGWIEGLKTLDSVIVAYGKGRLKCFLADSNSVFDLIPADMVVNAMVAAATAHSGDTGIQAIYHVGSSCKNPVTFGQLHDFTARYFAKRPLIGRNGSPIIVVKGTILSTMAQFSLYMTLRYKLPLQILRLINIVYPWSHGDNYSDLSRKIKLAMRLVELYQFDDLNTERLRMKRKENIKELDGSFEFDPKSIDWDNYITNTHIPGLITHVLKQ

SEQ ID NO: 75859 - protein, 430 aa, Arabidopsis thaliana
  peptide (1)..(430): Ceres Seq. ID no. 6456164
MQRLRSEVMEIDLFKVLRNNLGEDNLNALMREKIVPVPGDISIDNLGLKDTDLIQRMWSEIDIIINIAATTNFDERYDIGLGINTFGALNVLNFAKKCVKGQLLLHVSTAYISGEQPGLLLEKPFKMGETLSGDRELDINIEHDLMKQKLKELQDCSDEEISQTMKDFGMARAKLHGWPNTYVFTKAMGEMLMGKYRENLPLVIIRPTMITSTIAEPFPGWIEGLKTLDSVIVAYGKGRLKCFLADSNSVFDLIPADMVVNAMVAAATAHSGDTGIQAIYHVGSSCKNPVTFGQLHDFTARYFAKRPLIGRNGSPIIVVKGTILSTMAQFSLYMTLRYKLPLQILRLINIVYPWSHGDNYSDLSRKIKLAMRLVELYQFDDLNTERLRMKRKENIKELDGSFEFDPKSIDWDNYITNTHIPGLITHVLKQ

SEQ ID NO: 75860 - protein, 422 aa, Arabidopsis thaliana
  peptide (1)..(422): Ceres Seq. ID no. 6456165
MEIDLFKVLRNNLGEDNLNALMREKIVPVPGDISIDNLGLKDTDLIQRMWSEIDIIINIAATTNFDERYDIGLGINTFGALNVLNFAKKCVKGQLLLHVSTAYISGEQPGLLLEKPFKMGETLSGDRELDINIEHDLMKQKLKELQDCSDEEISQTMKDFGMARAKLHGWPNTYVFTKAMGEMLMGKYRENLPLVIIRPTMITSTIAEPFPGWIEGLKTLDSVIVAYGKGRLKCFLADSNSVFDLIPADMVVNAMVAAATAHSGDTGIQAIYHVGSSCKNPVTFGQLHDFTARYFAKRPLIGRNGSPIIVVKGTILSTMAQFSLYMTLRYKLPLQILRLINIVYPWSHGDNYSDLSRKIKLAMRLVELYQFDDLNTERLRMKRKENIKELDGSFEFDPKSIDWDNYITNTHIPGLITHVLKQ

SEQ ID NO: 75861 - DNA, 801 bp, Arabidopsis thaliana
  misc_feature (1)..(801): Ceres Seq. ID no. 6456505
  misc_feature (1)..(801): Ortholog of  Ceres SEQ ID NO 14314434 as cited in SEQ ID NO 52401
  misc_feature (1)..(801): Ortholog of  Ceres SEQ ID NO 14303939 as cited in SEQ ID NO 54286
  misc_feature (1)..(801): Ortholog of  Ceres SEQ ID NO 14307760 as cited in SEQ ID NO 54741
  misc_feature (1)..(801): Ortholog of  Ceres SEQ ID NO 15179003 as cited in SEQ ID NO 0
atggaagcaggtggcgcgtacaatccacgcactgttgaagaggtgtttagggattttaagggtcgtagagctggcatgattaaggctttaaccactgatgttcaggagtttttccgactttgtgatcccgaaaaggagaacctttgcctttacggacatccaaatgagcactgggaagtgaatttgccagctgaagaggttcctcctgagctcccagagcctgtcttgggtatcaattttgccagagacgggatggcggaaaaggattggttgtcccttgttgctgtccacagtgatgcttggcttcttgctgttgctttcttttttggagccaggtttggatttgacaaagctgataggaagaggcttttcaatatggtgaatgacctcccaacaatctttgaggttgtagctggcactgctaagaaacaaggaaaagataagtcctctgtttccaacaacagcagcaacagatccaaatcaagctccaagcgaggatctgaatcccgtgccaagttctcaaagccggagccgaaagatgatgaggaggaggaagaggaaggtgtggaagaggaggatgaggatgagcaaggtgaaacacagtgtggagcatgtggtgagagctatgcagctgatgagttctggatttgctgtgacctctgtgagatgtggtttcatggaaagtgtgttaagataacaccagcaagacaacaaaagggctcgttcctaaatttgttgaccgctcgcttctgtgtatctacctttgcatatgatgatgaacagcttaactgtttggtttag

SEQ ID NO: 75862 - protein, 266 aa, Arabidopsis thaliana
  peptide (1)..(266): Ceres Seq. ID no. 6456506
MEAGGAYNPRTVEEVFRDFKGRRAGMIKALTTDVQEFFRLCDPEKENLCLYGHPNEHWEVNLPAEEVPPELPEPVLGINFARDGMAEKDWLSLVAVHSDAWLLAVAFFFGARFGFDKADRKRLFNMVNDLPTIFEVVAGTAKKQGKDKSSVSNNSSNRSKSSSKRGSESRAKFSKPEPKDDEEEEEEGVEEEDEDEQGETQCGACGESYAADEFWICCDLCEMWFHGKCVKITPARQQKGSFLNLLTARFCVSTFAYDDEQLNCLV

SEQ ID NO: 75863 - protein, 241 aa, Arabidopsis thaliana
  peptide (1)..(241): Ceres Seq. ID no. 6456507
MIKALTTDVQEFFRLCDPEKENLCLYGHPNEHWEVNLPAEEVPPELPEPVLGINFARDGMAEKDWLSLVAVHSDAWLLAVAFFFGARFGFDKADRKRLFNMVNDLPTIFEVVAGTAKKQGKDKSSVSNNSSNRSKSSSKRGSESRAKFSKPEPKDDEEEEEEGVEEEDEDEQGETQCGACGESYAADEFWICCDLCEMWFHGKCVKITPARQQKGSFLNLLTARFCVSTFAYDDEQLNCLV

SEQ ID NO: 75864 - protein, 182 aa, Arabidopsis thaliana
  peptide (1)..(182): Ceres Seq. ID no. 6456508
MAEKDWLSLVAVHSDAWLLAVAFFFGARFGFDKADRKRLFNMVNDLPTIFEVVAGTAKKQGKDKSSVSNNSSNRSKSSSKRGSESRAKFSKPEPKDDEEEEEEGVEEEDEDEQGETQCGACGESYAADEFWICCDLCEMWFHGKCVKITPARQQKGSFLNLLTARFCVSTFAYDDEQLNCLV

SEQ ID NO: 75865 - DNA, 1251 bp, Arabidopsis thaliana
  misc_feature (1)..(1251): Ceres Seq. ID no. 6456546
  misc_feature (1)..(1251): Ortholog of  Ceres SEQ ID NO 14312216 as cited in SEQ ID NO 53930
  misc_feature (1)..(1251): Ortholog of  Ceres SEQ ID NO 13656404 as cited in SEQ ID NO 65806
  misc_feature (1)..(1251): Ortholog of  Ceres SEQ ID NO 12779935 as cited in SEQ ID NO 66774
  misc_feature (1)..(1251): Ortholog of  Ceres SEQ ID NO 13598695 as cited in SEQ ID NO 67368
  misc_feature (1)..(1251): Ortholog of  Ceres SEQ ID NO 13591174 as cited in SEQ ID NO 68289
atgaggaagcttttcttgttagggtttatagttgcaggactggttcttgggaatgaggcaaatgggtatttagagttcaatgtcactgaattagatcgcattgaggatttagagtttggtttctccaaatttagttccaatttcaatccattaatggttggtctcacacttatcagaggagctggttctaaaggagctgtttgtttggatggtacattgcctggatatcacttacatcgtggacatggatctggagccaatagctggttaattcaattagagggaggaggatggtgtgacaacattaggaactgtgtataccgaaagaagtcgcgtcgcggatcttctaactatatggagaaacaaatacagtttacaggaatacttagcaataaagctcaagaaaatccagactttttcaactggaatcgagttaagcttcgttactgcgatggtggttccttcagtggagatagtcagaacaaggctgcacggcttcagtttagaggagagaagatatggagagccgcaatggacgatttgaaggcaaagggaatgcgaaatgcgaaacaggcacttctatctggttgctctgcaggtggtctagcagttattttacgctgtgacgaattcagaaacttgttttctggatggaccagagttaaatgcttaagtgatgcaggcttgttcttggacacgcctgatgtatccggtggacacactataaggaatttatataacggcgttgtgcagttgcagggagtgaagaacaatttgccacatttatgcactaaccatctcaatccaacctcttgtttcttccctcaaaacttgatcagtcagatgaaaactcctcttttcattgtcaatgcagcatatgatatttggcagattcaaagcagtatcgctccgccgagtgcagatcctagtggttattggcatgaatgcagattaaaccacggtagatgcactccggcgcagatacggttcttgcaagggtttagaaaccaaatgttgagagctgtgagtggtttctcgaattcgaaaaagaacggtttgttcatcaattcttgctttgctcattgccaaaccgaaaggcaagacacttggttcgccgatgattctcctgttatacacaaaaaggcggtggcgatagcggttggagattggtatttcgatagagctgaagtgaagctaatagattgtccatacccgtgtgataggagctgtcacaatctggtcttcagatga

SEQ ID NO: 75866 - protein, 416 aa, Arabidopsis thaliana
  peptide (1)..(416): Ceres Seq. ID no. 6456547
MRKLFLLGFIVAGLVLGNEANGYLEFNVTELDRIEDLEFGFSKFSSNFNPLMVGLTLIRGAGSKGAVCLDGTLPGYHLHRGHGSGANSWLIQLEGGGWCDNIRNCVYRKKSRRGSSNYMEKQIQFTGILSNKAQENPDFFNWNRVKLRYCDGGSFSGDSQNKAARLQFRGEKIWRAAMDDLKAKGMRNAKQALLSGCSAGGLAVILRCDEFRNLFSGWTRVKCLSDAGLFLDTPDVSGGHTIRNLYNGVVQLQGVKNNLPHLCTNHLNPTSCFFPQNLISQMKTPLFIVNAAYDIWQIQSSIAPPSADPSGYWHECRLNHGRCTPAQIRFLQGFRNQMLRAVSGFSNSKKNGLFINSCFAHCQTERQDTWFADDSPVIHKKAVAIAVGDWYFDRAEVKLIDCPYPCDRSCHNLVFR

SEQ ID NO: 75867 - protein, 365 aa, Arabidopsis thaliana
  peptide (1)..(365): Ceres Seq. ID no. 6456548
MVGLTLIRGAGSKGAVCLDGTLPGYHLHRGHGSGANSWLIQLEGGGWCDNIRNCVYRKKSRRGSSNYMEKQIQFTGILSNKAQENPDFFNWNRVKLRYCDGGSFSGDSQNKAARLQFRGEKIWRAAMDDLKAKGMRNAKQALLSGCSAGGLAVILRCDEFRNLFSGWTRVKCLSDAGLFLDTPDVSGGHTIRNLYNGVVQLQGVKNNLPHLCTNHLNPTSCFFPQNLISQMKTPLFIVNAAYDIWQIQSSIAPPSADPSGYWHECRLNHGRCTPAQIRFLQGFRNQMLRAVSGFSNSKKNGLFINSCFAHCQTERQDTWFADDSPVIHKKAVAIAVGDWYFDRAEVKLIDCPYPCDRSCHNLVFR

SEQ ID NO: 75868 - protein, 298 aa, Arabidopsis thaliana
  peptide (1)..(298): Ceres Seq. ID no. 6456549
MEKQIQFTGILSNKAQENPDFFNWNRVKLRYCDGGSFSGDSQNKAARLQFRGEKIWRAAMDDLKAKGMRNAKQALLSGCSAGGLAVILRCDEFRNLFSGWTRVKCLSDAGLFLDTPDVSGGHTIRNLYNGVVQLQGVKNNLPHLCTNHLNPTSCFFPQNLISQMKTPLFIVNAAYDIWQIQSSIAPPSADPSGYWHECRLNHGRCTPAQIRFLQGFRNQMLRAVSGFSNSKKNGLFINSCFAHCQTERQDTWFADDSPVIHKKAVAIAVGDWYFDRAEVKLIDCPYPCDRSCHNLVFR

SEQ ID NO: 75869 - DNA, 726 bp, Arabidopsis thaliana
  misc_feature (1)..(726): Ceres Seq. ID no. 6456605
  misc_feature (1)..(726): Ortholog of  Ceres SEQ ID NO 12620190 as cited in SEQ ID NO 66274
atggccattctacttcactccctctctcttcatccaccaaaccctaaacctcaaaacccttataaacccaaaattctctcttcttctgctacctttcggagagatgtggtgcttagaacagcatcactctgtttcgtctccttcatctttcaaaaccaaattccagagtcattagctgatcctttgaagtctaccaaaccgttacgactcggcattgcgaacactaagtcttggttccagtactttggtagtgggttcgctattagggttcctcctgactttgaagacgtcaatgagcctgaggattactctgcgggattgtctctctatggtgacaaggcaaagccacaaactttcgccgcccggttccaaactcctgatggatcagaagttttgagtgtagtcattcgtccttcaaatcaacttaagatcactttcttagaggctaaagatatatctgatttgggatcattgaaggcagctgcaagactttttgttccaggtgcggcaacaatttactctgctcgtacaatcaaggtaaaggaagaagaaggtttaagaaattactacttctacgagtttggtagagatgaagaacgcatagctctagtagcctctgtgaacagagggaaggtttatatcgctggagcagctgcaccggaatccaaatggaaagacgatgagttgaagctccgatctgctgccatttctttcactattctatag

SEQ ID NO: 75870 - protein, 241 aa, Arabidopsis thaliana; identical to SEQ ID NO: 43398
  peptide (1)..(241): Ceres Seq. ID no. 6456606

SEQ ID NO: 75871 - DNA, 972 bp, Arabidopsis thaliana
  misc_feature (1)..(972): Ceres Seq. ID no. 6456714
  misc_feature (1)..(972): Ortholog of  Ceres SEQ ID NO 13595164 as cited in SEQ ID NO 56222
  misc_feature (1)..(972): Ortholog of  Ceres SEQ ID NO 13595665 as cited in SEQ ID NO 59902
  misc_feature (1)..(972): Ortholog of  Ceres SEQ ID NO 14302438 as cited in SEQ ID NO 62982
  misc_feature (1)..(972): Ortholog of  Ceres SEQ ID NO 13591068 as cited in SEQ ID NO 69043
  misc_feature (1)..(972): Ortholog of  Ceres SEQ ID NO 13623041 as cited in SEQ ID NO 0
atggaagatcggtgcttgatcaagaacgatatcactgaattgattggtaacacaccaatggtgtatctgaacaatgttgttgatggttgcgtggctcgtatcgctgcgaagcttgagatgatggagccttgttctagcgtcaaagacagaatcgcgtatagtatgatcaaagatgcagaagacaaaggattgattactcccggaaagagtacattgatagagccaactgctggtaacaccgggattggtttagcttgcatgggagctgcaagaggctataaagtgatccttgtgatgccttcaactatgagcttagagagaagaatcattctgagggcactaggtgcagagcttcatctctcggaccagcgcataggccttaaaggaatgttggagaaaactgaagcgattttaagcaaaactcctggtggttacattccacaacaatttgaaaatcctgcaaaccccgagattcattaccgaaccacgggaccggaaatatggagagattcagccgggaaagtagatatattggtcgctggcgtagggactggtggaactgctactggagtagggaagttcctcaaggagcagaacaaagacatcaaggtttgtgtggtggaaccagtagaaagtccggtacttagcggaggtcaaccaggtccacatttgattcagggaattggctctggtatcgtcccattcaatttggacttaaccattgttgatgaaattattcaagtggcaggtgaagaggctattgaaacagccaagcttcttgccctcaaagaaggattactggtgggaatatcctctggagccgcagcagcggctgcgttaaaggttgcaaagcggccagaaaacgcggggaaactcattgtggtggtttttcctagtggaggagaacgttatttatcgactaaactgttcgattcgattagatatgaagcagagaatttgcctattgaatga

SEQ ID NO: 75872 - protein, 323 aa, Arabidopsis thaliana
  peptide (1)..(323): Ceres Seq. ID no. 6456715
MEDRCLIKNDITELIGNTPMVYLNNVVDGCVARIAAKLEMMEPCSSVKDRIAYSMIKDAEDKGLITPGKSTLIEPTAGNTGIGLACMGAARGYKVILVMPSTMSLERRIILRALGAELHLSDQRIGLKGMLEKTEAILSKTPGGYIPQQFENPANPEIHYRTTGPEIWRDSAGKVDILVAGVGTGGTATGVGKFLKEQNKDIKVCVVEPVESPVLSGGQPGPHLIQGIGSGIVPFNLDLTIVDEIIQVAGEEAIETAKLLALKEGLLVGISSGAAAAAALKVAKRPENAGKLIVVVFPSGGERYLSTKLFDSIRYEAENLPIE

SEQ ID NO: 75873 - protein, 304 aa, Arabidopsis thaliana
  peptide (1)..(304): Ceres Seq. ID no. 6456716
MVYLNNVVDGCVARIAAKLEMMEPCSSVKDRIAYSMIKDAEDKGLITPGKSTLIEPTAGNTGIGLACMGAARGYKVILVMPSTMSLERRIILRALGAELHLSDQRIGLKGMLEKTEAILSKTPGGYIPQQFENPANPEIHYRTTGPEIWRDSAGKVDILVAGVGTGGTATGVGKFLKEQNKDIKVCVVEPVESPVLSGGQPGPHLIQGIGSGIVPFNLDLTIVDEIIQVAGEEAIETAKLLALKEGLLVGISSGAAAAAALKVAKRPENAGKLIVVVFPSGGERYLSTKLFDSIRYEAENLPIE

SEQ ID NO: 75874 - protein, 284 aa, Arabidopsis thaliana
  peptide (1)..(284): Ceres Seq. ID no. 6456717
MMEPCSSVKDRIAYSMIKDAEDKGLITPGKSTLIEPTAGNTGIGLACMGAARGYKVILVMPSTMSLERRIILRALGAELHLSDQRIGLKGMLEKTEAILSKTPGGYIPQQFENPANPEIHYRTTGPEIWRDSAGKVDILVAGVGTGGTATGVGKFLKEQNKDIKVCVVEPVESPVLSGGQPGPHLIQGIGSGIVPFNLDLTIVDEIIQVAGEEAIETAKLLALKEGLLVGISSGAAAAAALKVAKRPENAGKLIVVVFPSGGERYLSTKLFDSIRYEAENLPIE

SEQ ID NO: 75875 - DNA, 417 bp, Arabidopsis thaliana
  misc_feature (1)..(417): Ceres Seq. ID no. 6457557
  misc_feature (1)..(417): Ortholog of  Ceres SEQ ID NO 13582040 as cited in SEQ ID NO 51006
atgccatttggtttatgcaatgctcctgcaacatttcagaggtgtatgacctctatattttcagatttaatcgaggagatggtggaggtcttcatggacgatttttcggtctatggcccctctttctcctcatgtttgttgaatcttggcagggtattgaccaggtgcgaagagacgaaccttgttctcaattgggaaaagtgtcatttcatggtgaaggaaggcatagtgttgtgtcacaagatatcagaaaagggcatagaggttgacaaaggaaaaattgaagtgatgatgcagttgcagccaccaaaaacggtgaaggacatcagaagtttcattggtcatgctgggttctacggaagatttattaaagacttctccaagatagccaggccgttaaccagactattgtgctag

SEQ ID NO: 75876 - protein, 138 aa, Arabidopsis thaliana
  peptide (1)..(138): Ceres Seq. ID no. 6457558
MPFGLCNAPATFQRCMTSIFSDLIEEMVEVFMDDFSVYGPSFSSCLLNLGRVLTRCEETNLVLNWEKCHFMVKEGIVLCHKISEKGIEVDKGKIEVMMQLQPPKTVKDIRSFIGHAGFYGRFIKDFSKIARPLTRLLC

SEQ ID NO: 75877 - protein, 123 aa, Arabidopsis thaliana
  peptide (1)..(123): Ceres Seq. ID no. 6457559
MTSIFSDLIEEMVEVFMDDFSVYGPSFSSCLLNLGRVLTRCEETNLVLNWEKCHFMVKEGIVLCHKISEKGIEVDKGKIEVMMQLQPPKTVKDIRSFIGHAGFYGRFIKDFSKIARPLTRLLC

SEQ ID NO: 75878 - protein, 112 aa, Arabidopsis thaliana
  peptide (1)..(112): Ceres Seq. ID no. 6457560
MVEVFMDDFSVYGPSFSSCLLNLGRVLTRCEETNLVLNWEKCHFMVKEGIVLCHKISEKGIEVDKGKIEVMMQLQPPKTVKDIRSFIGHAGFYGRFIKDFSKIARPLTRLLC

SEQ ID NO: 75879 - DNA, 3888 bp, Arabidopsis thaliana
  misc_feature (1)..(3888): Ceres Seq. ID no. 6458469
  misc_feature (1)..(3888): Ortholog of  Ceres SEQ ID NO 14310920 as cited in SEQ ID NO 54622
atggcttctgctcgaacttggagatacaacgtcttcccgagcttccatggaggagatattcgtaagacttttctctctcatttacgtaagcagttcaactcaaatgggattacaatgtttgatgatcaaggaatcgagaggagccaaaccatagcccctgctctcatacaagcgattagagaatctaggatatcgattgtggttctttcaaagaactatgcttcttcgagttggtgcttgaatgaattggtggagattttgaaatgcaaagacgtagtgatgccgatcttctatgaagtagatccatccgatgtacggaaacagaccggagattttgggaaggccttcaaaaatagttgtaaaagtaaaactaaggaggagaggcagagatggatccaagctttaatttttgttggcaacatagctggagaacactcgctgaaatgggaaaatgaagcggatatgattgaaaagatagccaaagatgtttcagataaactgaatgctacaccttctaaagattttgatgcatttgtgggacttgagtttcacattagggaattaagttctctgctatacctagactatgagcaagtgaggatagtaggaatctgtggccctgcaggaatcggtaagactaccattgctcgtgctttacaaagcctactctctagcaattttcagcgaagttgttttatggagaatgttaggggaagtcttaatattgggcttgacgagtatggtctgaagttagatttacaagaacgacttctttcaaagattatgaaccaaaagggtatgaggatagagcatttaggcacaataagagataggttacatgaccaaaaagtgcttatcattctagatgatgttaatgatctcgatttgtatgctttggctgatcagacaacgtggtttggtcctggaagtaggattatcgtgacaacagaagacaacgagcttttgcagaaacatgatattaacaatgtctaccatgtggattttccatctagaaaagaagctcttgagatcttttgcagatgtgcttttagacaaagctctgcacctgatacgattctaaagcttgcagaacgagtaacagagctttgtggtaatcttccattgggtctctgtgtcataggttcatctttacacgggaaaactgaggatgagtgggaaattttaattcgcagactagaaattagtcttgatcgagataacgaggcacaacttagagttgggtatgatagcttacatgagaacgagcaagctttatttctcagcattgcagtcttcttcaactataaagaccgtcagcttgtgatggccatgctccttgacagtaacctagatgtcgagtatgggttaagaaccctcgccaataaatctctaatacatatatctaggaatgagaaaatagtgatgcataacttactacaacatgtgggtagacaagccattcaaagacaagaaccttggaaacgccacatcttaatagatgctgacgagatatgcaatgtccttgaaaatgatacagatgctagaattgtgtcagggatatcatttgatatatccagaatcggcgaagtttttttaagcgagagagcttttaaaagattgtgtaatctccaattcctcagggtgtttaagactggatatgatgaaaaaaacagagtgcgcataccggagaacatggagtttccacctcgtctaaggttactacagtgggaagcatatccgaggagaagtctttctcttaaacttaacctggaatatcttgtcgaacttgatatggaaggtagcctgctcgagaagctatgggatggaactcagccccttgcaaatctcaagaagatgtctttgtcaagttcatggtatttaaagaaacttccggatctgtcaaatgctacaaatctcgaagaattggatctgagagcttgccagaatttagtagagcttccttcctccttttcttatctgcataagctaaagtatttgaatatgatgggatgcagaaggctaaaagaagttccacctcatatcaacttgaagtctcttgaattggtcaacatgtatggatgctcaagattaaaaagctttccagatatttctacaaacatcagttcactcgacatatcatacactgatgtggaagaactacctgaatcaatgacgatgtggtctcgcctacgtactctcgaaatatacaaaagtagaaacctcaagatagtaacacatgtgcccctaaacctaacatatctagacctcagcgagactagaattgagaagattccagatgacatcaaaaatgttcatgggctgcaaattttatttctaggtggctgcagaaaactcgcatcattgccagagcttcctggttcgctcttgtacttatcagcaaacgagtgtgaatcacttgagagcgtatcttgcccttttaatacttcatacatggaactcagcttcaccaactgcttcaaactaaaccaagaagcacgcagaggaattattcaacaatcattttctcatgggtgggcatccttacctggaagagagttgcccactgacttataccaccgatctaccggacattccatcaccgttcgtctcgagggcaagactcctttttctgcattctttggatttaaggttttcctcgtgatttcccctaaccatgatgctgaagaaactagcaattctcccttattttgtcctcgcattggcaaaatcggttgctccgatgacgaaacacctatttatattatccccaaacctcgagcagaacatctagttatgtttcactctgacttgcataacaaggaaaaatgtcatgaagtaggcaacgagatactgtttgaattcagcaacatatccgacacctatgagattattgagtgtgattctatacagatgaacagtctctgtctcactcgccggagtttcggtcactgcgccatctccggggtcgagttcgtcgtacttcatcgaactatgaactctcatgatatcgatgatcagttagaagcagatgtatacagtaacttgccttctcgaaatgattcttcaacagggaggagaaatcgaaactcgtgtagatcgaaacactcagagactgagcaacgaagaagaagcaaaatcaatgaaagatttcagagtttaatggatattatacctcagaatcagaatgatcagaaacgagataaagcttctttcttgttggaggttatagagtatattcactttcttcaagaaaaagttcacatgtatgaagattctcaccaaatgtggtatcaatccccaaccaaattgattccttggagaaatagtcatgggtctgttgcggaggaaaatgaccatcctcaaatcgttaaaagcttttcaagtaatgataaagttgctgcttcttcgggttttctcttggatacgtacaattcagtaaatcctgatattgactcagcagttagcaccaagattcctgaacacagtcctgtttcagcagtttcatcgtatctacgtaccgagccttcgctgcagtttgttcagcatgacttttggcaaccaaaaacaagttgtggaacaattaactgttttacaaatgaattgttaacatctgacgaaaaaacatcagccagcttgtccactgtctgctcacaaagggtacttaacactctaactgaagcacttaagtcatcgggtgttaacatgtcagagaccatgatatctgtgcagttaagccttcggaaaagagaagatcgcgagtattctgttgctgcgtttgcttctgaggataatggtaatagcatcgctgatgaagaaggggactctcctactgaaactagaagcttctgcaatgatattgatcattcccagaagagaataagacgataa

SEQ ID NO: 75880 - protein, 1295 aa, Arabidopsis thaliana
  peptide (1)..(1295): Ceres Seq. ID no. 6458470
MASARTWRYNVFPSFHGGDIRKTFLSHLRKQFNSNGITMFDDQGIERSQTIAPALIQAIRESRISIVVLSKNYASSSWCLNELVEILKCKDVVMPIFYEVDPSDVRKQTGDFGKAFKNSCKSKTKEERQRWIQALIFVGNIAGEHSLKWENEADMIEKIAKDVSDKLNATPSKDFDAFVGLEFHIRELSSLLYLDYEQVRIVGICGPAGIGKTTIARALQSLLSSNFQRSCFMENVRGSLNIGLDEYGLKLDLQERLLSKIMNQKGMRIEHLGTIRDRLHDQKVLIILDDVNDLDLYALADQTTWFGPGSRIIVTTEDNELLQKHDINNVYHVDFPSRKEALEIFCRCAFRQSSAPDTILKLAERVTELCGNLPLGLCVIGSSLHGKTEDEWEILIRRLEISLDRDNEAQLRVGYDSLHENEQALFLSIAVFFNYKDRQLVMAMLLDSNLDVEYGLRTLANKSLIHISRNEKIVMHNLLQHVGRQAIQRQEPWKRHILIDADEICNVLENDTDARIVSGISFDISRIGEVFLSERAFKRLCNLQFLRVFKTGYDEKNRVRIPENMEFPPRLRLLQWEAYPRRSLSLKLNLEYLVELDMEGSLLEKLWDGTQPLANLKKMSLSSSWYLKKLPDLSNATNLEELDLRACQNLVELPSSFSYLHKLKYLNMMGCRRLKEVPPHINLKSLELVNMYGCSRLKSFPDISTNISSLDISYTDVEELPESMTMWSRLRTLEIYKSRNLKIVTHVPLNLTYLDLSETRIEKIPDDIKNVHGLQILFLGGCRKLASLPELPGSLLYLSANECESLESVSCPFNTSYMELSFTNCFKLNQEARRGIIQQSFSHGWASLPGRELPTDLYHRSTGHSITVRLEGKTPFSAFFGFKVFLVISPNHDAEETSNSPLFCPRIGKIGCSDDETPIYIIPKPRAEHLVMFHSDLHNKEKCHEVGNEILFEFSNISDTYEIIECDSIQMNSLCLTRRSFGHCAISGVEFVVLHRTMNSHDIDDQLEADVYSNLPSRNDSSTGRRNRNSCRSKHSETEQRRRSKINERFQSLMDIIPQNQNDQKRDKASFLLEVIEYIHFLQEKVHMYEDSHQMWYQSPTKLIPWRNSHGSVAEENDHPQIVKSFSSNDKVAASSGFLLDTYNSVNPDIDSAVSTKIPEHSPVSAVSSYLRTEPSLQFVQHDFWQPKTSCGTINCFTNELLTSDEKTSASLSTVCSQRVLNTLTEALKSSGVNMSETMISVQLSLRKREDREYSVAAFASEDNGNSIADEEGDSPTETRSFCNDIDHSQKRIRR

SEQ ID NO: 75881 - protein, 1257 aa, Arabidopsis thaliana
  peptide (1)..(1257): Ceres Seq. ID no. 6458471
MFDDQGIERSQTIAPALIQAIRESRISIVVLSKNYASSSWCLNELVEILKCKDVVMPIFYEVDPSDVRKQTGDFGKAFKNSCKSKTKEERQRWIQALIFVGNIAGEHSLKWENEADMIEKIAKDVSDKLNATPSKDFDAFVGLEFHIRELSSLLYLDYEQVRIVGICGPAGIGKTTIARALQSLLSSNFQRSCFMENVRGSLNIGLDEYGLKLDLQERLLSKIMNQKGMRIEHLGTIRDRLHDQKVLIILDDVNDLDLYALADQTTWFGPGSRIIVTTEDNELLQKHDINNVYHVDFPSRKEALEIFCRCAFRQSSAPDTILKLAERVTELCGNLPLGLCVIGSSLHGKTEDEWEILIRRLEISLDRDNEAQLRVGYDSLHENEQALFLSIAVFFNYKDRQLVMAMLLDSNLDVEYGLRTLANKSLIHISRNEKIVMHNLLQHVGRQAIQRQEPWKRHILIDADEICNVLENDTDARIVSGISFDISRIGEVFLSERAFKRLCNLQFLRVFKTGYDEKNRVRIPENMEFPPRLRLLQWEAYPRRSLSLKLNLEYLVELDMEGSLLEKLWDGTQPLANLKKMSLSSSWYLKKLPDLSNATNLEELDLRACQNLVELPSSFSYLHKLKYLNMMGCRRLKEVPPHINLKSLELVNMYGCSRLKSFPDISTNISSLDISYTDVEELPESMTMWSRLRTLEIYKSRNLKIVTHVPLNLTYLDLSETRIEKIPDDIKNVHGLQILFLGGCRKLASLPELPGSLLYLSANECESLESVSCPFNTSYMELSFTNCFKLNQEARRGIIQQSFSHGWASLPGRELPTDLYHRSTGHSITVRLEGKTPFSAFFGFKVFLVISPNHDAEETSNSPLFCPRIGKIGCSDDETPIYIIPKPRAEHLVMFHSDLHNKEKCHEVGNEILFEFSNISDTYEIIECDSIQMNSLCLTRRSFGHCAISGVEFVVLHRTMNSHDIDDQLEADVYSNLPSRNDSSTGRRNRNSCRSKHSETEQRRRSKINERFQSLMDIIPQNQNDQKRDKASFLLEVIEYIHFLQEKVHMYEDSHQMWYQSPTKLIPWRNSHGSVAEENDHPQIVKSFSSNDKVAASSGFLLDTYNSVNPDIDSAVSTKIPEHSPVSAVSSYLRTEPSLQFVQHDFWQPKTSCGTINCFTNELLTSDEKTSASLSTVCSQRVLNTLTEALKSSGVNMSETMISVQLSLRKREDREYSVAAFASEDNGNSIADEEGDSPTETRSFCNDIDHSQKRIRR

SEQ ID NO: 75882 - protein, 1202 aa, Arabidopsis thaliana
  peptide (1)..(1202): Ceres Seq. ID no. 6458472
MPIFYEVDPSDVRKQTGDFGKAFKNSCKSKTKEERQRWIQALIFVGNIAGEHSLKWENEADMIEKIAKDVSDKLNATPSKDFDAFVGLEFHIRELSSLLYLDYEQVRIVGICGPAGIGKTTIARALQSLLSSNFQRSCFMENVRGSLNIGLDEYGLKLDLQERLLSKIMNQKGMRIEHLGTIRDRLHDQKVLIILDDVNDLDLYALADQTTWFGPGSRIIVTTEDNELLQKHDINNVYHVDFPSRKEALEIFCRCAFRQSSAPDTILKLAERVTELCGNLPLGLCVIGSSLHGKTEDEWEILIRRLEISLDRDNEAQLRVGYDSLHENEQALFLSIAVFFNYKDRQLVMAMLLDSNLDVEYGLRTLANKSLIHISRNEKIVMHNLLQHVGRQAIQRQEPWKRHILIDADEICNVLENDTDARIVSGISFDISRIGEVFLSERAFKRLCNLQFLRVFKTGYDEKNRVRIPENMEFPPRLRLLQWEAYPRRSLSLKLNLEYLVELDMEGSLLEKLWDGTQPLANLKKMSLSSSWYLKKLPDLSNATNLEELDLRACQNLVELPSSFSYLHKLKYLNMMGCRRLKEVPPHINLKSLELVNMYGCSRLKSFPDISTNISSLDISYTDVEELPESMTMWSRLRTLEIYKSRNLKIVTHVPLNLTYLDLSETRIEKIPDDIKNVHGLQILFLGGCRKLASLPELPGSLLYLSANECESLESVSCPFNTSYMELSFTNCFKLNQEARRGIIQQSFSHGWASLPGRELPTDLYHRSTGHSITVRLEGKTPFSAFFGFKVFLVISPNHDAEETSNSPLFCPRIGKIGCSDDETPIYIIPKPRAEHLVMFHSDLHNKEKCHEVGNEILFEFSNISDTYEIIECDSIQMNSLCLTRRSFGHCAISGVEFVVLHRTMNSHDIDDQLEADVYSNLPSRNDSSTGRRNRNSCRSKHSETEQRRRSKINERFQSLMDIIPQNQNDQKRDKASFLLEVIEYIHFLQEKVHMYEDSHQMWYQSPTKLIPWRNSHGSVAEENDHPQIVKSFSSNDKVAASSGFLLDTYNSVNPDIDSAVSTKIPEHSPVSAVSSYLRTEPSLQFVQHDFWQPKTSCGTINCFTNELLTSDEKTSASLSTVCSQRVLNTLTEALKSSGVNMSETMISVQLSLRKREDREYSVAAFASEDNGNSIADEEGDSPTETRSFCNDIDHSQKRIRR

SEQ ID NO: 75883 - DNA, 651 bp, Arabidopsis thaliana
  misc_feature (1)..(651): Ceres Seq. ID no. 6458726
  misc_feature (1)..(651): Ortholog of  Ceres SEQ ID NO 13598589 as cited in SEQ ID NO 65254
atggatccgcaactaatggaggtttcacagcagttcgagaggtttaaagctgcgtttataataaaagatttcgatacctgttccagtctcttgtctcagcttaaggtactgtttccttttagccctaattcaatgaatcgtattccgccatctccgcaagagaatctaatcatggggttgaacctactgagactgcttgttcagaacagaatagctgaattccacacagaactgggattactttcatctgcaaccttggagaatccttgcatcaagcatgcggtggagctcgagcaatccttcatggaaggtgcttataaccgtgtgttgagtgctagacaaaccgcacctgatgagacttacgtctatttcatggatctcttggcaaaaaccattagagatgaaatagctggatgcagtgagaaagcatacgatcatctctcaatcagtgaaggttgtaagatgttactcttctcgtctgatcaacaactgttaacatatgtgaacgaggagcacccggagtgggaagttaaagacgggttagttgtcttccaaaaaaccagagaaaccgcaccgtgcaaggagataccgtcacttcaactcatcaaccagactctcagttacaccagagagctcgagcgtatcttgtaa

SEQ ID NO: 75884 - protein, 216 aa, Arabidopsis thaliana
  peptide (1)..(216): Ceres Seq. ID no. 6458727
MDPQLMEVSQQFERFKAAFIIKDFDTCSSLLSQLKVLFPFSPNSMNRIPPSPQENLIMGLNLLRLLVQNRIAEFHTELGLLSSATLENPCIKHAVELEQSFMEGAYNRVLSARQTAPDETYVYFMDLLAKTIRDEIAGCSEKAYDHLSISEGCKMLLFSSDQQLLTYVNEEHPEWEVKDGLVVFQKTRETAPCKEIPSLQLINQTLSYTRELERIL

SEQ ID NO: 75885 - protein, 211 aa, Arabidopsis thaliana
  peptide (1)..(211): Ceres Seq. ID no. 6458728
MEVSQQFERFKAAFIIKDFDTCSSLLSQLKVLFPFSPNSMNRIPPSPQENLIMGLNLLRLLVQNRIAEFHTELGLLSSATLENPCIKHAVELEQSFMEGAYNRVLSARQTAPDETYVYFMDLLAKTIRDEIAGCSEKAYDHLSISEGCKMLLFSSDQQLLTYVNEEHPEWEVKDGLVVFQKTRETAPCKEIPSLQLINQTLSYTRELERIL

SEQ ID NO: 75886 - protein, 172 aa, Arabidopsis thaliana
  peptide (1)..(172): Ceres Seq. ID no. 6458729
MNRIPPSPQENLIMGLNLLRLLVQNRIAEFHTELGLLSSATLENPCIKHAVELEQSFMEGAYNRVLSARQTAPDETYVYFMDLLAKTIRDEIAGCSEKAYDHLSISEGCKMLLFSSDQQLLTYVNEEHPEWEVKDGLVVFQKTRETAPCKEIPSLQLINQTLSYTRELERIL

SEQ ID NO: 75887 - DNA, 366 bp, Arabidopsis thaliana
  misc_feature (1)..(366): Ceres Seq. ID no. 6458756
  misc_feature (1)..(366): Ortholog of  Ceres SEQ ID NO 13645078 as cited in SEQ ID NO 51158
atgtctcacaggaagtttgagcatccaagacatggttctcttggtttcttaccaaggaagagagctaatcaggaaagggtatgtctttttttcaaacttaggactgagaaggaaataactccaatgggaggattcgcacattacggtatagtgaaggatgactacttgatgattaagggttgctgcatgggtccaaagaagagagttgtgactcttcgtcagtcactgctaaggcagacttctcgtcttgcgatggaggtgattaatctcaagttcgtcgatacctcatcgaaggggggacatggtcacttccagaccagcgaggaaaaggccaagtattttggtcgtgctgcaagaaaggcttaa

SEQ ID NO: 75888 - protein, 121 aa, Arabidopsis thaliana
  peptide (1)..(121): Ceres Seq. ID no. 6458757
MSHRKFEHPRHGSLGFLPRKRANQERVCLFFKLRTEKEITPMGGFAHYGIVKDDYLMIKGCCMGPKKRVVTLRQSLLRQTSRLAMEVINLKFVDTSSKGGHGHFQTSEEKAKYFGRAARKA

SEQ ID NO: 75889 - protein, 80 aa, Arabidopsis thaliana
  peptide (1)..(80): Ceres Seq. ID no. 6458758
MGGFAHYGIVKDDYLMIKGCCMGPKKRVVTLRQSLLRQTSRLAMEVINLKFVDTSSKGGHGHFQTSEEKAKYFGRAARKA

SEQ ID NO: 75890 - protein, 65 aa, Arabidopsis thaliana
  peptide (1)..(65): Ceres Seq. ID no. 6458759
MIKGCCMGPKKRVVTLRQSLLRQTSRLAMEVINLKFVDTSSKGGHGHFQTSEEKAKYFGRAARKA

SEQ ID NO: 75891 - DNA, 1797 bp, Arabidopsis thaliana
  misc_feature (1)..(1797): Ceres Seq. ID no. 6459359
  misc_feature (1)..(1797): Ortholog of  Ceres SEQ ID NO 12607856 as cited in SEQ ID NO 55419
atgggtggttttgatttgaataaagacggtaacaagcagagaagaaacggagattcttggcattgcctggattctcataaacatggccgctctaaaagtgcgtcgtcagagcgggatcttcacacttctggtaatggagcttcacaatctgcaaacaacttcactagaatgcaagcatcctctgttcaaacaacagcaaacaagagaccaaaaccactgcataattgtcagatgttaactaaaaacaatgtgtcttctaacgacagagcatccttggaacgcgatgttgagcagcttcaccttcgtcttcaacaggagaaatctatgagaatggtgttagagagagcaatgggccgtgcttcgagcagtttgtctccagggcacagacattttgctggtcaggcaaatgaacttatcacggagattgagttgcttgaagcagaggtcacgaatcgcgagcatcatgtgctttctctatatcgaagtatatttgaacagacagtaagcagagcaccttccgaacaaagctcaagcatttcttctccagctcatcatataaagcagccaccaagaaaacaagacccaaatgttatttcaaatgcattttgttcctccaataatttccctctaaagccgtggcatgctatggttactcttaaagattcgagtagaaaaacttccaaaaaggaccaatcttctcagttccagttcagaaactgtattccttcaacaacaagttgctcaagtcaagcaaaatcccacttcttaaaggattcagtaacagtgaagtctccatctcagagaactcttaaggatcatttgtaccaatgcccaaacaagttgtctgaagatatggtcaagtgtatgtcttcagtgtacttctggctctgctgcagtgccatgtcagcagatcctgaaaagagaatcctatcaagatcatctactagcaatgtgatcatccccaagaacattatgaatgaagacagagcttggtcctgcagatccatggtggaagtatcttggatctcatcagacaagaaaagattttctcaagtaacgtatgctatcaacaactataggctccttgttgaacaactagagagagttactataaatcaaatggaaggcaatgcaaagttagccttttggatcaacatatacaatgctctcctcatgcatgcatacttagcatatggtgtacctgctcattccctcagaaggttagctttgtttcacaagtctgcgtataatatcggtgggcacatcatcaatgcaaacaccattgaatactctatcttctgcttccagactccacggaatggacgttggcttgagaccattatttccaccgccttgaggaagaaaccagctgaagataaagtaaagtcaatgtttagccttgacaaaccagagccacttgtctgttttgctctttgcattggtgctctatcagatccagtgctaaaagcctacactgcatcaaacgttaaagaggaattagatgcttcaaaaagagagtttcttggagcaaacgtggttgtaaagatgcagaagaaagtgttattacctaagattatagagaggtttacaaaggaagcttctctgagctttgatgacctgatgagatggttaatagataacgcagacgaaaagcttggagaatcaatacaaaaatgcgtacaaggcaaaccaaacaacaagaaagcatcgcaggtcgtcgaatggttgccatacagttcaaaattccgttatgttttctccaaggacttgatggagaaaaagccctggtgggtttag

SEQ ID NO: 75892 - protein, 598 aa, Arabidopsis thaliana
  peptide (1)..(598): Ceres Seq. ID no. 6459360
MGGFDLNKDGNKQRRNGDSWHCLDSHKHGRSKSASSERDLHTSGNGASQSANNFTRMQASSVQTTANKRPKPLHNCQMLTKNNVSSNDRASLERDVEQLHLRLQQEKSMRMVLERAMGRASSSLSPGHRHFAGQANELITEIELLEAEVTNREHHVLSLYRSIFEQTVSRAPSEQSSSISSPAHHIKQPPRKQDPNVISNAFCSSNNFPLKPWHAMVTLKDSSRKTSKKDQSSQFQFRNCIPSTTSCSSQAKSHFLKDSVTVKSPSQRTLKDHLYQCPNKLSEDMVKCMSSVYFWLCCSAMSADPEKRILSRSSTSNVIIPKNIMNEDRAWSCRSMVEVSWISSDKKRFSQVTYAINNYRLLVEQLERVTINQMEGNAKLAFWINIYNALLMHAYLAYGVPAHSLRRLALFHKSAYNIGGHIINANTIEYSIFCFQTPRNGRWLETIISTALRKKPAEDKVKSMFSLDKPEPLVCFALCIGALSDPVLKAYTASNVKEELDASKREFLGANVVVKMQKKVLLPKIIERFTKEASLSFDDLMRWLIDNADEKLGESIQKCVQGKPNNKKASQVVEWLPYSSKFRYVFSKDLMEKKPWWV

SEQ ID NO: 75893 - protein, 542 aa, Arabidopsis thaliana
  peptide (1)..(542): Ceres Seq. ID no. 6459361
MQASSVQTTANKRPKPLHNCQMLTKNNVSSNDRASLERDVEQLHLRLQQEKSMRMVLERAMGRASSSLSPGHRHFAGQANELITEIELLEAEVTNREHHVLSLYRSIFEQTVSRAPSEQSSSISSPAHHIKQPPRKQDPNVISNAFCSSNNFPLKPWHAMVTLKDSSRKTSKKDQSSQFQFRNCIPSTTSCSSQAKSHFLKDSVTVKSPSQRTLKDHLYQCPNKLSEDMVKCMSSVYFWLCCSAMSADPEKRILSRSSTSNVIIPKNIMNEDRAWSCRSMVEVSWISSDKKRFSQVTYAINNYRLLVEQLERVTINQMEGNAKLAFWINIYNALLMHAYLAYGVPAHSLRRLALFHKSAYNIGGHIINANTIEYSIFCFQTPRNGRWLETIISTALRKKPAEDKVKSMFSLDKPEPLVCFALCIGALSDPVLKAYTASNVKEELDASKREFLGANVVVKMQKKVLLPKIIERFTKEASLSFDDLMRWLIDNADEKLGESIQKCVQGKPNNKKASQVVEWLPYSSKFRYVFSKDLMEKKPWWV

SEQ ID NO: 75894 - protein, 521 aa, Arabidopsis thaliana
  peptide (1)..(521): Ceres Seq. ID no. 6459362
MLTKNNVSSNDRASLERDVEQLHLRLQQEKSMRMVLERAMGRASSSLSPGHRHFAGQANELITEIELLEAEVTNREHHVLSLYRSIFEQTVSRAPSEQSSSISSPAHHIKQPPRKQDPNVISNAFCSSNNFPLKPWHAMVTLKDSSRKTSKKDQSSQFQFRNCIPSTTSCSSQAKSHFLKDSVTVKSPSQRTLKDHLYQCPNKLSEDMVKCMSSVYFWLCCSAMSADPEKRILSRSSTSNVIIPKNIMNEDRAWSCRSMVEVSWISSDKKRFSQVTYAINNYRLLVEQLERVTINQMEGNAKLAFWINIYNALLMHAYLAYGVPAHSLRRLALFHKSAYNIGGHIINANTIEYSIFCFQTPRNGRWLETIISTALRKKPAEDKVKSMFSLDKPEPLVCFALCIGALSDPVLKAYTASNVKEELDASKREFLGANVVVKMQKKVLLPKIIERFTKEASLSFDDLMRWLIDNADEKLGESIQKCVQGKPNNKKASQVVEWLPYSSKFRYVFSKDLMEKKPWWV

SEQ ID NO: 75895 - DNA, 1218 bp, Arabidopsis thaliana
  misc_feature (1)..(1218): Ceres Seq. ID no. 6459397
  misc_feature (1)..(1218): Ortholog of  Ceres SEQ ID NO 13599602 as cited in SEQ ID NO 0
atggctccgcctgtctctgatgattccctacagcctcgagatgtttgtgttgtgggagtggcgcgaacgcctataggggacttccttggctccctctcgtctttgactgctacaagacttgggtccatagccatccaagccgcacttaagagagcacatgttgatccggcccttgtggaagaggtcttctttggcaatgtcttaactgccaatcttgggcaagcaccagcaagacaggctgcacttggtgctgggattccctattctgtgatctgcaccactatcaacaaagtttgtgctgcaggaatgaaatctgtaatgctagcgtctcaaagtatccagctcggcttgaatgatattgttgttgctggtgggatggagagcatgtcaaacgtacctaagtacctcccggacgcaagaaggggttctcgattaggtcatgatactgttgttgatggtatgatgaaagatggactttgggatgtctataatgactttggaatgggagtttgtggagaaatatgcgctgaccagtaccgtattacaagagaagaacaggatgcttatgctatccagagctttgagcgtggtattgctgcgcaaaacactcagttgttcgcttgggaaattgttccggtcgaagtttccactggaagagggaggccttcagttgttattgacaaggatgaaggattggggaagtttgatgcagccaagttaaaaaagcttagaccaagtttcaaggaggatgggggatcagtcactgctggaaatgcatcaagcataagtgatggtgcggcagcgttagtgctagtgagtggagagaaggctcttgagcttggactgcatgttatcgctaagattagaggatacgctgatgctgctcaggcaccagagttattcacaaccacgccagctcttgctattcctaaagctataaagcgggctggtttggatgcatctcaagtggattattatgaaataaacgaagcattttctgtggtagctctagccaatcagaaactactgggattagatcctgaacggctcaatgcgcatggaggggctgtttcactgggacatccattgggctgtagcggtgctcgtatcttggtcacattattgggggtgttgagagcaaagaagggaaagtatggagtggcatcaatatgcaacggaggaggaggagcatcagcacttgtccttgagttcatgtaa

SEQ ID NO: 75896 - protein, 405 aa, Arabidopsis thaliana
  peptide (1)..(405): Ceres Seq. ID no. 6459398
MAPPVSDDSLQPRDVCVVGVARTPIGDFLGSLSSLTATRLGSIAIQAALKRAHVDPALVEEVFFGNVLTANLGQAPARQAALGAGIPYSVICTTINKVCAAGMKSVMLASQSIQLGLNDIVVAGGMESMSNVPKYLPDARRGSRLGHDTVVDGMMKDGLWDVYNDFGMGVCGEICADQYRITREEQDAYAIQSFERGIAAQNTQLFAWEIVPVEVSTGRGRPSVVIDKDEGLGKFDAAKLKKLRPSFKEDGGSVTAGNASSISDGAAALVLVSGEKALELGLHVIAKIRGYADAAQAPELFTTTPALAIPKAIKRAGLDASQVDYYEINEAFSVVALANQKLLGLDPERLNAHGGAVSLGHPLGCSGARILVTLLGVLRAKKGKYGVASICNGGGGASALVLEFM

SEQ ID NO: 75897 - protein, 303 aa, Arabidopsis thaliana
  peptide (1)..(303): Ceres Seq. ID no. 6459399
MKSVMLASQSIQLGLNDIVVAGGMESMSNVPKYLPDARRGSRLGHDTVVDGMMKDGLWDVYNDFGMGVCGEICADQYRITREEQDAYAIQSFERGIAAQNTQLFAWEIVPVEVSTGRGRPSVVIDKDEGLGKFDAAKLKKLRPSFKEDGGSVTAGNASSISDGAAALVLVSGEKALELGLHVIAKIRGYADAAQAPELFTTTPALAIPKAIKRAGLDASQVDYYEINEAFSVVALANQKLLGLDPERLNAHGGAVSLGHPLGCSGARILVTLLGVLRAKKGKYGVASICNGGGGASALVLEFM

SEQ ID NO: 75898 - protein, 299 aa, Arabidopsis thaliana
  peptide (1)..(299): Ceres Seq. ID no. 6459400
MLASQSIQLGLNDIVVAGGMESMSNVPKYLPDARRGSRLGHDTVVDGMMKDGLWDVYNDFGMGVCGEICADQYRITREEQDAYAIQSFERGIAAQNTQLFAWEIVPVEVSTGRGRPSVVIDKDEGLGKFDAAKLKKLRPSFKEDGGSVTAGNASSISDGAAALVLVSGEKALELGLHVIAKIRGYADAAQAPELFTTTPALAIPKAIKRAGLDASQVDYYEINEAFSVVALANQKLLGLDPERLNAHGGAVSLGHPLGCSGARILVTLLGVLRAKKGKYGVASICNGGGGASALVLEFM

SEQ ID NO: 75899 - DNA, 837 bp, Arabidopsis thaliana
  misc_feature (1)..(837): Ceres Seq. ID no. 6459453
  misc_feature (1)..(837): Ortholog of  Ceres SEQ ID NO 14309248 as cited in SEQ ID NO 0
atggccacacaaagttgttacgtcactcgaaatcttaaatccgccgtcaaaaatgctattcagacgaagcagccaccaaccactactcgagccgccgtagatccagattccttaacagtagatgtcgccgtttgtgaagttttatctcttcagttacaattttctccaagcttctgcatggttcatcagatttgtgttgttgttctccgcagggcgatttcgcttctgattattcttaacagctttttatcgaacaagacgatcatttctgcttacgcttctgctggattcctgattagtctgtttcaaactgctgctattcttgaagttcttcatggagctattggaattgtcccgagtggattcttgtctccactgatgcaatggagtggaagaactcacttcatattggctattgttggacagatcaaggaggtccaggattcgccgtggctgtctataacacttgtggcttggtgtatcggtgagatgatcagatatcctcattatgcttttacttgcctcggtagatgtccctattggctaacctacctcaggtacacgggattcatcgtgatttatccaacgggactagtgggtgaattgttgatcatgtacaaagcacttccatatgttaaagaaaggaatctttacgctaatttcttctctgttttccccttcagttactacgatttcctttggcatttttggattctgtttcataaaaggtcaaccatgctgatctttccatgtcatttttattcaggccgtcctcttggtctacccattcctttggttgaagctttatctccagcttttcaaacaaagaaagtctaa

SEQ ID NO: 75900 - protein, 278 aa, Arabidopsis thaliana
  peptide (1)..(278): Ceres Seq. ID no. 6459454
MATQSCYVTRNLKSAVKNAIQTKQPPTTTRAAVDPDSLTVDVAVCEVLSLQLQFSPSFCMVHQICVVVLRRAISLLIILNSFLSNKTIISAYASAGFLISLFQTAAILEVLHGAIGIVPSGFLSPLMQWSGRTHFILAIVGQIKEVQDSPWLSITLVAWCIGEMIRYPHYAFTCLGRCPYWLTYLRYTGFIVIYPTGLVGELLIMYKALPYVKERNLYANFFSVFPFSYYDFLWHFWILFHKRSTMLIFPCHFYSGRPLGLPIPLVEALSPAFQTKKV

SEQ ID NO: 75901 - protein, 219 aa, Arabidopsis thaliana
  peptide (1)..(219): Ceres Seq. ID no. 6459455
MVHQICVVVLRRAISLLIILNSFLSNKTIISAYASAGFLISLFQTAAILEVLHGAIGIVPSGFLSPLMQWSGRTHFILAIVGQIKEVQDSPWLSITLVAWCIGEMIRYPHYAFTCLGRCPYWLTYLRYTGFIVIYPTGLVGELLIMYKALPYVKERNLYANFFSVFPFSYYDFLWHFWILFHKRSTMLIFPCHFYSGRPLGLPIPLVEALSPAFQTKKV

SEQ ID NO: 75902 - protein, 152 aa, Arabidopsis thaliana
  peptide (1)..(152): Ceres Seq. ID no. 6459456
MQWSGRTHFILAIVGQIKEVQDSPWLSITLVAWCIGEMIRYPHYAFTCLGRCPYWLTYLRYTGFIVIYPTGLVGELLIMYKALPYVKERNLYANFFSVFPFSYYDFLWHFWILFHKRSTMLIFPCHFYSGRPLGLPIPLVEALSPAFQTKKV

SEQ ID NO: 75903 - DNA, 2445 bp, Arabidopsis thaliana
  misc_feature (1)..(2445): Ceres Seq. ID no. 6459535
  misc_feature (1)..(2445): Ortholog of  Ceres SEQ ID NO 13655640 as cited in SEQ ID NO 63844
  misc_feature (1)..(2445): Ortholog of  Ceres SEQ ID NO 13584744 as cited in SEQ ID NO 69137
atggctccaggattggatctgatctggatggtaatctcctttcttcttctgattcatctgtcaagtcaacaagaaactggcttcagcttcaacggttttcgccagggagatcttcatgttgatggggttgctcaaatccttcccggtggacttctgcggctgactgacacttcagagcagaaaaagggtcatgctttcttcaggcagcccttagtgttcaattcatctgaacctctctcgttctcaacgcatttcgtgtgtgctatggtgcgtaaaccgggagttaccggtggaaatgggattgctttctttctatctccttccatggatcttacaaacgcagatgcaactcagtatttgggtcttttcaacaccacaaccaacaggtctccctcatctcatatctttgctattgagcttgatactgttcaaagtgcagaatttgatgacatcgataacaatcatgttggtatcgacgtgaacagcctaacctctgttgaatctgctccggcttcttacttttcagacaaaaaaggtctcaataagagcataagtctcttgagtggagattcaatccaggtctgggtggactttgatggaactgtactaaacgtttcattggcgcctctagggattcggaagccaagtcaaagtcttatatcaagatccatgaatctttcagaagttatccaggatagaatgtttgtcggattctctgcagcaacaggacaattggctaataaccattacatactcggttggagtttcagcagaagcaaggcatcgttacagagcctagacatctcaaaacttccccaagttcctcatcctaaaatgaaaacttctctcctgctgattcttctgttgattgtacttggaatcatactcttggtactcctggtaggagcttatctatacagaagaaacaagtatgcagaagtaagagaggaatgggaaaaagagtatggtccacaccgatactcttacaaatccctgtacaaagcaacaaaaggattccacaaagatggttttcttggtaaaggaggattcggagaagtctacaaaggaactctacctcaggaagacatagctgtgaaaagattttcccatcatggagaacgagggatgaagcaattcgtagctgaaattgcaagcatgggttgcttagaccacaggaacttggttccacttttcggatactgcaggcgaaaaggcgagtttcttctcgtctccaagtacatgcctaatggaagtcttgaccagttcttgtttcataacagagaaccatctcttacttggtccaaaaggctagggattctaaagggtatagcttcagctcttaaatacttacacacagaagctacacaagttgttctacacagagatatcaaagcttctaatgtaatgttagacacagacttcacaggaaagttaggagattttggtatggctaggtttcatgaccatggagcaaatccaacaacaacaggagctgttggaacagtaggatacatgggacctgagctaacatcaatgggagcttcaactaaaaccgatgtatacgcatttggtgcattgatccttgaagtaacttgtgggagaagacctgtagaacctaatctgccgattgagaaacagcttctggtgaaatgggtttgtgattgctggaaaaggaaagatttaatcagtgctcgagatcccaaactgagtggagaattgatacctcaaatcgagatggtattgaaattagggttgctttgcacgaatcttgtgccggaatcgagacctgacatggtaaaagttgtgcagtaccttgacagacaggtttcgttgccggatttctcaccagattcaccgggaattgggattgttactccggttttggtcggaggaagctccaccgtgatctctaacatttcttctccgtttcttctggaagaaaatcttaattttgctacaatggtgaaccatggaaagaaggaagcctggattatggctctggacaagttcggggatgcaaatgggttacggtttctttctaaggacatgtcttcttattctgcttatcttactggtaattatagcgctcatggttcttggagtaggatatctattcagaaaaaagacaagacatatgtagatgtaatagaggctttcatgcaaaaaagaagtagtagaggcatgagaggaggttcttcctggtggtcaaatcgcatggagcttgcaacaatggctgtttgcacagtaactgacatgtatgcctgtatgcttgagcaaacttttggaaaggaaactgtatctgagttcagcttagaaaatagggtcgctttgctcaaatcaaatggtgtgccagaactgaaagcctccatggaagaagtggtgcaatatcttgaagttggaacctggtcctattctctgctgattgttggaatcttccttcattag

SEQ ID NO: 75904 - protein, 814 aa, Arabidopsis thaliana
  peptide (1)..(814): Ceres Seq. ID no. 6459536
MAPGLDLIWMVISFLLLIHLSSQQETGFSFNGFRQGDLHVDGVAQILPGGLLRLTDTSEQKKGHAFFRQPLVFNSSEPLSFSTHFVCAMVRKPGVTGGNGIAFFLSPSMDLTNADATQYLGLFNTTTNRSPSSHIFAIELDTVQSAEFDDIDNNHVGIDVNSLTSVESAPASYFSDKKGLNKSISLLSGDSIQVWVDFDGTVLNVSLAPLGIRKPSQSLISRSMNLSEVIQDRMFVGFSAATGQLANNHYILGWSFSRSKASLQSLDISKLPQVPHPKMKTSLLLILLLIVLGIILLVLLVGAYLYRRNKYAEVREEWEKEYGPHRYSYKSLYKATKGFHKDGFLGKGGFGEVYKGTLPQEDIAVKRFSHHGERGMKQFVAEIASMGCLDHRNLVPLFGYCRRKGEFLLVSKYMPNGSLDQFLFHNREPSLTWSKRLGILKGIASALKYLHTEATQVVLHRDIKASNVMLDTDFTGKLGDFGMARFHDHGANPTTTGAVGTVGYMGPELTSMGASTKTDVYAFGALILEVTCGRRPVEPNLPIEKQLLVKWVCDCWKRKDLISARDPKLSGELIPQIEMVLKLGLLCTNLVPESRPDMVKVVQYLDRQVSLPDFSPDSPGIGIVTPVLVGGSSTVISNISSPFLLEENLNFATMVNHGKKEAWIMALDKFGDANGLRFLSKDMSSYSAYLTGNYSAHGSWSRISIQKKDKTYVDVIEAFMQKRSSRGMRGGSSWWSNRMELATMAVCTVTDMYACMLEQTFGKETVSEFSLENRVALLKSNGVPELKASMEEVVQYLEVGTWSYSLLIVGIFLH

SEQ ID NO: 75905 - protein, 805 aa, Arabidopsis thaliana
  peptide (1)..(805): Ceres Seq. ID no. 6459537
MVISFLLLIHLSSQQETGFSFNGFRQGDLHVDGVAQILPGGLLRLTDTSEQKKGHAFFRQPLVFNSSEPLSFSTHFVCAMVRKPGVTGGNGIAFFLSPSMDLTNADATQYLGLFNTTTNRSPSSHIFAIELDTVQSAEFDDIDNNHVGIDVNSLTSVESAPASYFSDKKGLNKSISLLSGDSIQVWVDFDGTVLNVSLAPLGIRKPSQSLISRSMNLSEVIQDRMFVGFSAATGQLANNHYILGWSFSRSKASLQSLDISKLPQVPHPKMKTSLLLILLLIVLGIILLVLLVGAYLYRRNKYAEVREEWEKEYGPHRYSYKSLYKATKGFHKDGFLGKGGFGEVYKGTLPQEDIAVKRFSHHGERGMKQFVAEIASMGCLDHRNLVPLFGYCRRKGEFLLVSKYMPNGSLDQFLFHNREPSLTWSKRLGILKGIASALKYLHTEATQVVLHRDIKASNVMLDTDFTGKLGDFGMARFHDHGANPTTTGAVGTVGYMGPELTSMGASTKTDVYAFGALILEVTCGRRPVEPNLPIEKQLLVKWVCDCWKRKDLISARDPKLSGELIPQIEMVLKLGLLCTNLVPESRPDMVKVVQYLDRQVSLPDFSPDSPGIGIVTPVLVGGSSTVISNISSPFLLEENLNFATMVNHGKKEAWIMALDKFGDANGLRFLSKDMSSYSAYLTGNYSAHGSWSRISIQKKDKTYVDVIEAFMQKRSSRGMRGGSSWWSNRMELATMAVCTVTDMYACMLEQTFGKETVSEFSLENRVALLKSNGVPELKASMEEVVQYLEVGTWSYSLLIVGIFLH

SEQ ID NO: 75906 - protein, 726 aa, Arabidopsis thaliana
  peptide (1)..(726): Ceres Seq. ID no. 6459538
MVRKPGVTGGNGIAFFLSPSMDLTNADATQYLGLFNTTTNRSPSSHIFAIELDTVQSAEFDDIDNNHVGIDVNSLTSVESAPASYFSDKKGLNKSISLLSGDSIQVWVDFDGTVLNVSLAPLGIRKPSQSLISRSMNLSEVIQDRMFVGFSAATGQLANNHYILGWSFSRSKASLQSLDISKLPQVPHPKMKTSLLLILLLIVLGIILLVLLVGAYLYRRNKYAEVREEWEKEYGPHRYSYKSLYKATKGFHKDGFLGKGGFGEVYKGTLPQEDIAVKRFSHHGERGMKQFVAEIASMGCLDHRNLVPLFGYCRRKGEFLLVSKYMPNGSLDQFLFHNREPSLTWSKRLGILKGIASALKYLHTEATQVVLHRDIKASNVMLDTDFTGKLGDFGMARFHDHGANPTTTGAVGTVGYMGPELTSMGASTKTDVYAFGALILEVTCGRRPVEPNLPIEKQLLVKWVCDCWKRKDLISARDPKLSGELIPQIEMVLKLGLLCTNLVPESRPDMVKVVQYLDRQVSLPDFSPDSPGIGIVTPVLVGGSSTVISNISSPFLLEENLNFATMVNHGKKEAWIMALDKFGDANGLRFLSKDMSSYSAYLTGNYSAHGSWSRISIQKKDKTYVDVIEAFMQKRSSRGMRGGSSWWSNRMELATMAVCTVTDMYACMLEQTFGKETVSEFSLENRVALLKSNGVPELKASMEEVVQYLEVGTWSYSLLIVGIFLH

SEQ ID NO: 75907 - DNA, 1176 bp, Arabidopsis thaliana
  misc_feature (1)..(1176): Ceres Seq. ID no. 6459576
  misc_feature (1)..(1176): Ortholog of  Ceres SEQ ID NO 13597393 as cited in SEQ ID NO 63453
atggcggctttacttctcctcaatcgtgtttctcgaagtactagctcaatctctctccaccgggtcgcaggaactctgggtttcaattccttcaatgctcaaattcacggtgacagaatctccggaacactctttcgagtgagatcattagctactcttgctgaaggagcttctcattttaatgagatggtatctgtgaatcagcggaagtattatcttctgggtggtaaaggaggtgttgggaaaacgagctgtgctgcttctcttgcggttaagtttgctagccacggtcatcctaccattgtggtttctactgaccctgctcactccttgagcgattctttttcccaggacttgtcaggaggagtcctaaagcccgttcaaggtgttgattctccacttcttgctcttgagatcacacctgagataatgaaggacgagataaaacgtcagacgggcgataaaagtgtgaaaaatatgatggatagcatggggctcggaatgtttgccggcgagttaggggacttaaatcttgaagatatgctcaacgctgcctctcctggtattgacgaaatagcagctatttccaaggttcttcaatttatggaggcaccagaatacagtaggttcactcgtatagtttttgatactgctcccacggggcatactctgcggcttctttccctcccagacttctatgattcatccattagcaaaataactaagctcaagaagaaaatcactgcagcagcttcagcctttaagttggtctttggcaaaaaagagatacaacaaaaagaacttcctaacgagttagatcaactgaaagagaggatggagaaagttcgaaatgttttccgtgatgtggacactaccgagtttgttattgtaaccatcccaacggttatggcaataaacgagtcttcaaggttacatgcatctttaagaaaagaaaatgtgccagtccaccggcttattgttaatcagcttctacctcaatctgaatccgattgcaaattttgctcaataagacgaaaggaacaaacgcgtgtgcttggacttattcagaatgatacagaactttcggggttaaaattgatccaatcgccattgctagacgcagagataagaggggttcccgcacttaagttcatgggtgatctcatttggaaataa

SEQ ID NO: 75908 - protein, 391 aa, Arabidopsis thaliana
  peptide (1)..(391): Ceres Seq. ID no. 6459577
MAALLLLNRVSRSTSSISLHRVAGTLGFNSFNAQIHGDRISGTLFRVRSLATLAEGASHFNEMVSVNQRKYYLLGGKGGVGKTSCAASLAVKFASHGHPTIVVSTDPAHSLSDSFSQDLSGGVLKPVQGVDSPLLALEITPEIMKDEIKRQTGDKSVKNMMDSMGLGMFAGELGDLNLEDMLNAASPGIDEIAAISKVLQFMEAPEYSRFTRIVFDTAPTGHTLRLLSLPDFYDSSISKITKLKKKITAAASAFKLVFGKKEIQQKELPNELDQLKERMEKVRNVFRDVDTTEFVIVTIPTVMAINESSRLHASLRKENVPVHRLIVNQLLPQSESDCKFCSIRRKEQTRVLGLIQNDTELSGLKLIQSPLLDAEIRGVPALKFMGDLIWK

SEQ ID NO: 75909 - protein, 329 aa, Arabidopsis thaliana
  peptide (1)..(329): Ceres Seq. ID no. 6459578
MVSVNQRKYYLLGGKGGVGKTSCAASLAVKFASHGHPTIVVSTDPAHSLSDSFSQDLSGGVLKPVQGVDSPLLALEITPEIMKDEIKRQTGDKSVKNMMDSMGLGMFAGELGDLNLEDMLNAASPGIDEIAAISKVLQFMEAPEYSRFTRIVFDTAPTGHTLRLLSLPDFYDSSISKITKLKKKITAAASAFKLVFGKKEIQQKELPNELDQLKERMEKVRNVFRDVDTTEFVIVTIPTVMAINESSRLHASLRKENVPVHRLIVNQLLPQSESDCKFCSIRRKEQTRVLGLIQNDTELSGLKLIQSPLLDAEIRGVPALKFMGDLIWK

SEQ ID NO: 75910 - protein, 248 aa, Arabidopsis thaliana
  peptide (1)..(248): Ceres Seq. ID no. 6459579
MKDEIKRQTGDKSVKNMMDSMGLGMFAGELGDLNLEDMLNAASPGIDEIAAISKVLQFMEAPEYSRFTRIVFDTAPTGHTLRLLSLPDFYDSSISKITKLKKKITAAASAFKLVFGKKEIQQKELPNELDQLKERMEKVRNVFRDVDTTEFVIVTIPTVMAINESSRLHASLRKENVPVHRLIVNQLLPQSESDCKFCSIRRKEQTRVLGLIQNDTELSGLKLIQSPLLDAEIRGVPALKFMGDLIWK

SEQ ID NO: 75911 - DNA, 1185 bp, Arabidopsis thaliana
  misc_feature (1)..(1185): Ceres Seq. ID no. 6459702
  misc_feature (1)..(1185): Ortholog of  Ceres SEQ ID NO 12586556 as cited in SEQ ID NO 64667
  misc_feature (1)..(1185): Ortholog of  Ceres SEQ ID NO 13660894 as cited in SEQ ID NO 67475
atgcgacgtcgctctgttcctccagatttccacactttccctttcgtattcaaggcttgtgcagcaaagaagaatggtgatcttacattagtcaagactctgcattgtcaagctttgagattcggattgttatctgatttgttcactttgaacactctgattcgtgtttactcattgattgctccaatcgatagtgccttgcaactgttcgacgaaaatcctcaaagagatgttgttacctacaatgtgttgatcgacgggttagtgaaggcacgtgagattgttcgtgcaagagagttgtttgattcaatgcccttacgtgatttggtttcgtggaatagtctcatttctggttatgcgcagatgaatcattgcagagaagcaatcaaactcttcgacgagatggttgctttgggtctaaaacccgataatgtcgccattgtttcaactctttcagcttgtgcacaatcaggggattggcaaaaagggaaagctattcatgattacacgaaaaggaagagacttttcattgattccttcttagctactggattggtggatttctatgcaaaatgtggtttcatcgatacagcgatggagatcttcgaattatgttcagataaaactttattcacatggaatgcaatgatcactggtcttgcaatgcacggtaacggtgagctaacggttgattacttccgtaagatggttagttctggaatcaaaccagacggagtaaccttcataagtgttttagtgggttgcagccattctggtctagttgatgaagccaggaacctttttgaccaaatgagatctttgtatgatgttaatagagagatgaagcattacgggtgtatggcggatttgcttggaagagcaggattgatcgaagaagcagcggaaatgatcgagcaaatgcctaaagatggaggaaacagagagaaactcttagcatggagcggtttgttaggcggatgcagaatccacgggaacatagagatcgcggagaaagccgcaaatcgagtcaaggcgttgagtcccgaagatggaggagtgtataaagttatggtggaaatgtatgcaaacgcagagagatgggaggaagtagttaaggttagagaaataatagacagagacaagaaagtgaagaagaatgttggatttagtaaagttttgtcatag

SEQ ID NO: 75912 - protein, 394 aa, Arabidopsis thaliana; identical to SEQ ID NO: 73358
  peptide (1)..(394): Ceres Seq. ID no. 6459703

SEQ ID NO: 75913 - protein, 291 aa, Arabidopsis thaliana; identical to SEQ ID NO: 73359
  peptide (1)..(291): Ceres Seq. ID no. 6459704

SEQ ID NO: 75914 - protein, 273 aa, Arabidopsis thaliana
  peptide (1)..(273): Ceres Seq. ID no. 6459705
MNHCREAIKLFDEMVALGLKPDNVAIVSTLSACAQSGDWQKGKAIHDYTKRKRLFIDSFLATGLVDFYAKCGFIDTAMEIFELCSDKTLFTWNAMITGLAMHGNGELTVDYFRKMVSSGIKPDGVTFISVLVGCSHSGLVDEARNLFDQMRSLYDVNREMKHYGCMADLLGRAGLIEEAAEMIEQMPKDGGNREKLLAWSGLLGGCRIHGNIEIAEKAANRVKALSPEDGGVYKVMVEMYANAERWEEVVKVREIIDRDKKVKKNVGFSKVLS

SEQ ID NO: 75915 - DNA, 1278 bp, Arabidopsis thaliana
  misc_feature (1)..(1278): Ceres Seq. ID no. 6459811
  misc_feature (1)..(1278): Ortholog of  Ceres SEQ ID NO 14313532 as cited in SEQ ID NO 20462
atgcatgggttcgatttcaaagagatccaggagaagatctccgatagctttcgtccatggcaacgctcttttcaattctgggttcgagctactaatatctacacaggctacaaggtgtttcaacttcgagtaagtttagtaaaagatgcaaagaagcaagaggaaatgtgggaaagacaacatgaacaagctgctgataagatttacttcatgtgctctgatcttggtggtttcttccttaagattgctcaacttttagcaaaacctgacatggcaccagctgcgtgggtgaaaaagcttgtcactttgtgtgatcaagctcctgcgacgccgtttgatgcgattcaacttgttctagagaaggagttaggtaaaagcattggtgaaatctttgaaacgtttgatgaaaagcctcttggttctgcttctattgctcaggttcatagagcaatagtaaagggtaacaagatgaatgttgttgtaaaggttcaacatcctggcattgaaagattgatgatgacagacataagaaacttgcaactattcgccttatacatgcagagaacagatatcaaatttgacctgcattccataacaaaggaaatggagaaacagattggttatgaatttgacttcaaaagggaggccaatgcaatggaaagaattcgatgttttctttatgagaacaacaaaaagtctcctgttttggtaccaagagttctgcgagatatggtgactaagagggttttggtgatggaatacattaatggaattccaatcctgagcattggtgatgagatggctaaaagagggataaatcctcatggtaagattgcagaggcagcaaagcacaatatacttaacagtttatcccgtgcgtatggccaaatgatactgaaaagtggtttctttcatgcggatccacatcctggaaatatcttgatttgcaaaggtcaagaggcaagtcatattttgcttgttgcattgctggactatggtcaagtgaaggaactacccaacaagttgagacttggttatgcaaatttggtcattgccatggctgataacaatgcttcacgagtatcacagagcttttgggaaatgggtttacatacagtggccaagtgtgagaatgagcagcaagaacttctgcggttagcacaaacactttttgatacaaagatgcctactggtcagacagttttacaacctttctcagatgactcttcgattaaaaagatagccgttgaggtaataatatataccaaactaacttga

SEQ ID NO: 75916 - protein, 425 aa, Arabidopsis thaliana
  peptide (1)..(425): Ceres Seq. ID no. 6459812
MHGFDFKEIQEKISDSFRPWQRSFQFWVRATNIYTGYKVFQLRVSLVKDAKKQEEMWERQHEQAADKIYFMCSDLGGFFLKIAQLLAKPDMAPAAWVKKLVTLCDQAPATPFDAIQLVLEKELGKSIGEIFETFDEKPLGSASIAQVHRAIVKGNKMNVVVKVQHPGIERLMMTDIRNLQLFALYMQRTDIKFDLHSITKEMEKQIGYEFDFKREANAMERIRCFLYENNKKSPVLVPRVLRDMVTKRVLVMEYINGIPILSIGDEMAKRGINPHGKIAEAAKHNILNSLSRAYGQMILKSGFFHADPHPGNILICKGQEASHILLVALLDYGQVKELPNKLRLGYANLVIAMADNNASRVSQSFWEMGLHTVAKCENEQQELLRLAQTLFDTKMPTGQTVLQPFSDDSSIKKIAVEVIIYTKLT

SEQ ID NO: 75917 - protein, 370 aa, Arabidopsis thaliana
  peptide (1)..(370): Ceres Seq. ID no. 6459813
MWERQHEQAADKIYFMCSDLGGFFLKIAQLLAKPDMAPAAWVKKLVTLCDQAPATPFDAIQLVLEKELGKSIGEIFETFDEKPLGSASIAQVHRAIVKGNKMNVVVKVQHPGIERLMMTDIRNLQLFALYMQRTDIKFDLHSITKEMEKQIGYEFDFKREANAMERIRCFLYENNKKSPVLVPRVLRDMVTKRVLVMEYINGIPILSIGDEMAKRGINPHGKIAEAAKHNILNSLSRAYGQMILKSGFFHADPHPGNILICKGQEASHILLVALLDYGQVKELPNKLRLGYANLVIAMADNNASRVSQSFWEMGLHTVAKCENEQQELLRLAQTLFDTKMPTGQTVLQPFSDDSSIKKIAVEVIIYTKLT

SEQ ID NO: 75918 - protein, 355 aa, Arabidopsis thaliana
  peptide (1)..(355): Ceres Seq. ID no. 6459814
MCSDLGGFFLKIAQLLAKPDMAPAAWVKKLVTLCDQAPATPFDAIQLVLEKELGKSIGEIFETFDEKPLGSASIAQVHRAIVKGNKMNVVVKVQHPGIERLMMTDIRNLQLFALYMQRTDIKFDLHSITKEMEKQIGYEFDFKREANAMERIRCFLYENNKKSPVLVPRVLRDMVTKRVLVMEYINGIPILSIGDEMAKRGINPHGKIAEAAKHNILNSLSRAYGQMILKSGFFHADPHPGNILICKGQEASHILLVALLDYGQVKELPNKLRLGYANLVIAMADNNASRVSQSFWEMGLHTVAKCENEQQELLRLAQTLFDTKMPTGQTVLQPFSDDSSIKKIAVEVIIYTKLT

SEQ ID NO: 75919 - DNA, 570 bp, Arabidopsis thaliana
  misc_feature (1)..(570): Ceres Seq. ID no. 6459842
  misc_feature (1)..(570): Ortholog of  Ceres SEQ ID NO 14302840 as cited in SEQ ID NO 62295
  misc_feature (1)..(570): Ortholog of  Ceres SEQ ID NO 13596892 as cited in SEQ ID NO 62900
atggacatcaacttttggggatctgtgtattgcacattttttgcttctccatacctaaagaagtttagaggaaggattgtggtgattgcttctggatgtggatacattgcttcacctagactaagcttttactgtgcgagtaaagctgctgtgatcgccttttatgaaacactaagaactgagtttggatcagatattggggttaccattgtagcaccggggatcgtcgattcggaaatgagccgaggcaagttcatgacaaaggacggtaaacttgtcgtcgataaagagctcagagatgtgcaaatgagcgtattgccagtagaatcagccgagaggtgtgcgaaagcaataatgcggagcgtatgtagaggagataggtacttgttggaacccgactggataggttgtgtcatattgttgaaggttttttgttctgaggcaacagagtgggtagcccggtggctgctgatagccagaccaaaatttccaatgatggaggctcttagcaacaagatccttgatgtagcccatgcctttaattctttcttctcttttcctcattattag

SEQ ID NO: 75920 - protein, 189 aa, Arabidopsis thaliana; identical to SEQ ID NO: 73677
  peptide (1)..(189): Ceres Seq. ID no. 6459843

SEQ ID NO: 75921 - protein, 110 aa, Arabidopsis thaliana
  peptide (1)..(110): Ceres Seq. ID no. 6459844
MSRGKFMTKDGKLVVDKELRDVQMSVLPVESAERCAKAIMRSVCRGDRYLLEPDWIGCVILLKVFCSEATEWVARWLLIARPKFPMMEALSNKILDVAHAFNSFFSFPHY

SEQ ID NO: 75922 - protein, 104 aa, Arabidopsis thaliana
  peptide (1)..(104): Ceres Seq. ID no. 6459845
MTKDGKLVVDKELRDVQMSVLPVESAERCAKAIMRSVCRGDRYLLEPDWIGCVILLKVFCSEATEWVARWLLIARPKFPMMEALSNKILDVAHAFNSFFSFPHY

SEQ ID NO: 75923 - DNA, 603 bp, Arabidopsis thaliana
  misc_feature (1)..(603): Ceres Seq. ID no. 6459877
  misc_feature (1)..(603): Ortholog of  Ceres SEQ ID NO 13598613 as cited in SEQ ID NO 65582
  misc_feature (1)..(603): Ortholog of  Ceres SEQ ID NO 12635635 as cited in SEQ ID NO 0
atgattatcatttcaagaatctacataaaagttaggaattcttcaagattagctggaaatcccaactggggaacagcaactgttgttggagtatttgcaggattgctatatggagggagcaaagaagcttctgcttctgtgagcaaagatgcagaagtgatgttgaagatgggtagtacacaggataagcgtgaacaacacaggttgatgcgagatgcaatggagaaaaggttcatccgagtaactcgtggctccctcattggagggatgcgtcttggaatgttcactgcttccttctttagtctacaaaactttttagctgagacccgaggagtgcatgatgttttcaatgtggttggagctggttcagctactgctgcagtttttggcctaatcatgccggggtctcttgcttggcgtgcgcggaatgtgttgcttggttcagttcttggagccacagtgtgcttccctcttgggtgggtacaactgaagctcatgaagaaagcaaacgaaggcaataacgttgacacaggccaccacggtgaggtcacgagtggtgttggtgcagccattgagagactcgaacaacagttgagaaaataa

SEQ ID NO: 75924 - protein, 200 aa, Arabidopsis thaliana
  peptide (1)..(200): Ceres Seq. ID no. 6459878
MIIISRIYIKVRNSSRLAGNPNWGTATVVGVFAGLLYGGSKEASASVSKDAEVMLKMGSTQDKREQHRLMRDAMEKRFIRVTRGSLIGGMRLGMFTASFFSLQNFLAETRGVHDVFNVVGAGSATAAVFGLIMPGSLAWRARNVLLGSVLGATVCFPLGWVQLKLMKKANEGNNVDTGHHGEVTSGVGAAIERLEQQLRK

SEQ ID NO: 75925 - protein, 147 aa, Arabidopsis thaliana; identical to SEQ ID NO: 50427
  peptide (1)..(147): Ceres Seq. ID no. 6459879

SEQ ID NO: 75926 - protein, 144 aa, Arabidopsis thaliana
  peptide (1)..(144): Ceres Seq. ID no. 6459880
MGSTQDKREQHRLMRDAMEKRFIRVTRGSLIGGMRLGMFTASFFSLQNFLAETRGVHDVFNVVGAGSATAAVFGLIMPGSLAWRARNVLLGSVLGATVCFPLGWVQLKLMKKANEGNNVDTGHHGEVTSGVGAAIERLEQQLRK

SEQ ID NO: 75927 - DNA, 2121 bp, Arabidopsis thaliana
  misc_feature (1)..(2121): Ceres Seq. ID no. 6459967
  misc_feature (1)..(2121): Ortholog of  Ceres SEQ ID NO 13600595 as cited in SEQ ID NO 629
atggagatgggtcgtctggtcttcgggttgtgtttgattcttattgtgggtacgtttcttgaattctccggcggtgctacggcggcgaagggagtaacgtacgacggacggtctttgataatcgatggacagaggaagcttctcttctccggttccatccactatcctcgcagcacacccgagatgtggccgtctctgataaaaaagacaaaggaaggaggcatcgatgtgatccaaacgtacgttttctggaacctccatgagcctaagcttggacagtatgattttagtggaagaaacgatttagtgaagtttattaaagaaattagatcacaaggtctctatgtctgtctacgtattggacccttcatcgaagccgagtggaattacgggggattgccattttggttacgggatgtacccggtatggtataccgaaccgacaatgagcccttcaagttccacatgcaaaaattcaccgctaagatcgtagatttgatgaaatctgagggcttatatgcttctcaaggaggtccaattattctttctcagatcgagaacgagtatgcaaacgtggagggggctttccatgagaaaggagcatcgtacatcaagtgggcaggtcaaatggcggtcgggcttaagaccggagtgccatggatcatgtgcaagtcgcccgacgctcctgatcccgtgatcaatacctgcaacgggatgaaatgcggcgagacttttcctggaccaaactcacccaataagccgaaaatgtggactgaggattggacttcattctttcaggtttatggaaaagagccttatattagatctgctgaggatattgctttccatgccgctcttttcgttgcaaaaaatggaagttacatcaactattacatgtaccatggtggaacaaactttggaaggacttcatcttcgtatttcattacaggatactatgatcaagctcctctcgacgaatacggtcttttaagacagcctaagtacggtcatttgaaggagcttcacgctgcgataaaatcctctgcaaatcctctgcttcaaggaaagcaaacgattctctccttgggaccaatgcaacaagcttatgtctttgaagacgcgaacaatggatgcgttgcgtttctggtaaacaatgacgctaaagccagtcaaatacaattcagaaacaatgcgtatagcttgagtcccaagtcaattggtattcttcagaactgcaaaaacctaatttatgaaactgcaaaagtgaatgtgaagatgaatacgagagttacaacgccggttcaagtgttcaacgttcccgataactggaatttgtttagagaaacaatccctgcattcccaggcacatctttgaagacaaatgctttgttggaacacactaatttgacaaaggacaaaactgattatctttggtacacttcaagctttaagctggattcaccctgcacgaacccgtctatctacacagaatcatcaggacatgttgtccacgtgttcgtcaacaatgcactagcaggatctggacatggaagcagagacataagggtagttaaactacaagctccggttagcttaatcaatggacaaaacaatatatcgatcctcagcggcatggttggtctaccggactctggagcttacatggagaggagatcttatggactaaccaaagtacaaattagctgtggcgggacaaaacccatcgatttgagtagatctcaatggggttactcggtgggtttgcttggagagaaagttaggttatatcaatggaagaatttaaatagagtgaagtggagtatgaataaagctggactaattaagaaccgccccctcgcttggtacaagacaacgtttgatgggccgaatggagatgggcccgtgggcctacacatgtcgagtatgggtaaaggagaaatttgggtgaatggtgaaagcattggtcgttattgggtctcatatcatattcctcgggcgttcttaaaaccatctggaaatttattggtggtatttgaagaggaaggtggtgatcctcttgggatatctttgaatacaatatcggttgttggttcgagtcaagctcaatctcaattctcctga

SEQ ID NO: 75928 - protein, 706 aa, Arabidopsis thaliana
  peptide (1)..(706): Ceres Seq. ID no. 6459968
MEMGRLVFGLCLILIVGTFLEFSGGATAAKGVTYDGRSLIIDGQRKLLFSGSIHYPRSTPEMWPSLIKKTKEGGIDVIQTYVFWNLHEPKLGQYDFSGRNDLVKFIKEIRSQGLYVCLRIGPFIEAEWNYGGLPFWLRDVPGMVYRTDNEPFKFHMQKFTAKIVDLMKSEGLYASQGGPIILSQIENEYANVEGAFHEKGASYIKWAGQMAVGLKTGVPWIMCKSPDAPDPVINTCNGMKCGETFPGPNSPNKPKMWTEDWTSFFQVYGKEPYIRSAEDIAFHAALFVAKNGSYINYYMYHGGTNFGRTSSSYFITGYYDQAPLDEYGLLRQPKYGHLKELHAAIKSSANPLLQGKQTILSLGPMQQAYVFEDANNGCVAFLVNNDAKASQIQFRNNAYSLSPKSIGILQNCKNLIYETAKVNVKMNTRVTTPVQVFNVPDNWNLFRETIPAFPGTSLKTNALLEHTNLTKDKTDYLWYTSSFKLDSPCTNPSIYTESSGHVVHVFVNNALAGSGHGSRDIRVVKLQAPVSLINGQNNISILSGMVGLPDSGAYMERRSYGLTKVQISCGGTKPIDLSRSQWGYSVGLLGEKVRLYQWKNLNRVKWSMNKAGLIKNRPLAWYKTTFDGPNGDGPVGLHMSSMGKGEIWVNGESIGRYWVSYHIPRAFLKPSGNLLVVFEEEGGDPLGISLNTISVVGSSQAQSQFS

SEQ ID NO: 75929 - protein, 704 aa, Arabidopsis thaliana
  peptide (1)..(704): Ceres Seq. ID no. 6459969
MGRLVFGLCLILIVGTFLEFSGGATAAKGVTYDGRSLIIDGQRKLLFSGSIHYPRSTPEMWPSLIKKTKEGGIDVIQTYVFWNLHEPKLGQYDFSGRNDLVKFIKEIRSQGLYVCLRIGPFIEAEWNYGGLPFWLRDVPGMVYRTDNEPFKFHMQKFTAKIVDLMKSEGLYASQGGPIILSQIENEYANVEGAFHEKGASYIKWAGQMAVGLKTGVPWIMCKSPDAPDPVINTCNGMKCGETFPGPNSPNKPKMWTEDWTSFFQVYGKEPYIRSAEDIAFHAALFVAKNGSYINYYMYHGGTNFGRTSSSYFITGYYDQAPLDEYGLLRQPKYGHLKELHAAIKSSANPLLQGKQTILSLGPMQQAYVFEDANNGCVAFLVNNDAKASQIQFRNNAYSLSPKSIGILQNCKNLIYETAKVNVKMNTRVTTPVQVFNVPDNWNLFRETIPAFPGTSLKTNALLEHTNLTKDKTDYLWYTSSFKLDSPCTNPSIYTESSGHVVHVFVNNALAGSGHGSRDIRVVKLQAPVSLINGQNNISILSGMVGLPDSGAYMERRSYGLTKVQISCGGTKPIDLSRSQWGYSVGLLGEKVRLYQWKNLNRVKWSMNKAGLIKNRPLAWYKTTFDGPNGDGPVGLHMSSMGKGEIWVNGESIGRYWVSYHIPRAFLKPSGNLLVVFEEEGGDPLGISLNTISVVGSSQAQSQFS

SEQ ID NO: 75930 - protein, 645 aa, Arabidopsis thaliana
  peptide (1)..(645): Ceres Seq. ID no. 6459970
MWPSLIKKTKEGGIDVIQTYVFWNLHEPKLGQYDFSGRNDLVKFIKEIRSQGLYVCLRIGPFIEAEWNYGGLPFWLRDVPGMVYRTDNEPFKFHMQKFTAKIVDLMKSEGLYASQGGPIILSQIENEYANVEGAFHEKGASYIKWAGQMAVGLKTGVPWIMCKSPDAPDPVINTCNGMKCGETFPGPNSPNKPKMWTEDWTSFFQVYGKEPYIRSAEDIAFHAALFVAKNGSYINYYMYHGGTNFGRTSSSYFITGYYDQAPLDEYGLLRQPKYGHLKELHAAIKSSANPLLQGKQTILSLGPMQQAYVFEDANNGCVAFLVNNDAKASQIQFRNNAYSLSPKSIGILQNCKNLIYETAKVNVKMNTRVTTPVQVFNVPDNWNLFRETIPAFPGTSLKTNALLEHTNLTKDKTDYLWYTSSFKLDSPCTNPSIYTESSGHVVHVFVNNALAGSGHGSRDIRVVKLQAPVSLINGQNNISILSGMVGLPDSGAYMERRSYGLTKVQISCGGTKPIDLSRSQWGYSVGLLGEKVRLYQWKNLNRVKWSMNKAGLIKNRPLAWYKTTFDGPNGDGPVGLHMSSMGKGEIWVNGESIGRYWVSYHIPRAFLKPSGNLLVVFEEEGGDPLGISLNTISVVGSSQAQSQFS

SEQ ID NO: 75931 - DNA, 1656 bp, Arabidopsis thaliana
  misc_feature (1)..(1656): Ceres Seq. ID no. 6459995
  misc_feature (1)..(1656): Ortholog of  Ceres SEQ ID NO 14312408 as cited in SEQ ID NO 55042
atggctcttgttattgcgacaaagctggagactacatttatgaaagatgcaacattggcaccaaagaatgctagtttcgactacataatcatcggaggaggaaccgcaggttgtgcattagccgcaacgctctctcaaaacgccagcgttttggttcttgaacgcggcgggtcgccatatgagaaccccacggccactgatatgggcaactccgtcaacacactcttaaacaacacaccaaactcatggtcgcagcttttcatctccgaagacggcgtttacaacacgcggccacgtgtcctcggtggagggtcggtgataaacggaggattctactcgcgtgcgggcaatgattacgtggaggaagctgagtgggagatggaagaagtggaagctgcttacgagtgggtcgagaagaaacttgtgttcgagccacaagtaatagaatggcaaaaggcgtttaaagatgggcttctggaggctggagagtctccggacaacggtttcacgtacgatcatatctacggcactaagatcggtggtacaatctttgaccgtgctggtcatagacataccgcggcgaatctgttagagtatgctaatcccaaccggattgttgtttacttgcatgcttctgttcacaaagtcctcttcaccaccgaagcgtatgaagtgctatttgaggatgcaaatggagtgttccacaaggcaaatctagcaaataaggcaacgaacgaagtgatcttgtcagctggagccctgggtagcccacaactattaatgttgagtggagtaggtcctgccgtccatcttgaggctcacggcgtgaacccactcgtcctagatcagcccatggttgggcaggggatggctgataatcccatgaactttgtagccattccttctcctcaaccagtagaactatccctcatacaagctgttgggatcacaaagtttgatagttacattgaaggtctaagtggcttgagtctctcttttgatataactcgtaggtttttcgatggtgttttgaatcttttaaacgagacaagtcatactacatctaggaaaatcctgacccaatccattgcagtccttttaaaatcttttgatgttaaattggaagtgaggatgaatgggggtttgatctttcaaaaagtcgatggaccggcctcaaaaggacatatgaagctacggaacacgaacccaagggataatccttcagtgacattcaactactatcaagaaccagaggatttgaacaagtgtgttaaagggcttaacaccattattagaatgataaattccaaagctttctccaagtacaagtatccgggtgtgacggcacgtgaactgctcaatctcatgttggcccttcccatcaatttgaggccaaggcacgtgacctcagcgttcaacttgaagcagttttgcatcgacaccgtgacgagtgtttggcattaccatggaggttgccaagttggaaaagtggttgacaagaattacaaagtcttaggcatagatggcttaagggtcatcgatggatccacatttctcaagtctcccgggactaatcctcaagccacggtcatgatgcttggaaggtacatggggcaggaaattattcggcaaagagcggctttccacgaaaagtaa

SEQ ID NO: 75932 - protein, 551 aa, Arabidopsis thaliana
  peptide (1)..(551): Ceres Seq. ID no. 6459996
MALVIATKLETTFMKDATLAPKNASFDYIIIGGGTAGCALAATLSQNASVLVLERGGSPYENPTATDMGNSVNTLLNNTPNSWSQLFISEDGVYNTRPRVLGGGSVINGGFYSRAGNDYVEEAEWEMEEVEAAYEWVEKKLVFEPQVIEWQKAFKDGLLEAGESPDNGFTYDHIYGTKIGGTIFDRAGHRHTAANLLEYANPNRIVVYLHASVHKVLFTTEAYEVLFEDANGVFHKANLANKATNEVILSAGALGSPQLLMLSGVGPAVHLEAHGVNPLVLDQPMVGQGMADNPMNFVAIPSPQPVELSLIQAVGITKFDSYIEGLSGLSLSFDITRRFFDGVLNLLNETSHTTSRKILTQSIAVLLKSFDVKLEVRMNGGLIFQKVDGPASKGHMKLRNTNPRDNPSVTFNYYQEPEDLNKCVKGLNTIIRMINSKAFSKYKYPGVTARELLNLMLALPINLRPRHVTSAFNLKQFCIDTVTSVWHYHGGCQVGKVVDKNYKVLGIDGLRVIDGSTFLKSPGTNPQATVMMLGRYMGQEIIRQRAAFHEK

SEQ ID NO: 75933 - protein, 538 aa, Arabidopsis thaliana
  peptide (1)..(538): Ceres Seq. ID no. 6459997
MKDATLAPKNASFDYIIIGGGTAGCALAATLSQNASVLVLERGGSPYENPTATDMGNSVNTLLNNTPNSWSQLFISEDGVYNTRPRVLGGGSVINGGFYSRAGNDYVEEAEWEMEEVEAAYEWVEKKLVFEPQVIEWQKAFKDGLLEAGESPDNGFTYDHIYGTKIGGTIFDRAGHRHTAANLLEYANPNRIVVYLHASVHKVLFTTEAYEVLFEDANGVFHKANLANKATNEVILSAGALGSPQLLMLSGVGPAVHLEAHGVNPLVLDQPMVGQGMADNPMNFVAIPSPQPVELSLIQAVGITKFDSYIEGLSGLSLSFDITRRFFDGVLNLLNETSHTTSRKILTQSIAVLLKSFDVKLEVRMNGGLIFQKVDGPASKGHMKLRNTNPRDNPSVTFNYYQEPEDLNKCVKGLNTIIRMINSKAFSKYKYPGVTARELLNLMLALPINLRPRHVTSAFNLKQFCIDTVTSVWHYHGGCQVGKVVDKNYKVLGIDGLRVIDGSTFLKSPGTNPQATVMMLGRYMGQEIIRQRAAFHEK

SEQ ID NO: 75934 - protein, 484 aa, Arabidopsis thaliana
  peptide (1)..(484): Ceres Seq. ID no. 6459998
MGNSVNTLLNNTPNSWSQLFISEDGVYNTRPRVLGGGSVINGGFYSRAGNDYVEEAEWEMEEVEAAYEWVEKKLVFEPQVIEWQKAFKDGLLEAGESPDNGFTYDHIYGTKIGGTIFDRAGHRHTAANLLEYANPNRIVVYLHASVHKVLFTTEAYEVLFEDANGVFHKANLANKATNEVILSAGALGSPQLLMLSGVGPAVHLEAHGVNPLVLDQPMVGQGMADNPMNFVAIPSPQPVELSLIQAVGITKFDSYIEGLSGLSLSFDITRRFFDGVLNLLNETSHTTSRKILTQSIAVLLKSFDVKLEVRMNGGLIFQKVDGPASKGHMKLRNTNPRDNPSVTFNYYQEPEDLNKCVKGLNTIIRMINSKAFSKYKYPGVTARELLNLMLALPINLRPRHVTSAFNLKQFCIDTVTSVWHYHGGCQVGKVVDKNYKVLGIDGLRVIDGSTFLKSPGTNPQATVMMLGRYMGQEIIRQRAAFHEK

SEQ ID NO: 75935 - DNA, 957 bp, Arabidopsis thaliana
  misc_feature (1)..(957): Ceres Seq. ID no. 6460014
  misc_feature (1)..(957): Ortholog of  Ceres SEQ ID NO 14302154 as cited in SEQ ID NO 0
atgtcgcacttcggaaggtcaggtccaccggatatcagcgacacctactcacttctcgtccttaacatcaccttccgtacgactgctgatgatctctatcctctattcgcaaagtatggaaaggtcgttgatgtgtttattcccagagatcgaaggactggtgattcgcgtggttttgcgtttgttcggtataagtataaagacgaagctcacaaagcagtggaaaggcttgatggaagagttgttgatggcagagaaataactgttcagtttgcgaaatatgggccaaatgctgaaaaaatttccaaaggaagagttgtggaaccaccgccgaagtcacgaagatctagaagccgtagtcctaggcggagtcgtagtcctaggaggagccgtagcccgcctagacgtcgtagtcccagaagaagccgcagtcctcgtaggaggtcccgagatgactatagggaaaaagactaccggaagcggagcaggagcagaagctatgacaggcgtgaaaggcatgaggagaaggatagagatcatcgtcgtcgcactaggtctcgtagtgccagcccagatgaaaaacgcagagtcagaggccgttatgataatgagagccgcagtcacagtcgttccttgagtgcatctcctgctcgccgcagccctagaagttcctccccacagaaaacctctcctgctagagaagtttctcctgataagcgtagcaatgagaggtctccatctcctcgtcgcagcctcagcccaagaagccctgctttgcaaaaggcctctccttctaaggagatgtctcctgaaaggcgtagcaatgagaggtccccatctcctggtagccctgctcctctgcgcaaagttgatgctgcttctcgaagtcaatctccttatgctgcggtgggttacaaaaacactgtgtttcagatgtgtatcactaatgaaacttga

SEQ ID NO: 75936 - protein, 318 aa, Arabidopsis thaliana
  peptide (1)..(318): Ceres Seq. ID no. 6460015
MSHFGRSGPPDISDTYSLLVLNITFRTTADDLYPLFAKYGKVVDVFIPRDRRTGDSRGFAFVRYKYKDEAHKAVERLDGRVVDGREITVQFAKYGPNAEKISKGRVVEPPPKSRRSRSRSPRRSRSPRRSRSPPRRRSPRRSRSPRRRSRDDYREKDYRKRSRSRSYDRRERHEEKDRDHRRRTRSRSASPDEKRRVRGRYDNESRSHSRSLSASPARRSPRSSSPQKTSPAREVSPDKRSNERSPSPRRSLSPRSPALQKASPSKEMSPERRSNERSPSPGSPAPLRKVDAASRSQSPYAAVGYKNTVFQMCITNET

SEQ ID NO: 75937 - DNA, 3204 bp, Arabidopsis thaliana
  misc_feature (1)..(3204): Ceres Seq. ID no. 6460078
  misc_feature (1)..(3204): Ortholog of  Ceres SEQ ID NO 14313220 as cited in SEQ ID NO 66007
  misc_feature (1)..(3204): Ortholog of  Ceres SEQ ID NO 13658778 as cited in SEQ ID NO 66511
atgaacaccggtggtcggttaatcgccggttctcacaacaggaatgagtttgtcctcattaatgccgatgagaatgcccgaataagatcagtccaagagctgagtggacagacatgtcaaatctgcagagatgagatcgaattgactgttgatggagaaccgtttgtggcatgtaacgaatgtgcattccctgtgtgtagaccttgctatgagtacgaaagacgagaaggcaatcaagcttgtccacagtgcaaaacccgtttcaaacgtcttaaaggaagtccaagagttgaaggtgatgaagaggaagatgacattgatgatttagacaatgagtttgagtatggaaataatgggattggatttgatcaggtttctgaaggtatgtcaatctctcgtcgcaactccggtttcccacaatctgatttggattcagctccacctggctctcagattccattgctgacttacggcgacgaggacgttgagatttcttctgatagacatgctcttattgttcctccttcacttggtggtcatggcaatagagttcatcctgtttctctttctgacccgaccgtggctgcacatccaaggcctatggtacctcagaaagatcttgcggtttatggttatggaagtgtcgcttggaaagatcggatggaggaatggaagagaaagcagaatgagaaacttcaggttgttaggatggatgagggaaggcagccattgtctaggaagataccaatcaaatcgagcaagataaatccttaccggatgttaattgtgctacgtcttgtgattcttggtctcttctttcactaccgtattcttcaccccgtcaaagatgcatatgctttgtggcttatttctgttatatgtgagatatggtttgctgtttcatgggttcttgatcagttccctaaatggtaccctatcgagcgagaaacgtacttggaccgactctcattaagatatgagaaagaagggaaaccgtcgggactatcccctgtggatgtatttgttagtacagtggatccattgaaagagcctccgcttattactgcaaatactgtcttgtctattcttgctgttgattatcctgtcgataaggttgcttgttacgtatctgatgatggtgctgctatgcttactttcgaagctctttctgagaccgctgaattcgcaaggaaatgggttcctttctgcaagaaatattgtattgagcctcgtgctcccgaatggtatttctgccataaaatggactacttgaagaataaagttcatcccgcatttgttagggagcggcgagccatgaagagagattatgaagaattcaaagtaaagatcaatgctttagtagcaacagcacagaaagtgcctgaggatggttggactatgcaagacggtacaccttggcccggtaatagtgtgcgagatcatcctggcatgattcaggtcttccttggaagtgacggtgttcgtgatgtcgaaaacaacgagttgcctcgattagtttacgtttctcgtgagaagagacccggatttgatcaccataagaaggctggagctatgaattccctgatacgagtctctggggttctatcaaatgctccttaccttctgaatgtcgattgtgatcactacatcaacaatagcaaagctcttagagaagcaatgtgtttcatgatggatcctcagtcaggaaagaaaatctgttatgttcagttccctcaaaggttcgatgggattgataggcacgatcgatactcaaatcgcaatgttgtgttctttgatatcaatatgaaaggtttggatgggctacaagggcctatatacgtcggtacaggttgtgttttcaggaggcaagcgctttacggatttgatgcaccgaagaagaagaagggcccacgtaagacatgcaattgctggccaaaatggtgtctcctatgttttggttcaagaaagaatcgtaaagcaaagacagtggctgcggataagaagaagaagaatagggaagcgtcaaagcagatccacgcattagaaaatatcgaagagggccgcgtcactaaaggttctaacgtagaacagtcaaccgaggcaatgcaaatgaagttggagaagaaatttgggcagtctcctgtatttgttgcatctgcgcgtatggagaatggtgggatggctagaaacgcaagcccggcttgtctgcttaaagaagccatccaagtcattagttgcggatatgaagataaaactgaatggggaaaagagattgggtggatctatggttctgttaccgaagatattcttacgggttttaagatgcattctcatggttggagatctgtttattgtacaccaaagttagcggctttcaaaggatcagctccaatcaatctttcggatcgtctccatcaagttcttcgatgggcgcttgggtcggttgagattttcttgagtaggcattgtcctatttggtatggttatggaggtgggttgaaatggcttgagcggttgtcctacattaactctgtggtttacccgtggacctctctaccgctcatcgtttactgttctctccctgccatctgtcttctcactggaaaattcatcgttcccgagattagcaactatgcgagtatcctcttcatggcgctcttctcgtcgattgcaataacgggtattctcgagatgcaatggggcaaagttgggatcgatgattggtggagaaacgaacagttttgggtcattggaggtgtttctgcgcatctgtttgctctcttccaaggtctcctcaaggttcttgctggtgtcgacactaacttcacagtcacatcaaaagcagctgatgatggagagttctctgacctttacctcttcaaatggacttcacttctcatccctccaatgactctactcatcataaacgtcattggagtcatagtcggagtctctgatgccatcagcaatggatacgactcgtggggaccgcttttcggaagactgttctttgcactttgggtcatcattcatctttacccgttccttaaaggtttgcttgggaaacaagatagaatgccaaccattattgtcgtctggtccatcctcctggcctcgattcttacacttctttgggtccgggttaatccgtttgtggcgaaaggcggtcctattctcgagatctgtggtttagactgcttgtga

SEQ ID NO: 75938 - protein, 1067 aa, Arabidopsis thaliana
  peptide (1)..(1067): Ceres Seq. ID no. 6460079
MNTGGRLIAGSHNRNEFVLINADENARIRSVQELSGQTCQICRDEIELTVDGEPFVACNECAFPVCRPCYEYERREGNQACPQCKTRFKRLKGSPRVEGDEEEDDIDDLDNEFEYGNNGIGFDQVSEGMSISRRNSGFPQSDLDSAPPGSQIPLLTYGDEDVEISSDRHALIVPPSLGGHGNRVHPVSLSDPTVAAHPRPMVPQKDLAVYGYGSVAWKDRMEEWKRKQNEKLQVVRMDEGRQPLSRKIPIKSSKINPYRMLIVLRLVILGLFFHYRILHPVKDAYALWLISVICEIWFAVSWVLDQFPKWYPIERETYLDRLSLRYEKEGKPSGLSPVDVFVSTVDPLKEPPLITANTVLSILAVDYPVDKVACYVSDDGAAMLTFEALSETAEFARKWVPFCKKYCIEPRAPEWYFCHKMDYLKNKVHPAFVRERRAMKRDYEEFKVKINALVATAQKVPEDGWTMQDGTPWPGNSVRDHPGMIQVFLGSDGVRDVENNELPRLVYVSREKRPGFDHHKKAGAMNSLIRVSGVLSNAPYLLNVDCDHYINNSKALREAMCFMMDPQSGKKICYVQFPQRFDGIDRHDRYSNRNVVFFDINMKGLDGLQGPIYVGTGCVFRRQALYGFDAPKKKKGPRKTCNCWPKWCLLCFGSRKNRKAKTVAADKKKKNREASKQIHALENIEEGRVTKGSNVEQSTEAMQMKLEKKFGQSPVFVASARMENGGMARNASPACLLKEAIQVISCGYEDKTEWGKEIGWIYGSVTEDILTGFKMHSHGWRSVYCTPKLAAFKGSAPINLSDRLHQVLRWALGSVEIFLSRHCPIWYGYGGGLKWLERLSYINSVVYPWTSLPLIVYCSLPAICLLTGKFIVPEISNYASILFMALFSSIAITGILEMQWGKVGIDDWWRNEQFWVIGGVSAHLFALFQGLLKVLAGVDTNFTVTSKAADDGEFSDLYLFKWTSLLIPPMTLLIINVIGVIVGVSDAISNGYDSWGPLFGRLFFALWVIIHLYPFLKGLLGKQDRMPTIIVVWSILLASILTLLWVRVNPFVAKGGPILEICGLDCL

SEQ ID NO: 75939 - protein, 939 aa, Arabidopsis thaliana
  peptide (1)..(939): Ceres Seq. ID no. 6460080
MSISRRNSGFPQSDLDSAPPGSQIPLLTYGDEDVEISSDRHALIVPPSLGGHGNRVHPVSLSDPTVAAHPRPMVPQKDLAVYGYGSVAWKDRMEEWKRKQNEKLQVVRMDEGRQPLSRKIPIKSSKINPYRMLIVLRLVILGLFFHYRILHPVKDAYALWLISVICEIWFAVSWVLDQFPKWYPIERETYLDRLSLRYEKEGKPSGLSPVDVFVSTVDPLKEPPLITANTVLSILAVDYPVDKVACYVSDDGAAMLTFEALSETAEFARKWVPFCKKYCIEPRAPEWYFCHKMDYLKNKVHPAFVRERRAMKRDYEEFKVKINALVATAQKVPEDGWTMQDGTPWPGNSVRDHPGMIQVFLGSDGVRDVENNELPRLVYVSREKRPGFDHHKKAGAMNSLIRVSGVLSNAPYLLNVDCDHYINNSKALREAMCFMMDPQSGKKICYVQFPQRFDGIDRHDRYSNRNVVFFDINMKGLDGLQGPIYVGTGCVFRRQALYGFDAPKKKKGPRKTCNCWPKWCLLCFGSRKNRKAKTVAADKKKKNREASKQIHALENIEEGRVTKGSNVEQSTEAMQMKLEKKFGQSPVFVASARMENGGMARNASPACLLKEAIQVISCGYEDKTEWGKEIGWIYGSVTEDILTGFKMHSHGWRSVYCTPKLAAFKGSAPINLSDRLHQVLRWALGSVEIFLSRHCPIWYGYGGGLKWLERLSYINSVVYPWTSLPLIVYCSLPAICLLTGKFIVPEISNYASILFMALFSSIAITGILEMQWGKVGIDDWWRNEQFWVIGGVSAHLFALFQGLLKVLAGVDTNFTVTSKAADDGEFSDLYLFKWTSLLIPPMTLLIINVIGVIVGVSDAISNGYDSWGPLFGRLFFALWVIIHLYPFLKGLLGKQDRMPTIIVVWSILLASILTLLWVRVNPFVAKGGPILEICGLDCL

SEQ ID NO: 75940 - protein, 867 aa, Arabidopsis thaliana
  peptide (1)..(867): Ceres Seq. ID no. 6460081
MVPQKDLAVYGYGSVAWKDRMEEWKRKQNEKLQVVRMDEGRQPLSRKIPIKSSKINPYRMLIVLRLVILGLFFHYRILHPVKDAYALWLISVICEIWFAVSWVLDQFPKWYPIERETYLDRLSLRYEKEGKPSGLSPVDVFVSTVDPLKEPPLITANTVLSILAVDYPVDKVACYVSDDGAAMLTFEALSETAEFARKWVPFCKKYCIEPRAPEWYFCHKMDYLKNKVHPAFVRERRAMKRDYEEFKVKINALVATAQKVPEDGWTMQDGTPWPGNSVRDHPGMIQVFLGSDGVRDVENNELPRLVYVSREKRPGFDHHKKAGAMNSLIRVSGVLSNAPYLLNVDCDHYINNSKALREAMCFMMDPQSGKKICYVQFPQRFDGIDRHDRYSNRNVVFFDINMKGLDGLQGPIYVGTGCVFRRQALYGFDAPKKKKGPRKTCNCWPKWCLLCFGSRKNRKAKTVAADKKKKNREASKQIHALENIEEGRVTKGSNVEQSTEAMQMKLEKKFGQSPVFVASARMENGGMARNASPACLLKEAIQVISCGYEDKTEWGKEIGWIYGSVTEDILTGFKMHSHGWRSVYCTPKLAAFKGSAPINLSDRLHQVLRWALGSVEIFLSRHCPIWYGYGGGLKWLERLSYINSVVYPWTSLPLIVYCSLPAICLLTGKFIVPEISNYASILFMALFSSIAITGILEMQWGKVGIDDWWRNEQFWVIGGVSAHLFALFQGLLKVLAGVDTNFTVTSKAADDGEFSDLYLFKWTSLLIPPMTLLIINVIGVIVGVSDAISNGYDSWGPLFGRLFFALWVIIHLYPFLKGLLGKQDRMPTIIVVWSILLASILTLLWVRVNPFVAKGGPILEICGLDCL

SEQ ID NO: 75941 - DNA, 1899 bp, Arabidopsis thaliana
  misc_feature (1)..(1899): Ceres Seq. ID no. 6460180
  misc_feature (1)..(1899): Ortholog of  Ceres SEQ ID NO 15176771 as cited in SEQ ID NO 55128
atggcgggaaacggaaacgaaagtaccggtggagacttcagtttctcggctgcggcggcccgtgatgcgcttccgaggatcacgactgagaagggcggcaaatctccagggccggcagacgtctgccaggatgacatcgcaccgcgggtcaactttcagaccatcgacgagcttcacagtctccagaagaaacgatctgcccctaccactcctcttagagatggcagcgccagcggagtcagcggaactagtgctaaagtagcacacgtgccagtgactcctacgtcacttccggctgctgacgtcagcgacagtggcttgaagttcactcacatccttcacaacctctctcccgccgagttgtacgagcaagcgataaagtttgagaagggatcgtttgtgacatcgaccggtgcgttggctacattgtctggagccaaaaccggtcggtctcctaaagacaagcgtgtggttaaggatgataccactgaggccgaactctggtggggaaaaggatcaccaaacattgaaatggatgaaaaaacttttttggtgaaccgagagagagctgttgattacttaaactccttggacaaggtgtttgtgaatgatcaatacctaaactgggatccagagaacaaaatcaaagtgagaattgtttcagcaagagcttaccattcactattcatgcacaacatgtgtatccgtccaacacctgaggagttagagaatttcgggacacccgatttcacgatttacaacgcggggaaattcccgtgtaaccgtttcactcattacatgacatcttcgacgagtgtggacataaacctaggaagaagagagatggtgattctaggtacccaatatgctggagaaatgaagaaaggactctttggtgtgatgcattatttgatgcctaagagaaagattttgtctcttcactctggttgtaacatgggcaaagatggagatgttgctctctttttcggactctctggtaccggaaagactacgttgtcgactgaccataaccggtatttgatcggagatgatgaacattgttggagtgaggctggagtttcgaatatcgaaggtggttgttacgcgaaatgcattgatttggctagggacaaagagcctgatatctggaacgctatcaagtttggaaccgttttggagaatgttgtgtttgatgagcatacacgagaagtggattacactgacaaatcagtgacggagaacacacgtgcggcttatccgatagagtacattccaaactcgaagataccgtgcgttggaccacacccgaagaacgtgatcctattggcttgtgacgccttcggtgtgttgccgccaatcagcaagctcaatcttgctcagactatgtaccatttcatcagtggctacactgctctcgttgcaggaacagaggaaggagttaaggaacctcgagcgacattctcagcttgttttggtgctgctttcattatgctacacccaaccaagtacgctgctatgttggctgagaaaatgcaggctcaaggagccaccggttggcttgttaacaccggttggtccggtggaagctacggaactggaagccgaatcaagttggcgtatacacgaaagataatcgatgctatacattcgggtagtctactgaatgcaagttaccgtaaaacagatatttttggtttggagattccaaatgaagtagaaggagttccttctgagatactggaacctattaatgcatggcctgataaaatggcttatgaggacacattgttgaaattggctggtttgtttaaaagcaattttgagacattcacaagtcataagattggtgatgatggaaaattgactgaagagattcttgcagctggtcctaacttctaa

SEQ ID NO: 75942 - protein, 632 aa, Arabidopsis thaliana
  peptide (1)..(632): Ceres Seq. ID no. 6460181
MAGNGNESTGGDFSFSAAAARDALPRITTEKGGKSPGPADVCQDDIAPRVNFQTIDELHSLQKKRSAPTTPLRDGSASGVSGTSAKVAHVPVTPTSLPAADVSDSGLKFTHILHNLSPAELYEQAIKFEKGSFVTSTGALATLSGAKTGRSPKDKRVVKDDTTEAELWWGKGSPNIEMDEKTFLVNRERAVDYLNSLDKVFVNDQYLNWDPENKIKVRIVSARAYHSLFMHNMCIRPTPEELENFGTPDFTIYNAGKFPCNRFTHYMTSSTSVDINLGRREMVILGTQYAGEMKKGLFGVMHYLMPKRKILSLHSGCNMGKDGDVALFFGLSGTGKTTLSTDHNRYLIGDDEHCWSEAGVSNIEGGCYAKCIDLARDKEPDIWNAIKFGTVLENVVFDEHTREVDYTDKSVTENTRAAYPIEYIPNSKIPCVGPHPKNVILLACDAFGVLPPISKLNLAQTMYHFISGYTALVAGTEEGVKEPRATFSACFGAAFIMLHPTKYAAMLAEKMQAQGATGWLVNTGWSGGSYGTGSRIKLAYTRKIIDAIHSGSLLNASYRKTDIFGLEIPNEVEGVPSEILEPINAWPDKMAYEDTLLKLAGLFKSNFETFTSHKIGDDGKLTEEILAAGPNF

SEQ ID NO: 75943 - protein, 455 aa, Arabidopsis thaliana
  peptide (1)..(455): Ceres Seq. ID no. 6460182
MDEKTFLVNRERAVDYLNSLDKVFVNDQYLNWDPENKIKVRIVSARAYHSLFMHNMCIRPTPEELENFGTPDFTIYNAGKFPCNRFTHYMTSSTSVDINLGRREMVILGTQYAGEMKKGLFGVMHYLMPKRKILSLHSGCNMGKDGDVALFFGLSGTGKTTLSTDHNRYLIGDDEHCWSEAGVSNIEGGCYAKCIDLARDKEPDIWNAIKFGTVLENVVFDEHTREVDYTDKSVTENTRAAYPIEYIPNSKIPCVGPHPKNVILLACDAFGVLPPISKLNLAQTMYHFISGYTALVAGTEEGVKEPRATFSACFGAAFIMLHPTKYAAMLAEKMQAQGATGWLVNTGWSGGSYGTGSRIKLAYTRKIIDAIHSGSLLNASYRKTDIFGLEIPNEVEGVPSEILEPINAWPDKMAYEDTLLKLAGLFKSNFETFTSHKIGDDGKLTEEILAAGPNF

SEQ ID NO: 75944 - protein, 403 aa, Arabidopsis thaliana
  peptide (1)..(403): Ceres Seq. ID no. 6460183
MHNMCIRPTPEELENFGTPDFTIYNAGKFPCNRFTHYMTSSTSVDINLGRREMVILGTQYAGEMKKGLFGVMHYLMPKRKILSLHSGCNMGKDGDVALFFGLSGTGKTTLSTDHNRYLIGDDEHCWSEAGVSNIEGGCYAKCIDLARDKEPDIWNAIKFGTVLENVVFDEHTREVDYTDKSVTENTRAAYPIEYIPNSKIPCVGPHPKNVILLACDAFGVLPPISKLNLAQTMYHFISGYTALVAGTEEGVKEPRATFSACFGAAFIMLHPTKYAAMLAEKMQAQGATGWLVNTGWSGGSYGTGSRIKLAYTRKIIDAIHSGSLLNASYRKTDIFGLEIPNEVEGVPSEILEPINAWPDKMAYEDTLLKLAGLFKSNFETFTSHKIGDDGKLTEEILAAGPNF

SEQ ID NO: 75945 - DNA, 690 bp, Arabidopsis thaliana
  misc_feature (1)..(690): Ceres Seq. ID no. 6460207
  misc_feature (1)..(690): Ortholog of  Ceres SEQ ID NO 15169300 as cited in SEQ ID NO 59572
  misc_feature (1)..(690): Ortholog of  Ceres SEQ ID NO 13596876 as cited in SEQ ID NO 62696
  misc_feature (1)..(690): Ortholog of  Ceres SEQ ID NO 13655442 as cited in SEQ ID NO 64359
  misc_feature (1)..(690): Ortholog of  Ceres SEQ ID NO 14303652 as cited in SEQ ID NO 67569
atgccggatcctcaaaaaagtggcgaagatgattcaaagaacgagcgttgggttgaaataatctcttgggaacccagagcttctgtttaccacaatttcttgacaaaggaggaatgcaagtatctaatagagctagctaaaccgcatatggagaaatcaactgttgtcgacgagaagactggaaagagcacagatagcagggtgcgaacgagttcagggacatttctcgcaagagggcgtgacaaaactatccgtgaaattgagaaaaggatatcagattttacattcataccagttgagcatggggaaggtcttcaagttctgcactatgagattgggcaaaagtatgagcctcattacgactacttcatggatgagtataacactaggaatgggggacagcggatagccacagttctcatgtacctatcagatgttgaggaggggggtgaaacagtgtttcctgcagccaagggaaactatagcgcagtgccatggtggaatgagttgtcagagtgtgggaaaggagggttgtctgtgaaaccaaagatgggagatgcattgcttttctggagcatgacgcctgatgcgacgctagacccatctagtcttcatggtgggtgtgctgttataaaagggaataagtggtcgtccacaaagtggttgcgtgtacacgagtacaaggtttga

SEQ ID NO: 75946 - protein, 229 aa, Arabidopsis thaliana
  peptide (1)..(229): Ceres Seq. ID no. 6460208
MPDPQKSGEDDSKNERWVEIISWEPRASVYHNFLTKEECKYLIELAKPHMEKSTVVDEKTGKSTDSRVRTSSGTFLARGRDKTIREIEKRISDFTFIPVEHGEGLQVLHYEIGQKYEPHYDYFMDEYNTRNGGQRIATVLMYLSDVEEGGETVFPAAKGNYSAVPWWNELSECGKGGLSVKPKMGDALLFWSMTPDATLDPSSLHGGCAVIKGNKWSSTKWLRVHEYKV

SEQ ID NO: 75947 - protein, 180 aa, Arabidopsis thaliana
  peptide (1)..(180): Ceres Seq. ID no. 6460209
MEKSTVVDEKTGKSTDSRVRTSSGTFLARGRDKTIREIEKRISDFTFIPVEHGEGLQVLHYEIGQKYEPHYDYFMDEYNTRNGGQRIATVLMYLSDVEEGGETVFPAAKGNYSAVPWWNELSECGKGGLSVKPKMGDALLFWSMTPDATLDPSSLHGGCAVIKGNKWSSTKWLRVHEYKV

SEQ ID NO: 75948 - DNA, 1224 bp, Arabidopsis thaliana
  misc_feature (1)..(1224): Ceres Seq. ID no. 6460298
  misc_feature (1)..(1224): Ortholog of  Ceres SEQ ID NO 14315862 as cited in SEQ ID NO 60207
  misc_feature (1)..(1224): Ortholog of  Ceres SEQ ID NO 13660129 as cited in SEQ ID NO 67547
atgtcagcgactgctctctcgagattaaacccagtttctcaatttgggtttcaaagaatcgttgctgggaaaagtaagagcttcttctccaattcgggtcaaaggagattgttttctgatagttctcggtttcgtcaagccatggctgcttctggttctttgccagtgtttggagacgcttgtttggatgatttggttactacttgttcaaatggcttagacttcactaagaagcgttctagtggtggtagcttcactattaattgtcctgtagctagcatgagacttgggaagagagggggaatgatgaagaaccgattggtttgtcactattctgttgttgatccgctagaaaagagtcgtgcactctttgggacattgtctaagagtgttcatacttctcctatggcttgtttctcggttggaccggctcatgagctgtcttctcttaacggtggttctcaagagtcaccaccaactactactacatctcttaagagtcttaggctagtgtcggggtcatgttatctcccgcatcctgaaaaggaagctacaggtggagaagacgctcactttatctgcgatgaagaacaagctattggagttgcagatggagttggcggttgggctgaggttggtgttaatgcgggactgttttcgcgtgagcttatgtcttattcagtatctgcaattcaagaacagcataaaggttcttctatcgaccctttagtggtgttagagaaagcacattctcaaaccaaagccaaaggctcctccacggcttgtatcatcgttttaaaagataagggattacacgccattaatctcggagacagtggattcacggtggttagagagggaaccacggtgtttcagtctccggttcagcagcatggattcaacttcacttatcaattagagagtgggaacagtgccgacgtccctagctccggtcagtctggagatgtcattgtcgctggaacagatggagtgtatgataatttatacaatgaagagatcacaggagtggtggttagctcggtgagggccggtttagacccgaaaggcacagctcagaagattgcagagttggcacgtcaaagagcagtcgacaaaaaacggcagagccctttcgcaactgcggctcaggaggctggctacaggtattacggaggaaagcttgatgacatcactgccgtcgtttcttacgtcacctcatcttaa

SEQ ID NO: 75949 - protein, 407 aa, Arabidopsis thaliana
  peptide (1)..(407): Ceres Seq. ID no. 6460299
MSATALSRLNPVSQFGFQRIVAGKSKSFFSNSGQRRLFSDSSRFRQAMAASGSLPVFGDACLDDLVTTCSNGLDFTKKRSSGGSFTINCPVASMRLGKRGGMMKNRLVCHYSVVDPLEKSRALFGTLSKSVHTSPMACFSVGPAHELSSLNGGSQESPPTTTTSLKSLRLVSGSCYLPHPEKEATGGEDAHFICDEEQAIGVADGVGGWAEVGVNAGLFSRELMSYSVSAIQEQHKGSSIDPLVVLEKAHSQTKAKGSSTACIIVLKDKGLHAINLGDSGFTVVREGTTVFQSPVQQHGFNFTYQLESGNSADVPSSGQSGDVIVAGTDGVYDNLYNEEITGVVVSSVRAGLDPKGTAQKIAELARQRAVDKKRQSPFATAAQEAGYRYYGGKLDDITAVVSYVTSS

SEQ ID NO: 75950 - protein, 360 aa, Arabidopsis thaliana
  peptide (1)..(360): Ceres Seq. ID no. 6460300
MAASGSLPVFGDACLDDLVTTCSNGLDFTKKRSSGGSFTINCPVASMRLGKRGGMMKNRLVCHYSVVDPLEKSRALFGTLSKSVHTSPMACFSVGPAHELSSLNGGSQESPPTTTTSLKSLRLVSGSCYLPHPEKEATGGEDAHFICDEEQAIGVADGVGGWAEVGVNAGLFSRELMSYSVSAIQEQHKGSSIDPLVVLEKAHSQTKAKGSSTACIIVLKDKGLHAINLGDSGFTVVREGTTVFQSPVQQHGFNFTYQLESGNSADVPSSGQSGDVIVAGTDGVYDNLYNEEITGVVVSSVRAGLDPKGTAQKIAELARQRAVDKKRQSPFATAAQEAGYRYYGGKLDDITAVVSYVTSS

SEQ ID NO: 75951 - protein, 314 aa, Arabidopsis thaliana
  peptide (1)..(314): Ceres Seq. ID no. 6460301
MRLGKRGGMMKNRLVCHYSVVDPLEKSRALFGTLSKSVHTSPMACFSVGPAHELSSLNGGSQESPPTTTTSLKSLRLVSGSCYLPHPEKEATGGEDAHFICDEEQAIGVADGVGGWAEVGVNAGLFSRELMSYSVSAIQEQHKGSSIDPLVVLEKAHSQTKAKGSSTACIIVLKDKGLHAINLGDSGFTVVREGTTVFQSPVQQHGFNFTYQLESGNSADVPSSGQSGDVIVAGTDGVYDNLYNEEITGVVVSSVRAGLDPKGTAQKIAELARQRAVDKKRQSPFATAAQEAGYRYYGGKLDDITAVVSYVTSS

SEQ ID NO: 75952 - DNA, 2871 bp, Arabidopsis thaliana
  misc_feature (1)..(2871): Ceres Seq. ID no. 6460428
  misc_feature (1)..(2871): Ortholog of  Ceres SEQ ID NO 13657677 as cited in SEQ ID NO 66119
atgtccactcctccgccggatgacatgtttggtttcgacgatcctttctcccccagtgattcgcgggaagttgtggatttgactaaagagtactcctttttgcacgattctcttgtcgactatggaaacgttaatgttcatcaagtagtgcccattattactcaatcctctattgacgctagagccattgcagatgctgtttctggtgtcgacgatgtgtttgggagaaaatcccagaagtttcttaggcaatttagagagaaattgagtgagagtttagtgattgaggtgttgcgtttgatagcaagaccatctgctgttatcagtttcttcgtttgggcaggtaggcagataggttataagcatactgcacctgtgtataacgctttggttgaccttattgtacgtgatgatgacgaaaaagttcccgaagaattcctgcaacagattagagatgatgataaggaagtgtttggcgaatttctcaatgtgttggtaaggaaacattgcaggaatgggtcatttagtattgcgcttgaggagttagggaggctcaaggattttaggttcagaccttcaagatcgacttataattgtttgattcaggcatttctcaaggctgatcgtttggactctgcatctttgattcatagggaaatgtctcttgcaaatcttaggatggatgggtttacacttagatgctttgcttattctctctgtaaagtaggaaagtggagggaagctctaacattggtggaaacggaaaattttgtgcctgatactgtgttttatacaaaattgatatctggtctgtgtgaagcttcgctttttgaagaggctatggatttcctgaataggatgcgtgctacttcctgccttccaaatgttgttacatattcaactttgctgtgtggatgcttgaacaaaaaacagctgggtaggtgtaaaagggtgcttaatatgatgatgatggaaggttgttatccaagtcccaagatttttaattctcttgtacatgcttattgcacatcaggagatcattcatatgcatacaaattgctcaaaaaaatggttaaatgtggtcacatgccaggatatgttgtctacaatatattgattgggagtatttgtggtgacaaagactcccttaattgtgatctgttggacttagctgagaaagcttatagtgaaatgcttgctgcaggggttgttctgaataagattaatgtcagtagcttcacacggtgtctttgtagtgctgggaaatatgaaaaggcatttagtgttatccgtgaaatgattggtcagggatttataccagataccagtacctattccaaagtccttaattatttatgtaatgcttcgaaaatggagttggcgtttttgttatttgaagaaatgaaaaggggtggccttgttgctgatgtctacacgtatactattatggtagatagtttctgtaaagctggtctaattgaacaggctcgtaagtggttcaatgaaatgagagaggttggttgtacacctaacgtcgtcacatataccgctcttatccatgcttatcttaaggctaagaaggtcagctatgcaaatgagctgtttgaaacgatgctgtctgaagggtgtctccctaatattgttacatattctgccttaattgatggccattgcaaagctggacaagtggagaaagcctgccagatttttgaaagaatgtgtggcagcaaagatgtcccagatgtagatatgtacttcaagcagtatgatgacaacagcgagaggccaaatgtagttacatatggagctttactggatggtttctgcaagtcgcatagggtcgaagaagctcgtaagttgttggatgctatgtctatggaaggttgtgaaccgaatcagattgtatatgatgctctcattgatggactctgtaaggttgggaaactagacgaagcacaagaagtgaaaactgagatgtctgagcatggattccctgcaaccttatatacttacagttctctaattgatcgttatttcaaagtcaagcgccaagatttagcctcaaaagtattatctaagatgcttgagaattcctgtgcgcccaatgtggttatatacactgagatgattgatggcttatgcaaggttggtaaaactgatgaagcttataagcttatgcaaatgatggaagaaaaagggtgtcagcccaatgttgtgacatatacagcgatgattgatggatttggaatgattggtaaaatagaaacatgccttgagctcttagagcgaatgggttccaaaggtgttgctccaaattatgttacttacagggtcttgatagatcattgttgcaaaaatggtgcactggatgtggcccacaatcttctcgaagaaatgaaacagacacattggcctacacacacagcaggatatcgcaaagtcattgaaggattcaataaagagttcatagagtctctagggcttctcgatgagataggccaggatgatactgccccttttctttctgtatataggcttttgattgataatcttattaaagctcaaagactggaaatggctcttaggcttcttgaagaggttgcaacattttcagccacgttggttgactacagtagcacatataactcactgattgaaagcctttgccttgctaataaagtggaaacggcttttcagttgttctcagaaatgacaaagaaaggtgtcattccggagatgcaatcattctgtagtctaatcaagggacttttccgaaacagcaagatcagtgaagcactattgcttctagatttcatatctcatatggaaattcagtggatagaagaaaagaaaacatctgatgggacttag

SEQ ID NO: 75953 - protein, 956 aa, Arabidopsis thaliana
  peptide (1)..(956): Ceres Seq. ID no. 6460429
MSTPPPDDMFGFDDPFSPSDSREVVDLTKEYSFLHDSLVDYGNVNVHQVVPIITQSSIDARAIADAVSGVDDVFGRKSQKFLRQFREKLSESLVIEVLRLIARPSAVISFFVWAGRQIGYKHTAPVYNALVDLIVRDDDEKVPEEFLQQIRDDDKEVFGEFLNVLVRKHCRNGSFSIALEELGRLKDFRFRPSRSTYNCLIQAFLKADRLDSASLIHREMSLANLRMDGFTLRCFAYSLCKVGKWREALTLVETENFVPDTVFYTKLISGLCEASLFEEAMDFLNRMRATSCLPNVVTYSTLLCGCLNKKQLGRCKRVLNMMMMEGCYPSPKIFNSLVHAYCTSGDHSYAYKLLKKMVKCGHMPGYVVYNILIGSICGDKDSLNCDLLDLAEKAYSEMLAAGVVLNKINVSSFTRCLCSAGKYEKAFSVIREMIGQGFIPDTSTYSKVLNYLCNASKMELAFLLFEEMKRGGLVADVYTYTIMVDSFCKAGLIEQARKWFNEMREVGCTPNVVTYTALIHAYLKAKKVSYANELFETMLSEGCLPNIVTYSALIDGHCKAGQVEKACQIFERMCGSKDVPDVDMYFKQYDDNSERPNVVTYGALLDGFCKSHRVEEARKLLDAMSMEGCEPNQIVYDALIDGLCKVGKLDEAQEVKTEMSEHGFPATLYTYSSLIDRYFKVKRQDLASKVLSKMLENSCAPNVVIYTEMIDGLCKVGKTDEAYKLMQMMEEKGCQPNVVTYTAMIDGFGMIGKIETCLELLERMGSKGVAPNYVTYRVLIDHCCKNGALDVAHNLLEEMKQTHWPTHTAGYRKVIEGFNKEFIESLGLLDEIGQDDTAPFLSVYRLLIDNLIKAQRLEMALRLLEEVATFSATLVDYSSTYNSLIESLCLANKVETAFQLFSEMTKKGVIPEMQSFCSLIKGLFRNSKISEALLLLDFISHMEIQWIEEKKTSDGT

SEQ ID NO: 75954 - protein, 948 aa, Arabidopsis thaliana
  peptide (1)..(948): Ceres Seq. ID no. 6460430
MFGFDDPFSPSDSREVVDLTKEYSFLHDSLVDYGNVNVHQVVPIITQSSIDARAIADAVSGVDDVFGRKSQKFLRQFREKLSESLVIEVLRLIARPSAVISFFVWAGRQIGYKHTAPVYNALVDLIVRDDDEKVPEEFLQQIRDDDKEVFGEFLNVLVRKHCRNGSFSIALEELGRLKDFRFRPSRSTYNCLIQAFLKADRLDSASLIHREMSLANLRMDGFTLRCFAYSLCKVGKWREALTLVETENFVPDTVFYTKLISGLCEASLFEEAMDFLNRMRATSCLPNVVTYSTLLCGCLNKKQLGRCKRVLNMMMMEGCYPSPKIFNSLVHAYCTSGDHSYAYKLLKKMVKCGHMPGYVVYNILIGSICGDKDSLNCDLLDLAEKAYSEMLAAGVVLNKINVSSFTRCLCSAGKYEKAFSVIREMIGQGFIPDTSTYSKVLNYLCNASKMELAFLLFEEMKRGGLVADVYTYTIMVDSFCKAGLIEQARKWFNEMREVGCTPNVVTYTALIHAYLKAKKVSYANELFETMLSEGCLPNIVTYSALIDGHCKAGQVEKACQIFERMCGSKDVPDVDMYFKQYDDNSERPNVVTYGALLDGFCKSHRVEEARKLLDAMSMEGCEPNQIVYDALIDGLCKVGKLDEAQEVKTEMSEHGFPATLYTYSSLIDRYFKVKRQDLASKVLSKMLENSCAPNVVIYTEMIDGLCKVGKTDEAYKLMQMMEEKGCQPNVVTYTAMIDGFGMIGKIETCLELLERMGSKGVAPNYVTYRVLIDHCCKNGALDVAHNLLEEMKQTHWPTHTAGYRKVIEGFNKEFIESLGLLDEIGQDDTAPFLSVYRLLIDNLIKAQRLEMALRLLEEVATFSATLVDYSSTYNSLIESLCLANKVETAFQLFSEMTKKGVIPEMQSFCSLIKGLFRNSKISEALLLLDFISHMEIQWIEEKKTSDGT

SEQ ID NO: 75955 - protein, 737 aa, Arabidopsis thaliana
  peptide (1)..(737): Ceres Seq. ID no. 6460431
MSLANLRMDGFTLRCFAYSLCKVGKWREALTLVETENFVPDTVFYTKLISGLCEASLFEEAMDFLNRMRATSCLPNVVTYSTLLCGCLNKKQLGRCKRVLNMMMMEGCYPSPKIFNSLVHAYCTSGDHSYAYKLLKKMVKCGHMPGYVVYNILIGSICGDKDSLNCDLLDLAEKAYSEMLAAGVVLNKINVSSFTRCLCSAGKYEKAFSVIREMIGQGFIPDTSTYSKVLNYLCNASKMELAFLLFEEMKRGGLVADVYTYTIMVDSFCKAGLIEQARKWFNEMREVGCTPNVVTYTALIHAYLKAKKVSYANELFETMLSEGCLPNIVTYSALIDGHCKAGQVEKACQIFERMCGSKDVPDVDMYFKQYDDNSERPNVVTYGALLDGFCKSHRVEEARKLLDAMSMEGCEPNQIVYDALIDGLCKVGKLDEAQEVKTEMSEHGFPATLYTYSSLIDRYFKVKRQDLASKVLSKMLENSCAPNVVIYTEMIDGLCKVGKTDEAYKLMQMMEEKGCQPNVVTYTAMIDGFGMIGKIETCLELLERMGSKGVAPNYVTYRVLIDHCCKNGALDVAHNLLEEMKQTHWPTHTAGYRKVIEGFNKEFIESLGLLDEIGQDDTAPFLSVYRLLIDNLIKAQRLEMALRLLEEVATFSATLVDYSSTYNSLIESLCLANKVETAFQLFSEMTKKGVIPEMQSFCSLIKGLFRNSKISEALLLLDFISHMEIQWIEEKKTSDGT

SEQ ID NO: 75956 - DNA, 2145 bp, Arabidopsis thaliana
  misc_feature (1)..(2145): Ceres Seq. ID no. 6460548
  misc_feature (1)..(2145): Ortholog of  Ceres SEQ ID NO 15170269 as cited in SEQ ID NO 54916
  misc_feature (1)..(2145): Ortholog of  Ceres SEQ ID NO 13663060 as cited in SEQ ID NO 60964
  misc_feature (1)..(2145): Ortholog of  Ceres SEQ ID NO 13598532 as cited in SEQ ID NO 65204
  misc_feature (1)..(2145): Ortholog of  Ceres SEQ ID NO 13656849 as cited in SEQ ID NO 65764
  misc_feature (1)..(2145): Ortholog of  Ceres SEQ ID NO 13656501 as cited in SEQ ID NO 69206
atgggttgtgtcaactcgaagcagactgtttctgtaacgccagcgatcgatcactctggtgttttcagggacaatgtttgttctggttccggtagaattgtggttgaggatcttcctccggtgacggagacgaagcttttgtcgtggtggagcaagagcgggaagaagagtagtagtaaaaagagcggtagtgagttgggtagcgatttcggtgagttgagtgagtctggtcgagcgagttcgaattgtaggagtgagtcggtgagtttccgcctcggtaatttgagcaagtaccttgaagctgagcaggtcgcagctggttggcctgcgtggcttagcaacgtcgctggtgaagctattcatggttgggttccatttcgatccgacgctttcgaaaaactcgaaaagattggacaagggacttatagtagtgtgttccgtgcaagagagactgaaacagggaggatagtggctttgaagaaagttagatttgacaattttgagccagagagtgttaggttcatggctagagagattttgatacttaggaaactcaatcatcccaacattatcaaactagaaggtattgttacttcaaagctatcttgcagcatacatctcgtgttcgagtatatggagcatgatctcactggtcttctttctagccctgatatcgacttcactactccacagattaagtgttatatgaaacaattgttgtctggacttgatcactgtcacgcacgaggtgtgatgcatcgggacattaagggctcaaatcttttggtgaataatgaaggaatattgaaggttgctgattttgggctagctaatttttgcaatgcttctgggaataagcaacctcttacaagtcgagttgtgactttgtggtaccgtccacctgaacttttgctcggggcaacggaatatggagcatctgttgatttgtggagtgttggctgtgtttttgctgaacttctaattggaaaaccggttctgcaagggagaactgaggtcgagcagttgcacaagatattcaaactttgtggatctccacctgaagattactggaaaaagtccaaacttcctcatgcaatgcttttcaaaccacagcaacattatgatggttgtctccgagaaaccttgaagttgaaaggtttatccgatgctgacatcaatcttatagaaactcttctttctatacagccccacaaacgtgggactgcgtctactgcccttgtttctcagtattttacttcaaagccttttgcttgtgatccctcaagtttgcctgtatactcgcctagcaaggagattgatgcaaagcatcgagaagacacaacaaggaaaaaaatcagcgggaatgggagacgtggtacagaatcgaggaagccaacacgaaagccccctgcatttgctaaactggcaccagctgaggatgtacggcaccactcccagaagtttcagaaacgtaatggtcattcagttcataattcgattgatagtgattccactttatttgagaaaatgcaaaagccatcaaatcatgaaaaggatgaagcttctcatgtgaagaacgcatcacaaggagatgtgcctttctcagggcctttgcaagtctctgtatcaagtggttttgcgtgggcaaagcgacgaaaagatgatatatgtgttagatcacataatagatctctttcaagaggtcatattcctaacctgttgggaccttctcctgctttcagtgagaatactgacgttgactctaaaaacaatgagaaagaaaaggaagaaaaacatggggaaagaacggattctcaagaccgtgaggcgtatgagatgttgaaactttcaatgctaaagaagtggaggcaacttgaacgaccagattcttttggtggttctgacgagtatcattcacaggaactgtcattggaactttatcagcgagaagaaaaggcagcaaagctgggtcatttgggttacgaagacaatgatgagaaaatcgaattctcagggcccttgttgtctaaatcttatggagttgatgagcttttggaacgccatgaacgccaaattcgccagttagttagaaaatcgtggttccagaaagtttggtttttgagaatttcagccatctcttcctag

SEQ ID NO: 75957 - protein, 714 aa, Arabidopsis thaliana
  peptide (1)..(714): Ceres Seq. ID no. 6460549
MGCVNSKQTVSVTPAIDHSGVFRDNVCSGSGRIVVEDLPPVTETKLLSWWSKSGKKSSSKKSGSELGSDFGELSESGRASSNCRSESVSFRLGNLSKYLEAEQVAAGWPAWLSNVAGEAIHGWVPFRSDAFEKLEKIGQGTYSSVFRARETETGRIVALKKVRFDNFEPESVRFMAREILILRKLNHPNIIKLEGIVTSKLSCSIHLVFEYMEHDLTGLLSSPDIDFTTPQIKCYMKQLLSGLDHCHARGVMHRDIKGSNLLVNNEGILKVADFGLANFCNASGNKQPLTSRVVTLWYRPPELLLGATEYGASVDLWSVGCVFAELLIGKPVLQGRTEVEQLHKIFKLCGSPPEDYWKKSKLPHAMLFKPQQHYDGCLRETLKLKGLSDADINLIETLLSIQPHKRGTASTALVSQYFTSKPFACDPSSLPVYSPSKEIDAKHREDTTRKKISGNGRRGTESRKPTRKPPAFAKLAPAEDVRHHSQKFQKRNGHSVHNSIDSDSTLFEKMQKPSNHEKDEASHVKNASQGDVPFSGPLQVSVSSGFAWAKRRKDDICVRSHNRSLSRGHIPNLLGPSPAFSENTDVDSKNNEKEKEEKHGERTDSQDREAYEMLKLSMLKKWRQLERPDSFGGSDEYHSQELSLELYQREEKAAKLGHLGYEDNDEKIEFSGPLLSKSYGVDELLERHERQIRQLVRKSWFQKVWFLRISAISS

SEQ ID NO: 75958 - protein, 540 aa, Arabidopsis thaliana
  peptide (1)..(540): Ceres Seq. ID no. 6460550
MAREILILRKLNHPNIIKLEGIVTSKLSCSIHLVFEYMEHDLTGLLSSPDIDFTTPQIKCYMKQLLSGLDHCHARGVMHRDIKGSNLLVNNEGILKVADFGLANFCNASGNKQPLTSRVVTLWYRPPELLLGATEYGASVDLWSVGCVFAELLIGKPVLQGRTEVEQLHKIFKLCGSPPEDYWKKSKLPHAMLFKPQQHYDGCLRETLKLKGLSDADINLIETLLSIQPHKRGTASTALVSQYFTSKPFACDPSSLPVYSPSKEIDAKHREDTTRKKISGNGRRGTESRKPTRKPPAFAKLAPAEDVRHHSQKFQKRNGHSVHNSIDSDSTLFEKMQKPSNHEKDEASHVKNASQGDVPFSGPLQVSVSSGFAWAKRRKDDICVRSHNRSLSRGHIPNLLGPSPAFSENTDVDSKNNEKEKEEKHGERTDSQDREAYEMLKLSMLKKWRQLERPDSFGGSDEYHSQELSLELYQREEKAAKLGHLGYEDNDEKIEFSGPLLSKSYGVDELLERHERQIRQLVRKSWFQKVWFLRISAISS

SEQ ID NO: 75959 - protein, 503 aa, Arabidopsis thaliana
  peptide (1)..(503): Ceres Seq. ID no. 6460551
MEHDLTGLLSSPDIDFTTPQIKCYMKQLLSGLDHCHARGVMHRDIKGSNLLVNNEGILKVADFGLANFCNASGNKQPLTSRVVTLWYRPPELLLGATEYGASVDLWSVGCVFAELLIGKPVLQGRTEVEQLHKIFKLCGSPPEDYWKKSKLPHAMLFKPQQHYDGCLRETLKLKGLSDADINLIETLLSIQPHKRGTASTALVSQYFTSKPFACDPSSLPVYSPSKEIDAKHREDTTRKKISGNGRRGTESRKPTRKPPAFAKLAPAEDVRHHSQKFQKRNGHSVHNSIDSDSTLFEKMQKPSNHEKDEASHVKNASQGDVPFSGPLQVSVSSGFAWAKRRKDDICVRSHNRSLSRGHIPNLLGPSPAFSENTDVDSKNNEKEKEEKHGERTDSQDREAYEMLKLSMLKKWRQLERPDSFGGSDEYHSQELSLELYQREEKAAKLGHLGYEDNDEKIEFSGPLLSKSYGVDELLERHERQIRQLVRKSWFQKVWFLRISAISS

SEQ ID NO: 75960 - DNA, 1320 bp, Arabidopsis thaliana
  misc_feature (1)..(1320): Ceres Seq. ID no. 6460634
  misc_feature (1)..(1320): Ortholog of  Ceres SEQ ID NO 15224908 as cited in SEQ ID NO 67263
atggtgtctttggtcaattcttctctaacatgctcaagccttactctgaatctccttcccattctgcgtacggaaacaccttcactctccaggaagcgtcgagcagcttatgtggcggctacatcttctagagatgttaacgataccgccgctgattcttctcagaaactcaccaaattcgtcacctttctcggaaaaggcggctccggcaagaccaccgccgctgttttcgccgctcagcattacgcattggctgggctcagtacatgtttggtgatacataatcaagacccttctgctgaattcctccttggaagcaagattgggacttctcctaccttgatcaacgacaatctctctgtcattaggctagaaaccacaaaaatgcttctagaacctcttaaacagctgaagcaagcagatgctcgacttaatatgacccaaggggttcttgaaggggtggttggagaagagctaggagtacttccagggatggattccatcttttcaatgcttgaactcgagaggcttgttggtttctttaggcaagcaacccgaaagaatcacaaggggaagccttttgacgttataatttatgatggcattagcactgaggaaactcttcggatgataggtctaagcagtaaaacaagattgtatgcgaaatatctgagaagtttggccgagaagacagatttggggaggctaacaagtccgtccattatgagatttgttgatgagtcaatgaacataaacagtaataagtcgcctttcgatggtatgacaagtcctgccatgtgggatactttggaacgtttcttggagactggcgcttctgcttggagagatccagagagattcaggagttttcttgtaatggacccaaacaatcctatgtctgttaaagctgcattacggtattggggttgtacagtacaagcaggatctcatgtttctggggcgtttgctatttcttcttctcatctgaccagccaaatcccgaaagcagattttgtgccactgccatttgcttctgcatcagttccatttactataactggtctggattgggacaaaattctgctggaccaagcgaattcaagtatccgggaacttctctctgaaactgtaagccatgggaccagcttgacacaaacagtaatgtttgatacagcaaagaaattggtgactcttttcatgccggggtttgaaaaatcagaaatcaaactgtatcaggtaaaaaggaacttctcatctccctcatattcgtcagttcttgtaaagctctctcatttcttttactcatctatgatggcataa

SEQ ID NO: 75961 - protein, 439 aa, Arabidopsis thaliana
  peptide (1)..(439): Ceres Seq. ID no. 6460635
MVSLVNSSLTCSSLTLNLLPILRTETPSLSRKRRAAYVAATSSRDVNDTAADSSQKLTKFVTFLGKGGSGKTTAAVFAAQHYALAGLSTCLVIHNQDPSAEFLLGSKIGTSPTLINDNLSVIRLETTKMLLEPLKQLKQADARLNMTQGVLEGVVGEELGVLPGMDSIFSMLELERLVGFFRQATRKNHKGKPFDVIIYDGISTEETLRMIGLSSKTRLYAKYLRSLAEKTDLGRLTSPSIMRFVDESMNINSNKSPFDGMTSPAMWDTLERFLETGASAWRDPERFRSFLVMDPNNPMSVKAALRYWGCTVQAGSHVSGAFAISSSHLTSQIPKADFVPLPFASASVPFTITGLDWDKILLDQANSSIRELLSETVSHGTSLTQTVMFDTAKKLVTLFMPGFEKSEIKLYQVKRNFSSPSYSSVLVKLSHFFYSSMMA

SEQ ID NO: 75962 - protein, 311 aa, Arabidopsis thaliana
  peptide (1)..(311): Ceres Seq. ID no. 6460636
MLLEPLKQLKQADARLNMTQGVLEGVVGEELGVLPGMDSIFSMLELERLVGFFRQATRKNHKGKPFDVIIYDGISTEETLRMIGLSSKTRLYAKYLRSLAEKTDLGRLTSPSIMRFVDESMNINSNKSPFDGMTSPAMWDTLERFLETGASAWRDPERFRSFLVMDPNNPMSVKAALRYWGCTVQAGSHVSGAFAISSSHLTSQIPKADFVPLPFASASVPFTITGLDWDKILLDQANSSIRELLSETVSHGTSLTQTVMFDTAKKLVTLFMPGFEKSEIKLYQVKRNFSSPSYSSVLVKLSHFFYSSMMA

SEQ ID NO: 75963 - protein, 294 aa, Arabidopsis thaliana
  peptide (1)..(294): Ceres Seq. ID no. 6460637
MTQGVLEGVVGEELGVLPGMDSIFSMLELERLVGFFRQATRKNHKGKPFDVIIYDGISTEETLRMIGLSSKTRLYAKYLRSLAEKTDLGRLTSPSIMRFVDESMNINSNKSPFDGMTSPAMWDTLERFLETGASAWRDPERFRSFLVMDPNNPMSVKAALRYWGCTVQAGSHVSGAFAISSSHLTSQIPKADFVPLPFASASVPFTITGLDWDKILLDQANSSIRELLSETVSHGTSLTQTVMFDTAKKLVTLFMPGFEKSEIKLYQVKRNFSSPSYSSVLVKLSHFFYSSMMA

SEQ ID NO: 75964 - DNA, 1806 bp, Arabidopsis thaliana
  misc_feature (1)..(1806): Ceres Seq. ID no. 6460796
  misc_feature (1)..(1806): Ortholog of  Ceres SEQ ID NO 15171212 as cited in SEQ ID NO 56899
  misc_feature (1)..(1806): Ortholog of  Ceres SEQ ID NO 12613725 as cited in SEQ ID NO 68196
atggatgttcatgatctatctgaagaagccaaaagaggagtaatacacacgtcggaggaatcattggacgatctttgtgttgattttcgaggtcggccatgcaggccaagcaagcatggtggtacaagagctgccctctttgttctaggcttccaagctttcgagatgatggcgatcgcagctgttggaaacaacttgatcacatacgtattcaatgagatgcatttccctttgtcaaaatccgcaaacctcgttactaacttcataggaacggtgtttctcctctcgcttcttggtggcttcctctctgattcataccttggaagctttcgtaccatgctcgtttttggcgtcatcgaaatctctggtttcatattattgtcagtccaagctcatctcccagagctaagaccaccagaatgcaacatgaagagcaccacaatacattgcgtagaggcaaatggttacaaggcagccactctctacaccgcactctgtttagtggccttagggagcggctgcctcaaaccgaacatcatctctcacggtgcaaaccagtttcaaaggaaagatttgaggaagctctcgagtttcttcaatgcggcttacttcgccttctcaatgggtcagcttattgcactcacactcttagtttgggtgcaaacacattctggtatggacgttggttttggtgtctccgcggctgttatggccgcggggatgatcagccttgtcgctggaactagcttttataggaataaaccgcctagtggtagcatcttcacaccaattgctcaggtcttcgtagccgcgatcactaaacgaaaacagatttgcccatcaaacccaaacatggttcaccaaccttcaacggatcttgttcgtgtcaaacctctcctccattctaataaattcaggtttcttgacaaggcttgcatcaagacgcaaggcaaggcaatggagagtccatggagactctgcacaatcgaacaagtccatcaagtcaagatattgttatcagtcataccgatattcgcgtgtactatcatcttcaacaccatcttagctcagcttcaaactttctctgttcagcaaggaagttccatgaacacacacattacaaaaactttccaaattccaccagcttctcttcaagccattccttacatcattctcatcttctttgtgcctctctacgagacgttcttcgtcccactcgctagaaaactcacgggaaacgattctggaatctctcctcttcagagaattggcactggactgttcttagcaactttctcgatggttgcagccgctttagtggagaagaagagacgagaatcgttcttggaacagaacgtaatgctctcgatcttttggatcgcgccgcagtttctgatatttggtttatcagagatgtttacagccgttggattagtggagtttttttacaaacagtcttcacagagtatgcaatcttttctcacagcaatgacatactgttcttactctttcgggttttatcttagctctgttcttgtctcgaccgtgaatagagttacttctagtaatggttccgggaccaaagaaggttggttaggcgataatgaccttaacaaagatagattagatcacttttactggcttttagcttcattgagtttcatcaacttctttaattatcttttctggtcaagatggtattcgtgtgatccgtccgcgacacatcatagcgccgaagtcaatagcttggaggctttagaaaatggcgaaatcaaggattccacgacggagaagcctagaatttga

SEQ ID NO: 75965 - protein, 601 aa, Arabidopsis thaliana
  peptide (1)..(601): Ceres Seq. ID no. 6460797
MDVHDLSEEAKRGVIHTSEESLDDLCVDFRGRPCRPSKHGGTRAALFVLGFQAFEMMAIAAVGNNLITYVFNEMHFPLSKSANLVTNFIGTVFLLSLLGGFLSDSYLGSFRTMLVFGVIEISGFILLSVQAHLPELRPPECNMKSTTIHCVEANGYKAATLYTALCLVALGSGCLKPNIISHGANQFQRKDLRKLSSFFNAAYFAFSMGQLIALTLLVWVQTHSGMDVGFGVSAAVMAAGMISLVAGTSFYRNKPPSGSIFTPIAQVFVAAITKRKQICPSNPNMVHQPSTDLVRVKPLLHSNKFRFLDKACIKTQGKAMESPWRLCTIEQVHQVKILLSVIPIFACTIIFNTILAQLQTFSVQQGSSMNTHITKTFQIPPASLQAIPYIILIFFVPLYETFFVPLARKLTGNDSGISPLQRIGTGLFLATFSMVAAALVEKKRRESFLEQNVMLSIFWIAPQFLIFGLSEMFTAVGLVEFFYKQSSQSMQSFLTAMTYCSYSFGFYLSSVLVSTVNRVTSSNGSGTKEGWLGDNDLNKDRLDHFYWLLASLSFINFFNYLFWSRWYSCDPSATHHSAEVNSLEALENGEIKDSTTEKPRI

SEQ ID NO: 75966 - protein, 546 aa, Arabidopsis thaliana
  peptide (1)..(546): Ceres Seq. ID no. 6460798
MMAIAAVGNNLITYVFNEMHFPLSKSANLVTNFIGTVFLLSLLGGFLSDSYLGSFRTMLVFGVIEISGFILLSVQAHLPELRPPECNMKSTTIHCVEANGYKAATLYTALCLVALGSGCLKPNIISHGANQFQRKDLRKLSSFFNAAYFAFSMGQLIALTLLVWVQTHSGMDVGFGVSAAVMAAGMISLVAGTSFYRNKPPSGSIFTPIAQVFVAAITKRKQICPSNPNMVHQPSTDLVRVKPLLHSNKFRFLDKACIKTQGKAMESPWRLCTIEQVHQVKILLSVIPIFACTIIFNTILAQLQTFSVQQGSSMNTHITKTFQIPPASLQAIPYIILIFFVPLYETFFVPLARKLTGNDSGISPLQRIGTGLFLATFSMVAAALVEKKRRESFLEQNVMLSIFWIAPQFLIFGLSEMFTAVGLVEFFYKQSSQSMQSFLTAMTYCSYSFGFYLSSVLVSTVNRVTSSNGSGTKEGWLGDNDLNKDRLDHFYWLLASLSFINFFNYLFWSRWYSCDPSATHHSAEVNSLEALENGEIKDSTTEKPRI

SEQ ID NO: 75967 - protein, 545 aa, Arabidopsis thaliana
  peptide (1)..(545): Ceres Seq. ID no. 6460799
MAIAAVGNNLITYVFNEMHFPLSKSANLVTNFIGTVFLLSLLGGFLSDSYLGSFRTMLVFGVIEISGFILLSVQAHLPELRPPECNMKSTTIHCVEANGYKAATLYTALCLVALGSGCLKPNIISHGANQFQRKDLRKLSSFFNAAYFAFSMGQLIALTLLVWVQTHSGMDVGFGVSAAVMAAGMISLVAGTSFYRNKPPSGSIFTPIAQVFVAAITKRKQICPSNPNMVHQPSTDLVRVKPLLHSNKFRFLDKACIKTQGKAMESPWRLCTIEQVHQVKILLSVIPIFACTIIFNTILAQLQTFSVQQGSSMNTHITKTFQIPPASLQAIPYIILIFFVPLYETFFVPLARKLTGNDSGISPLQRIGTGLFLATFSMVAAALVEKKRRESFLEQNVMLSIFWIAPQFLIFGLSEMFTAVGLVEFFYKQSSQSMQSFLTAMTYCSYSFGFYLSSVLVSTVNRVTSSNGSGTKEGWLGDNDLNKDRLDHFYWLLASLSFINFFNYLFWSRWYSCDPSATHHSAEVNSLEALENGEIKDSTTEKPRI

SEQ ID NO: 75968 - DNA, 336 bp, Arabidopsis thaliana
  misc_feature (1)..(336): Ceres Seq. ID no. 6460924
  misc_feature (1)..(336): Ortholog of  Ceres SEQ ID NO 12609177 as cited in SEQ ID NO 55753
atgattcgtcttgacaaagagtatagtggaaggaggctgcttgacatcgaccaccctgaaagtccttttggtacaaaggaatctcctgctgtcgtacagtcctactttgacaagagaaatatcggatgccgtggtggtgaaggcgctgctggtcgttgtatccatttaccaatcatttgttgtgttcttatatctcctgaaactgcagaggatggacacgacgtcgtttggttctggctagataaaggaaagtcatttgaatgtccagtgtgctcccaatactttgagcacggaccaccagacggtcatggtgacgatgaagaccaccaccattga

SEQ ID NO: 75969 - protein, 111 aa, Arabidopsis thaliana
  peptide (1)..(111): Ceres Seq. ID no. 6460925
MIRLDKEYSGRRLLDIDHPESPFGTKESPAVVQSYFDKRNIGCRGGEGAAGRCIHLPIICCVLISPETAEDGHDVVWFWLDKGKSFECPVCSQYFEHGPPDGHGDDEDHHH

SEQ ID NO: 75970 - DNA, 1414 bp, Arabidopsis thaliana
  misc_feature (1)..(1414): Ceres Seq. ID no. 6461428
  misc_feature (1)..(1414): Ortholog of  Ceres SEQ ID NO 14304654 as cited in SEQ ID NO 53301
  misc_feature (1)..(1414): Ortholog of  Ceres SEQ ID NO 15172291 as cited in SEQ ID NO 55046
  misc_feature (1)..(1414): Ortholog of  Ceres SEQ ID NO 13658153 as cited in SEQ ID NO 66326
  misc_feature (1)..(1414): Ortholog of  Ceres SEQ ID NO 14303011 as cited in SEQ ID NO 67226
ataaattgaagtgtgtgagatgcatcatccatacacaacatcttccatcttccgataattctcctttagtcttataatcactaataagtacgataattgaaatggatccaagattcatcaacaccattccttccttgaggtatgatgatgataagtgtgatgatgaatatgcgtttgtgaaagctctatgtatgagtggtggagatggtgccaacagttactccgccaattctcgccttcagaaaaaagttttatcaatggccaaaccagtcttggtaagaaacacagaagaaatgatgatgaacttagactttcctacgtacatcaaagttgctgaattgggttgttcttcgggacaaaactcttttttggctatctttgagatcatcaacaccattaatgtgttgtgccaacatgtgaacaaaaactcaccagagatcgattgttgtctaaacgatctcccggaaaatgatttcaacacgacctttaagttcgtacctttcttcaacaaggagctcatgatcacaaacaaatcatcatgtttcgtctatggagctccaggttccttctattccaggctcttctctcgcaatagcctccatttaatacattcctcttatgcactccattggctctctaaggttcccgagaaacttgagaataataaggggaatctgtacataacaagttcaagtcctcaaagtgcatacaaggcctacttgaatcaattccaaaaagacttcaccatgtttctaaggttacgttctgaagaaattgtctctaatggacgtatggttctcaccttcatcggaagaaacactcttaacgatccattgtatagagattgttgtcacttttggacattgctatcaaactctctccgtgacctagtctttgagggtcttgtgagtgagtcaaagctggacgcattcaacatgccgttttatgatccgaacgtacaagaactcaaagaagtgatacaaaaagagggctcttttgaaatcaatgaattggagtcacatggatttgatcttggtcactactacgaagaagatgactttgaagcaggacgcaatgaagctaatggcataagagctgttagtgaaccaatgctcattgctcattttggagaagaaattatcgataccttgttcgataagtatgcataccatgtgactcaacatgccaactgcaggaacaaaacgactgtcagtcttgtcgtttccttgactaagaagtaagaagtaatcaacttctgtcatgttgctctatttgtatttatttactactgttattttgtttccttgaataaatttcaacacctgccattcaatgtgatgatgtggagctagtattggaaaaaagtgtgactgtaatatattatggtaaatttggtaaatgatttatttcctgc

SEQ ID NO: 75971 - protein, 379 aa, Arabidopsis thaliana; identical to SEQ ID NO: 22507
  peptide (1)..(379): Ceres Seq. ID no. 6461429

SEQ ID NO: 75972 - protein, 349 aa, Arabidopsis thaliana; identical to SEQ ID NO: 22508
  peptide (1)..(349): Ceres Seq. ID no. 6461430

SEQ ID NO: 75973 - protein, 327 aa, Arabidopsis thaliana; identical to SEQ ID NO: 22509
  peptide (1)..(327): Ceres Seq. ID no. 6461431

SEQ ID NO: 75974 - DNA, 1103 bp, Arabidopsis thaliana
  misc_feature (1)..(1103): Ceres Seq. ID no. 6461444
  misc_feature (1)..(1103): Ortholog of  Ceres SEQ ID NO 13639109 as cited in SEQ ID NO 51131
  misc_feature (1)..(1103): Ortholog of  Ceres SEQ ID NO 13596346 as cited in SEQ ID NO 60879
  misc_feature (1)..(1103): Ortholog of  Ceres SEQ ID NO 15178104 as cited in SEQ ID NO 0
agagctcaagaaacatccctccataatttgcttctcttttctccaattctcacacattcttctgcttcgttaattttctactcgatttcgctcttcagaaatttgacaatgaagcttgacactagtggattggagacaactatgcctgtgattggctttggatcaaacagtgagatgcttgatgggttttcgtctgcaccttcgtttgatcttcctcgtaccactgattttgatgggtttcagaaaaaagctgtggagatggtgaagcctgcaaagggtacaactacacttgcgtttatctttaaggaaggtgttatggtagctgctgattctcgagctagcatgggaggatatatctcgtcgcaatctgtgaagaagattattgaaattaatccttatatgcttggtacaatggctggtggtgctgctgattgtcaattctggcacagaaatctgggaattaagtgccgtctacatgagctggcaaacaaaaggagaatctctgtttcaggagcttcaaagcttcttgctaacatgctctattcatatcgtggaatgggactttctgttggcacaatgattgctggatgggatgaaacaggccctggattgtactatgttgacaacgaaggaggacggcttaagggagacagattctctgtcggttcaggttcaccatacgcttatggtgttctggacagcggatacaaattcgatatgtcggttgaagaagcctcagagttagcaaggagatccatctaccatgctacattccgtgatggagctagtggtggagttgctagcgtgtaccacgttgggccgcaaggatggacgaaactctctggagacgacgttggcgagctacattaccattattaccccgtggctccaatcaccgcggaacatgtgatggaagaggctgccgaataagtactgtgattcttgtctatcttactaagagttttattacatcacttatgttttgttcatcaatgaacagaatcatagattcaagtttcttttgtattgcgaatgatgtagacgttagtttggccacaatgatcacgttgcataatagataacataatagataacctgtttct

SEQ ID NO: 75975 - protein, 309 aa, Arabidopsis thaliana; identical to SEQ ID NO: 30156
  peptide (1)..(309): Ceres Seq. ID no. 6461445

SEQ ID NO: 75976 - protein, 273 aa, Arabidopsis thaliana; identical to SEQ ID NO: 30157
  peptide (1)..(273): Ceres Seq. ID no. 6461446

SEQ ID NO: 75977 - protein, 262 aa, Arabidopsis thaliana; identical to SEQ ID NO: 30158
  peptide (1)..(262): Ceres Seq. ID no. 6461447

SEQ ID NO: 75978 - DNA, 2310 bp, Arabidopsis thaliana
  misc_feature (1)..(2310): Ceres Seq. ID no. 6461560
  misc_feature (1)..(2310): Ortholog of  Ceres SEQ ID NO 13582534 as cited in SEQ ID NO 57409
  misc_feature (1)..(2310): Ortholog of  Ceres SEQ ID NO 14302384 as cited in SEQ ID NO 67177
  misc_feature (1)..(2310): Ortholog of  Ceres SEQ ID NO 13584744 as cited in SEQ ID NO 69137
cttctcatagagacagaaaaagactactaatttacctctcgtgtaggaaaacaaagcaaaactggagtcattctctgtttcaaagagttatggtggtttcagtgaccatacgtcgtcgttttgttcttcttctacttgcatgcacttgtttgttgtctcggagactctgttttggtgaggacagaatcactttctcaagtcctatcaaagactcagagtcagagacccttctatgcaaaagtggtattttcaggtttggtttcttcactcctgttaattccactactcggttacgttatgttgggatttggtacgaaaagattccaatccaaactgtggtttgggttgctaacaaagactctcccatcaacgacacttccggtgttatctcgatctatcaagatggaaatctcgcggttaccgatggtcgaaatcgccttgtatggtcgacgaatgtctcagtaccagtagctccaaatgctacttgggttcagcttatggattctgggaatcttatgttacaagacaacagaaacaatggtgagattctttgggagagtttcaagcatccttatgattctttcatgccaagaatgactcttggcaccgacggtagaactggaggtaacctaaagcttacttcttggacaagccacgatgatccttcaacaggaaactacacagctggtattgctcctttcacgtttcctgagcttcttatctggaagaacaatgtcccaacgtggcgtagcggaccgtggaacggtcaggttttcatcggtttaccgaatatggattcacttctgtttcttgatgggtttaatcttaacagtgataatcaaggaacgatctcaatgtcttatgctaatgattcgttcatgtatcactttaacttggatcctgaaggaattatttatcagaaagattggagtacttctatgagaacttggaggataggtgtaaagtttccatacacagactgtgatgcatacggtagatgtggtcgattcgggagctgccatgccggggaaaacccgccttgtaaatgtgttaaagggtttgttccaaagaataacacagagtggaatggtggtaattggagtaatggatgtatgagaaaagctccattgcagtgtgaaagacagagaaatgtaagtaatggtggtggtggaggaaaagcagatggttttttgaaactgcagaagatgaaagtaccaatctctgcggaacggtctgaagctagtgaacaagtttgtcctaaagtatgcttagataactgttcttgcacagcttatgcatatgatagaggaattggatgcatgctttggagtggtgatttagttgatatgcaatcatttttgggaagtggcattgatctttttattcgtgttgctcattcagaactcaaaacacatagcaatctagcagttatgatcgcagcacctgtgataggcgttatgttaattgctgcggtctgcgttcttttagcatgccggaaatacaaaaagcgtccagctccagcgaaagatagaagtgcagagctaatgtttaagagaatggaagcacttacaagtgataatgagtctgcttctaaccaaatcaagctcaaggagcttccactctttgagtttcaagtgttagctacatcaactgatagcttctctctaagaaacaagctcgggcaaggcgggtttggtcctgtttacaagggaaaattacctgaaggacaagaaattgcagtgaagaggctctcacggaaatcaggtcaaggactagaggaacttatgaacgaagtggttgtgatatctaagttgcaacatcggaatctagtgaagttacttggatgttgtattgaaggtgaagaaagaatgttagtatatgaatatatgccaaagaaaagcttggatgcatatctttttgacccaatgaagcaaaagattcttgattggaagactcggttcaacataatggaaggaatttgcagaggtcttttgtaccttcacagagattcaagactaaagatcatacacagagatttaaaagccagcaacattttgttagatgagaatctaaaccccaagatatctgattttggacttgcaagaattttccgagcgaatgaagatgaagctaacacaagaagggttgttggaacatacggctatatgtcaccggagtatgcaatggaaggtttcttttcagaaaaatcagatgttttcagcttgggggttatatttctcgagatcataagtgggagaagaaactctagttctcacaaggaagagaataatctcaaccttttggcttatg

SEQ ID NO: 75979 - protein, 769 aa, Arabidopsis thaliana
  peptide (1)..(769): Ceres Seq. ID no. 6461561
SHRDRKRLLIYLSCRKTKQNWSHSLFQRVMVVSVTIRRRFVLLLLACTCLLSRRLCFGEDRITFSSPIKDSESETLLCKSGIFRFGFFTPVNSTTRLRYVGIWYEKIPIQTVVWVANKDSPINDTSGVISIYQDGNLAVTDGRNRLVWSTNVSVPVAPNATWVQLMDSGNLMLQDNRNNGEILWESFKHPYDSFMPRMTLGTDGRTGGNLKLTSWTSHDDPSTGNYTAGIAPFTFPELLIWKNNVPTWRSGPWNGQVFIGLPNMDSLLFLDGFNLNSDNQGTISMSYANDSFMYHFNLDPEGIIYQKDWSTSMRTWRIGVKFPYTDCDAYGRCGRFGSCHAGENPPCKCVKGFVPKNNTEWNGGNWSNGCMRKAPLQCERQRNVSNGGGGGKADGFLKLQKMKVPISAERSEASEQVCPKVCLDNCSCTAYAYDRGIGCMLWSGDLVDMQSFLGSGIDLFIRVAHSELKTHSNLAVMIAAPVIGVMLIAAVCVLLACRKYKKRPAPAKDRSAELMFKRMEALTSDNESASNQIKLKELPLFEFQVLATSTDSFSLRNKLGQGGFGPVYKGKLPEGQEIAVKRLSRKSGQGLEELMNEVVVISKLQHRNLVKLLGCCIEGEERMLVYEYMPKKSLDAYLFDPMKQKILDWKTRFNIMEGICRGLLYLHRDSRLKIIHRDLKASNILLDENLNPKISDFGLARIFRANEDEANTRRVVGTYGYMSPEYAMEGFFSEKSDVFSLGVIFLEIISGRRNSSSHKEENNLNLLAY

SEQ ID NO: 75980 - protein, 740 aa, Arabidopsis thaliana
  peptide (1)..(740): Ceres Seq. ID no. 6461562
MVVSVTIRRRFVLLLLACTCLLSRRLCFGEDRITFSSPIKDSESETLLCKSGIFRFGFFTPVNSTTRLRYVGIWYEKIPIQTVVWVANKDSPINDTSGVISIYQDGNLAVTDGRNRLVWSTNVSVPVAPNATWVQLMDSGNLMLQDNRNNGEILWESFKHPYDSFMPRMTLGTDGRTGGNLKLTSWTSHDDPSTGNYTAGIAPFTFPELLIWKNNVPTWRSGPWNGQVFIGLPNMDSLLFLDGFNLNSDNQGTISMSYANDSFMYHFNLDPEGIIYQKDWSTSMRTWRIGVKFPYTDCDAYGRCGRFGSCHAGENPPCKCVKGFVPKNNTEWNGGNWSNGCMRKAPLQCERQRNVSNGGGGGKADGFLKLQKMKVPISAERSEASEQVCPKVCLDNCSCTAYAYDRGIGCMLWSGDLVDMQSFLGSGIDLFIRVAHSELKTHSNLAVMIAAPVIGVMLIAAVCVLLACRKYKKRPAPAKDRSAELMFKRMEALTSDNESASNQIKLKELPLFEFQVLATSTDSFSLRNKLGQGGFGPVYKGKLPEGQEIAVKRLSRKSGQGLEELMNEVVVISKLQHRNLVKLLGCCIEGEERMLVYEYMPKKSLDAYLFDPMKQKILDWKTRFNIMEGICRGLLYLHRDSRLKIIHRDLKASNILLDENLNPKISDFGLARIFRANEDEANTRRVVGTYGYMSPEYAMEGFFSEKSDVFSLGVIFLEIISGRRNSSSHKEENNLNLLAY

SEQ ID NO: 75981 - protein, 604 aa, Arabidopsis thaliana
  peptide (1)..(604): Ceres Seq. ID no. 6461563
MDSGNLMLQDNRNNGEILWESFKHPYDSFMPRMTLGTDGRTGGNLKLTSWTSHDDPSTGNYTAGIAPFTFPELLIWKNNVPTWRSGPWNGQVFIGLPNMDSLLFLDGFNLNSDNQGTISMSYANDSFMYHFNLDPEGIIYQKDWSTSMRTWRIGVKFPYTDCDAYGRCGRFGSCHAGENPPCKCVKGFVPKNNTEWNGGNWSNGCMRKAPLQCERQRNVSNGGGGGKADGFLKLQKMKVPISAERSEASEQVCPKVCLDNCSCTAYAYDRGIGCMLWSGDLVDMQSFLGSGIDLFIRVAHSELKTHSNLAVMIAAPVIGVMLIAAVCVLLACRKYKKRPAPAKDRSAELMFKRMEALTSDNESASNQIKLKELPLFEFQVLATSTDSFSLRNKLGQGGFGPVYKGKLPEGQEIAVKRLSRKSGQGLEELMNEVVVISKLQHRNLVKLLGCCIEGEERMLVYEYMPKKSLDAYLFDPMKQKILDWKTRFNIMEGICRGLLYLHRDSRLKIIHRDLKASNILLDENLNPKISDFGLARIFRANEDEANTRRVVGTYGYMSPEYAMEGFFSEKSDVFSLGVIFLEIISGRRNSSSHKEENNLNLLAY

SEQ ID NO: 75982 - DNA, 1095 bp, Arabidopsis thaliana
  misc_feature (1)..(1095): Ceres Seq. ID no. 6461580
  misc_feature (1)..(1095): Ortholog of  Ceres SEQ ID NO 12590542 as cited in SEQ ID NO 621
  misc_feature (1)..(1095): Ortholog of  Ceres SEQ ID NO 12421854 as cited in SEQ ID NO 20723
  misc_feature (1)..(1095): Ortholog of  Ceres SEQ ID NO 13597847 as cited in SEQ ID NO 64858
atgtctagtagtaccaagaacattccaaaacctcctcctcttccttgtattacctaccagcgttttcaatctagtacaaggaaaccttcgagcttaatgcgccttgtgcctaaagaagcacttgaaacttgggataagcttttcaaggaaggatctggagcagatacatatgttgaaaccgataacaagtctcactttcctgcccattcaagtgtcctggctgcagcctcaccagttatagcgacacttctgaatcaatcgagggataagaatgggaatacatacctcaaaatccatggagttccttgtgaagcagtctacatgttcattaggtttctatactcttcctgctacgaggaggaagaaatgaagaagtttgtgctccatttattggttctgtcacattgctactcggtcccatctcttaaaagactttgtgtagagattctcgatcaaggatggattaacaaggagaatgtgatcgatgtgcttcaactagcgagaaactgtgacgtgacaaggatttgctttgtatgtctttccatggtcatcaaagacttcaaatctgtatcttcaacagagggatggaaagtgatgaaacgctctaatcctttgctcgaacaagagctcattgaggcagtcatcgaatccgacagtaggaaacaagaaagaagaagaaaactggaggagagagaagtgtatttgcagctctatgaagccatggaagctcttgtccacatatgtcgtgaaggttgtgggacaattggacctcgcgataaggcccttaaaggaagccataccgtgtgtaaattcccggcgtgtaaagggcttgaaggtgcgctcagacatttcttgggatgcaagtctagggcttcatgttctcattgcaaaaggatgtggcagcttcttcagcttcactcttgtatctgtgatgattctaattcttgcaaagtttctctctgctggaatttcaaggagaaaatgaagaagcttagcaagaaagaacaatctaaatggcgattgcttgtagaaaacattattagggcgaggaacagtctcgggcccttctcgtcacgttcttctggtttgatatag

SEQ ID NO: 75983 - protein, 364 aa, Arabidopsis thaliana
  peptide (1)..(364): Ceres Seq. ID no. 6461581
MSSSTKNIPKPPPLPCITYQRFQSSTRKPSSLMRLVPKEALETWDKLFKEGSGADTYVETDNKSHFPAHSSVLAAASPVIATLLNQSRDKNGNTYLKIHGVPCEAVYMFIRFLYSSCYEEEEMKKFVLHLLVLSHCYSVPSLKRLCVEILDQGWINKENVIDVLQLARNCDVTRICFVCLSMVIKDFKSVSSTEGWKVMKRSNPLLEQELIEAVIESDSRKQERRRKLEEREVYLQLYEAMEALVHICREGCGTIGPRDKALKGSHTVCKFPACKGLEGALRHFLGCKSRASCSHCKRMWQLLQLHSCICDDSNSCKVSLCWNFKEKMKKLSKKEQSKWRLLVENIIRARNSLGPFSSRSSGLI

SEQ ID NO: 75984 - protein, 332 aa, Arabidopsis thaliana
  peptide (1)..(332): Ceres Seq. ID no. 6461582
MRLVPKEALETWDKLFKEGSGADTYVETDNKSHFPAHSSVLAAASPVIATLLNQSRDKNGNTYLKIHGVPCEAVYMFIRFLYSSCYEEEEMKKFVLHLLVLSHCYSVPSLKRLCVEILDQGWINKENVIDVLQLARNCDVTRICFVCLSMVIKDFKSVSSTEGWKVMKRSNPLLEQELIEAVIESDSRKQERRRKLEEREVYLQLYEAMEALVHICREGCGTIGPRDKALKGSHTVCKFPACKGLEGALRHFLGCKSRASCSHCKRMWQLLQLHSCICDDSNSCKVSLCWNFKEKMKKLSKKEQSKWRLLVENIIRARNSLGPFSSRSSGLI

SEQ ID NO: 75985 - protein, 257 aa, Arabidopsis thaliana
  peptide (1)..(257): Ceres Seq. ID no. 6461583
MFIRFLYSSCYEEEEMKKFVLHLLVLSHCYSVPSLKRLCVEILDQGWINKENVIDVLQLARNCDVTRICFVCLSMVIKDFKSVSSTEGWKVMKRSNPLLEQELIEAVIESDSRKQERRRKLEEREVYLQLYEAMEALVHICREGCGTIGPRDKALKGSHTVCKFPACKGLEGALRHFLGCKSRASCSHCKRMWQLLQLHSCICDDSNSCKVSLCWNFKEKMKKLSKKEQSKWRLLVENIIRARNSLGPFSSRSSGLI

SEQ ID NO: 75986 - DNA, 1030 bp, Arabidopsis thaliana
  misc_feature (1)..(1030): Ceres Seq. ID no. 7080818
  misc_feature (1)..(1030): Ortholog of  Ceres SEQ ID NO 13638897 as cited in SEQ ID NO 55839
  misc_feature (1)..(1030): Ortholog of  Ceres SEQ ID NO 15177758 as cited in SEQ ID NO 57504
  misc_feature (1)..(1030): Ortholog of  Ceres SEQ ID NO 13596958 as cited in SEQ ID NO 63319
  misc_feature (1)..(1030): Ortholog of  Ceres SEQ ID NO 12614573 as cited in SEQ ID NO 68344
  misc_feature (1)..(1030): Ortholog of  Ceres SEQ ID NO 12614814 as cited in SEQ ID NO 68816
  misc_feature (1)..(1030): Ortholog of  Ceres SEQ ID NO 13624040 as cited in SEQ ID NO 0
ctcgagctacgtcagggctctcctctctttcaaggataataaccaaaagcttttctttttatcttctcctgcaattcttgaagaaatggatgagtttgttaacctcaaggaaacagagctgaggctgggattaccgggaacagataatgtatgtgaagcaaaagagagagtttcttgctgtaataacaacaataagagagtactatcaactgatactgagaaggagattgaatcatcatcaaggaaaactgaaacatcccctcctcgaaaggctcagattgttggatggccaccagttagatcttacaggaagaacaacattcagagtaagaagaatgaatctgagcatgagggtcaaggaatctatgtgaaagtaagtatggatggtgcaccatacttgaggaaaatagatctgagttgttacaaaggatactcagagttgcttaaagctttagaagtgatgttcaaattctctgtgggagagtactttgagagagatggatataaaggttcagactttgtgcctacttatgaagacaaagatggtgattggatgctcattggtgatgttccatgggagatgttcatatgtacgtgcaagagactaaggatcatgaaaggatcagaagccaaaggtttaggctgtggtgtatgagatatatcttcaagaaatctaacagagacacaaaagaacttgaagaaaaatagagtttcttttggttcagagaaatctctgtctgtgcttgggttgtcgggtttctcgggcaagatctatgttcattggattgaatccaattcatagcctttatttacctcatcggtaaaattcaaatgtaaacatgcttaatggtcttaagcatatgaaactggaacctaattacattttgtttcagaaacagggcaaaaggttgtccttaaatctttggttatgtgtattacattaattaaagtgttatgaagattgaagagttgtttttatatttgtagcaattctgttttgcgttctcattgatcaaagagattttcaagc

SEQ ID NO: 75987 - protein, 217 aa, Arabidopsis thaliana
  peptide (1)..(217): Ceres Seq. ID no. 7080819
SSYVRALLSFKDNNQKLFFLSSPAILEEMDEFVNLKETELRLGLPGTDNVCEAKERVSCCNNNNKRVLSTDTEKEIESSSRKTETSPPRKAQIVGWPPVRSYRKNNIQSKKNESEHEGQGIYVKVSMDGAPYLRKIDLSCYKGYSELLKALEVMFKFSVGEYFERDGYKGSDFVPTYEDKDGDWMLIGDVPWEMFICTCKRLRIMKGSEAKGLGCGV

SEQ ID NO: 75988 - protein, 189 aa, Arabidopsis thaliana; identical to SEQ ID NO: 47255
  peptide (1)..(189): Ceres Seq. ID no. 7080820

SEQ ID NO: 75989 - DNA, 898 bp, Arabidopsis thaliana
  misc_feature (1)..(898): Ceres Seq. ID no. 7087445
  misc_feature (1)..(898): Ortholog of  Ceres SEQ ID NO 14306297 as cited in SEQ ID NO 56907
caattattcaagatcgagacaagtgaagagtcgacaagaacatatagagattcatccatatcttgcgtgagaaaagcaaaggctaataacagttgagagaagggtgtgtttgtatgggctgctctgtatcgaagaagaagaagaagaatgcaatgcgaccaccgggatatgaggatcccgagcttcttgcatccgtcacgccattcacggtagaagaagtggaggctttgtatgaactgttcaagaagctaagcagctcaattatcgatgatggtcttattcataaggaagaatttcagctggctttattcagaaataggaaccggaggaatctcttcgctgatcggatatttgatgtatttgatgtgaagcgaaatggagtgatcgagtttggtgaatttgtccggtccttaggtgtcttccatccaagcgcgccggtccatgaaaaagtcaaatttgctttcaagttgtacgatttacgacaaactggattcatcgagcgagaagaattgaaagagatggtagtagcgcttcttcacgaatccgaactagttctttccgaagatatgattgaagtaatggtggataaggctttcgtgcaagcagaccgcaaaaacgacggaaaaatcgatatagatgaatggaaagactttgtatccttgaatccatcgctcatcaagaacatgactttgccatatctaaaggacataaataggacgtttccaagtttcgtttcatcttgtgaagaggaagaaatggaattgcaaaacgtatcttcctaatataagccatgcaaggaaagataaatatacataaaacgaatatttttgtacaagatcttaaaagaggaagatagagatgtaagctaggatttggaaataaaccgatcttgataacg

SEQ ID NO: 75990 - protein, 222 aa, Arabidopsis thaliana
  peptide (1)..(222): Ceres Seq. ID no. 7087446
MGCSVSKKKKKNAMRPPGYEDPELLASVTPFTVEEVEALYELFKKLSSSIIDDGLIHKEEFQLALFRNRNRRNLFADRIFDVFDVKRNGVIEFGEFVRSLGVFHPSAPVHEKVKFAFKLYDLRQTGFIEREELKEMVVALLHESELVLSEDMIEVMVDKAFVQADRKNDGKIDIDEWKDFVSLNPSLIKNMTLPYLKDINRTFPSFVSSCEEEEMELQNVSS

SEQ ID NO: 75991 - protein, 209 aa, Arabidopsis thaliana
  peptide (1)..(209): Ceres Seq. ID no. 7087447
MRPPGYEDPELLASVTPFTVEEVEALYELFKKLSSSIIDDGLIHKEEFQLALFRNRNRRNLFADRIFDVFDVKRNGVIEFGEFVRSLGVFHPSAPVHEKVKFAFKLYDLRQTGFIEREELKEMVVALLHESELVLSEDMIEVMVDKAFVQADRKNDGKIDIDEWKDFVSLNPSLIKNMTLPYLKDINRTFPSFVSSCEEEEMELQNVSS

SEQ ID NO: 75992 - DNA, 962 bp, Arabidopsis thaliana
  misc_feature (1)..(962): Ceres Seq. ID no. 7088168
  misc_feature (1)..(962): Ortholog of  Ceres SEQ ID NO 13638835 as cited in SEQ ID NO 52005
  misc_feature (1)..(962): Ortholog of  Ceres SEQ ID NO 12614289 as cited in SEQ ID NO 68735
  misc_feature (1)..(962): Ortholog of  Ceres SEQ ID NO 14309007 as cited in SEQ ID NO 0
cttggctcttagggctcgctaaattttctcagggctgtgaccatcgaccatcgtcgtcttcgcggagctcagttgaaagatgttaacggctgatataccaccaaatcagtcaatctacataaaacatatcaatgagaagatcaagaaagaagagctgaagaggtctctttactgtttgttctctcagtttggaagattacttgatgtggttgcgttaaagactcctaagctccggggacaagcatgggttgtttttactgaagtcaccgctgctagcaacgctgtccgtcagatgcagaactttcctttctatgataagcctatgcggatacaatatgcaaaatcaaagtcagattatgttactaaagccgaagggtcttttgttccaaaagaaaagaagatgaagcaagaagagaaagttgaaaggaagcgacatgctgaagaaactcaacaaccaagcatgcctaatggcgcaactactcagaacggaatgcctcctcctttccagccgagtgggcaagacacgatgccaccaaacaacatactcttcattcataatcttcccattgagacgaatagtatgatgcttcagctgctctttgagcaatacccaggattcaaagagataagaatgatcgaagcaaaacccggaattgcgtttgtggagtatgaagacgatgttcagtcttccatggccatgcaggctcttcagggtttcaagatcactccgcagaatccaatggtcgtctcttttgccaagaagtgaaaaccagagttttgttatgcggatgaatggtaatgatatactaattagtagctgtttaaaagcaaactgtcttattttatttggttcgtttccgattagtggtgtgaatgaccccgaagctttagaccagaatgtaatgagatcgaagaattgagagtgatttggttggagaaaatctcattttaaatgccttatt

SEQ ID NO: 75993 - protein, 228 aa, Arabidopsis thaliana
  peptide (1)..(228): Ceres Seq. ID no. 7088169
MLTADIPPNQSIYIKHINEKIKKEELKRSLYCLFSQFGRLLDVVALKTPKLRGQAWVVFTEVTAASNAVRQMQNFPFYDKPMRIQYAKSKSDYVTKAEGSFVPKEKKMKQEEKVERKRHAEETQQPSMPNGATTQNGMPPPFQPSGQDTMPPNNILFIHNLPIETNSMMLQLLFEQYPGFKEIRMIEAKPGIAFVEYEDDVQSSMAMQALQGFKITPQNPMVVSFAKK

SEQ ID NO: 75994 - protein, 157 aa, Arabidopsis thaliana
  peptide (1)..(157): Ceres Seq. ID no. 7088170
MQNFPFYDKPMRIQYAKSKSDYVTKAEGSFVPKEKKMKQEEKVERKRHAEETQQPSMPNGATTQNGMPPPFQPSGQDTMPPNNILFIHNLPIETNSMMLQLLFEQYPGFKEIRMIEAKPGIAFVEYEDDVQSSMAMQALQGFKITPQNPMVVSFAKK

SEQ ID NO: 75995 - protein, 147 aa, Arabidopsis thaliana
  peptide (1)..(147): Ceres Seq. ID no. 7088171
MRIQYAKSKSDYVTKAEGSFVPKEKKMKQEEKVERKRHAEETQQPSMPNGATTQNGMPPPFQPSGQDTMPPNNILFIHNLPIETNSMMLQLLFEQYPGFKEIRMIEAKPGIAFVEYEDDVQSSMAMQALQGFKITPQNPMVVSFAKK

SEQ ID NO: 75996 - DNA, 1499 bp, Arabidopsis thaliana
  misc_feature (1)..(1499): Ceres Seq. ID no. 7088897
  misc_feature (1)..(1499): Ortholog of  Ceres SEQ ID NO 14306949 as cited in SEQ ID NO 54919
  misc_feature (1)..(1499): Ortholog of  Ceres SEQ ID NO 15175723 as cited in SEQ ID NO 57875
ggcacgagggagagagaactggtctctcccattttctgttctcttttgtattctgagtgaaagttttgttttctgggggaaaaaattagggttcttagatggaggagatagaaggaacaaacagagcagctgttgagagttgtcatagagttcttaatcttttacatagatcacagcaacaagatcatgttggttttgaaaagaatttagtatctgaaactagagaagctgtgattaggttcaagagagttgggagtttgttaagcagtagtgttggtcatgctaggtttagaagagctaagaaacttcagagtcatgtctctcaaagtctcttacttgatccatgtcaacaaaggacaacagaagttccatcatcatcttctcagaaaacaccggtactccggtctggtttccaggaattgagcttgagacaaccttcagattcactcactttagggactcgctcttttagtttaaactcaaatgctaaagctcctctccttcagcttaatcagcagacaatgcctccttcgaattatcctactttgtttccagtacaacaacaacaacaacaacaacaacaacaacaacagcaggagcagcagcagcagcagcagcagcaacagcaacagtttcatgaacggttacaagctcaccatcttcatcagcaacagcagctacagaaacatcaagctgagcttatgcttaggaaatgcaatggtgggataagtttgagtttcgataactctagttgtactccaactatgtcatccactaggtcctttgtttcttcacttagcatagatggtagtgttgctaatatagagggaaagaactccttccattttggggttcctagttcaactgatcagaattcactacattctaagaggaaatgccccttgaaaggagatgaacatggaagcttaaaatgcgggagctctagccgatgccactgcgctaagaagaggaaacatcgggttaggagatcgattagagtaccggctataagtaacaaggttgcagatatccctcctgatgattattcatggcgaaaatatggtcagaagcccatcaagggctctccttatcccagaggatattacaaatgtagtagcatgagaggttgtccagcgaggaagcatgttgagagatgtttggaagatccggcaatgcttattgttacttatgaagcagagcataaccacccgaaattgccatctcaagctataacaacttaactctcgtttatctttgcggtccagcataaaccttctcatgtatgttgttctcttttgtgcgcgatgatcggctttggggttgctgcaatgttgtgatatatggatcggggtaagtgcttttgttggggtggatttgcttgtgagagtttgctgcaattgttggattttgagctatatatggggtaaatgtaggattggtcaagactctttttctgtttctcaagtttattggtcttaatgattaaaagtttaatggtt

SEQ ID NO: 75997 - protein, 380 aa, Arabidopsis thaliana
  peptide (1)..(380): Ceres Seq. ID no. 7088898
MEEIEGTNRAAVESCHRVLNLLHRSQQQDHVGFEKNLVSETREAVIRFKRVGSLLSSSVGHARFRRAKKLQSHVSQSLLLDPCQQRTTEVPSSSSQKTPVLRSGFQELSLRQPSDSLTLGTRSFSLNSNAKAPLLQLNQQTMPPSNYPTLFPVQQQQQQQQQQQQQEQQQQQQQQQQQFHERLQAHHLHQQQQLQKHQAELMLRKCNGGISLSFDNSSCTPTMSSTRSFVSSLSIDGSVANIEGKNSFHFGVPSSTDQNSLHSKRKCPLKGDEHGSLKCGSSSRCHCAKKRKHRVRRSIRVPAISNKVADIPPDDYSWRKYGQKPIKGSPYPRGYYKCSSMRGCPARKHVERCLEDPAMLIVTYEAEHNHPKLPSQAITT

SEQ ID NO: 75998 - protein, 239 aa, Arabidopsis thaliana
  peptide (1)..(239): Ceres Seq. ID no. 7088899
MPPSNYPTLFPVQQQQQQQQQQQQQEQQQQQQQQQQQFHERLQAHHLHQQQQLQKHQAELMLRKCNGGISLSFDNSSCTPTMSSTRSFVSSLSIDGSVANIEGKNSFHFGVPSSTDQNSLHSKRKCPLKGDEHGSLKCGSSSRCHCAKKRKHRVRRSIRVPAISNKVADIPPDDYSWRKYGQKPIKGSPYPRGYYKCSSMRGCPARKHVERCLEDPAMLIVTYEAEHNHPKLPSQAITT

SEQ ID NO: 75999 - DNA, 1227 bp, Arabidopsis thaliana
  misc_feature (1)..(1227): Ceres Seq. ID no. 7089997
  misc_feature (1)..(1227): Ortholog of  Ceres SEQ ID NO 15178181 as cited in SEQ ID NO 58740
  misc_feature (1)..(1227): Ortholog of  Ceres SEQ ID NO 12614739 as cited in SEQ ID NO 68587
ctagaggatctactagtcatatggattcccgaattcatgtcttatgagaaggagctagccgctgcaaagaaagccgtcactctagctgctcgtctcagccaggaagtgcagaagactcttttgcaatcccaagtttggaaaaaatccgatagaagtccggttactgcagctgattacggctcacaagctgtggttagtcttgtattggagagggagctccaacctgataaactgtcattagtagctgaagaggaaactggagatctgcggaagaatggaagtgaggcgtttctagaagatattgcaaagcttgtgaaagatactctagcctctgaggaatcgtacaccagctctcctctatccacagatgatgtgttaaatgctatagactgcggtaaatcagaaggcggttgcaaaggttcccactgggttcttgatcctatagatggaaccagaggatttgtaagaggagagcaatacgcggtggggttagccttgcttgtggaaggcaaagtggtgcttggtgtcatggcttgcccaaatcttcctttggcttctgcggtttgcgcgactgataattcttcccaggaagatgttggctgtcttttctttgctacaacgggttcagggacttacgtgcaatcgctcaaaggcaattctctgccacaaaaggtgcaagtgagtagcaatgagaatcttgatgaagcgaagttcttagaatcataccacaaaccaattcccatccatggtaccattgccaagaaactcgggattaaagcattacctgtaaggatcgatagccaagctaagtatgcggctttgtcgcgaggagacgcagagatatacttgcgtttcactctcaatggataccgtgagtgtatttgggaccatgcacctggttcaataatcactacagaagctggaggcgtagtgtgtgatgctacagggaaatctctggacttctcgaaaggaaagtatcttgctcacaaaacggggatcatagttaccaccaagaaactcaagccatggatattgaaggcagtcagagaatccatagaagaagagaatctttatttctgaggcacaacagaaactgtacaatacagtatttgtatttgtctgaactagtaattggtgtatattcttagttcatatatcgtatacatcagatatgaaagatatttttgcttagataatgaataatgatactaaggaagattcgatttg

SEQ ID NO: 76000 - protein, 359 aa, Arabidopsis thaliana
  peptide (1)..(359): Ceres Seq. ID no. 7089998
LEDLLVIWIPEFMSYEKELAAAKKAVTLAARLSQEVQKTLLQSQVWKKSDRSPVTAADYGSQAVVSLVLERELQPDKLSLVAEEETGDLRKNGSEAFLEDIAKLVKDTLASEESYTSSPLSTDDVLNAIDCGKSEGGCKGSHWVLDPIDGTRGFVRGEQYAVGLALLVEGKVVLGVMACPNLPLASAVCATDNSSQEDVGCLFFATTGSGTYVQSLKGNSLPQKVQVSSNENLDEAKFLESYHKPIPIHGTIAKKLGIKALPVRIDSQAKYAALSRGDAEIYLRFTLNGYRECIWDHAPGSIITTEAGGVVCDATGKSLDFSKGKYLAHKTGIIVTTKKLKPWILKAVRESIEEENLYF

SEQ ID NO: 76001 - protein, 347 aa, Arabidopsis thaliana
  peptide (1)..(347): Ceres Seq. ID no. 7089999
MSYEKELAAAKKAVTLAARLSQEVQKTLLQSQVWKKSDRSPVTAADYGSQAVVSLVLERELQPDKLSLVAEEETGDLRKNGSEAFLEDIAKLVKDTLASEESYTSSPLSTDDVLNAIDCGKSEGGCKGSHWVLDPIDGTRGFVRGEQYAVGLALLVEGKVVLGVMACPNLPLASAVCATDNSSQEDVGCLFFATTGSGTYVQSLKGNSLPQKVQVSSNENLDEAKFLESYHKPIPIHGTIAKKLGIKALPVRIDSQAKYAALSRGDAEIYLRFTLNGYRECIWDHAPGSIITTEAGGVVCDATGKSLDFSKGKYLAHKTGIIVTTKKLKPWILKAVRESIEEENLYF

SEQ ID NO: 76002 - protein, 183 aa, Arabidopsis thaliana
  peptide (1)..(183): Ceres Seq. ID no. 7090000
MACPNLPLASAVCATDNSSQEDVGCLFFATTGSGTYVQSLKGNSLPQKVQVSSNENLDEAKFLESYHKPIPIHGTIAKKLGIKALPVRIDSQAKYAALSRGDAEIYLRFTLNGYRECIWDHAPGSIITTEAGGVVCDATGKSLDFSKGKYLAHKTGIIVTTKKLKPWILKAVRESIEEENLYF

SEQ ID NO: 76003 - DNA, 1183 bp, Arabidopsis thaliana
  misc_feature (1)..(1183): Ceres Seq. ID no. 7094716
  misc_feature (1)..(1183): Ortholog of  Ceres SEQ ID NO 15171366 as cited in SEQ ID NO 51578
  misc_feature (1)..(1183): Ortholog of  Ceres SEQ ID NO 15175723 as cited in SEQ ID NO 57875
  misc_feature (1)..(1183): Ortholog of  Ceres SEQ ID NO 14314909 as cited in SEQ ID NO 58002
  misc_feature (1)..(1183): Ortholog of  Ceres SEQ ID NO 15179772 as cited in SEQ ID NO 64248
aaaaaaaacttgcacatcttctcagatcttcaagtttctcctctggtttctcatcatgaccgttgatattatgcgtttacctaagatggaagatcaaacggctatacaagaagctgcatcacaaggcttaaaaagcatggaacacttgattcgtgtcctctctaaccgtcccgaagaacgtaacgttgattgctctgagatcactgatttcacagtttctaagttcaagaaagttatctctcttcttaaccgttccggtcacgcccggtttagacgtggtccggttcattcccctccttcctcctccgttcctccaccggtgaaagtgacaactccggctcccactcagatctctgctccagcaccggttagcttcgttcaggcaaatcaacaaagcgtgacgttagatttcactagaccgagcgtttttggcgctaaaaccaagagctcggaggttgttgagtttgctaaagagagctttagcgtatcttctaactcttctttcatgtcttctgcgatcaccggtgatggaagtgtctctaaaggctcttcgatctttcttgctccggctccagcggtgccagtgacttcctccgggaaaccgccgctttctggtcttccttacaggaagagatgctttgaacatgaccactctgaaggcttttccggcaagatctctggctccggcaacggcaagtgccattgcaagaaaagccgaaaaaatcggatgaagagaaccgtgagagtaccggcggtaagtgcaaagatcgccgatataccaccagacgaatattcatggagaaagtatggacaaaaaccgatcaaaggctcaccacatccacggggttattacaagtgtagtacatttagaggatgtccagcgaggaaacacgtggaaagagctttggatgattcaacgatgttgattgtgacgtacgaaggagagcaccgtcatcaccagtccacgatgcaggagcatgtaactcctagcgtgagtggtttggtgtttggttcggcttgaagaattaattagtttggtagttttgtaatattttgagaaatagaggggttggttttgtaattttttttctataacaaaattagttttagatttttttttagtagtcttttgaatggattttaatcttactaccgagaaagaaaaaattcttactacattttc

SEQ ID NO: 76004 - protein, 339 aa, Arabidopsis thaliana
  peptide (1)..(339): Ceres Seq. ID no. 7094717
KKTCTSSQIFKFLLWFLIMTVDIMRLPKMEDQTAIQEAASQGLKSMEHLIRVLSNRPEERNVDCSEITDFTVSKFKKVISLLNRSGHARFRRGPVHSPPSSSVPPPVKVTTPAPTQISAPAPVSFVQANQQSVTLDFTRPSVFGAKTKSSEVVEFAKESFSVSSNSSFMSSAITGDGSVSKGSSIFLAPAPAVPVTSSGKPPLSGLPYRKRCFEHDHSEGFSGKISGSGNGKCHCKKSRKNRMKRTVRVPAVSAKIADIPPDEYSWRKYGQKPIKGSPHPRGYYKCSTFRGCPARKHVERALDDSTMLIVTYEGEHRHHQSTMQEHVTPSVSGLVFGSA

SEQ ID NO: 76005 - protein, 321 aa, Arabidopsis thaliana; identical to SEQ ID NO: 40359
  peptide (1)..(321): Ceres Seq. ID no. 7094718

SEQ ID NO: 76006 - protein, 316 aa, Arabidopsis thaliana; identical to SEQ ID NO: 40360
  peptide (1)..(316): Ceres Seq. ID no. 7094719

SEQ ID NO: 76007 - DNA, 1117 bp, Arabidopsis thaliana
  misc_feature (1)..(1117): Ceres Seq. ID no. 7094766
  misc_feature (1)..(1117): Ortholog of  Ceres SEQ ID NO 14304848 as cited in SEQ ID NO 54575
  misc_feature (1)..(1117): Ortholog of  Ceres SEQ ID NO 12617447 as cited in SEQ ID NO 65185
tttcgaaacgttcacatcactgcgtctcgtttgataaaccctaagcccttttcttcttcgattctccattttcttcctctctgttccggcgacgcttctcctcgccgttccaatcctctccggcatagaaactcggtgtctccttcatcttcctttcccttctgttcgacttcttccttttcttctttctacattcctatggcgggaggagatggtcaggtgtctcattcgcttgagaagcagttcgagagtttccgtgttcaattggaagaatctgcagctttgagagagcagattcgtgctgtggttatggagattgagtctgctactaggcttattcaagctaatcttcttctcgttcatcaatcgcgtcctattcctgaggttatcgagaaagctaaggaaaaaatcgttgatttgaagcagtattatggtcggcttgctgaaattcttgaggagtgtcctggacaatactataggtaccatggagactggagaagtgaaacacaggcagtggtctcccagcttgcttttatgcactggctagaaactggaactcttctcgtgcataccgaagctgaagaaaaacttgggttgaacagtttggagtttggattggagacagaagattatctcactggaatttgtttcatgtcaaacgatttgcctaggtacgtggttaatcgagtgacagcaggagactatgactgcccaagaaaggtgatgaatttcctgacagatcttcatgcagcctttcgcatgctcaatctcaggaacgatttcctgcgcaagaaattcgacagtatgaagtacgacctaagaagagtggaagaagtttactatgatgtcaagatccgaggtttgatttccggcggagatcctcctggcgtccaagcagtccaaggccaatcctaaatgtcctcggctctttttaagtttttatgtataactttgtttagctagcatgaaaacgtcaaggagtgttcttctctaaaccaaaaacggcaaggaaaatagagagactgtagtttttaggtgtagtttgcaattactgaaaacggcaagtattccttttgtgggccttgaaagcccacattttagtcacaactttactgtt

SEQ ID NO: 76008 - protein, 304 aa, Arabidopsis thaliana; identical to SEQ ID NO: 37639
  peptide (1)..(304): Ceres Seq. ID no. 7094767

SEQ ID NO: 76009 - protein, 238 aa, Arabidopsis thaliana; identical to SEQ ID NO: 37640
  peptide (1)..(238): Ceres Seq. ID no. 7094768

SEQ ID NO: 76010 - protein, 201 aa, Arabidopsis thaliana; identical to SEQ ID NO: 37641
  peptide (1)..(201): Ceres Seq. ID no. 7094769

SEQ ID NO: 76011 - DNA, 801 bp, Arabidopsis thaliana
  misc_feature (1)..(801): Ceres Seq. ID no. 7094883
  misc_feature (1)..(801): Ortholog of  Ceres SEQ ID NO 15173567 as cited in SEQ ID NO 57612
  misc_feature (1)..(801): Ortholog of  Ceres SEQ ID NO 12611396 as cited in SEQ ID NO 59809
  misc_feature (1)..(801): Ortholog of  Ceres SEQ ID NO 15178140 as cited in SEQ ID NO 0
tcgtcgctgcgtctctctcccgcaaccttcgattttcgtttattcgcatccatcggagagagaaaacaatcaataagcgaccatgttggtgtaccaagatcttctcaccggtgatgagcttctgtctgactctttcccttacaaggagattgagaatggaatcctctgggaagtagaaggaaagtgggttactgtgggagctgtagatgttaacattggtgccaatccatctgctgaagaaggtggtgaggatgaaggtgttgatgactctactcaaaaggttgttgacattgtcgacaccttcagacttcaggagcaaccaacttatgacaagaagggattcatcgcttacattaagaaatacattaagcttttgacacccaagctcagcgaagaagatcaagctgtcttcaagaagggtattgagggagctaccaagtttttgctccccaggctcagtgacttccaattctttgttggggagggtatgcatgatgacagcactttggtctttgcttactacaaggagggttcaactaacccaacatttttgtacttcgctcatggtttgaaggaggtcaagtgctgagagagaagctctcgttgggttactgtggtcggtcgcagcgactctctaagtttatgtttctttatattgtcctgtgtttcgtcgtcgtcccctattaaaattacctgccagtttacttttctctcttcttgttttctgtgttggaagattctcaagttatttattccgcaaaaaacggtttatcatttacaattagttgaattttggtcgtt

SEQ ID NO: 76012 - protein, 168 aa, Arabidopsis thaliana; identical to SEQ ID NO: 28030
  peptide (1)..(168): Ceres Seq. ID no. 7094884

SEQ ID NO: 76013 - DNA, 1647 bp, Arabidopsis thaliana
  misc_feature (1)..(1647): Ceres Seq. ID no. 7095700
  misc_feature (1)..(1647): Ortholog of  Ceres SEQ ID NO 13663419 as cited in SEQ ID NO 66561
aaggttcttcgttgacatactattctctgttgtagcaacactaagaagaagcagagaaaatgagaaaccttagcttcatcgtcttatttctattgaccctcttcttcattcatcatttggttgatgcttctttgctagtgaagtctcttcctggttttgaaggtcctcttccttttgagctcgagactggatatgtgagtattggtgaatctggagatgttgagctcttttactactttgtgaaatcagagaggaatccagaaaatgatcctctcatgatttggctcactggtggacctggctgcagctccatctgtggattgctcttcgcaaacggtcctttagcttttaaaggggatgagtataatgggacagtacctcctctagagttgacatctttttcatggacaaaggtggctaacattttatatttggaagctcctgctggctctggatactcttatgcgaaaactcggcgtgcttttgagtcgagcgacaccaaacaaatgcaccaaattgatcaatttcttaggagttggtttgtgaaacacccggagtttatatcgaatcctttttacgttggtggagattcatattccgggaaaattgttccaggagctgtgcaacaaatttcacttggaaatgagaagggcctcacaccactcataaatattcagggttatgttcttggaaaccctgtgacagataaaaacattgaaactaactatagagttccatttgctcatgggatgggacttatttcagatgagctctttgagtcacttgaaagaagttgtggaggcaaattcttcaacgtagacccaagtaatgcaagatgctcaaataatcttcaagcttatgatcattgtatgtcagagatatactcagagcatattttgttacgaaactgcaaagtagattacgtcttggcagacacaccaaacatcagaaccgatagaagaagagtaatgaaggaattttcagtaaacgattcatcatcattgccacctcctagctgctttacttataggtattttctgtctgccttttgggcaaacgatgaaaatgtacgcagagctctaggcgtgaaaaaggaagtaggaaaatggaaccgatgcaacagccaaaacataccatatacatttgagattttcaatgcagttccttatcacgtaaacaatagtcttaaaggcttccgctctctcatctacagtggtgatcatgattctatggtaccattttcttcaactcaagcatggatcagagctctcaactattccattgttgatgactggagaccttggatgatgagtagcaatcaagtcgcaggctatacaaggacttacgcaaacaagatgacatttgcaaccatcaagggaggaggacacacagcggagtatactccagatcaatgctctcttatgttcagaagatggattgatggagaacctctctaaagattctcactcgcttctctctctttctctctttgttgttgttacagtttaagactaatgttcagtgaattgtaattttgccacatgctattctgtgaaatcttcaatgattttgtgttgttgtagaactctaaagtctaatcagaaaggctctgtttcatagcaagtaacagaccctgtttcatattcc

SEQ ID NO: 76014 - protein, 465 aa, Arabidopsis thaliana
  peptide (1)..(465): Ceres Seq. ID no. 7095701
MRNLSFIVLFLLTLFFIHHLVDASLLVKSLPGFEGPLPFELETGYVSIGESGDVELFYYFVKSERNPENDPLMIWLTGGPGCSSICGLLFANGPLAFKGDEYNGTVPPLELTSFSWTKVANILYLEAPAGSGYSYAKTRRAFESSDTKQMHQIDQFLRSWFVKHPEFISNPFYVGGDSYSGKIVPGAVQQISLGNEKGLTPLINIQGYVLGNPVTDKNIETNYRVPFAHGMGLISDELFESLERSCGGKFFNVDPSNARCSNNLQAYDHCMSEIYSEHILLRNCKVDYVLADTPNIRTDRRRVMKEFSVNDSSSLPPPSCFTYRYFLSAFWANDENVRRALGVKKEVGKWNRCNSQNIPYTFEIFNAVPYHVNNSLKGFRSLIYSGDHDSMVPFSSTQAWIRALNYSIVDDWRPWMMSSNQVAGYTRTYANKMTFATIKGGGHTAEYTPDQCSLMFRRWIDGEPL

SEQ ID NO: 76015 - protein, 393 aa, Arabidopsis thaliana
  peptide (1)..(393): Ceres Seq. ID no. 7095702
MIWLTGGPGCSSICGLLFANGPLAFKGDEYNGTVPPLELTSFSWTKVANILYLEAPAGSGYSYAKTRRAFESSDTKQMHQIDQFLRSWFVKHPEFISNPFYVGGDSYSGKIVPGAVQQISLGNEKGLTPLINIQGYVLGNPVTDKNIETNYRVPFAHGMGLISDELFESLERSCGGKFFNVDPSNARCSNNLQAYDHCMSEIYSEHILLRNCKVDYVLADTPNIRTDRRRVMKEFSVNDSSSLPPPSCFTYRYFLSAFWANDENVRRALGVKKEVGKWNRCNSQNIPYTFEIFNAVPYHVNNSLKGFRSLIYSGDHDSMVPFSSTQAWIRALNYSIVDDWRPWMMSSNQVAGYTRTYANKMTFATIKGGGHTAEYTPDQCSLMFRRWIDGEPL

SEQ ID NO: 76016 - protein, 316 aa, Arabidopsis thaliana
  peptide (1)..(316): Ceres Seq. ID no. 7095703
MHQIDQFLRSWFVKHPEFISNPFYVGGDSYSGKIVPGAVQQISLGNEKGLTPLINIQGYVLGNPVTDKNIETNYRVPFAHGMGLISDELFESLERSCGGKFFNVDPSNARCSNNLQAYDHCMSEIYSEHILLRNCKVDYVLADTPNIRTDRRRVMKEFSVNDSSSLPPPSCFTYRYFLSAFWANDENVRRALGVKKEVGKWNRCNSQNIPYTFEIFNAVPYHVNNSLKGFRSLIYSGDHDSMVPFSSTQAWIRALNYSIVDDWRPWMMSSNQVAGYTRTYANKMTFATIKGGGHTAEYTPDQCSLMFRRWIDGEPL

SEQ ID NO: 76017 - DNA, 2336 bp, Arabidopsis thaliana
  misc_feature (1)..(2336): Ceres Seq. ID no. 7098265
  misc_feature (1)..(2336): Ortholog of  Ceres SEQ ID NO 13654290 as cited in SEQ ID NO 62197
  misc_feature (1)..(2336): Ortholog of  Ceres SEQ ID NO 14301924 as cited in SEQ ID NO 67731
cccagcagatttagagcgtgtgagggagataggaagagagaaagtgagcgagagacgatcacggccgcgctgaaatccacgaccacggccgcgctgaaatccacgaccacggccgctctgaagaagaagactctctccgtctcctcccttctcctcctccgtctaagagacaaggcatccccagacgccatgatctctctcactccctcgttgtttctgaacaagacggttgttcctggatgttccacacgcctctctctgcgccagcctagaactataattactcctcctgcttccttgagagtcttttcctctctcggatctaaccaggatcccaccggcagcgttttgattgagaccactgccacttcatcctcctctctcgagacctccgccgccgacattgttcccaaatccaccgtatctggtggagttcaggatgtctacggcgaggatgccgccaccgaggacatgcctatcactccttggtctctctctgtcgccagtgggtatacgttgttgcgtgatccacatcacaacaaaggccttgcctttagccacagagagcgtgacgctcactatctacgcggcctcctcccccccactgttatctcacaagatcttcaggttaaaaaaattatgcacactcttcgtcagtatcaagttcccttgcagaagtatatggctatgatggatctccaggagaccaacgagaggctgttttacaaacttctcattgatcacgtcgaggagttgctacccgttatctacactccaacggttggggaagcctgccagaagtatggtagcattttcctgcgtccacaggggctttttatcagcttgaaagaaaaaggtaagattcatgaagtgctgaggaactggcctgagaagaacatccaggtcattgttgtcactgatggggagcgcattttagggttaggagatcttggatgtcagggaatgggaatacctgttgggaaactttctctctacacagcccttggaggtgtccggccatctgcctgtctgcccgtaacaatcgatgttgggacaaacaacgaaaagctattgaacgatgagttctacatagggctccgccaaaggagagctacaggagaggaatactccgaacttatgcatgaattcatgacagcagtcaagcagaactatggggagaaagtcgttattcagtttgaagactttgccaaccataatgcttttgatctgttagctaagtatggtacaacacatcttgttttcaatgacgatattcagggcacagcatcagttgtgcttgctggacttatcgctgctcttagatttgtggggggatccttgtcagaccacagattcctcttcctcggggctggagaggctggcactggaatagctgaactaattgctcttgagatttcaaagaagtcccatattccattggaagaggctcggaagaatatttggctcgtggattcaaagggattgattgtcagttcccggaaagaatccattcaacatttcaaaaagccctgggctcatgaccatgaaccaataagggaacttgttgatgccgtcaaggcaatcaagccgacagttctgatcggaacatcaggtgtaggtcaaacattcactcaagacgtggtggaaaccatggcaaagctaaatgagaaacccatcattctttctctttcgaacccaacttctcagtcagaatgtacggcagaagaggcctatacgtggagtcagggacgggcgatctttgcaagtggaagcccatttgcgccagtagagtatgagggaaagacgtttgtgcctggacaggcaaacaacgcatacatcttccctgggtttggactcgggctaataatgtcagggacgatccgtgtccatgatgacatgcttctggcagcatcagaagctttggctgaggaactgatggaggaacactatgagaaggggatgatataccctcccttcaggaatatcagaaaaatctcagctcgtattgcagctaaggtggctgccaaggcctacgaactgggactggccacgaggttgcctcagcccaaggagctggagcagtgtgctgagagcagcatgtacagcccttcgtatcgaagctaccgctgaggataagcttaatctaatttgttatgtctcatacgactcttatggccatttctctcctctcctattcgttcaccttccacttcccgtgagatttttgtttgtttgtttgtcagcatctttaaaatcttgtgttgtaatcactgtttcccttgttgtttctttttaagtccgtaataatcctcctatggaaattgtttctctgggcc

SEQ ID NO: 76018 - protein, 709 aa, Arabidopsis thaliana
  peptide (1)..(709): Ceres Seq. ID no. 7098266
PSRFRACEGDRKRESERETITAALKSTTTAALKSTTTAALKKKTLSVSSLLLLRLRDKASPDAMISLTPSLFLNKTVVPGCSTRLSLRQPRTIITPPASLRVFSSLGSNQDPTGSVLIETTATSSSSLETSAADIVPKSTVSGGVQDVYGEDAATEDMPITPWSLSVASGYTLLRDPHHNKGLAFSHRERDAHYLRGLLPPTVISQDLQVKKIMHTLRQYQVPLQKYMAMMDLQETNERLFYKLLIDHVEELLPVIYTPTVGEACQKYGSIFLRPQGLFISLKEKGKIHEVLRNWPEKNIQVIVVTDGERILGLGDLGCQGMGIPVGKLSLYTALGGVRPSACLPVTIDVGTNNEKLLNDEFYIGLRQRRATGEEYSELMHEFMTAVKQNYGEKVVIQFEDFANHNAFDLLAKYGTTHLVFNDDIQGTASVVLAGLIAALRFVGGSLSDHRFLFLGAGEAGTGIAELIALEISKKSHIPLEEARKNIWLVDSKGLIVSSRKESIQHFKKPWAHDHEPIRELVDAVKAIKPTVLIGTSGVGQTFTQDVVETMAKLNEKPIILSLSNPTSQSECTAEEAYTWSQGRAIFASGSPFAPVEYEGKTFVPGQANNAYIFPGFGLGLIMSGTIRVHDDMLLAASEALAEELMEEHYEKGMIYPPFRNIRKISARIAAKVAAKAYELGLATRLPQPKELEQCAESSMYSPSYRSYR

SEQ ID NO: 76019 - protein, 646 aa, Arabidopsis thaliana; identical to SEQ ID NO: 45959
  peptide (1)..(646): Ceres Seq. ID no. 7098267

SEQ ID NO: 76020 - protein, 552 aa, Arabidopsis thaliana; identical to SEQ ID NO: 45960
  peptide (1)..(552): Ceres Seq. ID no. 7098268

SEQ ID NO: 76021 - DNA, 2132 bp, Arabidopsis thaliana
  misc_feature (1)..(2132): Ceres Seq. ID no. 7098782
  misc_feature (1)..(2132): Ortholog of  Ceres SEQ ID NO 13599322 as cited in SEQ ID NO 0
cgcggccgctaaaccctttccttcttcttcttcttcttcttcttcttcgattgtttagattacttgggtttgacccaagtttgcttctttctatgattcatcaatctagatcttgctatctgggtccagaaacgattcacgcgcttcattcatgatataaagttactaccttttttttattttaccttctgggtcatggttttgtctgcttttcgtcttttgcttttgtctggatgattcataatctctcgagatctattatgttcacaagagttgttcttatgcgtggtgagatgatcttaggagtgtttcactatctttcttcaattcgggtttttagtttctgagatctgtttttgaagaatctgatctgagtttgaggaagtttgactaaatagatcgaagaagatgtttaagcagatacttgggaagcttcctaagaaaacttctgctaagttttgggataatggtgaatcccaaactctagataacaacaacaatcaaggaggaggtgatgaagttttaagccagagaacgtcatcaaatggagatactagtttggattgtgtttcttcttttgatgtattgccaaggttgagagatgtttccatctctgagaagcaagaactgtttcttaagaagcttagactatgttgtctagtgtttgattttgtagctgagcctcaacagaacttcaaggagaaagagatcaaaaggcaaacacttcttgaagttgtggattatgttatctcttcagggaatggcaagttccctgaatcagttattcaagaagctaccaagatgatttcggcgaatctctttagtaatcctcatcgacaatggaagaacaaaactcctgaggcattggatttggaagaagaagaaggatctttgaatccttcttggcctcacttgcagattgtttatgagttccttttgagaatcgttgcatctcccaacacagaccccaagatatccaagaaatacatcgatcatacattcgttctcaagctattggatttgtttgattctgaagatccgagggaaagagagtatctgaaaacgatacttcaccgcatctacgggaggtttatggttcatcgcccgttcatcaggaaaactatgaacaacatcttgtatgattttatattcgagacagggaaacactcgggaatcgccgagtttcttgaagttttaggatccatcatcaatggattcgctttaccactcaaggaagaacacaagctctttcttactcgtgtcttgattcctctgcacaagctgaaatgcttaccaaattaccatcaacagctttcttactgcgttatacagtttgttgagaaagattgtaagctcgcggataccgttattagagggatgttgaagtactggcctgttactaatagcgctaaagaaatcatgttcttgaatgaattggaggagatactagaagcaactcaattaacagagtttgaacggtgtatggttccgctctctcgccaaattgctcagtgcttgagcagttctcactttcaggtagcggaacgggctttatacttatggaacaacgatcatgtcactaatttagtgagacagaacagtagaatcattttacctatagtgtttcccgctttggagaaaaacggtagcagccattggaatcaggctgtgaagaacttgacagagaatgttctcaaggttttgtccgatacaaatcctgatttattcgaagaatgtttgcacaagttccaagaagatcagcaaaaagcagaagatactaaaaagaagaatggagaaacctggagacagctagaggagattgttgcttcaatggcgaagtaagagttttttctgcactttacgtgattcaacaagaaatcggtttattgttttgttttgtttcctttacgcctgaaaggtatatacatttactttgctttgcttgcttcatttaagtatctggtttcgactttaagactagtttaattcagttaaacagtgtgagattttacctttttcagttcttgatttgtctgtatacttggttcatgtaaacatcttgttatgaaaacacgaattttctattgtctgaagtcacttagtttatcagtgaaagagattgctgcggccgc

SEQ ID NO: 76022 - protein, 477 aa, Arabidopsis thaliana; identical to SEQ ID NO: 48766
  peptide (1)..(477): Ceres Seq. ID no. 7098783

SEQ ID NO: 76023 - protein, 346 aa, Arabidopsis thaliana; identical to SEQ ID NO: 48767
  peptide (1)..(346): Ceres Seq. ID no. 7098784

SEQ ID NO: 76024 - protein, 249 aa, Arabidopsis thaliana; identical to SEQ ID NO: 48768
  peptide (1)..(249): Ceres Seq. ID no. 7098785

SEQ ID NO: 76025 - DNA, 1810 bp, Arabidopsis thaliana
  misc_feature (1)..(1810): Ceres Seq. ID no. 7100800
  misc_feature (1)..(1810): Ortholog of  Ceres SEQ ID NO 14313228 as cited in SEQ ID NO 67057
  misc_feature (1)..(1810): Ortholog of  Ceres SEQ ID NO 13584744 as cited in SEQ ID NO 69137
tcgattggccaaatcggccctcgagaacaaaaaaaacttcttttttttctctttctctcttggcttctctttagaaagtgactcaccagaaaaaaaaaagggtttttgcttttcgggtttagctaagaaaaatctttcaatcttccttaaatctttcaaaaccccaaaatgggacctcgttgctctaagctctctctctgttggtggccgacccatctcaaatcaactcacaacgaagcttctgatctagataacggaacggacgatttgccgtcgtttacggagtttagtttcgaccaactacgagctgctacttgtggattctctacagacagtattgtctccgaacatggtgttaaagctcctaatgttgtgtataaaggcagacttgaagatgaccgatggatcgctgttaaacgattcaatagatccgcttggcctgatactcgtcaatttcttgaagaagcaaaagctgtggggcagttgaggaatgagaggttggcgaatttgattggattctgttgtgaaggagacgagagattgctcgttgctgagtttatgccttttgaaactctctcgaagcatctctttcactgggatagtcagccaatgaagtggtctatgaggttgagagtggctttgtatcttgcacaagcacttgagtattgtagcagcaaaggtcgcgccttgtaccacgatcttaatgcttacaggatcttgtttgaccaggatggtaacccgagattatcttgctttggtcttatgaagaatagtagggatgggaagagttacagtacaaatttggctttcacacctcctgaatacctaagaacagggagagtgattccggagagtgtggtctacagcttcggaacgctgttgctagatcttctcagcggcaaacacataccaccaagccatgcgcttgatctgattcgtgggaagaatttcctgatgctgatggactcgtgtctagatggccatttctcaaacgatgatggaaccgatttggttcgtttagcttcccgttgtttgcagtatgaagctcgtgaaaggccaaatgtgaaatctctcgtgtcctcactcgctcctcttcagaaagaaactgatattccgtctcatgttttaatggggattccacatggagctgcttctccaaaggaaacaacttcgcttacccctcttggtgacgcttgttcacgacatgatctcacagcaatacatgaaattctcgaaaaggttggatacaaagatgacgagggtgtagcaaatgagctctcgttccaagtgtggaccgaccagattcaggagactctaaactccaagaaacaaggagatgctgcgttcaaaggcaaagactttgtcactgctgttgaatgttacacgcagttcatcgaagatggcacaatggtatcgccaacagtttttgcaaggaggtgtttgtgttatctgatgagcaatatgcctcaagaggctcttggtgatgcaatgcaggcgcaagtagtgtctcctgaatggccaacggctttctatcttcaggccgctgctctcttcagccttggaatggataaagacgcctgtgaaaccctaaaagatggaacttccttggaagccaagaaacataacaacagaaactgaaaacttcaagtgtataggtttcttctctcttccgccttcttcgttttgtgattggattctgagaaagcctcattgtctctgtcttctttaagcattatcttaaatttgtggtttccaatttgaagagatgattcaaatcacatttgaatcaagaaaagaaggatctttctct

SEQ ID NO: 76026 - protein, 489 aa, Arabidopsis thaliana; identical to SEQ ID NO: 47005
  peptide (1)..(489): Ceres Seq. ID no. 7100801

SEQ ID NO: 76027 - protein, 359 aa, Arabidopsis thaliana; identical to SEQ ID NO: 47006
  peptide (1)..(359): Ceres Seq. ID no. 7100802

SEQ ID NO: 76028 - protein, 342 aa, Arabidopsis thaliana; identical to SEQ ID NO: 47007
  peptide (1)..(342): Ceres Seq. ID no. 7100803

SEQ ID NO: 76029 - DNA, 2538 bp, Arabidopsis thaliana
  misc_feature (1)..(2538): Ceres Seq. ID no. 7101464
  misc_feature (1)..(2538): Ortholog of  Ceres SEQ ID NO 12613725 as cited in SEQ ID NO 68196
cttggagagctgcactcttcatcattggtatcgaattcagcgagaggctaagttactttgggatctccacgaacttagtggtctacttgactaccattcttcaccaagatctcaagatggctgtaaaaaatacgaactactggtctggtgtcactactttgatgcctcttcttggaggcttcgtcgcagatgcttatctcggccgttatggaactgtcctacttgcaaccaccatttaccttatggtactaatttctgagaaaccggataaataataatactcaaaaactattatcgatccttttcaatagtttaaagatagaccttcacatatacacacctcttctatactctcataaccgagtcaatgatacccaaaaatatcatgagttcaaaattttaaatatatatttatatatctaccttattaatatatatatctatattttatattttataatttatttttgttattttgttgtcggttttgatcggtagtaccttttggacactattataaaaaccagctctaataacttcatatcttatcacacacaacaaattttgagattagtcaaaacttgatatatgttttgtttccttgtttcttgtcttaatttgttgaatttacaaatttgcagggcttgattctgttaacattgtcttggtttataccgggattgaaagcatgtcatgaagacatgtgtgttgagccaaggaaagcccacgagatagccttcttcattgcaatctacttgatctccataggcactggaggtcataagccatcccttgagagctttggagctgaccaattcgaagatggccatccggaagaacgaaaaatgaaaatgtcttactttaactggtggaatgctggtctatgcgctggtattttaaccgcggtgactgtaattgtctatatcgaagaccggattggttggggtgtggctagcatcatactcacaatagttatggctacttcgtttttttatcttccgtatcggcaaaccgttttaccgttatagagcaccttctggtagcccattgaccccaatgttgcaagtctttgtcgccgccattgccaaaagaaatcttccttgtcccagtgattcttctcttcttcatgagttaactaatgaagagtatactaaaggccggcttctttccagctcaaagaatcttaagtaagtgcataacaactcggatgcttagtcttggtttaagttaggttttggtttggatgttttagttttttttttaacaatagcaaacaagtagcatatatccaaaataatatggatcgatttgttacaatttcggtcaggggtttaaaattagtcttgatcaaatattcaacaaaaaaaaaaaattacataaggttttgaatccgtttaaagcatattatagtatccaaacatgcatgtaagtgattccgattctgtttgcagatttctagacaaagcagcagttattgaggaccgaaacgagaacactaaagccgagaagcagagtccatggcgactcgcaacggttacgaaagtggaagaagttaagctactcatcaacatgattccaatctggttctttacattagcctttggagtatgcgccactcaaagctcaacactctttatcaaacaagccataataatggaccgacacatcacagggacaagcttcatagttcctccagcttcattgttctctctcatagctctctccataatcatcaccgtaacaatctacgagaaactcctcgttcctcttttgagacgtgccacaggaaacgaaagaggcattagcattctacaaagaatcggggtcggtatggttttctccttattcgctatgatcattgctgctctgattgagaagaaaagattagattatgctaaggaacaccacatgaataagaccatgaccttgagtgctatatggttagctcctcaattcctagtcttaggagttgcggatgcttttacccttgtcggtcttcaagaatatttctacgaccaagtcccagattctatgagaagcttaggcatagcgttttacctcagcgtgcttggagcggctagctttgtcaacaatcttttgataacggttagtgatcatttagccgaggaaatttccgggaagggctggtttgggaaagaccttaatagcagccgcttggaccgcttttactggatgctagccgccttgaccgctgcaaatatatgctgctttgtgatcgtggccatgagatacacttacaagactgtgcagccgagtctggctgttgttgctgacggcggtgatgacgttgagacagccacggggacgaataacacgtccaagtttacgtaacttagctattggtttggtcatatgatgaccattttatgttctgtgtttattgtgtacttttgaaaagtgattttgtagtcattttaacattagtgtggcgttagcctttagaaacgtatgtaatacatcttacagaactgaattccaagtccaaatttatatacaaaatagtttttaaattatgat

SEQ ID NO: 76030 - protein, 310 aa, Arabidopsis thaliana
  peptide (1)..(310): Ceres Seq. ID no. 7101465
MHVSDSDSVCRFLDKAAVIEDRNENTKAEKQSPWRLATVTKVEEVKLLINMIPIWFFTLAFGVCATQSSTLFIKQAIIMDRHITGTSFIVPPASLFSLIALSIIITVTIYEKLLVPLLRRATGNERGISILQRIGVGMVFSLFAMIIAALIEKKRLDYAKEHHMNKTMTLSAIWLAPQFLVLGVADAFTLVGLQEYFYDQVPDSMRSLGIAFYLSVLGAASFVNNLLITVSDHLAEEISGKGWFGKDLNSSRLDRFYWMLAALTAANICCFVIVAMRYTYKTVQPSLAVVADGGDDVETATGTNNTSKFT

SEQ ID NO: 76031 - protein, 260 aa, Arabidopsis thaliana
  peptide (1)..(260): Ceres Seq. ID no. 7101466
MIPIWFFTLAFGVCATQSSTLFIKQAIIMDRHITGTSFIVPPASLFSLIALSIIITVTIYEKLLVPLLRRATGNERGISILQRIGVGMVFSLFAMIIAALIEKKRLDYAKEHHMNKTMTLSAIWLAPQFLVLGVADAFTLVGLQEYFYDQVPDSMRSLGIAFYLSVLGAASFVNNLLITVSDHLAEEISGKGWFGKDLNSSRLDRFYWMLAALTAANICCFVIVAMRYTYKTVQPSLAVVADGGDDVETATGTNNTSKFT

SEQ ID NO: 76032 - protein, 232 aa, Arabidopsis thaliana
  peptide (1)..(232): Ceres Seq. ID no. 7101467
MDRHITGTSFIVPPASLFSLIALSIIITVTIYEKLLVPLLRRATGNERGISILQRIGVGMVFSLFAMIIAALIEKKRLDYAKEHHMNKTMTLSAIWLAPQFLVLGVADAFTLVGLQEYFYDQVPDSMRSLGIAFYLSVLGAASFVNNLLITVSDHLAEEISGKGWFGKDLNSSRLDRFYWMLAALTAANICCFVIVAMRYTYKTVQPSLAVVADGGDDVETATGTNNTSKFT

SEQ ID NO: 76033 - DNA, 750 bp, Arabidopsis thaliana
  misc_feature (1)..(750): Ceres Seq. ID no. 7102177
  misc_feature (1)..(750): Ortholog of  Ceres SEQ ID NO 15170135 as cited in SEQ ID NO 67647
tcgattggccaaatcggccctcgagcaactgcttacctcatacaaacaagtcaaaatcggcaatcctcttgagaaagggacattgttaggaccattacatactcctgaatcaaaaaagaactttgagaaaggaattgaagtcatcaaatcccagggtggtaaaatactaacgggaggtaaagcagtcgaaggtgaaggaaactttgtggagcctacgataatcgagatatcagcagatgctgctgtcgtcaaagaagagctatttgctccggttctatatgttctaaagtttaagtcatttggagaggctgttgcgataaacaactcggttcctcaaggtctaagcagctcgatattcactcggaaccctgaaaacatcttcaggtggatcggaccactgggaagtgactgtggcattgtgaatgtgaacataccgacgaatggagctgagattggtggagcttttggaggcgagaaagcgactggtggtggtcgtgaagctggaagcgactcatggaaacagtacatgcgtcgatcgacttgtaccatcaactatggaaacgagttacctctagcgcaaggaattaacttcggttagatttttcagagatttactcgttaattaataatgttatgttggttcgatttcgatacttgtattgtatgccttgttctctccaagcctttgacttaagatgattacgcttttaatatatataaaaaaatattgaatatattttgattgttaat

SEQ ID NO: 76034 - protein, 198 aa, Arabidopsis thaliana
  peptide (1)..(198): Ceres Seq. ID no. 7102178
RLAKSALEQLLTSYKQVKIGNPLEKGTLLGPLHTPESKKNFEKGIEVIKSQGGKILTGGKAVEGEGNFVEPTIIEISADAAVVKEELFAPVLYVLKFKSFGEAVAINNSVPQGLSSSIFTRNPENIFRWIGPLGSDCGIVNVNIPTNGAEIGGAFGGEKATGGGREAGSDSWKQYMRRSTCTINYGNELPLAQGINFG

SEQ ID NO: 76035 - DNA, 563 bp, Arabidopsis thaliana
  misc_feature (1)..(563): Ceres Seq. ID no. 7102555
  misc_feature (1)..(563): Ortholog of  Ceres SEQ ID NO 15172828 as cited in SEQ ID NO 60174
ctcgaaaactcatcaaatcaaaaatcaaacacagagaagagaaaatggccgcagaaggagaagttatcgcttgccacaccgttgaagattggaccgagaagctcaaagccgccaacgaatccaagaaactgattgtgatagacttcactgcaacatggtgcccaccttgccgtttcattgcacccgtctttgctgacttagccaagaagcacctcgacgtagtcttcttcaaggtcgatgttgacgaattgaacactgttgctgaggagtttaaagttcaggcaatgccaacgtttatcttcatgaaagaaggagagatcaaggagactgtggttggtgctgctaaagaagaaatcattgccaatctcgagaagcacaagacagttgttgctgctgcttgatttgcttttctctcttacctattttgctaaaatatgtttggtgttttaataaatcctttgttcgcccgagtcttttcaccttaaatgtgctcttatgtgtggtggtgaataaatgttgttgcaaacttgattactcgcagctatgctaattgttcgttcatg

SEQ ID NO: 76036 - protein, 132 aa, Arabidopsis thaliana
  peptide (1)..(132): Ceres Seq. ID no. 7102556
RKLIKSKIKHREEKMAAEGEVIACHTVEDWTEKLKAANESKKLIVIDFTATWCPPCRFIAPVFADLAKKHLDVVFFKVDVDELNTVAEEFKVQAMPTFIFMKEGEIKETVVGAAKEEIIANLEKHKTVVAAA

SEQ ID NO: 76037 - protein, 118 aa, Arabidopsis thaliana; identical to SEQ ID NO: 29115
  peptide (1)..(118): Ceres Seq. ID no. 7102557

SEQ ID NO: 76038 - DNA, 997 bp, Arabidopsis thaliana
  misc_feature (1)..(997): Ceres Seq. ID no. 7102650
  misc_feature (1)..(997): Ortholog of  Ceres SEQ ID NO 12635513 as cited in SEQ ID NO 0
aaaaaaaaaaaacagagagagagaacaacaaccaaacactcatttctccacatcttgagagaaaaaaacagagcaggtatattagagatctcatggcgatggcggtctccggagctgtcctcagtgggcttggttcttcgttcctcaccggaggcaagagaggtgccaccgcattggcaagcggcgtaggcactggagctcagagagttggcaggaaaactcttattgtcgctgctgcggctgctcagcctaagaaatcttggatccctgccgttaaaggtggtggcaacttccttgaccctgaatggctcgatggctcgctaccaggagatttcgggttcgacccattgggtttggggaaagacccggcttttctgaaatggtacagagaggctgagctgatccatggccgatgggcgatggcagcggttcttgggatcttcgtcggccaggcctggagcggtgtggcatggtttgaagctggagcccagccagacgcgatcgctcccttctcgttcgggtcgcttcttggaacccaattgcttctcatgggttgggtggagagcaaacgatgggtcgatttcttcaacccggattctcaatcggttgagtgggcaacgccatggtcgaagaccgccgagaatttcgcgaactataccggcgatcagggataccccggtgggagattcttcgatccgttgggtctcgccgggaaaaaccgcgacggtgtttatgagccggactttgagaagctggagaggctgaaattggcagagattaagcactcgaggctcgcaatggttgccatgttgatcttttactttgaggccgggcaggggaaaacgcctctcggtgctcttggtttgtgagaaaacggcatgatgtttttgattctgtagatacaatttctcttccaaaaacctaatgtttctcttcttcaatgtgacatttgggaaaagatcatcaaaccattgctataaatgtaaaatgaaatcgt

SEQ ID NO: 76039 - protein, 288 aa, Arabidopsis thaliana
  peptide (1)..(288): Ceres Seq. ID no. 7102651
KKKTERENNNQTLISPHLERKKQSRYIRDLMAMAVSGAVLSGLGSSFLTGGKRGATALASGVGTGAQRVGRKTLIVAAAAAQPKKSWIPAVKGGGNFLDPEWLDGSLPGDFGFDPLGLGKDPAFLKWYREAELIHGRWAMAAVLGIFVGQAWSGVAWFEAGAQPDAIAPFSFGSLLGTQLLLMGWVESKRWVDFFNPDSQSVEWATPWSKTAENFANYTGDQGYPGGRFFDPLGLAGKNRDGVYEPDFEKLERLKLAEIKHSRLAMVAMLIFYFEAGQGKTPLGALGL

SEQ ID NO: 76040 - protein, 258 aa, Arabidopsis thaliana; identical to SEQ ID NO: 40172
  peptide (1)..(258): Ceres Seq. ID no. 7102652

SEQ ID NO: 76041 - protein, 256 aa, Arabidopsis thaliana; identical to SEQ ID NO: 40173
  peptide (1)..(256): Ceres Seq. ID no. 7102653

SEQ ID NO: 76042 - DNA, 2014 bp, Arabidopsis thaliana
  misc_feature (1)..(2014): Ceres Seq. ID no. 7103407
  misc_feature (1)..(2014): Ortholog of  Ceres SEQ ID NO 13596392 as cited in SEQ ID NO 62136
  misc_feature (1)..(2014): Ortholog of  Ceres SEQ ID NO 15226223 as cited in SEQ ID NO 65500
  misc_feature (1)..(2014): Ortholog of  Ceres SEQ ID NO 13596394 as cited in SEQ ID NO 68561
aatctaatctagggtttctagtcacttgaagcttctcttaaaaaacctgtctcactcctcgtcaacctcttcctctcccgctgtcgccaagattgaatcttttttcagttgtggcttcaccggataataaggaattcagtaagagataagttcatcctgacaacatggagaccaagaatgagaattctgatgtttcacgggcagaggagtttaaaagtcaggccaacgaagcttttaaaggtcacaaatactccagtgctattgatctatatacaaaagctattgaactcaacagcaacaacgctgtgtattgggcaaatcgtgcatttgctcacacaaaactggaggaatatggcagtgcaatacaggatgcatcgaaggccattgaagttgattcaagatactctaagggctattacaggcgtggtgctgcgtatcttgccatgggaaaatttaaggatgccttgaaggacttccaacaggtaaaaaggctttctcctaatgaccctgatgccacaagaaagctaaaggaatgtgagaaagcagtgatgaaactcaaatttgaagaagcaatctctgtgccagtatctgaaaggcgttcagtagctgagtccattgacttccatacaatagaggttgagccacaatattctggtgctagaattgagggagaggaagttaccttagattttgtgaaaacgatgatggaggattttaagaaccaaaaaacattgcataaacggtatgcctatcaaatcgtcttacagactaggcaaatcttgctagcactgccttctcttgttgatataagtgttccacatggcaaacatatcactgtttgcggtgacgttcatggtcagttctacgatcttctcaatatctttgagcttaatggcctcccttcggaggagaacccatacctatttaatggcgactttgtggacagaggctcattctccgttgagatcatcctcactttgtttgctttcaagtgcatgtgcccatcatccatatatctagccagaggaaaccatgaaagcaagagcatgaacaaaatttatggttttgagggtgaggttcggtccaagttgagtgaaaaattcgtggatctctttgctgaagttttctgttacctcccgttggctcatgttataaatgggaaggtcttcgtggtacatggaggtcttttcagtgttgacggcgtgaaactctcagacatcagagccattgacagattctgtgagccaccagaggaaggactaatgtgtgaactattgtggagtgatcctcaacctctccctggaagaggcccaagcaagcgaggagttggtctatcatttggtggagatgtgacaaagaggtttttgcaagataacaatttagatttgttggtccggtcacatgaagtaaaagatgaaggttatgaggttgaacatgacggtaaactcataactgtcttctctgcgccaaattactgtgatcagatgggtaataagggagccttcattcgttttgaagctcctgatatgaagccaaacattgttacattctcagcagtgcctcatccggatgtgaagcctatggcatatgcaaacaactttctcaggatgttcaactaaccagcaaaaagcttcttctactcaaaatgctattctaaagactcaagaccagaagtggttcagaaacataatgatataagtttttttttccctttatcttctgcagttttttcatgttgttccagaaaagggaggccatgataattaaaggtacagtatccggatttgatcgttttttttcttcttccttcttttctgataaagattttcactcttcctttaagcttatccagcaacttttgtcccttttgtcttatgttgtaagagggggtaatgtatcattcttattttagatgaaaatcttgtgattactcaacaaaagagtgaccaaatgaccccccaaaactttgtacttaaaatggtttcttgaatcaaaaatcaaaaggtgtttcttc

SEQ ID NO: 76043 - protein, 484 aa, Arabidopsis thaliana
  peptide (1)..(484): Ceres Seq. ID no. 7103408
METKNENSDVSRAEEFKSQANEAFKGHKYSSAIDLYTKAIELNSNNAVYWANRAFAHTKLEEYGSAIQDASKAIEVDSRYSKGYYRRGAAYLAMGKFKDALKDFQQVKRLSPNDPDATRKLKECEKAVMKLKFEEAISVPVSERRSVAESIDFHTIEVEPQYSGARIEGEEVTLDFVKTMMEDFKNQKTLHKRYAYQIVLQTRQILLALPSLVDISVPHGKHITVCGDVHGQFYDLLNIFELNGLPSEENPYLFNGDFVDRGSFSVEIILTLFAFKCMCPSSIYLARGNHESKSMNKIYGFEGEVRSKLSEKFVDLFAEVFCYLPLAHVINGKVFVVHGGLFSVDGVKLSDIRAIDRFCEPPEEGLMCELLWSDPQPLPGRGPSKRGVGLSFGGDVTKRFLQDNNLDLLVRSHEVKDEGYEVEHDGKLITVFSAPNYCDQMGNKGAFIRFEAPDMKPNIVTFSAVPHPDVKPMAYANNFLRMFN

SEQ ID NO: 76044 - protein, 391 aa, Arabidopsis thaliana
  peptide (1)..(391): Ceres Seq. ID no. 7103409
MGKFKDALKDFQQVKRLSPNDPDATRKLKECEKAVMKLKFEEAISVPVSERRSVAESIDFHTIEVEPQYSGARIEGEEVTLDFVKTMMEDFKNQKTLHKRYAYQIVLQTRQILLALPSLVDISVPHGKHITVCGDVHGQFYDLLNIFELNGLPSEENPYLFNGDFVDRGSFSVEIILTLFAFKCMCPSSIYLARGNHESKSMNKIYGFEGEVRSKLSEKFVDLFAEVFCYLPLAHVINGKVFVVHGGLFSVDGVKLSDIRAIDRFCEPPEEGLMCELLWSDPQPLPGRGPSKRGVGLSFGGDVTKRFLQDNNLDLLVRSHEVKDEGYEVEHDGKLITVFSAPNYCDQMGNKGAFIRFEAPDMKPNIVTFSAVPHPDVKPMAYANNFLRMFN

SEQ ID NO: 76045 - protein, 356 aa, Arabidopsis thaliana
  peptide (1)..(356): Ceres Seq. ID no. 7103410
MKLKFEEAISVPVSERRSVAESIDFHTIEVEPQYSGARIEGEEVTLDFVKTMMEDFKNQKTLHKRYAYQIVLQTRQILLALPSLVDISVPHGKHITVCGDVHGQFYDLLNIFELNGLPSEENPYLFNGDFVDRGSFSVEIILTLFAFKCMCPSSIYLARGNHESKSMNKIYGFEGEVRSKLSEKFVDLFAEVFCYLPLAHVINGKVFVVHGGLFSVDGVKLSDIRAIDRFCEPPEEGLMCELLWSDPQPLPGRGPSKRGVGLSFGGDVTKRFLQDNNLDLLVRSHEVKDEGYEVEHDGKLITVFSAPNYCDQMGNKGAFIRFEAPDMKPNIVTFSAVPHPDVKPMAYANNFLRMFN

SEQ ID NO: 76046 - DNA, 911 bp, Arabidopsis thaliana
  misc_feature (1)..(911): Ceres Seq. ID no. 7103577
  misc_feature (1)..(911): Ortholog of  Ceres SEQ ID NO 13638849 as cited in SEQ ID NO 52046
  misc_feature (1)..(911): Ortholog of  Ceres SEQ ID NO 13599613 as cited in SEQ ID NO 0
aaccccccgattacgctattctcaaacaagcaaagaaccttaaccaaaaagaaaacgtctacggagactatggagaggaaacatcacttcgtgttagttcacaacgcttatcatggagcctggatctggtacaagctcaagcccctccttgaatcagccggccaccgcgttactgctgtcgaactcgccgcctccgggatcgacccacgaccaatccaggccgttgaaaccgtcgacgaatactccaaaccgttgatcgaaaccctcaaatctctccaggagaacgaagagggaattctggttggattcagcttcggaggcatcaacatcgctctcgccgccgacatatttccggcgaagattaaggttcttgtgttcctcaacgccttcttgcccgacacaacccacgtgccttctcacgttctggacaagtatatggagatgcctggaggtttgggagattgtgagttttcatctcatgaaacaagaaatgggacgatgagtttattgaagatgggaccaaaattcatgaaggcacgtctttaccaaaattgtcccatagaggattacgagctggcaaaaatgttgcataggcaagggtcatttttcacagaggatctatcaaagaaagaaaagtttagcgaggaaggatatggttcggtgcaacgagtttacgtaatgagtagtgaagacaaagccatcccctgcgatttcattcgttggatgattgataatttcaacgtctcgaaagtctacgagatcgatggcggagatcacatggtgatgctctccaaaccccaaaaactctttgactctctctctgctattgccaccgattatatgtaataatcttaagtccgttttacttttttctcatcgttactaataaaacaaacccctttttccgggct

SEQ ID NO: 76047 - protein, 281 aa, Arabidopsis thaliana
  peptide (1)..(281): Ceres Seq. ID no. 7103578
NPPITLFSNKQRTLTKKKTSTETMERKHHFVLVHNAYHGAWIWYKLKPLLESAGHRVTAVELAASGIDPRPIQAVETVDEYSKPLIETLKSLQENEEGILVGFSFGGINIALAADIFPAKIKVLVFLNAFLPDTTHVPSHVLDKYMEMPGGLGDCEFSSHETRNGTMSLLKMGPKFMKARLYQNCPIEDYELAKMLHRQGSFFTEDLSKKEKFSEEGYGSVQRVYVMSSEDKAIPCDFIRWMIDNFNVSKVYEIDGGDHMVMLSKPQKLFDSLSAIATDYM

SEQ ID NO: 76048 - protein, 258 aa, Arabidopsis thaliana
  peptide (1)..(258): Ceres Seq. ID no. 7103579
MERKHHFVLVHNAYHGAWIWYKLKPLLESAGHRVTAVELAASGIDPRPIQAVETVDEYSKPLIETLKSLQENEEGILVGFSFGGINIALAADIFPAKIKVLVFLNAFLPDTTHVPSHVLDKYMEMPGGLGDCEFSSHETRNGTMSLLKMGPKFMKARLYQNCPIEDYELAKMLHRQGSFFTEDLSKKEKFSEEGYGSVQRVYVMSSEDKAIPCDFIRWMIDNFNVSKVYEIDGGDHMVMLSKPQKLFDSLSAIATDYM

SEQ ID NO: 76049 - DNA, 1592 bp, Arabidopsis thaliana
  misc_feature (1)..(1592): Ceres Seq. ID no. 7103708
  misc_feature (1)..(1592): Ortholog of  Ceres SEQ ID NO 15169350 as cited in SEQ ID NO 53271
atttttcaaacatcacgtttcccgatttgtccgactcatcatcttctttctctttctgtctctctctctctctgttcgaatcgaaaccctaacaaatccgaaattgtctctgagattgaaattgccccaatttaatggcgtaaagcttcaccaatttcatcaattcgatatcaatttttgaaatttcgaagaaaggaagaaactttgaaaagagaaagcaaaatgtcaagagagacgacgacggaagcaacgcctttgattttaaccgacggaggaggaggaaggagatcggtgagaagacaagggttaagagaagcggcgaggttactaagacatgcaagtagcgggagaatgatgatgagagagccatcgatgcttgttcgtgaagctgcggctgagcagcttgaagagagacaaagcgattgggcttattcgaaacctgtagtggttttggatttcgtttggaatcttgcttttgtcgttgttgctacagctgttttggtacttagcagcgatgagaatccgaatatgcctcttagggtttggattattgggtatgggttgcaatgtatgatgcatatggtttgtgtttgtgttgagtatcgtaggaggaatagtagaagaagaagagatttgagtccaagatctagctcttcttcttcttcttcttcttcttctatggatgaagaagaaggtttgggtttgagtagaaactcagatgaacgttacttggagctaggtcaattagagaatgaaaacaatagttttgctaagcatctagaatctgcaaatacgatgatctcatttatatggtgggttattggattttattgggtatcttctggtggtcaagagttagcacaaggatccccacagctttattggttgtgtatagtctttcttggtttcgatgtgttctttgttgttttctgcgttgcattggcttgtgttatcggcattgctgtttgctgctgcttgccttgcatcattgcagttctatacgccgtagcagaacaggaaggagcttcgaaagaagacattgaccaacttactaaattcaaattccgaaaggttggtgatactatgaaacacactgttgatgaagaacaaggacaaggagattctggaggagtgatgactgaatgtggtacagattcacccgttgaacatgctcttcctcatgaggatgcagaatgctgcatttgtctttccgcttatgaagacgagacagagctaagagaacttccttgtggccaccatttccattgcggttgtgtggataaatggctttacataaatgctacttgtcccctctgcaaatacaacatcctcaagagtagcggggggggggggggagaaaaaatctagaagactagaacagtaagaagaggaaacttgcaaatatgcgaatatctgtatcatttagcagctgaggaacccatgagaaaaagggttcgagatttgatcaatttgttgtttacattgcttgttatatgtttacacattttagttgcttttttctttggagtctgtatgttctgttgttgtcgactcttgttaacatgttttggtacttacttgctcaacaagct

SEQ ID NO: 76050 - protein, 381 aa, Arabidopsis thaliana
  peptide (1)..(381): Ceres Seq. ID no. 7103709
MSRETTTEATPLILTDGGGGRRSVRRQGLREAARLLRHASSGRMMMREPSMLVREAAAEQLEERQSDWAYSKPVVVLDFVWNLAFVVVATAVLVLSSDENPNMPLRVWIIGYGLQCMMHMVCVCVEYRRRNSRRRRDLSPRSSSSSSSSSSSMDEEEGLGLSRNSDERYLELGQLENENNSFAKHLESANTMISFIWWVIGFYWVSSGGQELAQGSPQLYWLCIVFLGFDVFFVVFCVALACVIGIAVCCCLPCIIAVLYAVAEQEGASKEDIDQLTKFKFRKVGDTMKHTVDEEQGQGDSGGVMTECGTDSPVEHALPHEDAECCICLSAYEDETELRELPCGHHFHCGCVDKWLYINATCPLCKYNILKSSGGGGGEKI

SEQ ID NO: 76051 - protein, 338 aa, Arabidopsis thaliana
  peptide (1)..(338): Ceres Seq. ID no. 7103710
MMMREPSMLVREAAAEQLEERQSDWAYSKPVVVLDFVWNLAFVVVATAVLVLSSDENPNMPLRVWIIGYGLQCMMHMVCVCVEYRRRNSRRRRDLSPRSSSSSSSSSSSMDEEEGLGLSRNSDERYLELGQLENENNSFAKHLESANTMISFIWWVIGFYWVSSGGQELAQGSPQLYWLCIVFLGFDVFFVVFCVALACVIGIAVCCCLPCIIAVLYAVAEQEGASKEDIDQLTKFKFRKVGDTMKHTVDEEQGQGDSGGVMTECGTDSPVEHALPHEDAECCICLSAYEDETELRELPCGHHFHCGCVDKWLYINATCPLCKYNILKSSGGGGGEKI

SEQ ID NO: 76052 - protein, 337 aa, Arabidopsis thaliana
  peptide (1)..(337): Ceres Seq. ID no. 7103711
MMREPSMLVREAAAEQLEERQSDWAYSKPVVVLDFVWNLAFVVVATAVLVLSSDENPNMPLRVWIIGYGLQCMMHMVCVCVEYRRRNSRRRRDLSPRSSSSSSSSSSSMDEEEGLGLSRNSDERYLELGQLENENNSFAKHLESANTMISFIWWVIGFYWVSSGGQELAQGSPQLYWLCIVFLGFDVFFVVFCVALACVIGIAVCCCLPCIIAVLYAVAEQEGASKEDIDQLTKFKFRKVGDTMKHTVDEEQGQGDSGGVMTECGTDSPVEHALPHEDAECCICLSAYEDETELRELPCGHHFHCGCVDKWLYINATCPLCKYNILKSSGGGGGEKI

SEQ ID NO: 76053 - DNA, 1683 bp, Arabidopsis thaliana
  misc_feature (1)..(1683): Ceres Seq. ID no. 7103819
  misc_feature (1)..(1683): Ortholog of  Ceres SEQ ID NO 14307863 as cited in SEQ ID NO 20504
acctagaaatcgaaaatatcagatctaaagaagagcgtcttcataaacgcccttcgtcttcttccctgcaaatctattttctagatctttctttcttccgcgaaacgacaatgagagagtgcatttcgatccacattggtcaggctggtattcaagtcggaaatgcttgctgggagctttactgtcttgaacatggcattcagcctgatggccagatgcctggtgacaagattgttggtggaggtgatgatgctttcaacaccttcttcagtgaaaccggtgcaggtaagcacgtcccacgtgctgtctttgttgatcttgagccaactgtgatcgacgaggtcaggactggtacttaccgtcagcttttccaccctgaacaactcatcagtggtaaagaagacgctgctaacaatttcgcccgtggtcattacaccattgggaaagagattgttgatctctgcttggaccggatcagaaagctcgctgataactgtactggtcttcaaggattccttgttttcaacgctgttggtggtgggactggatctggtcttggatctcttctccttgagagactttctgttgactatgggaaaaagtccaagttgggtttcactgtttacccatctccacaggtgtctacctctgtggttgagccttacaacagtgtcctctccactcactctctcttggaacacactgatgtctccatcctcctcgacaatgaagctatctatgacatctgtagacgctcccttaacattgagagacctacctacaccaacctcaaccgtctcgtctctcaggttatttcttccttgactgcttctctgaggttcgatggtgccttgaatgttgatgttactgagttccaaaccaacttggttccatacccaaggatccacttcatgctttcgtcctatgcaccagtcatctccgcggagaaggccttccatgagcaactctcagttgctgagatcacgaacagtgcctttgaacctgcttccatgatggcaaagtgtgacccgcgacatggaaagtacatggcttgctgtttgatgtaccgtggtgatgtagtccccaaggatgtgaacgcagcggttggcaccatcaagaccaagcgaactattcagtttgttgactggtgtcctactggattcaagtgtggtatcaactaccagccaccaactgttgttcctggaggtgatcttgctaaagtccagagagctgtttgtatgatctcaaactcaaccagtgttgctgaggtattctcccgtattgatcacaagtttgatcttatgtacgccaaacgtgctttcgttcactggtatgttggtgagggtatggaagaaggagaattctcagaggctcgtgaggatcttgcagcattggagaaagattatgaagaggtcggtgctgaaggtggtgacgaggggggggatgaaaaaaaaaaatactaagaagaatgtttcttaaaaattggattttgtgttgggtttttctctattatctcgtgttgtgatgaatgggggctcgaaactcttacgagtcttagttgtgtgtttttctaaacctatatttctatctcttgctggtggtttgatttctattatctagttcgtttgtgtattgactcatgtttctggtaatatctttcttactatgtgataaagtaatccc

SEQ ID NO: 76054 - protein, 486 aa, Arabidopsis thaliana
  peptide (1)..(486): Ceres Seq. ID no. 7103820
LEIENIRSKEERLHKRPSSSSLQIYFLDLSFFRETTMRECISIHIGQAGIQVGNACWELYCLEHGIQPDGQMPGDKIVGGGDDAFNTFFSETGAGKHVPRAVFVDLEPTVIDEVRTGTYRQLFHPEQLISGKEDAANNFARGHYTIGKEIVDLCLDRIRKLADNCTGLQGFLVFNAVGGGTGSGLGSLLLERLSVDYGKKSKLGFTVYPSPQVSTSVVEPYNSVLSTHSLLEHTDVSILLDNEAIYDICRRSLNIERPTYTNLNRLVSQVISSLTASLRFDGALNVDVTEFQTNLVPYPRIHFMLSSYAPVISAEKAFHEQLSVAEITNSAFEPASMMAKCDPRHGKYMACCLMYRGDVVPKDVNAAVGTIKTKRTIQFVDWCPTGFKCGINYQPPTVVPGGDLAKVQRAVCMISNSTSVAEVFSRIDHKFDLMYAKRAFVHWYVGEGMEEGEFSEAREDLAALEKDYEEVGAEGGDEGGDEKKKY

SEQ ID NO: 76055 - protein, 450 aa, Arabidopsis thaliana
  peptide (1)..(450): Ceres Seq. ID no. 7103821
MRECISIHIGQAGIQVGNACWELYCLEHGIQPDGQMPGDKIVGGGDDAFNTFFSETGAGKHVPRAVFVDLEPTVIDEVRTGTYRQLFHPEQLISGKEDAANNFARGHYTIGKEIVDLCLDRIRKLADNCTGLQGFLVFNAVGGGTGSGLGSLLLERLSVDYGKKSKLGFTVYPSPQVSTSVVEPYNSVLSTHSLLEHTDVSILLDNEAIYDICRRSLNIERPTYTNLNRLVSQVISSLTASLRFDGALNVDVTEFQTNLVPYPRIHFMLSSYAPVISAEKAFHEQLSVAEITNSAFEPASMMAKCDPRHGKYMACCLMYRGDVVPKDVNAAVGTIKTKRTIQFVDWCPTGFKCGINYQPPTVVPGGDLAKVQRAVCMISNSTSVAEVFSRIDHKFDLMYAKRAFVHWYVGEGMEEGEFSEAREDLAALEKDYEEVGAEGGDEGGDEKKKY

SEQ ID NO: 76056 - protein, 415 aa, Arabidopsis thaliana
  peptide (1)..(415): Ceres Seq. ID no. 7103822
MPGDKIVGGGDDAFNTFFSETGAGKHVPRAVFVDLEPTVIDEVRTGTYRQLFHPEQLISGKEDAANNFARGHYTIGKEIVDLCLDRIRKLADNCTGLQGFLVFNAVGGGTGSGLGSLLLERLSVDYGKKSKLGFTVYPSPQVSTSVVEPYNSVLSTHSLLEHTDVSILLDNEAIYDICRRSLNIERPTYTNLNRLVSQVISSLTASLRFDGALNVDVTEFQTNLVPYPRIHFMLSSYAPVISAEKAFHEQLSVAEITNSAFEPASMMAKCDPRHGKYMACCLMYRGDVVPKDVNAAVGTIKTKRTIQFVDWCPTGFKCGINYQPPTVVPGGDLAKVQRAVCMISNSTSVAEVFSRIDHKFDLMYAKRAFVHWYVGEGMEEGEFSEAREDLAALEKDYEEVGAEGGDEGGDEKKKY

SEQ ID NO: 76057 - DNA, 1440 bp, Arabidopsis thaliana
  misc_feature (1)..(1440): Ceres Seq. ID no. 7103849
  misc_feature (1)..(1440): Ortholog of  Ceres SEQ ID NO 15170447 as cited in SEQ ID NO 52849
  misc_feature (1)..(1440): Ortholog of  Ceres SEQ ID NO 13589042 as cited in SEQ ID NO 60626
  misc_feature (1)..(1440): Ortholog of  Ceres SEQ ID NO 14302887 as cited in SEQ ID NO 66146
gcctatcattttgccaacgaacgttctttcttcttaatcacagctcagcctgacgcaaccgctcaggctgatctcttccaatttacagccatttcccagctcagatctctgatccggtgagatctctctcaaggaaaaggagttagagcatcatcaagatgaaggcactcattcttgttggaggcttcggcactcgcttgagaccattgactctcagtttcccaaagccccttgttgattttgctaataaacccatgatccttcatcagatagaggctcttaaggcagttggagttgatgaagtggttttggccatcaattatcagccagaggtgatgctgaacttcttgaaggactttgagaccaagctggaaatcaaaatcacttgctcacaagagaccgagccactaggtaccgctggtcctctggctctagcgagagacaaattgcttgatggatctggagagcccttctttgttcttaacagtgatgtgattagtgagtaccctcttaaagaaatgcttgagtttcacaaatctcacggtggggaagcctccataatggtaacaaaggtggatgaaccgtcgaaatatggagtggttgttatggaagaaagcactggaagagtggagaagtttgtggaaaagccaaaactgtatgtaggtaacaagatcaacgctgggatttatcttctgaacccatctgttcttgataagattgagctaagaccgacttcaatcgaaaaagagactttccctaagattgcagcagcgcaagggctctatgctatggtgctaccagggttttggatggacattgggcaaccccgtgactacataacgggtttgagactctacttagactcccttaggaagaaatctcctgccaaattaaccagtgggccacacatagttgggaatgttcttgttgacgaaaccgctacaattggggaaggatgtttgattggaccagacgttgccattggtccaggctgcattgttgagtcaggagtcagactctcccgatgcacggtcatgcgtggagtccgcatcaagaagcatgcgtgtatctcgagcagtatcatcgggtggcactcaacggttggtcaatgggccaggatcgagaacatgactatcctcggtgaggatgttcatgtgagcgatgagatctatagcaatggaggagttgttttgccacacaaggagatcaaatcaaacatcttgaagccagagatagtgatgtgaaaatgagatattatatgtgcaactttttttttttttttgtgtcctttcttcaactttgaaatcgctttcgtaattcttaatggcttttgaataagcatcaatcaaaacgctgtatatcttgttagggtcgtttgctgttttgtctctttttttgttttgtaatttataaaaaaatttattctcattcaaaaaaagg

SEQ ID NO: 76058 - protein, 361 aa, Arabidopsis thaliana; identical to SEQ ID NO: 24162
  peptide (1)..(361): Ceres Seq. ID no. 7103850

SEQ ID NO: 76059 - protein, 329 aa, Arabidopsis thaliana; identical to SEQ ID NO: 24163
  peptide (1)..(329): Ceres Seq. ID no. 7103851

SEQ ID NO: 76060 - protein, 302 aa, Arabidopsis thaliana; identical to SEQ ID NO: 24164
  peptide (1)..(302): Ceres Seq. ID no. 7103852

SEQ ID NO: 76061 - DNA, 1611 bp, Arabidopsis thaliana
  misc_feature (1)..(1611): Ceres Seq. ID no. 7103950
  misc_feature (1)..(1611): Ortholog of  Ceres SEQ ID NO 13582281 as cited in SEQ ID NO 51014
  misc_feature (1)..(1611): Ortholog of  Ceres SEQ ID NO 15176795 as cited in SEQ ID NO 54453
  misc_feature (1)..(1611): Ortholog of  Ceres SEQ ID NO 14310508 as cited in SEQ ID NO 58965
  misc_feature (1)..(1611): Ortholog of  Ceres SEQ ID NO 12617417 as cited in SEQ ID NO 65089
aaagcataatagagatacaaagaaacaagaaaacgaaaggaaaaaatacagaaatgggtggtttgaagtttcatgtacttatgtatccatggttcgcaacaggccatatgaccccgttcctttttcttgccaacaaattggctgagaaaggtcatacggtcacttttttgattcccaagaaagctctgaaacagttggaaaatctcaatctgtttccacacaacattgcctttcgctctgtcaccgtccctcatgtggatggtctccccgttggcacagagacagtctctgagatccccgtgacatcagctgatctcttgatgtctgctatggatctcacacgtgatcaagttgaaggtgtggtccgagccgtggaaccggacctgatcttctttgacttcgctcattggattccagaggtagctagagactttggccttaagactgtaaagtacgtcgtggtatctgcatcgactatagctagtatgcttgttccaggtggtgagttaggtgttcctccgccgggatatccttcatcgaaggtgctgcttcgtaaacaagatgcttacaccatgaagaatctggagtctacaaatacaatcaatgtcggaccaaacttattggaaagagtcactacaagtcttatgaactctgatgtcattgcgataaggacagccagagaaatcgaaggaaacttttgcgactatatcgaaaaacattgcaggaaaaaggttctcttgacaggtccggtgttccctgagccagacaagactagagagctagaggaacgatgggttaagtggctaagtgggtatgaaccagactcagtggtgttttgtgcgttgggctcacaagtcattttagagaaagatcaattccaagaactctgcttaggaatggagctaacaggttcaccgtttcttgtagcggttaagccacctagaggctcatcaacgattcaagaagcacttcctgaaggattcgaggagagggttaaaggaagaggagttgtttggggagaatgggttcaacaaccattgctattgtctcatccatcagtcgggtgctttgtgagccattgtgggtttggatcaatgtgggagtctttgctgagtgattgtcagatagtcttggtaccacagttgggtgatcaggtcctcaacacaagattgctgagtgacgaactcaaggtttcggttgaagtggcaagagaggaaacaggatggttctcgaaagagagcttgttcgatgctatcaatagtgtgatgaaaagggacagtgagatcgggaatctggtgaagaagaatcacaccaagtggagggagacactaactagtcctggacttgtgaccggttatgtcgagggggtgagagagtcaaaagcaggatcttgtctctgtgaccaaccatgtttcgaagtagaagggagtgatcaataaggttggtacaaaccaaactatatatcttgaagtgcttctgtttccaagtgtgtttttgtttgtttgtatcatgtttctaagtagcagtaggggatttataaggttttataaaccaaaccttacttgaagtacctctgttttccctagttggctttataataatgtgtttcgt

SEQ ID NO: 76062 - protein, 478 aa, Arabidopsis thaliana
  peptide (1)..(478): Ceres Seq. ID no. 7103951
SIIEIQRNKKTKGKNTEMGGLKFHVLMYPWFATGHMTPFLFLANKLAEKGHTVTFLIPKKALKQLENLNLFPHNIAFRSVTVPHVDGLPVGTETVSEIPVTSADLLMSAMDLTRDQVEGVVRAVEPDLIFFDFAHWIPEVARDFGLKTVKYVVVSASTIASMLVPGGELGVPPPGYPSSKVLLRKQDAYTMKNLESTNTINVGPNLLERVTTSLMNSDVIAIRTAREIEGNFCDYIEKHCRKKVLLTGPVFPEPDKTRELEERWVKWLSGYEPDSVVFCALGSQVILEKDQFQELCLGMELTGSPFLVAVKPPRGSSTIQEALPEGFEERVKGRGVVWGEWVQQPLLLSHPSVGCFVSHCGFGSMWESLLSDCQIVLVPQLGDQVLNTRLLSDELKVSVEVAREETGWFSKESLFDAINSVMKRDSEIGNLVKKNHTKWRETLTSPGLVTGYVEGVRESKAGSCLCDQPCFEVEGSDQ

SEQ ID NO: 76063 - protein, 461 aa, Arabidopsis thaliana
  peptide (1)..(461): Ceres Seq. ID no. 7103952
MGGLKFHVLMYPWFATGHMTPFLFLANKLAEKGHTVTFLIPKKALKQLENLNLFPHNIAFRSVTVPHVDGLPVGTETVSEIPVTSADLLMSAMDLTRDQVEGVVRAVEPDLIFFDFAHWIPEVARDFGLKTVKYVVVSASTIASMLVPGGELGVPPPGYPSSKVLLRKQDAYTMKNLESTNTINVGPNLLERVTTSLMNSDVIAIRTAREIEGNFCDYIEKHCRKKVLLTGPVFPEPDKTRELEERWVKWLSGYEPDSVVFCALGSQVILEKDQFQELCLGMELTGSPFLVAVKPPRGSSTIQEALPEGFEERVKGRGVVWGEWVQQPLLLSHPSVGCFVSHCGFGSMWESLLSDCQIVLVPQLGDQVLNTRLLSDELKVSVEVAREETGWFSKESLFDAINSVMKRDSEIGNLVKKNHTKWRETLTSPGLVTGYVEGVRESKAGSCLCDQPCFEVEGSDQ

SEQ ID NO: 76064 - protein, 452 aa, Arabidopsis thaliana
  peptide (1)..(452): Ceres Seq. ID no. 7103953
MYPWFATGHMTPFLFLANKLAEKGHTVTFLIPKKALKQLENLNLFPHNIAFRSVTVPHVDGLPVGTETVSEIPVTSADLLMSAMDLTRDQVEGVVRAVEPDLIFFDFAHWIPEVARDFGLKTVKYVVVSASTIASMLVPGGELGVPPPGYPSSKVLLRKQDAYTMKNLESTNTINVGPNLLERVTTSLMNSDVIAIRTAREIEGNFCDYIEKHCRKKVLLTGPVFPEPDKTRELEERWVKWLSGYEPDSVVFCALGSQVILEKDQFQELCLGMELTGSPFLVAVKPPRGSSTIQEALPEGFEERVKGRGVVWGEWVQQPLLLSHPSVGCFVSHCGFGSMWESLLSDCQIVLVPQLGDQVLNTRLLSDELKVSVEVAREETGWFSKESLFDAINSVMKRDSEIGNLVKKNHTKWRETLTSPGLVTGYVEGVRESKAGSCLCDQPCFEVEGSDQ

SEQ ID NO: 76065 - DNA, 1048 bp, Arabidopsis thaliana
  misc_feature (1)..(1048): Ceres Seq. ID no. 7104730
  misc_feature (1)..(1048): Ortholog of  Ceres SEQ ID NO 14310620 as cited in SEQ ID NO 53662
tcgattggccaaatcggccctcgagatttattttcacgacggacgcacaatcttgaacaatattatggaggagaaggaatcaaatgataggataaagaagctagaatctgacatagtgattcacattgggaaacaagaagcagaacttgcattgaaagtaaacagtgcagctttccaaggagatttttaccagcttaagagcttaatccgatctggagccgatcctaacaaaaccgattacgatggaagatcaccgcttcatcttgcagcatgtagaggctatgaagacattacattattccttattcaggaaggtgttgatgtcaatctaaaagataagttcggacacacaccattgtttgaggctgtgaaagcaggacaagaaggagtgattggtttgcttgtcaaagaaggagcctcctttaatttagaagattcaggaaacttcctttgcacgacagttgctaaaggcgactctgattttctcaagagattgctttcaagcggtatgaacccaaacagtgaagattatgatcacagaacgccgcttcatgtcgcggcttctgaagggttattcttgatggctaaaatgttggttgaagctggagcaagcgttatttctaaagaccgatgggggaattctccgcttgatgaagcccgattgtgcggaaacaagaaactgattaagttactcgaagatgtgaaaaatgctcagtcgtctatctacccgtcaagcttgcgtgaattacaagaggagagaattgagagacggaaatgcacggtgtttccattccacccgcaagaggcgaaagaagagcgtagtagaaagcacggagttgtggtttggatcccaagcaatctcgagaaactcatagtaaccgctgcgaaagagctagggctatcggatggagcctcatttgtactattatcagaagaccaaggtcgtatcacagacattgatatgattagtgatggacacaaattgtatatgatcagtgatactactgatcaaacataatgatggactcttcgatttttccgatgatcc

SEQ ID NO: 76066 - protein, 338 aa, Arabidopsis thaliana
  peptide (1)..(338): Ceres Seq. ID no. 7104731
RLAKSALEIYFHDGRTILNNIMEEKESNDRIKKLESDIVIHIGKQEAELALKVNSAAFQGDFYQLKSLIRSGADPNKTDYDGRSPLHLAACRGYEDITLFLIQEGVDVNLKDKFGHTPLFEAVKAGQEGVIGLLVKEGASFNLEDSGNFLCTTVAKGDSDFLKRLLSSGMNPNSEDYDHRTPLHVAASEGLFLMAKMLVEAGASVISKDRWGNSPLDEARLCGNKKLIKLLEDVKNAQSSIYPSSLRELQEERIERRKCTVFPFHPQEAKEERSRKHGVVVWIPSNLEKLIVTAAKELGLSDGASFVLLSEDQGRITDIDMISDGHKLYMISDTTDQT

SEQ ID NO: 76067 - protein, 317 aa, Arabidopsis thaliana
  peptide (1)..(317): Ceres Seq. ID no. 7104732
MEEKESNDRIKKLESDIVIHIGKQEAELALKVNSAAFQGDFYQLKSLIRSGADPNKTDYDGRSPLHLAACRGYEDITLFLIQEGVDVNLKDKFGHTPLFEAVKAGQEGVIGLLVKEGASFNLEDSGNFLCTTVAKGDSDFLKRLLSSGMNPNSEDYDHRTPLHVAASEGLFLMAKMLVEAGASVISKDRWGNSPLDEARLCGNKKLIKLLEDVKNAQSSIYPSSLRELQEERIERRKCTVFPFHPQEAKEERSRKHGVVVWIPSNLEKLIVTAAKELGLSDGASFVLLSEDQGRITDIDMISDGHKLYMISDTTDQT

SEQ ID NO: 76068 - protein, 169 aa, Arabidopsis thaliana
  peptide (1)..(169): Ceres Seq. ID no. 7104733
MNPNSEDYDHRTPLHVAASEGLFLMAKMLVEAGASVISKDRWGNSPLDEARLCGNKKLIKLLEDVKNAQSSIYPSSLRELQEERIERRKCTVFPFHPQEAKEERSRKHGVVVWIPSNLEKLIVTAAKELGLSDGASFVLLSEDQGRITDIDMISDGHKLYMISDTTDQT

SEQ ID NO: 76069 - DNA, 1412 bp, Arabidopsis thaliana
  misc_feature (1)..(1412): Ceres Seq. ID no. 7104734
  misc_feature (1)..(1412): Ortholog of  Ceres SEQ ID NO 14308851 as cited in SEQ ID NO 55618
tcgattggccaaatcggccctcgagagtagaaaatggctgatggtgaagatattcaaccccttgtctgtgacaatggaactggaatggttaaggctggttttgctggggatgatgcaccgagggctgtgtttccaagtattgttggccgtcctcgccacactggagtgatggttggaatgggacagaaggatgcatatgttggcgatgaagctcaatccaagcgtggtattcttacccttaaataccctattgagcacggtattgtcaacaattgggatgatatggaaaaaatctggcatcatactttctacaatgagctccgtgttgctcccgaggagcatcctattctgctcactgaagcgcctcttaacccaaaggctaaccgtgagaagatgactcagatcatgtttgaaacctttaacgctccggctatgtatgtcgccattcaagctgtcctgtcgctttatgctagtggtcgtactactggtattgtgcttgactctggagatggtgtgagtcacacggtccctatctatgagggttacgctctcccgcatgcaatcctacgtcttgatcttgcaggtcgtgacctcacagatgctctgatgaagatcctcactgagcgtggttactctttcaccacaacagctgagcgtgaaattgtcagagacatcaaggagaagctttgctacattgctcttgactatgagcaggagcttgagacggctaaaaccagctcttctgtagagaagaactatgagttacctgatgggcaagtgatcaccattggatctgagcgtttccgttgccctgaggttctttaccagccatctatgatcggtatggagaatgctggtatccatgaaaccacctacaactccataatgaaatgtgatgttgacatcagaaaggacttgtatggtaacattgtgctcagtggtggaacaactatgttccctggaattgctgacagaatgagcaaagagatcactgctttggcaccgagcagcatgaagatcaaagtcgttgcacctcctgagaggaaatactctgtctggattggaggatccatcttggcctccctcagtaccttccagcagatgtggatcgcaaaggcagaatatgatgagtcaggcccgtcgattgttcaccggaaatgcttttgagcttgaagttaagtctgcttccggagaagccctgggggtttttccagtttgtccttactgggtttttatcttcgttctctgctcttctttgtttttcttcttcaatattttcagattctggcctaagacattttgaagaatttacattatctgtttgtagtgttggttaaactgttgtcttgttccttttatttattttggatgacacaactgtgtttgagtgaataagaactcctgatttttcc

SEQ ID NO: 76070 - protein, 377 aa, Arabidopsis thaliana; identical to SEQ ID NO: 36003
  peptide (1)..(377): Ceres Seq. ID no. 7104735

SEQ ID NO: 76071 - protein, 360 aa, Arabidopsis thaliana; identical to SEQ ID NO: 36004
  peptide (1)..(360): Ceres Seq. ID no. 7104736

SEQ ID NO: 76072 - protein, 332 aa, Arabidopsis thaliana; identical to SEQ ID NO: 36005
  peptide (1)..(332): Ceres Seq. ID no. 7104737

SEQ ID NO: 76073 - DNA, 2728 bp, Arabidopsis thaliana
  misc_feature (1)..(2728): Ceres Seq. ID no. 7104918
  misc_feature (1)..(2728): Ortholog of  Ceres SEQ ID NO 13598741 as cited in SEQ ID NO 62749
  misc_feature (1)..(2728): Ortholog of  Ceres SEQ ID NO 12587535 as cited in SEQ ID NO 64020
  misc_feature (1)..(2728): Ortholog of  Ceres SEQ ID NO 13654409 as cited in SEQ ID NO 68534
  misc_feature (1)..(2728): Ortholog of  Ceres SEQ ID NO 12586366 as cited in SEQ ID NO 68983
tatagacgcaatcaccgccgattctctctctctctctctcgagtctctcgacggtcgcatatcaaaagtccatttctttcttctctttggaggatcagcaactatggatgaagagtacgaagtcatagttctgggtactggtctcaaggagtgcatccttagtggtcttctctccgtcgatggtcttaaggtacttcacatggacaggaatgactactacggtggagagtcaacttctcttaatctcaatcagctgtggaagaagttcaggggagaagagaaggctcctgctcatttaggttctagcagagactacaatgttgacatgatgccaaagtttatgatggctaacggaaagcttgttcgtgtccttattcatacggatgtgaccaagtacttgtcttttaaagctgttgatggaagctatgtttttgtccaaggcaaggtccaaaaagtgccagcaactcccatggaggccctcaaatctcctcttatgggtatttttgagaaacgtcgagctggaaagtttttcagctatgttcaagaatacgacgagaaggacccaaaaacacatgatggaatggatttgaggagagttacaactaaggatttgattgcgaaattcggtcttaaagaagatactattgactttattggtcatgcagtggcacttcactgtaatgacaatcatctccatcaacctgcctatgatactgtaatgagaatgaagctctacgcagagtcccttgcacgttttcaaggaggttcaccatatatctatcctctctatgggttgggagaattgcctcaggcatttgcacgacttagtgctgtctatggtgggacgtatatgttgaacaaacctgagtgcaaggtagagtttgacgaggagggtaaggtttctggtgttacatctgagggagagactgccaaatgcaagaaagttgtctgcgatccttcttacctaaccaacaaggtcaggaagattggcagggttgctcgggcgattgccattatgagccaccctattccaaacaccaatgattctcagtcggtgcaagtcattctaccccaaaaacaattgggccgcaaatcagacatgtatgtcttctgttgttcatattcacacaacgttgctcccaagggaaagttcatagcatttgtgtcaacagacgctgaaactgataaccctcaaaccgagctccagcctggaatcgaccttcttggtcctgttgatgagctgttcttcgacatctatgatagatatgagcctgtcaacgaacccactttggacaactgcttcatatcaacgagttatgatgctacaacacactttgacacaactgttgttgatgtgttgaacatgtataaattgatcaccggaaaggaactggatctaagtgtggatcttaacgcagctagtgctgcagaggaggaatgatggaaaatattgcaagctctgtctctctctgttagtcaccaaatgatgtaaccggttctctttctccctcttcttaaaagttgtctcaccaaatgttctgttaaaatactaaatcaaaccgatctcatcatgcgtacctattcccggttatcgcagtctgtttttttcttctcaaaaaactaaaatgttggatttcgtggtttttgtttggagtgtctaatataccaaaaaaaaaaaaaaaagagctcttggatccgtggttaaggaacgaaccgccgtaccaaactggaacataatcggctttgtggagttcattaaatccggtcagaaacaagatgacatggtcttggtcgtaccgcagggttcctccgccgttagactaggcaacgaagcctcaatctcccagaaaatatccgtcctacctggccgtctgtactcaataacgttcagcgccgctcgaacctgcgctcaagacgagaggctcaatatatccgtgacgcatgagtcaggtgtgatccctatccagacgatgtacggcagcgatggttgggactcatactcatgggcttttaaagctggtggtcccgaaatcgagatccggttccataaccctggtgttgaagagcacccggcttgcggacctttgatcgacgccgtggctatcaaggctttgttccctcccagattctctggatataatctgataaagaatgggaatttcgaagaaggaccttacgtgtttcccacggcaaaatggggagtactgatcccaccgttcatcgaggacgataacagcccattgcccggttggatgatcgagtctctcaaagccgttaagtacgtagacaaagcacacttcgctgtccccgaaggacaccgagccatcgagcttgttggaggcaaagagagcgccatttctcagatagtgaggacgtcactgaacaaattctacgccctcacgttcaacgtgggagacgccagagacggttgtgagggaccaatgattgtggaagcgttcgctggacagggcaaggtcatggtggactacgcttctaaaggaaaaggcgggtttagacgtgggaggcttgtgttcaaggcagtgtcggccaggacacgtgtcactttcttgagcacgttttaccacatgaaaagcgatcactctggctcgctatgtggtccggtgatcgatgatgttaggctggtagcggttgggaaactccgaggatgaaagttggggtcgttgactcattcggttgaatatactacattaatggataattgtaattc

SEQ ID NO: 76074 - protein, 479 aa, Arabidopsis thaliana
  peptide (1)..(479): Ceres Seq. ID no. 7104919
IDAITADSLSLSLESLDGRISKVHFFLLFGGSATMDEEYEVIVLGTGLKECILSGLLSVDGLKVLHMDRNDYYGGESTSLNLNQLWKKFRGEEKAPAHLGSSRDYNVDMMPKFMMANGKLVRVLIHTDVTKYLSFKAVDGSYVFVQGKVQKVPATPMEALKSPLMGIFEKRRAGKFFSYVQEYDEKDPKTHDGMDLRRVTTKDLIAKFGLKEDTIDFIGHAVALHCNDNHLHQPAYDTVMRMKLYAESLARFQGGSPYIYPLYGLGELPQAFARLSAVYGGTYMLNKPECKVEFDEEGKVSGVTSEGETAKCKKVVCDPSYLTNKVRKIGRVARAIAIMSHPIPNTNDSQSVQVILPQKQLGRKSDMYVFCCSYSHNVAPKGKFIAFVSTDAETDNPQTELQPGIDLLGPVDELFFDIYDRYEPVNEPTLDNCFISTSYDATTHFDTTVVDVLNMYKLITGKELDLSVDLNAASAAEEE

SEQ ID NO: 76075 - protein, 445 aa, Arabidopsis thaliana; identical to SEQ ID NO: 21269
  peptide (1)..(445): Ceres Seq. ID no. 7104920

SEQ ID NO: 76076 - protein, 413 aa, Arabidopsis thaliana; identical to SEQ ID NO: 21270
  peptide (1)..(413): Ceres Seq. ID no. 7104921

SEQ ID NO: 76077 - DNA, 1018 bp, Arabidopsis thaliana
  misc_feature (1)..(1018): Ceres Seq. ID no. 7104949
  misc_feature (1)..(1018): Ortholog of  Ceres SEQ ID NO 15176130 as cited in SEQ ID NO 1136
  misc_feature (1)..(1018): Ortholog of  Ceres SEQ ID NO 15171728 as cited in SEQ ID NO 57131
  misc_feature (1)..(1018): Ortholog of  Ceres SEQ ID NO 14308198 as cited in SEQ ID NO 59072
  misc_feature (1)..(1018): Ortholog of  Ceres SEQ ID NO 13654213 as cited in SEQ ID NO 60614
  misc_feature (1)..(1018): Ortholog of  Ceres SEQ ID NO 12617527 as cited in SEQ ID NO 64697
tttgtttcgattatcgattattatatcttatatcgtgttcgttttttttttttttagaacataaaaagagccagatgctcattacacactcatgtaagtaaacaacacacatcgcaggacgtacatacataaaaagcacaatacaacgaccgaatgcgactgcgttacaaaccctcattatttttatttaatatgtatacacgattgttcgaagcttaacggccaccaccgggaagcttttccttgatcttgtccatcatccccttcttctcgtggtgctcaccaccgtagccaccagcatcatatccggatccaaataacgaagagtcgcagaggaagcttgaggacgatttcgacattgtcactaataagaaagcgagcgacgttgctcagcctttggttgaggcggatattccgtttaagatccatatcgtcaaggatcacgatatgaaggagaggctttgtttggaggtggagaggttagggctaagtactttgattatgggtagtagaggatttggtgctacgaagaggagtagtaaagggagattagggagtgtcagtgattactcagttcaccattgtgcttgtccggtggttgttgttagatttcctgatgataaggatggagaagatgagaaatccggcgacagtggtggggagaatctgatggacagtgataaacttcatacagtgcctgaggtggctgaagaagagggagataaggatgagtaccatgatgcttcggataagcagtagcagcaaggctttcatgttgcagaaggagacctccctaaggagacttagaaagaaaagaaagcgttcctttgcccttggtttgtgttcttgagtgtgcttaattgtgttgtttttggggtttggggtattctagatctcttttgtaagtattctcttgtttcttggttttgttttaaactctatggaatttgggatgagtggattcgatgtcttttgtttgtctttgaaaaagcagtgaaaagaatttcagtggtcttgt

SEQ ID NO: 76078 - protein, 103 aa, Arabidopsis thaliana
  peptide (1)..(103): Ceres Seq. ID no. 7104950
MKERLCLEVERLGLSTLIMGSRGFGATKRSSKGRLGSVSDYSVHHCACPVVVVRFPDDKDGEDEKSGDSGGENLMDSDKLHTVPEVAEEEGDKDEYHDASDKQ

SEQ ID NO: 76079 - protein, 85 aa, Arabidopsis thaliana
  peptide (1)..(85): Ceres Seq. ID no. 7104951
MGSRGFGATKRSSKGRLGSVSDYSVHHCACPVVVVRFPDDKDGEDEKSGDSGGENLMDSDKLHTVPEVAEEEGDKDEYHDASDKQ

SEQ ID NO: 76080 - DNA, 2871 bp, Arabidopsis thaliana
  misc_feature (1)..(2871): Ceres Seq. ID no. 7104967
  misc_feature (1)..(2871): Ortholog of  Ceres SEQ ID NO 13589868 as cited in SEQ ID NO 55521
  misc_feature (1)..(2871): Ortholog of  Ceres SEQ ID NO 12617659 as cited in SEQ ID NO 65286
gtcgcgcatttagcgttgttttgaagctctctctttcaaattctgttcgtctctcgcgatctctctctctctctcagatagctccgaaactttcacgcagagttaagtgaagcaggatgggattgtcattcgccaagctttttagcaggctttttgccaagaaggagatgagaattctgatggttggtcttgatgctgctggtaagaccaccattttgtacaagctcaagctcggagagattgtaaccaccattcccactattgggttcaatgtggagactgtggagtacaagaacatcagtttcacagtgtgggatgtcggcggtcaggataagatccgtcccttgtggaggcattacttccagaacacccaaggtcttatctttgtggtggacagcaatgacagagaccgtgttgttgaggctagagatgaattgcaccgaatgttgaatgaggacgagctgcgtgatgctgttctgctcgtatttgctaacaagcaggatctcccaaatgctatgaatgcagctgagatcacggataagcttggtctccactctctccgtcagcgtcactggtacatccagagcacatgtgccacttcaggcgaggggctttacgaaggtcttgactggttgtccaacaacattgccggcaaggcgtagagggaaagttcgtggtggagttgatttgctgagcaaatctggatgcaggggcaaacattatctgaattttttttttggtttccgttttcgttattgttctgctttttttttgggatatgtcgatggattttgtgattgtacgtagaacttagaaaaaaactaccttttatatagttttggtaaaactgtaatcgaagatttcacctaaaagaaaaaaaaaaaaaaaagagctcttggatccgattcaatctggctcttgaaagtggcaacatcagtgtggctgttgcatccgctacacagattaacgagaaagaccactggtatagacttggagtggaggctcttcgccaaggtaattctggaattgttgagtttgcataccagcagacaaagaactttgagaggttatcttttctttatctcattactggaaatttggacaagctttcaaagttgatgaagattgcagaagtgaagaacaacgtaatgggacagtttcacaatgctctctacctaggagatgttaaagagcgtgttaagatactggagaatgctggtcatttgcctctagcttatatcacagcttcggttcatggtttaaatgacattgctgagcgactggcaactgagttaggagacaacgtgccctcattgcctgaaggaaaaactccatcgcttctaatgccaccgacacccatcatgtgtggtggtgattggcctcttcttagagtgatgaaaggaatatttgaaggaggacttgagagtgcagacagaggaggtactgttgatgaagaagatgttgaaggggattggggtgaggaacttgacattaatgttgatggaatggagaacagagatattgaagacattttggcggctgcagaagcaggtgaagaagaaaacgatgaggaaggtggatggggacttgaagacttggtgctcccaccagagcttgacactcctaaagcctctgctaatgcacgttcatctgtttttgtgacacctccccaaggtatgcccgtaagtcagagctggagccagaaatcttctcttgctgctgagcaagccgcagcgggaagcttcgacactgcaatgcgtctgctccacagacagcttggtatcaagaactttacacctttgaaatcgatgtttctagatctgttcaatggcagccatagctatctgcgtgctttttcttcatgtcctgtggttccacttgccattgagcgtggatggagcgagtcttccagtcccaacgtccgtagcccaccagctcttgtttatgatttctctcagctagacgagaagctcaaatccggctacaaagctacaacaactgggaaattcactgaggctctccgtctcttcctttctatcctgcacaccatccctctagtggtagtcgagacaagaagagaagtggatgaggtcaaggaattaatcgttatcgttaaagaatatgtccttggtcttcaaatggagctcaagaggagagagatgaaagatgatccggtgaggcagcaagagctcgctgcttacttcactcactgcaacctccaaacacctcacttacggcttgcgctgcttagtgcaatgggtgtctgctacaaggcaaagaacctcgccactgcttctaatttcgccagaagactgttggaaacaagcccagttgatagccaagccaagatggctagacaagttgtgcaagccgctgaacgtaacatgaccgatgaaacaaagcttaactacgacttcaggaacccttttgtggtatgtggttccacatatgtcccgatctacagaggacagaaagacgtctcatgtccttactgcaccgcccggtttgtaccaaaccaggaaggaaacatctgcacggtctgtgatctagcagtgattggcgcagacgcatctggtttgttatgctctccatctcaagtccggtgatcaatttcagatttcataatcaatacagggatgctctattaacagaataagagtgttgaacttttggtgtttttgtgattgtgtacttaccaatcaggtttgaggatttttctcgttgcaggtttttattactcttttaaaagttgtttcttatcttttagtacacatgagaactttagcttcttgctttataatttctctttttgatgcatagtagcactggataacttgtaatttcaatttcggaaattatggtttacttgcg

SEQ ID NO: 76081 - protein, 495 aa, Arabidopsis thaliana
  peptide (1)..(495): Ceres Seq. ID no. 7104968
MKIAEVKNNVMGQFHNALYLGDVKERVKILENAGHLPLAYITASVHGLNDIAERLATELGDNVPSLPEGKTPSLLMPPTPIMCGGDWPLLRVMKGIFEGGLESADRGGTVDEEDVEGDWGEELDINVDGMENRDIEDILAAAEAGEEENDEEGGWGLEDLVLPPELDTPKASANARSSVFVTPPQGMPVSQSWSQKSSLAAEQAAAGSFDTAMRLLHRQLGIKNFTPLKSMFLDLFNGSHSYLRAFSSCPVVPLAIERGWSESSSPNVRSPPALVYDFSQLDEKLKSGYKATTTGKFTEALRLFLSILHTIPLVVVETRREVDEVKELIVIVKEYVLGLQMELKRREMKDDPVRQQELAAYFTHCNLQTPHLRLALLSAMGVCYKAKNLATASNFARRLLETSPVDSQAKMARQVVQAAERNMTDETKLNYDFRNPFVVCGSTYVPIYRGQKDVSCPYCTARFVPNQEGNICTVCDLAVIGADASGLLCSPSQVR

SEQ ID NO: 76082 - protein, 485 aa, Arabidopsis thaliana
  peptide (1)..(485): Ceres Seq. ID no. 7104969
MGQFHNALYLGDVKERVKILENAGHLPLAYITASVHGLNDIAERLATELGDNVPSLPEGKTPSLLMPPTPIMCGGDWPLLRVMKGIFEGGLESADRGGTVDEEDVEGDWGEELDINVDGMENRDIEDILAAAEAGEEENDEEGGWGLEDLVLPPELDTPKASANARSSVFVTPPQGMPVSQSWSQKSSLAAEQAAAGSFDTAMRLLHRQLGIKNFTPLKSMFLDLFNGSHSYLRAFSSCPVVPLAIERGWSESSSPNVRSPPALVYDFSQLDEKLKSGYKATTTGKFTEALRLFLSILHTIPLVVVETRREVDEVKELIVIVKEYVLGLQMELKRREMKDDPVRQQELAAYFTHCNLQTPHLRLALLSAMGVCYKAKNLATASNFARRLLETSPVDSQAKMARQVVQAAERNMTDETKLNYDFRNPFVVCGSTYVPIYRGQKDVSCPYCTARFVPNQEGNICTVCDLAVIGADASGLLCSPSQVR

SEQ ID NO: 76083 - protein, 420 aa, Arabidopsis thaliana
  peptide (1)..(420): Ceres Seq. ID no. 7104970
MPPTPIMCGGDWPLLRVMKGIFEGGLESADRGGTVDEEDVEGDWGEELDINVDGMENRDIEDILAAAEAGEEENDEEGGWGLEDLVLPPELDTPKASANARSSVFVTPPQGMPVSQSWSQKSSLAAEQAAAGSFDTAMRLLHRQLGIKNFTPLKSMFLDLFNGSHSYLRAFSSCPVVPLAIERGWSESSSPNVRSPPALVYDFSQLDEKLKSGYKATTTGKFTEALRLFLSILHTIPLVVVETRREVDEVKELIVIVKEYVLGLQMELKRREMKDDPVRQQELAAYFTHCNLQTPHLRLALLSAMGVCYKAKNLATASNFARRLLETSPVDSQAKMARQVVQAAERNMTDETKLNYDFRNPFVVCGSTYVPIYRGQKDVSCPYCTARFVPNQEGNICTVCDLAVIGADASGLLCSPSQVR

SEQ ID NO: 76084 - DNA, 1913 bp, Arabidopsis thaliana
  misc_feature (1)..(1913): Ceres Seq. ID no. 7104999
  misc_feature (1)..(1913): Ortholog of  Ceres SEQ ID NO 12605517 as cited in SEQ ID NO 20422
  misc_feature (1)..(1913): Ortholog of  Ceres SEQ ID NO 13593831 as cited in SEQ ID NO 53828
gcaacacataacccactcacagaaaaacctagaaagctctagagagaaagagagagagagatggaaggtaaagaagaagatgttagagtcggagctaacaagtttccggagaggcaaccgatcggaacttcggctcagagtgacaaggactacaaagagccaccacctgcgccgttgttcgagcccggcgagctagcttcatggtccttctggagagctgggattgctgagtttatagctacgtttttgttcctgtacatcactgttttgactgttatgggtgtgaagaggtcaccgaacatgtgtgcttccgtcggaatccaaggtatcgcttgggctttcggtggtatgatcttcgctctcgtctactgcaccgctggtatctccggtggacacatcaacccagcggttacgttcggtttgttcttagctaggaagctttcgctcacacgagctgtgtactacatagtgatgcagtgcttaggagctatctgtggagctggtgtggtcaaggggttccagccaaagcaataccaggctttgggaggtggagccaacaccatagctcatggctacaccaaaggaagtggtcttggagctgagattattggaacctttgtccttgtttacaccgtcttctctgccactgatgccaagagaaacgctcgtgactctcatgttcctattctagcaccgctccctatcggattcgctgtgttcttggttcacttagcaaccatccccattactggaactggaatcaacccagcaagaagtcttggagctgcaatcatcttcaacaaggacaacgcttgggatgaccactgggtcttttgggttggaccattcattggtgctgcacttgctgctctctaccacgttatagtcatcagagccatcccattcaagtccagaagctaaagctgattgagttctatttaaaatctggcttttgttcttagtttgctttcttttgtgaatctactacctgtgtgtaacgtgtgtatctgttgtcctcttctttgcctaatggagacttatgtaaaacaaataaaaaaaaaaaaaaaagagctcttggatccgagttatttaagccaggtatcaaaaacattcaaggacgtgaaccagacgattcaagaacatggaccgtgggcttctccttgggttggagaatctggtggagcttacaatagtggtggccgtcatgtttctgacacattcatagatagcttctggtatctagatcagcttggaatgtcagcgagacacaacactaaagtttactgcagacagactttggttggagggttttacggcttgctcgaaaagggaacgtttgttccaaatcctgattactatagcgcgctgctttggcatcgtttaatgggaaaaggggttcttgcggtgcagacagatggaccgccacagctacgggtttacgcacattgttcaaaaggaagagccggtgtgacattgctactgataaatctaagcaatcaatcggattttacggttagtgtcagcaatggcataaacgtggttttgaatgcggaatcaaggaagaagaagtcattgttggatactttaaaaagaccattttcttggattggaagcaaagcttctgatggatatttgaatagagaagagtatcatctgacaccagaaaacggtgtgttgcgcagcaaaacaatggtcttgaatggtaaatcgttaaaaccgacggcaacaggagatatcccgagccttgaaccggtcctccgtagtgtgaactctccgcttaatgtcttgccattgtcgatgtcgttcattgtgttacctaattttgatgcttctgcttgttcatgatgttaatggggtctctctttgcttattgggaaaaaataaataaaaataaagaatagttgtaattaaac

SEQ ID NO: 76085 - protein, 286 aa, Arabidopsis thaliana; identical to SEQ ID NO: 39702
  peptide (1)..(286): Ceres Seq. ID no. 7105000

SEQ ID NO: 76086 - protein, 271 aa, Arabidopsis thaliana
  peptide (1)..(271): Ceres Seq. ID no. 7105001
METYVKQIKKKKKELLDPSYLSQVSKTFKDVNQTIQEHGPWASPWVGESGGAYNSGGRHVSDTFIDSFWYLDQLGMSARHNTKVYCRQTLVGGFYGLLEKGTFVPNPDYYSALLWHRLMGKGVLAVQTDGPPQLRVYAHCSKGRAGVTLLLINLSNQSDFTVSVSNGINVVLNAESRKKKSLLDTLKRPFSWIGSKASDGYLNREEYHLTPENGVLRSKTMVLNGKSLKPTATGDIPSLEPVLRSVNSPLNVLPLSMSFIVLPNFDASACS

SEQ ID NO: 76087 - protein, 214 aa, Arabidopsis thaliana; identical to SEQ ID NO: 39703
  peptide (1)..(214): Ceres Seq. ID no. 7105002

SEQ ID NO: 76088 - DNA, 1744 bp, Arabidopsis thaliana
  misc_feature (1)..(1744): Ceres Seq. ID no. 7105012
  misc_feature (1)..(1744): Ortholog of  Ceres SEQ ID NO 14310419 as cited in SEQ ID NO 55050
  misc_feature (1)..(1744): Ortholog of  Ceres SEQ ID NO 13657789 as cited in SEQ ID NO 66154
tcgattggccaaatcggccctcgagattaaacagcatcaagacaacatccaaaaattacccaggtttttgtgtttgaaactcgaagattgttgcggattcctgaaagattaaggcttttagctccaagtttccaagagtgctgtgaatcagctcccactctgtctctgcatattgcaagacaccggttttgtttcagaagtttgtttcttcttgtctcatgatcactagttttcagcaatggggtatgtaaacgtggagaagagatgggtttttcctcttgtcatcacatctctcgtctgcgttttccttcttgcaacttctttcaacatgggactagtctcttccctccgaacaatcaacgggattttctccatcataccttcccgtctcgtcaagaaccaaacgagacttgattttgcagagtctaaagttgctagacaaacccgtgttttgcctcatgaagacaagcttccccgttttgcataccttgtttccgggtctaaaggggatgtagaaaagctttggagaacacttagagcagtgtaccatccaagaaaccagtatgttgttcacttggatcttgaatcacctgtgaatgagagattagagctggcctctcggattaataacgatcctatgtactctaaaaccgggaatgtatatatgataaccaagactaaccttgtgacatataaaggaccaacgatggtggcaaatactcttcacgcttgtgctgttcttctcaagagaaatgcgaactgggattggtttattaaccttagtgcttcagattatcctctggtgacccaagatgatctgcttcatacgttttcaacattggaccggaacctcaactttatcgaacacacaagtcaactgggatggaaagaggagaagcgagcacagccattaatgattgatcctggactctacttgttgaacaaatctgatatttactgggtcacacctcgccgaagtttgccaactgcctttaagttattcactggatcagcttggatggctctatcacgcccgtttgtagagtattgcatatggggatgggacaatttaccacgaactctcctaatgtattacaccaacttcgtttcatcgcccgaaggttacttccagaccgtgatttgcaacgtgcctgagtttgcaaaaactgcagtaaaccatgacctacactacatttcctgggacaatccgccgcagcagcacccacacgtgttgtcactcaacgacacaatgccgatgatatggagcggtgctgcgtttgctaggaaattcagaagagatgatgaagtacttaataagatcgataaggaattacttaaacggaggaatgataaagatagttttactcctggtggatggtgcagtgggaaaccaaaatgctccagggtcggtaatgtggctaagattgttcctagctttggagctcagaggcttcaaggacttgtgaccaggttagtcaacgaagctaatacaggagttagtcagtgtaaatagaaagaattcgaagaaaaaaagaaccattatcgaagtaatggagagcgactgtcatgatatatatatttatacaacatatagagaatcttgcagttgcaggctttagataagactattagacattgtttgcattgagtagagatgccttgtaatgccacgacctactgggattcatttttgtttgtttgaagtcatctccttcaaaatccaataaaattataaccttttttt

SEQ ID NO: 76089 - protein, 424 aa, Arabidopsis thaliana
  peptide (1)..(424): Ceres Seq. ID no. 7105013
MGYVNVEKRWVFPLVITSLVCVFLLATSFNMGLVSSLRTINGIFSIIPSRLVKNQTRLDFAESKVARQTRVLPHEDKLPRFAYLVSGSKGDVEKLWRTLRAVYHPRNQYVVHLDLESPVNERLELASRINNDPMYSKTGNVYMITKTNLVTYKGPTMVANTLHACAVLLKRNANWDWFINLSASDYPLVTQDDLLHTFSTLDRNLNFIEHTSQLGWKEEKRAQPLMIDPGLYLLNKSDIYWVTPRRSLPTAFKLFTGSAWMALSRPFVEYCIWGWDNLPRTLLMYYTNFVSSPEGYFQTVICNVPEFAKTAVNHDLHYISWDNPPQQHPHVLSLNDTMPMIWSGAAFARKFRRDDEVLNKIDKELLKRRNDKDSFTPGGWCSGKPKCSRVGNVAKIVPSFGAQRLQGLVTRLVNEANTGVSQCK

SEQ ID NO: 76090 - protein, 394 aa, Arabidopsis thaliana
  peptide (1)..(394): Ceres Seq. ID no. 7105014
MGLVSSLRTINGIFSIIPSRLVKNQTRLDFAESKVARQTRVLPHEDKLPRFAYLVSGSKGDVEKLWRTLRAVYHPRNQYVVHLDLESPVNERLELASRINNDPMYSKTGNVYMITKTNLVTYKGPTMVANTLHACAVLLKRNANWDWFINLSASDYPLVTQDDLLHTFSTLDRNLNFIEHTSQLGWKEEKRAQPLMIDPGLYLLNKSDIYWVTPRRSLPTAFKLFTGSAWMALSRPFVEYCIWGWDNLPRTLLMYYTNFVSSPEGYFQTVICNVPEFAKTAVNHDLHYISWDNPPQQHPHVLSLNDTMPMIWSGAAFARKFRRDDEVLNKIDKELLKRRNDKDSFTPGGWCSGKPKCSRVGNVAKIVPSFGAQRLQGLVTRLVNEANTGVSQCK

SEQ ID NO: 76091 - protein, 291 aa, Arabidopsis thaliana
  peptide (1)..(291): Ceres Seq. ID no. 7105015
MYSKTGNVYMITKTNLVTYKGPTMVANTLHACAVLLKRNANWDWFINLSASDYPLVTQDDLLHTFSTLDRNLNFIEHTSQLGWKEEKRAQPLMIDPGLYLLNKSDIYWVTPRRSLPTAFKLFTGSAWMALSRPFVEYCIWGWDNLPRTLLMYYTNFVSSPEGYFQTVICNVPEFAKTAVNHDLHYISWDNPPQQHPHVLSLNDTMPMIWSGAAFARKFRRDDEVLNKIDKELLKRRNDKDSFTPGGWCSGKPKCSRVGNVAKIVPSFGAQRLQGLVTRLVNEANTGVSQCK

SEQ ID NO: 76092 - DNA, 3181 bp, Arabidopsis thaliana
  misc_feature (1)..(3181): Ceres Seq. ID no. 7105035
  misc_feature (1)..(3181): Ortholog of  Ceres SEQ ID NO 13593889 as cited in SEQ ID NO 53305
aaccccccgactttcctcaaatcccatcactctctttctttcgtttggtccctcaaaaactatataaaatcccaatttcccagctctattaaaaaaaccatatacgtacacacatacaaatactctctgattattttttgtatgtgtgtacgaaaacgcatagctctttgttgtctttgatcgagatttttgctgaatctatcttcgcagtgagatcgattttgttatttgatttcgtttactcgtcaatcggaagttcgatcggaaattgaatgcgtggatctgattacgatcaaatgacctccagcttaagggctactgacattaaggaaattggcaatgggagagacgggagatgatgctgggccatcagagcaaggaccttctaatcaaacctggtggccttcagaatttgtggagaaatttggttctgtttatctgggatcgcaagaagagacatctagtactaaagactcacctagaaatcttgggcaagatgggctgccatctagtactgcttcgaatattctttggagtactggttcactttctgagcccatcccaaatggcttctactctgtgatcccggataatagattgaagcagctatttaataacattcctacattggaagatcttcatgctctgggtgacgaaggtcttaaggctgatgtgattctagttgattttcagaaagataaaaagcttttcaggcagaagcagttgattaccaaacttgtcagtggattgaactcaaagccagctactattattaagaaaattgctggactggtagcagatgtttataagcaatcaactctgcagagtccagcaaaaagtacgcagtcatttgaaaactgtggtattcaactgctaggacagatcaagcatggttcttgtcgtcctcgagcaatcttgttcaaagtcttagctgatactgttggcctgcaaagtcgacttgtagtgggtttgccaagtgatggagctgctgagagtgtggactcatatagtcatatttctgtcactgttttgctgaattctgtggaaatgctggttgacctaatgcgatttcctggtcagcttattcctctatcaaccaaagcaatttttatgagtcatatctcagcggcaggggaaagtgattctgcagagaatgactcttgtgattcacctttggagccaaacagtcccatgtttggttatccagagaaatttgaccatgaaaatgcagaaaaagatgaaaacctttcgttgcacaggaaactggatgggtctccaaatacgtctggtccaccatcaaggaatatgctgttacgatctgcctctgcgctagagaggaaattaagtttctcacagagcgagtcaaacatggctaacgagttttggcggcagagccggaggaaggtcattgctgatcagcggactgctagttccagtcccgaacatctttccttccgagcccgtacaaagtccatgctaagtggcgacaagaacttggcacgagatttcaccggggatgttgccacatcaagctgcaaatctgttggaggagcaaaaatggaaactaagagaataaggaggagaagcatcagtataactcctgagattggcgatgatattgtcagggcagtacgagcgatgaatgaagccttgaagcagaatcgcctctcaaaagagcaaggggatgatgattcatctcctaactctccaaatgacagaaccgagagctctcatctccagaaaaatgtctctggttttcatcttgatgcccatgaccaagtttctggtggaaggtcgacactttcaagggaaccactagatccgcagaaggcaatctcactaccttcttctccccagaactaccgaagccaatatgaacagagtggatcgtcacatcgcaatataagccacatctgggataaagtattgggatctcccatgttccagaataagccattattaccttatgaagaatggaacatagacttctctgagctgactgttgggacacgtgtcggaattggatttttcggagaagtattccgtgggatctggaacgggacagacgttgctatcaaagtgttccttgagcaagaccttacagctgagaacatggaggatttctgcaatgagatatcaattcttagccgacttagacatcccaatgttatactgttccttggagcatgcacaaagcctccacgattatcactgatcactgagtacatggaaatgggatctttgtattacttgctccacttgagtggacaaaaaaagaggttaagctggcggaggaagctaaagatgctgcgggacatttgcaggggattgatgtgtatacaccggatggggatagtacaccgtgatataaagagtgcaaactgtcttttgagcaacaaatggacagtcaagatctgtgattttgggctgtcgagaataatgacagggacaacaatgagagacacagtctctgcaggaactccagagtggatggctcctgaacttatccgcaatgagcccttctcagaaaagtgtgatatcttcagtttaggtgtaataatgtgggagctatgcactttaaccagaccttgggaaggagtaccgcctgaacgggttgtttatgctattgcttacgagggagctcggcttgagattcctgaaggaccactgggaaagcttattgcagattgttggacagaaccggaacaaagaccgagttgcaatgagatactctctcgtttgctggattgtgagtattcgctttgctaactttctctcaatcatattttccttctgtgaatataaaactttgcagcgagagaggtttttgttttcttcgtttcttttttttgaatattgttggctttctcctttgagtttgtacaaaagaactttggcgctttcacatccacaaaaagctttgtggaactcttttccgtttaatcatttgcaaattcgtaaatttcaaaacctctgaaacaaaaaagtaagtcttataaattttacaaaaggtgagaagagttgctcattctttcagtttaaatgatcaagcttgctactctttttcgtaccataaggtttgttccctgctttgcatttgctataagaaaattacggacaaatacatgtacttttcgtttatatttcgtgccttaagaaatgaaaaggagctttgattgac

SEQ ID NO: 76093 - protein, 809 aa, Arabidopsis thaliana
  peptide (1)..(809): Ceres Seq. ID no. 7105036
MGETGDDAGPSEQGPSNQTWWPSEFVEKFGSVYLGSQEETSSTKDSPRNLGQDGLPSSTASNILWSTGSLSEPIPNGFYSVIPDNRLKQLFNNIPTLEDLHALGDEGLKADVILVDFQKDKKLFRQKQLITKLVSGLNSKPATIIKKIAGLVADVYKQSTLQSPAKSTQSFENCGIQLLGQIKHGSCRPRAILFKVLADTVGLQSRLVVGLPSDGAAESVDSYSHISVTVLLNSVEMLVDLMRFPGQLIPLSTKAIFMSHISAAGESDSAENDSCDSPLEPNSPMFGYPEKFDHENAEKDENLSLHRKLDGSPNTSGPPSRNMLLRSASALERKLSFSQSESNMANEFWRQSRRKVIADQRTASSSPEHLSFRARTKSMLSGDKNLARDFTGDVATSSCKSVGGAKMETKRIRRRSISITPEIGDDIVRAVRAMNEALKQNRLSKEQGDDDSSPNSPNDRTESSHLQKNVSGFHLDAHDQVSGGRSTLSREPLDPQKAISLPSSPQNYRSQYEQSGSSHRNISHIWDKVLGSPMFQNKPLLPYEEWNIDFSELTVGTRVGIGFFGEVFRGIWNGTDVAIKVFLEQDLTAENMEDFCNEISILSRLRHPNVILFLGACTKPPRLSLITEYMEMGSLYYLLHLSGQKKRLSWRRKLKMLRDICRGLMCIHRMGIVHRDIKSANCLLSNKWTVKICDFGLSRIMTGTTMRDTVSAGTPEWMAPELIRNEPFSEKCDIFSLGVIMWELCTLTRPWEGVPPERVVYAIAYEGARLEIPEGPLGKLIADCWTEPEQRPSCNEILSRLLDCEYSLC

SEQ ID NO: 76094 - protein, 573 aa, Arabidopsis thaliana
  peptide (1)..(573): Ceres Seq. ID no. 7105037
MLVDLMRFPGQLIPLSTKAIFMSHISAAGESDSAENDSCDSPLEPNSPMFGYPEKFDHENAEKDENLSLHRKLDGSPNTSGPPSRNMLLRSASALERKLSFSQSESNMANEFWRQSRRKVIADQRTASSSPEHLSFRARTKSMLSGDKNLARDFTGDVATSSCKSVGGAKMETKRIRRRSISITPEIGDDIVRAVRAMNEALKQNRLSKEQGDDDSSPNSPNDRTESSHLQKNVSGFHLDAHDQVSGGRSTLSREPLDPQKAISLPSSPQNYRSQYEQSGSSHRNISHIWDKVLGSPMFQNKPLLPYEEWNIDFSELTVGTRVGIGFFGEVFRGIWNGTDVAIKVFLEQDLTAENMEDFCNEISILSRLRHPNVILFLGACTKPPRLSLITEYMEMGSLYYLLHLSGQKKRLSWRRKLKMLRDICRGLMCIHRMGIVHRDIKSANCLLSNKWTVKICDFGLSRIMTGTTMRDTVSAGTPEWMAPELIRNEPFSEKCDIFSLGVIMWELCTLTRPWEGVPPERVVYAIAYEGARLEIPEGPLGKLIADCWTEPEQRPSCNEILSRLLDCEYSLC

SEQ ID NO: 76095 - protein, 568 aa, Arabidopsis thaliana
  peptide (1)..(568): Ceres Seq. ID no. 7105038
MRFPGQLIPLSTKAIFMSHISAAGESDSAENDSCDSPLEPNSPMFGYPEKFDHENAEKDENLSLHRKLDGSPNTSGPPSRNMLLRSASALERKLSFSQSESNMANEFWRQSRRKVIADQRTASSSPEHLSFRARTKSMLSGDKNLARDFTGDVATSSCKSVGGAKMETKRIRRRSISITPEIGDDIVRAVRAMNEALKQNRLSKEQGDDDSSPNSPNDRTESSHLQKNVSGFHLDAHDQVSGGRSTLSREPLDPQKAISLPSSPQNYRSQYEQSGSSHRNISHIWDKVLGSPMFQNKPLLPYEEWNIDFSELTVGTRVGIGFFGEVFRGIWNGTDVAIKVFLEQDLTAENMEDFCNEISILSRLRHPNVILFLGACTKPPRLSLITEYMEMGSLYYLLHLSGQKKRLSWRRKLKMLRDICRGLMCIHRMGIVHRDIKSANCLLSNKWTVKICDFGLSRIMTGTTMRDTVSAGTPEWMAPELIRNEPFSEKCDIFSLGVIMWELCTLTRPWEGVPPERVVYAIAYEGARLEIPEGPLGKLIADCWTEPEQRPSCNEILSRLLDCEYSLC

SEQ ID NO: 76096 - DNA, 2657 bp, Arabidopsis thaliana
  misc_feature (1)..(2657): Ceres Seq. ID no. 7105238
  misc_feature (1)..(2657): Ortholog of  Ceres SEQ ID NO 14314812 as cited in SEQ ID NO 52569
  misc_feature (1)..(2657): Ortholog of  Ceres SEQ ID NO 15168492 as cited in SEQ ID NO 58104
gaagagaatccgatgcgtagaagactatcttccgtgctaatcaacaatcagtgcatcgcgtcccaacgccattaccacacatctcgacctgagaaacccacaaagaaagccagcagccatgaaccaactcacaaattcaccaggaagccatgggaggaagtgccatttctcaccgatctcaaagaaatcgaagacccagaggaagctctttctctcttccaccaataccaggaaatgggtttccgacacgactacccatcttactcttctctcatctacaagcttgcaaagtcccgtaacttcgacgccgtcgaccaaattctccgccttgttcgctatcgaaacgtccggtgcagagaatccctcttcatgggattgattcagcattacgggaaagccggttcggtcgacaaagccatcgatgttttccacaaaatcacctcctttgattgtgttcgcacgattcagtctctcaacactctcatcaacgttctggtcgataacggcgagttggaaaaggccaaaagctttttcgacggggcaaaggatatgcgtttgcgtcccaattcggtgtctttcaatattttgatcaaaggatttcttgataaatgcgattgggaagctgcatgtaaggtgttcgacgaaatgcttgagatggaggtgcaaccgagtgttgtgacatacaatagcctgattggtttcttatgccgaaatgacgatatgggtaaggcgaagagcttgcttgaagatatgattaagaaaagaatacgtccgaatgctgtgacatttgggttgttaatgaaaggtttatgttgtaagggagagtacaatgaagcaaagaagttgatgttcgatatggagtatcgtgggtgtaaaccgggtctcgttaactacggaattttgatgagtgatcttgggaagagagggagaattgatgaggcaaagcttctactcggcgagatgaagaaaagacggataaaaccagatgttgtgatctataacattctggtaaaccatctttgcactgagtgtagagtccctgaggcttatagagtgctgacggaaatgcagatgaaagggtgtaaaccaaatgcagctacataccgtatgatgattgatgggttttgtcgtatcgaggattttgattcagggttgaatgttttgaatgcaatgcttgcaagcagacactgtcccacacctgcaacgtttgtatgtatggttgctgggctgattaaaggcggtaacttggaccatgcttgctttgtgttagaggtgatgggaaagaaaaacttaagttttgggtctggtgcttggcaaaatctactttctgatctctgcatcaaggatggaggagtatattgtgaggctttgtcagaagtaatttccatctaagcaatgacctttttaaaggctgcaaagtactcttcttcctgattttagctctcgccattacttttgtctcagctgctcggcttcttgatgaagaagaagatattgggttggtccctttgcctaccacgagtcctggtcctttaccaacagttggtttaggcccctttcccactgctaattcaggccctgcaactggtatcgcttcaggtacaggttcagcctcagggggtttaggttccttgggtaccaatactggccccgggcctctatcgaccactggttctagtcttttaccagttgctagttcgggtaccttgcctgttactggccccggtcctctaccaaccagttctggtctcttaccgggtgctagttcgggtaacttgcctggttcaggttcagggcctttgcctactgttggttcaggtgctgcagctacgggtctgggcgcaggtgcagggtcagtgattggtggttcagttcctgacaacactttggttttcttcatgcacgatatactcggtggctcaaacccgacagcgagggctgtgactggagtcgtcgcaaacgcagccctcagtggccaaattccattcgctaagcccaatggtgcaaacctccctgttagtaacggcgttccatcagacaataacaacaatggaatcctgaacaataacaacgtcccacttctcgtcgggcttggcggaaccacttccaacattctacagaacaatggaaacaacatgttgaacggtcttcccgtggctaacggcggccagctcccatcgggttcgtctcttcagatgctcatgtttgggacattgacggtgatggacaacgaactaaccgaaggacacgaactcgggtctggtctgctgggtaaagcccaaggcttctacgtggcaagtgcccttgatgggaccagccagactatggctttcacggctatgtttgagagcggtggatatgaagatagcatcagtttcttcggtgtgcatagaacagctgcatcggaatctcatcttggggtaatgggcggtactggtaagtatgtgaatgcgagaggcttcgcaattgtcaagacttttacgggttcctccgggacccagcagcagcagccgcaccagttcacagatgggctcgagactgttctggagtgcaccgtttatctttcttactagtttcttttccctcttctcttatcttttttgtctaccaagaaaacgtgaaaacctattaatttgacaaccaatcccttgttattc

SEQ ID NO: 76097 - protein, 463 aa, Arabidopsis thaliana
  peptide (1)..(463): Ceres Seq. ID no. 7105239
EENPMRRRLSSVLINNQCIASQRHYHTSRPEKPTKKASSHEPTHKFTRKPWEEVPFLTDLKEIEDPEEALSLFHQYQEMGFRHDYPSYSSLIYKLAKSRNFDAVDQILRLVRYRNVRCRESLFMGLIQHYGKAGSVDKAIDVFHKITSFDCVRTIQSLNTLINVLVDNGELEKAKSFFDGAKDMRLRPNSVSFNILIKGFLDKCDWEAACKVFDEMLEMEVQPSVVTYNSLIGFLCRNDDMGKAKSLLEDMIKKRIRPNAVTFGLLMKGLCCKGEYNEAKKLMFDMEYRGCKPGLVNYGILMSDLGKRGRIDEAKLLLGEMKKRRIKPDVVIYNILVNHLCTECRVPEAYRVLTEMQMKGCKPNAATYRMMIDGFCRIEDFDSGLNVLNAMLASRHCPTPATFVCMVAGLIKGGNLDHACFVLEVMGKKNLSFGSGAWQNLLSDLCIKDGGVYCEALSEVISI

SEQ ID NO: 76098 - protein, 459 aa, Arabidopsis thaliana
  peptide (1)..(459): Ceres Seq. ID no. 7105240
MRRRLSSVLINNQCIASQRHYHTSRPEKPTKKASSHEPTHKFTRKPWEEVPFLTDLKEIEDPEEALSLFHQYQEMGFRHDYPSYSSLIYKLAKSRNFDAVDQILRLVRYRNVRCRESLFMGLIQHYGKAGSVDKAIDVFHKITSFDCVRTIQSLNTLINVLVDNGELEKAKSFFDGAKDMRLRPNSVSFNILIKGFLDKCDWEAACKVFDEMLEMEVQPSVVTYNSLIGFLCRNDDMGKAKSLLEDMIKKRIRPNAVTFGLLMKGLCCKGEYNEAKKLMFDMEYRGCKPGLVNYGILMSDLGKRGRIDEAKLLLGEMKKRRIKPDVVIYNILVNHLCTECRVPEAYRVLTEMQMKGCKPNAATYRMMIDGFCRIEDFDSGLNVLNAMLASRHCPTPATFVCMVAGLIKGGNLDHACFVLEVMGKKNLSFGSGAWQNLLSDLCIKDGGVYCEALSEVISI

SEQ ID NO: 76099 - protein, 385 aa, Arabidopsis thaliana
  peptide (1)..(385): Ceres Seq. ID no. 7105241
MGFRHDYPSYSSLIYKLAKSRNFDAVDQILRLVRYRNVRCRESLFMGLIQHYGKAGSVDKAIDVFHKITSFDCVRTIQSLNTLINVLVDNGELEKAKSFFDGAKDMRLRPNSVSFNILIKGFLDKCDWEAACKVFDEMLEMEVQPSVVTYNSLIGFLCRNDDMGKAKSLLEDMIKKRIRPNAVTFGLLMKGLCCKGEYNEAKKLMFDMEYRGCKPGLVNYGILMSDLGKRGRIDEAKLLLGEMKKRRIKPDVVIYNILVNHLCTECRVPEAYRVLTEMQMKGCKPNAATYRMMIDGFCRIEDFDSGLNVLNAMLASRHCPTPATFVCMVAGLIKGGNLDHACFVLEVMGKKNLSFGSGAWQNLLSDLCIKDGGVYCEALSEVISI

SEQ ID NO: 76100 - DNA, 679 bp, Arabidopsis thaliana
  misc_feature (1)..(679): Ceres Seq. ID no. 7105752
  misc_feature (1)..(679): Ortholog of  Ceres SEQ ID NO 12557737 as cited in SEQ ID NO 81
actctgtgcattaggtttcattttagcggcagacgagagagctaaagcaaggagcaaccctaaccatggcgactcaaccagctactgaatctgtgcaatgcttcggaaggaagaagaccgcagtggccgtcactcactgcaagcgtggatctggtttgatcaagctcaacggttgcccaatcgagcttttccagcctgagatcctccgattcaagatcttcgagccggttcttctcctcggaaagcaccgtttcgctggtgtgaacatgaggatccgtgtcaacggtggtggtcacacatcccaggtttacgccatccgtcagagtatcgcgaaggctcttgttgcgtactaccagaagtatgtggatgagcagtcgaagaaggagattaaggatatcttggtgaggtatgataggactctgcttgtggcggatccgaggaggtgtgagccgaagaagtttggtggtcgtggtgctcgttctcgttaccagaagagttaccgttaaacaaagctggtttgtgttttgtttttcaatttggaatcatcgtaaggtttttttgggagtatggacttgtgagactctttagattttataatttctgctttattatgcttgttggattatggtgattctccaagaaacttatgttttgttatgtctactattttcttattttt

SEQ ID NO: 76101 - protein, 146 aa, Arabidopsis thaliana; identical to SEQ ID NO: 38400
  peptide (1)..(146): Ceres Seq. ID no. 7105753

SEQ ID NO: 76102 - protein, 79 aa, Arabidopsis thaliana; identical to SEQ ID NO: 21210
  peptide (1)..(79): Ceres Seq. ID no. 7105754

SEQ ID NO: 76103 - DNA, 2988 bp, Arabidopsis thaliana
  misc_feature (1)..(2988): Ceres Seq. ID no. 7105774
  misc_feature (1)..(2988): Ortholog of  Ceres SEQ ID NO 13590691 as cited in SEQ ID NO 66290
ctcttcttcccagtgttgtcttctcttctccacgaacttaattttttcaaaaccctagcaactttgattcattcaaaatccgatccaacgatgactattgaagaagtttccggtgagactcctccgtctacgcctccttcttcttctacgccttctccgtcttcctccaccaccaacgccgcgccgttgggatcctctgtgattccgattgtaaacaagctacaagacatattcgctcagctcggaagccagtctacgatcgcgcttcctcaggttgttgttgttggaagccaaagcagtggcaagtctagcgtccttgaagcactcgtcggccgtgactttctccctcgtggtaatgatatctgcacgcgtcgtcctcttgttctccagctcctccagactaaaagccgcgctaatggcggatccgatgatgagtggggggagtttcgtcaccttcctgaaactcgtttctatgatttctctgagattcgtcgagaaattgaggctgagacgaatagattagttggagagaacaaaggtgtagcagatacacagattcgtcttaaaatttcttcacctaatgtattgaacatcacgcttgtggatctgcctggtattaccaaggtgccagttggtgaccagccatccgacattgaagcacgtataagaacgatgatcttgtcttacatcaagcaagatacttgcttgatattggctgttacccctgctaataccgatctagcaaactctgatgcccttcaaattgctagcattgtagatcctgatggtcacagaacgataggtgtaatcacaaagttggatattatggacaaaggtactgatgctcgaaaactccttcttggaaatgttgttcctcttcgacttggatacgtgggagttgtaaatcgttgccaggaggatattttgctaaaccgcacagtcaaggaagcacttctcgcagaggagaagttcttccggagtcacccggtttaccatggtcttgccgatcgtttgggtgttcctcagctagcaaagaagttaaatcagatccttgttcaacatatcaaggtcttgcttccggatttgaagtcgcggataagtaatgctttggttgctacagcaaaagagcatcagagctatggtgaattaacagaatcaagggctgggcaaggagctcttctcctcaactttctctccaaatactgtgaagcatactcttcattgctggaagggaaaagtgaagaaatgtctacgtcagagctctctggaggagcaagaattcactatattttccagtcaatctttgttaagagtttggaggaggttgatccatgcgaggacttgacagatgatgatattcggactgcaattcagaatgcaactggtccaagatctgcattatttgttccagatgttccatttgaagttcttgttaggaggcagatatctcgtttgttagatcctagccttcagtgtgcccggttcatttttgaagagctaataaagattagccatagatgtatgatgaatgagttacaacgatttccagtcctacgaaagcgcatggatgaggttatcggggatttcctgcgagaaggtcttgaaccctcagaagcaatgatcggggatatcattgatatggagatggattacataaacacttcacatccaaattttattggtggaaccaaggccgtggaagctgcaatgcatcaagtgaagtcttcgaggattccccatcctgtggcacgaccaaaggacactgtggagcctgatagaacatcttcttccacgagtcaagtgaaatctagatcgtttctcggcaggcaagctaatggaattgttactgatcagggagttgtatctgcagatgctgaaaaagctcaacctgctgcaaatgcgagtgatacaaggtggggtatcccttcaattttccgagggggtgatactagagcagttactaaagatagcttattaaacaaaccattcagtgaagctgttgaggatatgtctcacaacttatccatgatctatctaaaggagcccccagctgtcttgaggccaaccgaaacccattcagaacaggaagcagttgagattcagataacaaagctgttactaagatcatactatgacattgtaaggaagaatattgaggactcggtaccaaaagcaatcatgcatttcctggtaaaccacacaaaacgtgagctgcataacgtcttcatcaagaagctttacagggagaacttgtttgaagaaatgttgcaagagccagatgagatagcagttaagaggaaacgcacacaagagactctccacgttcttcagcaagcttacaggacactagatgagttgccactggaagcagattcggtgtcagcaggaatgtcaaaacatcaggagttactgacatcttcaaagtattcgacaagcagctcatactcggcatctccaagtacgacaagaagatcgagaagagcaggagatcaacaccaaaatggatacggattctaacatgatccaaatatctcgaatatctctcgactgtgataacgcatttcattcatttaatggctctttcaggttttggtattaaattatgtgttggtcatatgaagaatttatatagggaaaccagtacacagtgtgggttttggtccttttggahtytgcattggttgamttgataagggagtgaaaggkgatatagttttttttttccaatttgtttcaaatgytccccctgcaamaataasgggaagcaaamacctttmahtttaaatttttttttggggratgtttaatyaataagttatatwamatgatyggtcmamavgaccttataaattgkgtagtttttttgtttttkgagcaasgaraakkggaaaattcccctwaaaaaaaaaaaaaaaaaaaaaaaaaaaaaaaaaaaaaaaaaaaaaaaaaaaaaaaaaaaaaaaaaaaaaaactcgagggggggcccgg

SEQ ID NO: 76104 - protein, 838 aa, Arabidopsis thaliana
  peptide (1)..(838): Ceres Seq. ID no. 7105775
LFFPVLSSLLHELNFFKTLATLIHSKSDPTMTIEEVSGETPPSTPPSSSTPSPSSSTTNAAPLGSSVIPIVNKLQDIFAQLGSQSTIALPQVVVVGSQSSGKSSVLEALVGRDFLPRGNDICTRRPLVLQLLQTKSRANGGSDDEWGEFRHLPETRFYDFSEIRREIEAETNRLVGENKGVADTQIRLKISSPNVLNITLVDLPGITKVPVGDQPSDIEARIRTMILSYIKQDTCLILAVTPANTDLANSDALQIASIVDPDGHRTIGVITKLDIMDKGTDARKLLLGNVVPLRLGYVGVVNRCQEDILLNRTVKEALLAEEKFFRSHPVYHGLADRLGVPQLAKKLNQILVQHIKVLLPDLKSRISNALVATAKEHQSYGELTESRAGQGALLLNFLSKYCEAYSSLLEGKSEEMSTSELSGGARIHYIFQSIFVKSLEEVDPCEDLTDDDIRTAIQNATGPRSALFVPDVPFEVLVRRQISRLLDPSLQCARFIFEELIKISHRCMMNELQRFPVLRKRMDEVIGDFLREGLEPSEAMIGDIIDMEMDYINTSHPNFIGGTKAVEAAMHQVKSSRIPHPVARPKDTVEPDRTSSSTSQVKSRSFLGRQANGIVTDQGVVSADAEKAQPAANASDTRWGIPSIFRGGDTRAVTKDSLLNKPFSEAVEDMSHNLSMIYLKEPPAVLRPTETHSEQEAVEIQITKLLLRSYYDIVRKNIEDSVPKAIMHFLVNHTKRELHNVFIKKLYRENLFEEMLQEPDEIAVKRKRTQETLHVLQQAYRTLDELPLEADSVSAGMSKHQELLTSSKYSTSSSYSASPSTTRRSRRAGDQHQNGYGF

SEQ ID NO: 76105 - protein, 808 aa, Arabidopsis thaliana; identical to SEQ ID NO: 39322
  peptide (1)..(808): Ceres Seq. ID no. 7105776

SEQ ID NO: 76106 - protein, 614 aa, Arabidopsis thaliana; identical to SEQ ID NO: 39323
  peptide (1)..(614): Ceres Seq. ID no. 7105777

SEQ ID NO: 76107 - DNA, 2013 bp, Arabidopsis thaliana
  misc_feature (1)..(2013): Ceres Seq. ID no. 7105829
  misc_feature (1)..(2013): Ortholog of  Ceres SEQ ID NO 14302588 as cited in SEQ ID NO 0
gactcactatagggaaagctggtacgcctgcaggtaccggtccggaattcccgggtcgacccacgcgtccgcaacaatggcttcgtcatctacaagtatctctctccttctcttcgtctctttcattcttcttctcgttaactcgcgtgcagagaatgcgtccagtggatcggatctcgacgaagaattggctttcctcgccgcggaggaatccaaggaacaaagccacggcggcggttcgtaccacgaggaggagcacgatcatcagcaccgagacttcgagaattacgatgatctcgagcaaggaggcggcgagtttcatcacggcgatcacggttacgaggaggagccgttaccaccagtcgacgagaaagacgtggcggttctgaccaaggacaatttcaccgagttcgtcggcaacaatagcttcgcgatggtggagttttacgctccgtggtgcggcgcttgtcaggctttgactccggagtacgccgcggctgcgacggagttgaaaggccttgcggcgctcgcgaagatcgacgcgacggaggaaggggatttggctcagaagtacgagattcagggcttccccaccgttttcttgtttgtcgacggagaaatgcgcaagacctacgaaggtgaaagaacaaaggatggtattgtgacttggctgaagaagaaggccagtcctagcatccacaacatcactactaaagaggaggctgaacgtgttttgtccgctgaacctaaacttgtctttggttttctcaactcattagtggggtcagagagtgaggagctcgcggctgcgtccagactggaagacgatctcagtttttaccaaactgcaagccctgatattgcaaagctatttgaaattgaaacccaagtcaagcgtcctgccttagttttactgaaaaaggaggaagagaaacttgcccgttttgatggaaacttcactaaaacggctatagcagagtttgtgtcagccaacaaagtcccattggtgatcaacttcacaagggaaggtgcatcactgattttcgagagctcagtgaaaaaccaactcattctttttgccaaggcaaatgaatcagagaagcaccttcccactctgagggaggtggcaaagtccttcaagggaaagtttgttttcgtttatgtgcaaatggacaatgaagattatggagaagcagtttctggattctttggtgttaccggcgctgcccccaaggttcttgtatacactggtaatgaagatatgaggaagtttattctggacggtgaattgaccgtaaataacattaagacacttgcggaagatttcctagcagacaaactgaagcctttctacaagtcagatccactaccggaaaataacgatggtgatgttaaggtcattgtgggaaacaattttgatgagattgttcttgacgagtcaaaggatgttcttctcgagatatatgctccttggtgtggccactgccaatcatttgagccgatttacaacaagcttggaaagtatttaaaaggcattgactcgttagttgtagcaaagatggatggtaccagcaatgagcatcctagagcaaaggctgatgggttcccaacaatcctgttcttccctggtggaaacaaaagcttcgatccgatcgctgtggatgttgaccgtacagtagtggaactgtacaaattcctgaagaagcacgcatcaatcccatttaaacttgagaaaccggcgacacctgaaccggtgatctcgaccatgaaatctgatgagaagatcgagggtgatagttccaaggatgagttgtgatgatcggaacagagtgtgtaacaaggctatagatgatgactcttctataaatgatagaaaatgttttgccctttgtttttttccattgttgtatgctatgaaatgaataattaaagaagttttggtttctcaagtttttggatgtaactggaggtttgatccacacattgagtgttgatttaatgcgacttgtggtt

SEQ ID NO: 76108 - protein, 604 aa, Arabidopsis thaliana
  peptide (1)..(604): Ceres Seq. ID no. 7105830
THYRESWYACRYRSGIPGSTHASATMASSSTSISLLLFVSFILLLVNSRAENASSGSDLDEELAFLAAEESKEQSHGGGSYHEEEHDHQHRDFENYDDLEQGGGEFHHGDHGYEEEPLPPVDEKDVAVLTKDNFTEFVGNNSFAMVEFYAPWCGACQALTPEYAAAATELKGLAALAKIDATEEGDLAQKYEIQGFPTVFLFVDGEMRKTYEGERTKDGIVTWLKKKASPSIHNITTKEEAERVLSAEPKLVFGFLNSLVGSESEELAAASRLEDDLSFYQTASPDIAKLFEIETQVKRPALVLLKKEEEKLARFDGNFTKTAIAEFVSANKVPLVINFTREGASLIFESSVKNQLILFAKANESEKHLPTLREVAKSFKGKFVFVYVQMDNEDYGEAVSGFFGVTGAAPKVLVYTGNEDMRKFILDGELTVNNIKTLAEDFLADKLKPFYKSDPLPENNDGDVKVIVGNNFDEIVLDESKDVLLEIYAPWCGHCQSFEPIYNKLGKYLKGIDSLVVAKMDGTSNEHPRAKADGFPTILFFPGGNKSFDPIAVDVDRTVVELYKFLKKHASIPFKLEKPATPEPVISTMKSDEKIEGDSSKDEL

SEQ ID NO: 76109 - protein, 579 aa, Arabidopsis thaliana
  peptide (1)..(579): Ceres Seq. ID no. 7105831
MASSSTSISLLLFVSFILLLVNSRAENASSGSDLDEELAFLAAEESKEQSHGGGSYHEEEHDHQHRDFENYDDLEQGGGEFHHGDHGYEEEPLPPVDEKDVAVLTKDNFTEFVGNNSFAMVEFYAPWCGACQALTPEYAAAATELKGLAALAKIDATEEGDLAQKYEIQGFPTVFLFVDGEMRKTYEGERTKDGIVTWLKKKASPSIHNITTKEEAERVLSAEPKLVFGFLNSLVGSESEELAAASRLEDDLSFYQTASPDIAKLFEIETQVKRPALVLLKKEEEKLARFDGNFTKTAIAEFVSANKVPLVINFTREGASLIFESSVKNQLILFAKANESEKHLPTLREVAKSFKGKFVFVYVQMDNEDYGEAVSGFFGVTGAAPKVLVYTGNEDMRKFILDGELTVNNIKTLAEDFLADKLKPFYKSDPLPENNDGDVKVIVGNNFDEIVLDESKDVLLEIYAPWCGHCQSFEPIYNKLGKYLKGIDSLVVAKMDGTSNEHPRAKADGFPTILFFPGGNKSFDPIAVDVDRTVVELYKFLKKHASIPFKLEKPATPEPVISTMKSDEKIEGDSSKDEL

SEQ ID NO: 76110 - protein, 460 aa, Arabidopsis thaliana; identical to SEQ ID NO: 50654
  peptide (1)..(460): Ceres Seq. ID no. 7105832

SEQ ID NO: 76111 - DNA, 1463 bp, Arabidopsis thaliana
  misc_feature (1)..(1463): Ceres Seq. ID no. 7105900
  misc_feature (1)..(1463): Ortholog of  Ceres SEQ ID NO 15177947 as cited in SEQ ID NO 60308
ccacgcgtccgaagtgatttcaagtggttggttctgttccttttctcgtccccgatcaagtttcttctcctaaactccagaatttggtcttgaaaatctctaaaggctcttcctttttgttcatttctctacccagatatcgatgggtacatacctaagttctccgaaaactgaaaagttatcagaagatggtgagaatgataagctcagatttggtttatcgtctatgcaaggttggcgcgctaccatggaagacgcgcatgctgcaattcttgatcttgatgataagacatcgttcttcggtgtgtatgatggccatggaggtaaagtcgttgcaaagttctgtgccaagtatctacaccagcaggttatcagtaatgaagcgtataaaactggagacgtcgaaacatctcttcgaagagcattctttagaatggatgacatgatgcaaggacaaagaggatggcgagagttagctgtacttggcgacaagatgaacaaatttagcggcatgattgaaggatttatatggtcaccaagaagcggtgacaccaataaccaacccgatagttggcctcttgaagatggtcctcattctgatttcacgggacctacctcggggtgcacagcgtgtgtagctcttattaaagataagaagctctttgttgcaaatgccggtgactcacgttgtgtgatatcaagaaagagtcaggcttacaatctttctaaagatcacaagcctgatcttgaagttgaaaaagaaaggatattgaaagctggtggctttattcacgctgggagaatcaatggaagcttgaatctgacaagagccattggtgatatggagttcaagcagaataagtttttaccatctgaaaagcaaatggttactgctgatccagatataaacactattgacctatgtgatgatgatgactttcttgttgttgcttgcgatggaatatgggattgtatgtcaagccaggaactagttgattttatccatgaacagttaaaatctgaaacaaaactttcaacagtatgtgaaaaggttgttgatagatgtttggctccagatacagcgactggtgaaggttgtgataatatgaccatcatcttggttcagttcaagaagcctaacccatctgagactgaaccagaagattccaaaccagaaccaagcgaagatgagccgagctcatcaagctagatatctttaaagagccaagaggaagaagatttgtgaaagtgtctcttttatcattgactttttgttcaacattgtaaatccttttgaatgtggcttagattcaagaagctggctttttcccagtttagcttcaagaagtctgagatgtcacagagtttggtttaatcttaaaaggacctttgtatagatatttcttgtgattgatgttttcagctatagtttaaaaaattcacaaggacaagctttttgtacc

SEQ ID NO: 76112 - protein, 355 aa, Arabidopsis thaliana; identical to SEQ ID NO: 28678
  peptide (1)..(355): Ceres Seq. ID no. 7105901

SEQ ID NO: 76113 - protein, 327 aa, Arabidopsis thaliana; identical to SEQ ID NO: 28679
  peptide (1)..(327): Ceres Seq. ID no. 7105902

SEQ ID NO: 76114 - protein, 320 aa, Arabidopsis thaliana; identical to SEQ ID NO: 28680
  peptide (1)..(320): Ceres Seq. ID no. 7105903

SEQ ID NO: 76115 - DNA, 1263 bp, Arabidopsis thaliana
  misc_feature (1)..(1263): Ceres Seq. ID no. 7105947
  misc_feature (1)..(1263): Ortholog of  Ceres SEQ ID NO 15177055 as cited in SEQ ID NO 57450
  misc_feature (1)..(1263): Ortholog of  Ceres SEQ ID NO 12615854 as cited in SEQ ID NO 62880
attcgcggccgcgagagagagaaactcaccggggaatcttgaaatcaccatcacatcctctcttccctcgatctccgttatcgactgtaaatcgaattttgttgttgctttgttttcttgggcgaataaaagaggataatttagtggcggggttttcgagaaagagagagaaagaatgagttttcaagatttagaggcgggaagaggaagatcattagcttcttcaaggaacatcaatggtggtggtagtagacaagacacgactcaagatgttgcttctggtatatttcagatcaatacaagtgtttccactttccatcgtcttgtcaatactcttggtactcctaaagatacgcctgagctcagagagaagctgcataagacaagattatatattggacagttagtgaaagatacatcagctaaacttaaagaagctagtgaaactgatcatcaaagaggtgtaaatcaaaagaagaagattgtggatgctaagcttgcaaaggactttcaagctgtgttgaaagagtttcaaaaggctcagcgtcttgctgctgaaagagaaaccgtatatgctcctcttgtccacaagccatctcttccctcaagctacacatccagtgagatagatgtgaatggagataagcatccagagcagcgtgcccttcttgtggaatcaaaaagacaagaacttgtactgttggacaatgagattgcgttcaatgaggctgttattgaggaaagagagcaagggatacaagaaattcagcagcaaattggcgaggtgcacgagatcttcaaagacttggcagtgttggtgcacgatcaaggaaacatgatagatgatattggtactcacatcgataactcttacgctgcaactgcccaaggaaaatcccatctcgtaaggcatcaaagacacaaagatcaaattcttctctgacgtgcttgctcttggtgatttttggtatcgtgctcatgattgttattatagtgctcgcagtttgatttccccaagctcataaaagcatggacaagtgcttcatcatcaatcaagaagcatcaatgagtatatgtttgtcacgactctctttgttcctacaatttagtctgttggactattggtctcttgtttcttgttatcgagtatatagagtagttcactttggtttgatttggcttgtgtttgctgagtcttggttctgaaggagagagtgttactgctttgtctctgtaatataacttggttctgaagcggccgcg

SEQ ID NO: 76116 - protein, 255 aa, Arabidopsis thaliana; identical to SEQ ID NO: 24038
  peptide (1)..(255): Ceres Seq. ID no. 7105948

SEQ ID NO: 76117 - DNA, 1813 bp, Arabidopsis thaliana
  misc_feature (1)..(1813): Ceres Seq. ID no. 7106018
  misc_feature (1)..(1813): Ortholog of  Ceres SEQ ID NO 14310016 as cited in SEQ ID NO 20753
gaattcggcacgaggcgaagaccaaccagtctgttaattttgtataaacaatgaaacgaagaagatcttccgagaatattctctccttctcacgcataccctagaatattgtttcgtctctcttccttctacgtttgcttatttgccccaactcgacgcgaatcatcagcttttataaattctgtcaactcaaagattgtttctgaattggaatcttacagaggtttagcttgagatgatatgacgaatcagcaggagcaacacattgcgatatttacaacagctagtattccatggcttacgggaactgctgttaatcctctcttccgtgctgcctaccttgcaaatgatggggaaagacgggtcacgttggtgattccatggctgactttgaagcaccaaaagcttgtctacccaaatagcatcacttttagttccccgtcagagcaagaagcttatgtccgccagtggcttgaggagagagtctcttttcgtttagcctttgagatacgtttctatcctggaaagtttgctattgacaaaaggagtattcttcctgttggggatatatctgatgccattcctgatgaagaggcagacattgctgtcctcgaggagcctgagcatctcacatggtttcatcatggccaaaaatggaaaactaagttcaactacgtcataggaatcgtacacactaactacttggaatacgttaaaagagagaaacaaggccgtgtcaaagcatttttcctcaaatacttaaatagttgggttgttggcatttactgccacaaggtaatcaggttatctgctgcgactcaagaataccctaaatctatagtctgcaatgttcatggcgtcaaccctaaatttctcgaaattgggttgagaaaactagaacagcagaagctccaggagcagcccttcactaaaggcgcatactacattggtaagatggtctggagcaaagggtacaaggagcttcttaaactacttgagaaacaccaaaaggaacttgccgagttagaggttgatttatacggtgatggagaggactctgaagagatcaaagaagcagcccgaaaactcgacttgacggttaatgtttacccaggacgtgatcacgctgactcgctatttcacaactataaagtgtttctcaaccccagcacgacagacgttgtgtgtacaacaactgcagaagccttggcgatgggaaaaatagtagtatgcgcgaatcacatatcgaacaagttcttcaaacagtttcccaactgcagaacctatgacgatggacaaggttttgtaagagccacgctcaaggctcttggggaacaaccatcgcaacttacagagcaacaaaggcatgaactatcatgggaagctgctacacaacggtttataaaagtctctgatctgaaccggttatcaagagctgattcgaacttgtcaaagagaagtgtgtttgcgtcatcttcgattagtgtggggaaaaacttggaggatatgtcagcgtatattcatttcttggcgtctggatttgaagcttcaagaacagcttttggtgctatacctggaagcttgcagcccgatgaagagttatgtagagatcttggtttgtctctcaacactccttccccaaatactcgcaagcaagattgacctgttttttaatttatctttgtctgcatatcattgggatatttttgtgtataaatcaatgtatactatctgaatcattctatagcagctttggtgtaatattgatgatatatatactatatattaacatgaaagttagatttttcatctt

SEQ ID NO: 76118 - protein, 473 aa, Arabidopsis thaliana
  peptide (1)..(473): Ceres Seq. ID no. 7106019
MTNQQEQHIAIFTTASIPWLTGTAVNPLFRAAYLANDGERRVTLVIPWLTLKHQKLVYPNSITFSSPSEQEAYVRQWLEERVSFRLAFEIRFYPGKFAIDKRSILPVGDISDAIPDEEADIAVLEEPEHLTWFHHGQKWKTKFNYVIGIVHTNYLEYVKREKQGRVKAFFLKYLNSWVVGIYCHKVIRLSAATQEYPKSIVCNVHGVNPKFLEIGLRKLEQQKLQEQPFTKGAYYIGKMVWSKGYKELLKLLEKHQKELAELEVDLYGDGEDSEEIKEAARKLDLTVNVYPGRDHADSLFHNYKVFLNPSTTDVVCTTTAEALAMGKIVVCANHISNKFFKQFPNCRTYDDGQGFVRATLKALGEQPSQLTEQQRHELSWEAATQRFIKVSDLNRLSRADSNLSKRSVFASSSISVGKNLEDMSAYIHFLASGFEASRTAFGAIPGSLQPDEELCRDLGLSLNTPSPNTRKQD

SEQ ID NO: 76119 - DNA, 2787 bp, Arabidopsis thaliana
  misc_feature (1)..(2787): Ceres Seq. ID no. 7106145
  misc_feature (1)..(2787): Ortholog of  Ceres SEQ ID NO 14313575 as cited in SEQ ID NO 58703
cgcggccgcgtaaccatggcggagaaagtatcggaggacgttatgcttctacacggtgacctcgatttgaaaattgttaaggctaggaggttacctaacatggatatgttctcagaacatttgcgccgtctcttcaccgcctgtaacgcctgtgctagacccaccgataccgatgatgtcgatcccagagataaaggcgaattcggtgataaaaacatccgtagccaccgtaaggttatcaccagcgatccttacgtcaccgtcgtcgttcctcaagcgactctagctcgaacacgtgttttgaaaaactcacaagagcctctttgggacgagaaattcaacatttctatagcgcatccgtttgcttatctcgagttccaggtcaaagacgacgatgttttcggtgctcaaatcattggcacggctaagatcccggttcgagacatcgcatcgggagaacgcatttctggttggtttcctgtactcggtgcttcgggaaaaccgcctaaggcagaaactgctattttcatcgatatgaaatttactccgtttgaccagatccatagctaccgatgtggaatcgccggagatccggagcgtaggggtgttagacggacttatttccctgtgaggaaaggaagtcaggtgaggctttaccaggacgctcatgttatggacggaacgttgccggcgattgggttagataacgggaaagtttatgagcatgggaagtgttgggaagatatatgttatgctatatctgaggctcaccatatgatttacattgttggttggtctatcttccataagattaagcttgttagggaaacaaaagttccaagagataaggatatgacgcttggggaattgctcaaatacaaatcccaggaaggtgttcgagttttgctacttgtatgggatgataagacttctcatgataagtttgggataaaaacgcctggagttatggggacacatgatgaggagactaggaagttcttcaagcattcttctgtgatatgcgttttgtcaccccggtatgccagcagtaagcttgggttgttcaaacaacaggttgttggaactctcttcacgcaccatcaaaagtgtgttcttgtagacactcaggctgttggtaataatcgcaaggtcaccgcttttattggaggtctagatctttgtgatggccgttatgacacacctgagcataggatactccacgatcttgacactgtatttaaggatgatttccacaatcctacatttccagctggtaccaaggccccaagacaaccttggcacgatttgcactgtaggatagatgggcctgcggcatatgatgttctcataaactttgagcagcgatggagaaaggcaacacgatggaaggagtttagcttacgtttaaaggggaaaactcactggcaagatgatgctttgatccggatagggcgtatatcatggattctgagtccagtgtttaaatttctgaaggatggtacttcgataattccagaggacgatccatgtgtttgggtttctaaagaagatgatccagagaactggcatgttcagatattccgttctatcgactcaggatccgtgaaaggatttccaaaatatgaagatgaggctgaggcccagcatctggaatgtgccaagcgtcttgttgtagataaaagcatccagactgcatacatccagacaatcagatctgctcagcatttcatatatatcgagaatcagtatttcctgggttcttcttatgcttggccttcttatagagacgcaggagctgacaatcttattcctatggagttggcactaaagattgttagcaaaatcagagctaaggaaagatttgccgtatatgttgtcataccattgtggcctgaaggcgacccaaagtctggccctgtgcaagaaattctatattggcagagccaaactatgcagatgatgtatgatgttatagcaaaagaactgaaagcggtgcaatcagatgctcatcctctcgattaccttaacttttactgccttggtaaacgagagcagcttccagatgatatgccagccaccaatggcagtgtggtatcagattcttataatttccagcgtttcatgatttacgtgcacgcaaaagggatgatagtagatgatgagtatgtactcatgggatctgctaatatcaaccaaagatctatggcaggcaccaaagatactgaaatcgccatgggcgcataccaacctaatcatacatgggctcacaagggaagacacccacgtggccaggtgtatggatacagaatgtcactatgggcagagcatttaggcaaaactggagatgagtttgtggagccatcagatctggaatgtctgaagaaggtgaacacaatctctgaagaaaactggaaaagattcatagacccgaaattctcagagctacaaggtcacttaataaagtatcctctacaagtagacgttgatggtaaagtaagccctcttcctgattacgagaccttcccagatgttggtggtaagatcattggagctcattccatggctcttcctgacactttaaccacgtaatgtgaatgttcaatgtaaatttcagcatttgttttggggtttcttttgatcctgaataatattagctgaaagtgttgtttgagttgttgtacatttaactgtgttgtttcttttttatacattcttttgtgattgtcgtcaaatatttgttggggtgcaaaatgtagagatcgtgagtgagtgaagaggcgcggccgc

SEQ ID NO: 76120 - protein, 862 aa, Arabidopsis thaliana
  peptide (1)..(862): Ceres Seq. ID no. 7106146
RGRVTMAEKVSEDVMLLHGDLDLKIVKARRLPNMDMFSEHLRRLFTACNACARPTDTDDVDPRDKGEFGDKNIRSHRKVITSDPYVTVVVPQATLARTRVLKNSQEPLWDEKFNISIAHPFAYLEFQVKDDDVFGAQIIGTAKIPVRDIASGERISGWFPVLGASGKPPKAETAIFIDMKFTPFDQIHSYRCGIAGDPERRGVRRTYFPVRKGSQVRLYQDAHVMDGTLPAIGLDNGKVYEHGKCWEDICYAISEAHHMIYIVGWSIFHKIKLVRETKVPRDKDMTLGELLKYKSQEGVRVLLLVWDDKTSHDKFGIKTPGVMGTHDEETRKFFKHSSVICVLSPRYASSKLGLFKQQVVGTLFTHHQKCVLVDTQAVGNNRKVTAFIGGLDLCDGRYDTPEHRILHDLDTVFKDDFHNPTFPAGTKAPRQPWHDLHCRIDGPAAYDVLINFEQRWRKATRWKEFSLRLKGKTHWQDDALIRIGRISWILSPVFKFLKDGTSIIPEDDPCVWVSKEDDPENWHVQIFRSIDSGSVKGFPKYEDEAEAQHLECAKRLVVDKSIQTAYIQTIRSAQHFIYIENQYFLGSSYAWPSYRDAGADNLIPMELALKIVSKIRAKERFAVYVVIPLWPEGDPKSGPVQEILYWQSQTMQMMYDVIAKELKAVQSDAHPLDYLNFYCLGKREQLPDDMPATNGSVVSDSYNFQRFMIYVHAKGMIVDDEYVLMGSANINQRSMAGTKDTEIAMGAYQPNHTWAHKGRHPRGQVYGYRMSLWAEHLGKTGDEFVEPSDLECLKKVNTISEENWKRFIDPKFSELQGHLIKYPLQVDVDGKVSPLPDYETFPDVGGKIIGAHSMALPDTLTT

SEQ ID NO: 76121 - protein, 857 aa, Arabidopsis thaliana; identical to SEQ ID NO: 41444
  peptide (1)..(857): Ceres Seq. ID no. 7106147

SEQ ID NO: 76122 - protein, 848 aa, Arabidopsis thaliana; identical to SEQ ID NO: 41445
  peptide (1)..(848): Ceres Seq. ID no. 7106148

SEQ ID NO: 76123 - DNA, 698 bp, Arabidopsis thaliana
  misc_feature (1)..(698): Ceres Seq. ID no. 7106241
  misc_feature (1)..(698): Ortholog of  Ceres SEQ ID NO 15172783 as cited in SEQ ID NO 52143
  misc_feature (1)..(698): Ortholog of  Ceres SEQ ID NO 13599514 as cited in SEQ ID NO 0
ccacgcgtccgggctttcaaagcttcgaggactatcgattgggatggtatggctaaggtccttgtcacagatgaggctcgtagagagttctctaaccttcgtcgtgctttcgatgaggttaacacacagctccagaccaaatttagtcaggaacctgaacccatagattgggattactataggaagggtattggagctggcattgttgacaagtacaaggaagcttatgacagcattgagattccaaagtacgttgacaaagttactcctgaatacaagccaaagtttgatgctttgttggtggaactgaaagaagcagaacagaaatcgctcaaggagtctgaacggttggagaaagaaattgctgatgtccaagagatcagcaaaaagctcagcaccatgactgcagatgagtactttgagaagcacccggaactcaaaaagaagtttgatgacgaaatccgtaatgacaactggggatactgatcatgtttctccatctccggcttggaaagaaaactctctttctctttctctgttctcttactgtgattttgtgagccaatcataacaataataagtacaccattcacttaagcagtgttgagatcttcattccaaggaagataaacgcatttggttttagttatcaatttcacaaagtgtttcgtttcgttcctcagtgaataataagagtc

SEQ ID NO: 76124 - protein, 161 aa, Arabidopsis thaliana
  peptide (1)..(161): Ceres Seq. ID no. 7106242
PRVRAFKASRTIDWDGMAKVLVTDEARREFSNLRRAFDEVNTQLQTKFSQEPEPIDWDYYRKGIGAGIVDKYKEAYDSIEIPKYVDKVTPEYKPKFDALLVELKEAEQKSLKESERLEKEIADVQEISKKLSTMTADEYFEKHPELKKKFDDEIRNDNWGY

SEQ ID NO: 76125 - protein, 145 aa, Arabidopsis thaliana; identical to SEQ ID NO: 20822
  peptide (1)..(145): Ceres Seq. ID no. 7106243

SEQ ID NO: 76126 - DNA, 1508 bp, Arabidopsis thaliana
  misc_feature (1)..(1508): Ceres Seq. ID no. 7106244
  misc_feature (1)..(1508): Ortholog of  Ceres SEQ ID NO 13597559 as cited in SEQ ID NO 65274
ccacgcgtccgcaaagagtaaccaaattgatatttatctcttctcaaccatggcgatgagacaagccgctaaggcaacgatcagggcctgttcttcctcttcttcttcgggttacttcgctcgacgtcagtttaatgcatcttctggtgatagcaaaaagattgtaggagttttctacaaggccaacgaatacgctaccaagaaccctaacttccttggctgcgtcgagaatgccttaggaatccgtgactggcttgaatcccaaggacatcagtacatcgtcactgatgacaaggaaggccctgattgcgaacttgagaaacatatcccggatcttcacgtcctaatctccactcccttccacccggcgtatgtaactgctgaaagaatcaagaaagccaaaaacttgaagcttctcctcacagctggtattggctcggatcatattgatctccaggcagctgcagctgctggcctgacggttgctgaagtcacgggaagcaacgtggtctcagtggcagaagatgagctcatgagaatcttaatcctcatgcgcaacttcgtaccagggtacaaccaggtcgtcaaaggcgagtggaacgtcgcgggcattgcgtacagagcttatgatcttgaagggaagacgataggaaccgtgggagctggaagaatcggaaagcttttgctgcagcggttgaaaccattcgggtgtaacttgttgtaccatgacaggcttcagatggcaccagagctggagaaagagactggagctaagttcgttgaggatctgaatgaaatgctccctaaatgtgacgttatagtcatcaacatgcctctcacggagaagacaagaggaatgttcaacaaagagttgatagggaaattgaagaaaggcgttttgatagtgaacaacgcaagaggagccatcatggagaggcaagcagtggtggatgcggtggagagtggacacattggagggtacagcggagacgtttgggacccacagccagctcctaaggaccatccatggcgttacatgcctaaccaggctatgacccctcatacctccggcaccaccattgacgctcagctacggtatgcggcggggacgaaagacatgttggagagatacttcaagggagaagacttccctactgagaattacatcgtcaaggacggtgaacttgctcctcagtaccggtaagcttttgaggaggtgacattgggaagatgatgagaaacgaccccaacgttcaagaaaacaaataaagaagtatttggactttgctaagtcgaatgacttgagtcatcttttggtttagtttttgttattatataagcacaataataataggagggcacttcccctgttctgagagtttgtgaacatattactcagtggtttaaatcacacatatgtatttgtttccccaatcgtaggaactcaatggtttcaaatctcattatataaacataaaaatgaataaaggcatattaaatttgtctaa

SEQ ID NO: 76127 - protein, 400 aa, Arabidopsis thaliana
  peptide (1)..(400): Ceres Seq. ID no. 7106245
HASAKSNQIDIYLFSTMAMRQAAKATIRACSSSSSSGYFARRQFNASSGDSKKIVGVFYKANEYATKNPNFLGCVENALGIRDWLESQGHQYIVTDDKEGPDCELEKHIPDLHVLISTPFHPAYVTAERIKKAKNLKLLLTAGIGSDHIDLQAAAAAGLTVAEVTGSNVVSVAEDELMRILILMRNFVPGYNQVVKGEWNVAGIAYRAYDLEGKTIGTVGAGRIGKLLLQRLKPFGCNLLYHDRLQMAPELEKETGAKFVEDLNEMLPKCDVIVINMPLTEKTRGMFNKELIGKLKKGVLIVNNARGAIMERQAVVDAVESGHIGGYSGDVWDPQPAPKDHPWRYMPNQAMTPHTSGTTIDAQLRYAAGTKDMLERYFKGEDFPTENYIVKDGELAPQYR

SEQ ID NO: 76128 - protein, 384 aa, Arabidopsis thaliana
  peptide (1)..(384): Ceres Seq. ID no. 7106246
MAMRQAAKATIRACSSSSSSGYFARRQFNASSGDSKKIVGVFYKANEYATKNPNFLGCVENALGIRDWLESQGHQYIVTDDKEGPDCELEKHIPDLHVLISTPFHPAYVTAERIKKAKNLKLLLTAGIGSDHIDLQAAAAAGLTVAEVTGSNVVSVAEDELMRILILMRNFVPGYNQVVKGEWNVAGIAYRAYDLEGKTIGTVGAGRIGKLLLQRLKPFGCNLLYHDRLQMAPELEKETGAKFVEDLNEMLPKCDVIVINMPLTEKTRGMFNKELIGKLKKGVLIVNNARGAIMERQAVVDAVESGHIGGYSGDVWDPQPAPKDHPWRYMPNQAMTPHTSGTTIDAQLRYAAGTKDMLERYFKGEDFPTENYIVKDGELAPQYR

SEQ ID NO: 76129 - protein, 382 aa, Arabidopsis thaliana
  peptide (1)..(382): Ceres Seq. ID no. 7106247
MRQAAKATIRACSSSSSSGYFARRQFNASSGDSKKIVGVFYKANEYATKNPNFLGCVENALGIRDWLESQGHQYIVTDDKEGPDCELEKHIPDLHVLISTPFHPAYVTAERIKKAKNLKLLLTAGIGSDHIDLQAAAAAGLTVAEVTGSNVVSVAEDELMRILILMRNFVPGYNQVVKGEWNVAGIAYRAYDLEGKTIGTVGAGRIGKLLLQRLKPFGCNLLYHDRLQMAPELEKETGAKFVEDLNEMLPKCDVIVINMPLTEKTRGMFNKELIGKLKKGVLIVNNARGAIMERQAVVDAVESGHIGGYSGDVWDPQPAPKDHPWRYMPNQAMTPHTSGTTIDAQLRYAAGTKDMLERYFKGEDFPTENYIVKDGELAPQYR

SEQ ID NO: 76130 - DNA, 1887 bp, Arabidopsis thaliana
  misc_feature (1)..(1887): Ceres Seq. ID no. 7106556
  misc_feature (1)..(1887): Ortholog of  Ceres SEQ ID NO 13600220 as cited in SEQ ID NO 0
gagctctccttcatttcatcctcaacaaattcctacaccaatatctttagctagagagaaaaaaagagtgaggaaactagagagagagaccacccaataatggtgaggttcgagaaggttcatttagtgttagggttagctctggttctaactctggtcggagctccgaccaaagcccaaggacctgtttgcggtgcaggcctgcctgacaaatttagcagattaaacttccctgaaggcttcatttggggaaccgcaacagcagcatttcaggttgaaggagctgttaatgaaggttgcagaggtccaagcatgtgggatactttcactaagaagttcccacatagatgtgaaaatcataacgctgatgttgctgtggatttctatcatcgttacaaggaagatatccagttgatgaaagaccttaacactgatgcttttagactttctattgcgtggcccagaatattcccccatggaaggatgtctaagggaataagcaaagtaggagtccaattctaccacgacctcatcgatgagcttctcaaaaacaatataataccattagttacagtctttcattgggatactccccaagacttggaagatgaatatggtggtttcttaagtggtcgcatcgtgcaagattttaccgaatatgcgaatttcactttccacgaatatggacacaaagtgaaacattggatcacattcaatgagccatgggtgtttagtcgtgccggttacgacaacggaaagaaagctccgggacgttgttcaccgtacatccccggttatggacagcattgtcaagatgggcggtctggatacgaagcttatcaagtcagtcacaacttactcttgtcgcatgcttacgccgttgacgcattcagaaaatgcaaacagtgtgctggaggtaaaataggaattgcacacagtccagcttggttcgaaccacaagaccttgagcatgttggaggttccattgaacgtgtgcttgatttcatcctaggatggcatttggctccaacaacttatggagattatccacaatcgatgaaggatcgtgtcggtcatagattgccaaaattcacagaagctgagaagaagttgctgaagggttctacagattacgtaggaatgaattactatacttcagtgtttgcaaaagaaattagccctgatcctaagaatcctagttggactactgattctcttgttgattgggatagcaagagtgtggatggatacaaaattggtagcaagccgtttaatggtaaactggatgtgtattcaaaaggtttgagataccttttgaagtatattaaggataactatggcgacccagaagttatcattgccgagaatggatacggtgaagaccttggagagaagcacaatgacgtaaactttgggacacaagatcacaacaggaaatattatatccaaaggcatctcttgagtatgcacgacgccatttgcaaggacaaagtgaacgttacgggatactttgtgtggtcgttgatggacaactttgagtggcaagatgggtacaaagcgaggttcgggctttactacatcgatttccagaacaacttgacccgtcaccaaaaggtttcgggcaaatggtattccgaattcctcaaaccacaatttccaacctccaagctgagggaagaactctaggtgatcaagaatccaaatcttgaatcctatatatcgggacaaaataattgagtagcaagagtcttgaagatgttcttgaggatattatcagtttgtgtcattgtgtattctaatgatcgttttcatctaccggtccttcctatgttagaaggacttgtgagttgttcgagttttaataatatcaataaatgtcttcttttt

SEQ ID NO: 76131 - protein, 528 aa, Arabidopsis thaliana
  peptide (1)..(528): Ceres Seq. ID no. 7106557
MVRFEKVHLVLGLALVLTLVGAPTKAQGPVCGAGLPDKFSRLNFPEGFIWGTATAAFQVEGAVNEGCRGPSMWDTFTKKFPHRCENHNADVAVDFYHRYKEDIQLMKDLNTDAFRLSIAWPRIFPHGRMSKGISKVGVQFYHDLIDELLKNNIIPLVTVFHWDTPQDLEDEYGGFLSGRIVQDFTEYANFTFHEYGHKVKHWITFNEPWVFSRAGYDNGKKAPGRCSPYIPGYGQHCQDGRSGYEAYQVSHNLLLSHAYAVDAFRKCKQCAGGKIGIAHSPAWFEPQDLEHVGGSIERVLDFILGWHLAPTTYGDYPQSMKDRVGHRLPKFTEAEKKLLKGSTDYVGMNYYTSVFAKEISPDPKNPSWTTDSLVDWDSKSVDGYKIGSKPFNGKLDVYSKGLRYLLKYIKDNYGDPEVIIAENGYGEDLGEKHNDVNFGTQDHNRKYYIQRHLLSMHDAICKDKVNVTGYFVWSLMDNFEWQDGYKARFGLYYIDFQNNLTRHQKVSGKWYSEFLKPQFPTSKLREEL

SEQ ID NO: 76132 - protein, 457 aa, Arabidopsis thaliana
  peptide (1)..(457): Ceres Seq. ID no. 7106558
MWDTFTKKFPHRCENHNADVAVDFYHRYKEDIQLMKDLNTDAFRLSIAWPRIFPHGRMSKGISKVGVQFYHDLIDELLKNNIIPLVTVFHWDTPQDLEDEYGGFLSGRIVQDFTEYANFTFHEYGHKVKHWITFNEPWVFSRAGYDNGKKAPGRCSPYIPGYGQHCQDGRSGYEAYQVSHNLLLSHAYAVDAFRKCKQCAGGKIGIAHSPAWFEPQDLEHVGGSIERVLDFILGWHLAPTTYGDYPQSMKDRVGHRLPKFTEAEKKLLKGSTDYVGMNYYTSVFAKEISPDPKNPSWTTDSLVDWDSKSVDGYKIGSKPFNGKLDVYSKGLRYLLKYIKDNYGDPEVIIAENGYGEDLGEKHNDVNFGTQDHNRKYYIQRHLLSMHDAICKDKVNVTGYFVWSLMDNFEWQDGYKARFGLYYIDFQNNLTRHQKVSGKWYSEFLKPQFPTSKLREEL

SEQ ID NO: 76133 - protein, 423 aa, Arabidopsis thaliana
  peptide (1)..(423): Ceres Seq. ID no. 7106559
MKDLNTDAFRLSIAWPRIFPHGRMSKGISKVGVQFYHDLIDELLKNNIIPLVTVFHWDTPQDLEDEYGGFLSGRIVQDFTEYANFTFHEYGHKVKHWITFNEPWVFSRAGYDNGKKAPGRCSPYIPGYGQHCQDGRSGYEAYQVSHNLLLSHAYAVDAFRKCKQCAGGKIGIAHSPAWFEPQDLEHVGGSIERVLDFILGWHLAPTTYGDYPQSMKDRVGHRLPKFTEAEKKLLKGSTDYVGMNYYTSVFAKEISPDPKNPSWTTDSLVDWDSKSVDGYKIGSKPFNGKLDVYSKGLRYLLKYIKDNYGDPEVIIAENGYGEDLGEKHNDVNFGTQDHNRKYYIQRHLLSMHDAICKDKVNVTGYFVWSLMDNFEWQDGYKARFGLYYIDFQNNLTRHQKVSGKWYSEFLKPQFPTSKLREEL

SEQ ID NO: 76134 - DNA, 1718 bp, Arabidopsis thaliana
  misc_feature (1)..(1718): Ceres Seq. ID no. 7106572
  misc_feature (1)..(1718): Ortholog of  Ceres SEQ ID NO 15226449 as cited in SEQ ID NO 58879
agtgtgagtaatttagatccaggattcttcagattcctctcctttgatcctctctttaacaatctctctctctctgttttcttcgatccgttgtaggagaaaatggtcgttatcaacagtctccgacgcttggcgcgtaccactcaggttcatttgcacagtaggtatgccacttgcatgtctgggaactccacttccaggaggattttcactactgaggcagcacctgagaagaaaaacactgttgggtctaaagggcatgatatgcttgcaccttttactgctggatggcagagtgctgatttagatcccttggtcattgcaaagtctgagggaagttatgtgtatgatgatactgggaaaaaatatcttgactctctcgctggtttatggtgtactgccttaggaggaaatgagccaaggcttgtttctgccgctgttgaacagttgaacaccttgccgttttatcactccttttggaaccgtactactaaaccttctctggatcttgctaaggttcttttagagatgttcacggccaacaaaatggccaaagcattttttacaagcggtggatcagatgccaacgatacccaggtcaagctggtttggtattacaataacgcacttggaaggcccgagaagaaaaagtttatcgcgagaaagaaatcgtaccatggctccactctaatatcagcaagtttgtccggccttcccccgctacaccaaaattttgatttacctgcaccatttgtgttgcacacagattgccctcattattggcgttttcatcttccaggcgaaacggaagaggagttctcaaccagattagccaagaatttagaggatctaatcatcaaagaaggaccagaaactattggtgcttttatagctgaaccagtcatgggtgctgggggtgtgatacctccacctgctacctactttgaaaaggttcaagctgttgttaagaaatatgatatcttgttcattgctgatgaggtgatatgtgcatttggaaggctcgggacaatgtttggctgtgacaaatacaacattaagccagatcttgtgaccttagctaaggcactgtcttcagcatatatgccgattggagccattcttatgagccaagaagtggcagatgtcataaattctcatagcagcaagcttggcgttttctcccatggatttacttattctggtcatccagtttcgtgtgctgtagcaattgaagcgttaaagatatacaaggagaggaacataccagagtatgtcgccaaagttgccccaaggtttcaagatggagttaaagcgtttgcctctggtagtcctattattggagagacaagaggaacaggtttgattcttgggactgagtttgtagacaataaatctccgaacgaaccatttccaccagaatggggtgttggcgcattctttggagccgagtgccagaagcacgggatgttagtccgtgttgcaggtgatggcattttgatgtctccaccgctcattatctcacctgaagagattgatgagttgatttctatctatgggaaagcattgaaggcaacggaagagaaggtaaaagaactcaaggctcagcacaagaagtgaaaagcagagtcaaaatgatgttgatgaaaaatgttttttagattctcaaagtttggatctattgtttttttttttaacacacaacaagtctttaaataagt

SEQ ID NO: 76135 - protein, 504 aa, Arabidopsis thaliana
  peptide (1)..(504): Ceres Seq. ID no. 7106573
MVVINSLRRLARTTQVHLHSRYATCMSGNSTSRRIFTTEAAPEKKNTVGSKGHDMLAPFTAGWQSADLDPLVIAKSEGSYVYDDTGKKYLDSLAGLWCTALGGNEPRLVSAAVEQLNTLPFYHSFWNRTTKPSLDLAKVLLEMFTANKMAKAFFTSGGSDANDTQVKLVWYYNNALGRPEKKKFIARKKSYHGSTLISASLSGLPPLHQNFDLPAPFVLHTDCPHYWRFHLPGETEEEFSTRLAKNLEDLIIKEGPETIGAFIAEPVMGAGGVIPPPATYFEKVQAVVKKYDILFIADEVICAFGRLGTMFGCDKYNIKPDLVTLAKALSSAYMPIGAILMSQEVADVINSHSSKLGVFSHGFTYSGHPVSCAVAIEALKIYKERNIPEYVAKVAPRFQDGVKAFASGSPIIGETRGTGLILGTEFVDNKSPNEPFPPEWGVGAFFGAECQKHGMLVRVAGDGILMSPPLIISPEEIDELISIYGKALKATEEKVKELKAQHKK

SEQ ID NO: 76136 - protein, 479 aa, Arabidopsis thaliana; identical to SEQ ID NO: 26478
  peptide (1)..(479): Ceres Seq. ID no. 7106574

SEQ ID NO: 76137 - protein, 450 aa, Arabidopsis thaliana; identical to SEQ ID NO: 26479
  peptide (1)..(450): Ceres Seq. ID no. 7106575

SEQ ID NO: 76138 - DNA, 1219 bp, Arabidopsis thaliana
  misc_feature (1)..(1219): Ceres Seq. ID no. 7106592
  misc_feature (1)..(1219): Ortholog of  Ceres SEQ ID NO 14314272 as cited in SEQ ID NO 57461
  misc_feature (1)..(1219): Ortholog of  Ceres SEQ ID NO 15170602 as cited in SEQ ID NO 57485
ccacgcgtccggtgaactgttgttgttgtgctctttggtttcatcgagagagaacctaaacccgatctgaaccaataacaataagaagacgaatggcgtcttcgtcgttctcagtcacatctccagctgctgctgcttccgtctatgcagtcactcaaacctcctcgcacttcccaatccaaaaccgctctcgcagagtttctttccgtctctctgctaagcccaagcttcgctttctctccaagcctagtcgcagtagctaccctgtggtgaaagcacaatctaacaaggttagtactggtgcatcatcaaatgctgccaaagttgatgggccatcatcagctgaaggaaaggagaaaaactcattgaaggagtcgtctgcttcttctcctgaattagctacagaagagtctatttctgagttccttacccaagtaacaactcttgtcaagcttgtggattcaagagacattgttgagttgcagttgaaacaactcgactgtgaactagtcattcgaaaaaaagaagccttacctcaacctcaagctcctgcatcttatgttatgatgcagcaaccaaatcaaccatcttatgcccagcaaatggctcctcctgctgcacctgctgctgccgcaccagccccttctacgccagcctctctgcctccaccatccccacctactccagccaaatcgtcacttcctactgttaaaagccccatggctggcacattctaccgtagtcctgcacctggtgaaccaccctttattaaggttggagacaaagtgcagaaggggcaagttctatgcattgttgaagccatgaagttaatgaatgaaatagagtctgaccataccggaaccgtagtcgatattgtcgcagaagacggcaagcctgtcagcctcgacactcctctgtttgtggttcaaccgtagaatcggcaccatgagaaatggagaaaagaagctctactaaattcattctctgtgctttggtaatacaaaatttgctgagacttctaaaaacgtttccccttcgctgtcactgttaaagtctgttaggtttgttagtttggtgaggaagaattgagttttctttagtttctctattcgttaaaaaaaaaaagatgagacatttttttccataagctctgtttttatttctttcctatatacacgaactcttcttgttctgttctatttgcaaattatccaatttc

SEQ ID NO: 76139 - protein, 280 aa, Arabidopsis thaliana
  peptide (1)..(280): Ceres Seq. ID no. 7106593
MASSSFSVTSPAAAASVYAVTQTSSHFPIQNRSRRVSFRLSAKPKLRFLSKPSRSSYPVVKAQSNKVSTGASSNAAKVDGPSSAEGKEKNSLKESSASSPELATEESISEFLTQVTTLVKLVDSRDIVELQLKQLDCELVIRKKEALPQPQAPASYVMMQQPNQPSYAQQMAPPAAPAAAAPAPSTPASLPPPSPPTPAKSSLPTVKSPMAGTFYRSPAPGEPPFIKVGDKVQKGQVLCIVEAMKLMNEIESDHTGTVVDIVAEDGKPVSLDTPLFVVQP

SEQ ID NO: 76140 - DNA, 1730 bp, Arabidopsis thaliana
  misc_feature (1)..(1730): Ceres Seq. ID no. 7106618
  misc_feature (1)..(1730): Ortholog of  Ceres SEQ ID NO 15171476 as cited in SEQ ID NO 55569
  misc_feature (1)..(1730): Ortholog of  Ceres SEQ ID NO 14312069 as cited in SEQ ID NO 59191
ggcacgagctgcatactggtcattgattggttaatcagagctctctcttttcttttcctatctctagagactagagaaatggctctctatctctcttcttcacgactcatcacctttctctctttcatcttgcttctctccaatggcttctcgtcctcttcctctcgccctagcatccaccatcgtcaccacctggacaaccacaattacaaagacgctctctccaaatccattctcttcttcgaaggtcaaagatccggaaagcttcctccaaaccagagaatgacttggagaagcaactctggtctctctgatggctctgctctcaacgtggatttggtgggaggatactacgatgcaggggacaatatgaagtttggattcccaatggcattcacaaccacaatgctctcatggagtttaattgagtttggtggtctcatgaaatctgagttaccaaacgcaaaagacgctattcgttgggctactgactttctcctcaaagccacttcacatcctgataccatttatgttcaggttggtgatcctaacatggaccatgcttgttgggagagaccagaagacatggacacaccaagaagtgtgtttaaagtcgacaagaacaatcctggttctgatatcgccggtgaaatcgccgccgctcttgccgctgcttcaattgttttcagaaaatgtgatccttcttactccaatcacctcctccaacgagccattacggtttttacatttgcggacaaatacagaggaccctacagtgcaggtctggccccagaagtttgtccattctactgttcttactctggatatcaggatgaattgttatggggagctgcttggttacaaaaagcaacaaataacccaacatatctcaattacatcaaagctaatggacaaatccttggagctgatgagtttgataacatgtttagttgggataataagcacgttggtgctagaatccttctctccaaggagtttctgattcagaaagtgaagtcacttgaagaatacaaagagcatgctgatagtttcatttgctctgttatacctggagcatcctcttcccaatatacaccaggtgggctattgttcaagatgggtgagagcaacatgcaatacgtgacgtctacatcgttcttgctcttgacctacgccaaatacttaacctctgctcgcaccgtcgcttattgcggtggctccgtcgtcacccctgcccgcctccgctccatcgcaaagaaacaggtggattatctacttggaggcaacccgttgaagatgtcatacatggttggttatggtctgaaatatccacgtcggattcaccaccgtggctcatctctcccctccgttgcagtccacccgaccaggatccagtgccacgacggcttctccttgtttacctctcaatctcctaatcctaacgacctagtcggtgcagtagtcggtggtccggaccagaacgatcaattccctgacgaacggtccgactacggacggtcagagccagcaacttacattaacgctccacttgttggagctttggcttatcttgctcgatcctaaggccaactttaactaagcttaaaccgcatttaattgttggtttacaatgttaattagtagtaatgattttataaatgaatggccaagattgtccgatccggctgaatgaatgttttagatgatgtggtatttgattttaattttct

SEQ ID NO: 76141 - protein, 527 aa, Arabidopsis thaliana
  peptide (1)..(527): Ceres Seq. ID no. 7106619
GTSCILVIDWLIRALSFLFLSLETREMALYLSSSRLITFLSFILLLSNGFSSSSSRPSIHHRHHLDNHNYKDALSKSILFFEGQRSGKLPPNQRMTWRSNSGLSDGSALNVDLVGGYYDAGDNMKFGFPMAFTTTMLSWSLIEFGGLMKSELPNAKDAIRWATDFLLKATSHPDTIYVQVGDPNMDHACWERPEDMDTPRSVFKVDKNNPGSDIAGEIAAALAAASIVFRKCDPSYSNHLLQRAITVFTFADKYRGPYSAGLAPEVCPFYCSYSGYQDELLWGAAWLQKATNNPTYLNYIKANGQILGADEFDNMFSWDNKHVGARILLSKEFLIQKVKSLEEYKEHADSFICSVIPGASSSQYTPGGLLFKMGESNMQYVTSTSFLLLTYAKYLTSARTVAYCGGSVVTPARLRSIAKKQVDYLLGGNPLKMSYMVGYGLKYPRRIHHRGSSLPSVAVHPTRIQCHDGFSLFTSQSPNPNDLVGAVVGGPDQNDQFPDERSDYGRSEPATYINAPLVGALAYLARS

SEQ ID NO: 76142 - protein, 501 aa, Arabidopsis thaliana
  peptide (1)..(501): Ceres Seq. ID no. 7106620
MALYLSSSRLITFLSFILLLSNGFSSSSSRPSIHHRHHLDNHNYKDALSKSILFFEGQRSGKLPPNQRMTWRSNSGLSDGSALNVDLVGGYYDAGDNMKFGFPMAFTTTMLSWSLIEFGGLMKSELPNAKDAIRWATDFLLKATSHPDTIYVQVGDPNMDHACWERPEDMDTPRSVFKVDKNNPGSDIAGEIAAALAAASIVFRKCDPSYSNHLLQRAITVFTFADKYRGPYSAGLAPEVCPFYCSYSGYQDELLWGAAWLQKATNNPTYLNYIKANGQILGADEFDNMFSWDNKHVGARILLSKEFLIQKVKSLEEYKEHADSFICSVIPGASSSQYTPGGLLFKMGESNMQYVTSTSFLLLTYAKYLTSARTVAYCGGSVVTPARLRSIAKKQVDYLLGGNPLKMSYMVGYGLKYPRRIHHRGSSLPSVAVHPTRIQCHDGFSLFTSQSPNPNDLVGAVVGGPDQNDQFPDERSDYGRSEPATYINAPLVGALAYLARS

SEQ ID NO: 76143 - protein, 433 aa, Arabidopsis thaliana
  peptide (1)..(433): Ceres Seq. ID no. 7106621
MTWRSNSGLSDGSALNVDLVGGYYDAGDNMKFGFPMAFTTTMLSWSLIEFGGLMKSELPNAKDAIRWATDFLLKATSHPDTIYVQVGDPNMDHACWERPEDMDTPRSVFKVDKNNPGSDIAGEIAAALAAASIVFRKCDPSYSNHLLQRAITVFTFADKYRGPYSAGLAPEVCPFYCSYSGYQDELLWGAAWLQKATNNPTYLNYIKANGQILGADEFDNMFSWDNKHVGARILLSKEFLIQKVKSLEEYKEHADSFICSVIPGASSSQYTPGGLLFKMGESNMQYVTSTSFLLLTYAKYLTSARTVAYCGGSVVTPARLRSIAKKQVDYLLGGNPLKMSYMVGYGLKYPRRIHHRGSSLPSVAVHPTRIQCHDGFSLFTSQSPNPNDLVGAVVGGPDQNDQFPDERSDYGRSEPATYINAPLVGALAYLARS

SEQ ID NO: 76144 - DNA, 1899 bp, Arabidopsis thaliana
  misc_feature (1)..(1899): Ceres Seq. ID no. 7106710
  misc_feature (1)..(1899): Ortholog of  Ceres SEQ ID NO 14311219 as cited in SEQ ID NO 56635
  misc_feature (1)..(1899): Ortholog of  Ceres SEQ ID NO 15169615 as cited in SEQ ID NO 66708
  misc_feature (1)..(1899): Ortholog of  Ceres SEQ ID NO 15169619 as cited in SEQ ID NO 67512
cgatgatgaagataccccaccaaacccaaaaaaagagatctctcgaggatccgaattcgcggccgcgtcgacgcgaaagcgacgatttcttctccatcgtgagagcaaatctccagagccgttttctcttcttcttcttcctcctcgtgccgtctctgaaactccatcatcgtatcaatcaaattgcttcctcctccaaattgaaaaacaatggaattggattcggagaacaaattgttgaagacgggtttggttatagtggcgacacttgttatagccaaactcatcttctctttcttcacttctgattctaagaagaagcgtcttcctcctactcttaaagcttggcctccattggttggaagtcttatcaaattcttgaaaggacctattattatgcttagagaggaataccctaagcttggaagtgtgtttactgttaatcttgttcacaaaaagattacttttcttattggtcctgaagtctctgctcattttttcaaagcttctgaatctgatcttagtcagcaggaagtgtatcagttcaatgtccctacttttggtcctggagttgttttcgatgttgattattctgttcgtcaggagcagtttcggttcttcactgaggcacttagagttaacaagttgaagggttatgtggatatgatggttactgaagctgaggattacttctctaaatggggagagagtggtgaagttgatattaaggttgagctagagaggctcatcatcttgactgcaagtagatgtttactgggtcgagaagttcgtgatcagctttttgatgatgtctctgctttgttccatgaccttgacaatggaatgcttcccatcagtgttctcttcccatatctcccaattccagctcaccgccgtcgtgaccgtgcccgagaaaagctttcggagattttcgcaaaaatcattgggtcgagaaaacgctctggaaaaacagagaacgacatgctgcagtgtttcatcgaatcaaagtacaaagatggtagacagacaaccgaatctgaagtcactggtttgctcattgctgctctgtttgcaggacaacacacgagctctatcacttccacctggaccggtgcttatctgatgcgatacaaagagtacttctcagctgctcttgatgagcagaagaacctgattgcgaaacatggagacaagatcgatcatgatatcttatccgagatggatgttctctaccgctgcattaaggaagcgttgaggcttcaccctccactcatcatgttaatgagagcctcgcacagtgatttcagcgtgacagctcgggatggaaaaacttacgatatcccaaagggtcacatcgttgcaacctcccctgcatttgccaaccgcttaccgcacatcttcaaagaccccgacacctacgacccagaaagattctcccctggaagagaagaggacaaagccgcaggggcattctcgtacattgcattcggagggggaaggcacgggtgccttggagagccgtttgcttacctgcagatcaaagccatatggagtcatttgttgaggaacttcgagcttgagctagtttcaccgttccctgagattgactggaacgctatggtggttggagttaaaggcaatgtgatggtgcgttacaagaggcgccagctttcttaaagacaagtttaaggttattgcagctttggatttttctctctggtttctgctttgcttttgtccctctctggttttagttttgttgttgaataattcttctgtttttataaactgttgttactctttaattgaaaaaaaaaaaaaaaaaaaaaaaaaaaaagggcggccgctctagaggaaccaagctacgtacgcgtgcatgcgacgtcatagctcttctat

SEQ ID NO: 76145 - protein, 488 aa, Arabidopsis thaliana; identical to SEQ ID NO: 39837
  peptide (1)..(488): Ceres Seq. ID no. 7106711

SEQ ID NO: 76146 - protein, 426 aa, Arabidopsis thaliana; identical to SEQ ID NO: 39838
  peptide (1)..(426): Ceres Seq. ID no. 7106712

SEQ ID NO: 76147 - protein, 337 aa, Arabidopsis thaliana; identical to SEQ ID NO: 39839
  peptide (1)..(337): Ceres Seq. ID no. 7106713

SEQ ID NO: 76148 - DNA, 1048 bp, Arabidopsis thaliana
  misc_feature (1)..(1048): Ceres Seq. ID no. 7106757
  misc_feature (1)..(1048): Ortholog of  Ceres SEQ ID NO 13655598 as cited in SEQ ID NO 64077
  misc_feature (1)..(1048): Ortholog of  Ceres SEQ ID NO 15179351 as cited in SEQ ID NO 0
agctttctccgatcatgccgaccagaaacatcgccattggtggagtccaagaagaggtctatcaccccaacgcacttagggcggcgctcgctgagtttatctcgactttgatcttcgtcttcgccggctcaggctccggaattgctttcaacaagatcactgacaatggagcaaccactccttccggcctcgtcgccgctgccttagctcatgctttcggtctctttgtcgctgtctctgttggcgctaacattgccgctgccttagctcatgctttcggtctctttgtcgctgtctctgttggcgctaacatttccggtggccacgttaaccctgccgttaccttcggtgttttactcggtgggaacatcactctcctccgtggtattctctactggattgctcagcttcttggctccgtcgccgcttgtttcctccttagctttgccaccggtggcgagccaattccagcgttcggtctctctgccggagtcggatcattaaacgctctcgtcttcgagatcgtgatgaccttcgggctcgtctacaccgtctacgccacagccgttgaccccaagaacggtagtctcggaacaatcgcaccaatcgccataggtttcatcgttggagctaacatcctcgccggtggagctttcagcggagcttccatgaacccagccgttgctttcggaccagccgtcgtaagctggacgtggaccaaccactgggtttactgggctggtcctcttattggtggtggactcgccggaattatctacgactttgtcttcatcgatgaaaatgcccacgagcaattgcctaccaccgattactgaagacgtcaaattcaacgttgttaatctgatgaatttttcgtgatttgcttttttaatttgcatcgtaatgggtttctggccgttggatcatttttagatgaatctttgtctattgattgatcatttatgtgtctttgggtttgttgttggagttgtaatatctctggaaggcttttgtgcaattgtattgtacggtttaataactataattg

SEQ ID NO: 76149 - protein, 277 aa, Arabidopsis thaliana
  peptide (1)..(277): Ceres Seq. ID no. 7106758
LSPIMPTRNIAIGGVQEEVYHPNALRAALAEFISTLIFVFAGSGSGIAFNKITDNGATTPSGLVAAALAHAFGLFVAVSVGANIAAALAHAFGLFVAVSVGANISGGHVNPAVTFGVLLGGNITLLRGILYWIAQLLGSVAACFLLSFATGGEPIPAFGLSAGVGSLNALVFEIVMTFGLVYTVYATAVDPKNGSLGTIAPIAIGFIVGANILAGGAFSGASMNPAVAFGPAVVSWTWTNHWVYWAGPLIGGGLAGIIYDFVFIDENAHEQLPTTDY

SEQ ID NO: 76150 - protein, 273 aa, Arabidopsis thaliana
  peptide (1)..(273): Ceres Seq. ID no. 7106759
MPTRNIAIGGVQEEVYHPNALRAALAEFISTLIFVFAGSGSGIAFNKITDNGATTPSGLVAAALAHAFGLFVAVSVGANIAAALAHAFGLFVAVSVGANISGGHVNPAVTFGVLLGGNITLLRGILYWIAQLLGSVAACFLLSFATGGEPIPAFGLSAGVGSLNALVFEIVMTFGLVYTVYATAVDPKNGSLGTIAPIAIGFIVGANILAGGAFSGASMNPAVAFGPAVVSWTWTNHWVYWAGPLIGGGLAGIIYDFVFIDENAHEQLPTTDY

SEQ ID NO: 76151 - DNA, 1194 bp, Arabidopsis thaliana
  misc_feature (1)..(1194): Ceres Seq. ID no. 7106947
  misc_feature (1)..(1194): Ortholog of  Ceres SEQ ID NO 14311596 as cited in SEQ ID NO 51728
  misc_feature (1)..(1194): Ortholog of  Ceres SEQ ID NO 12617197 as cited in SEQ ID NO 63406
  misc_feature (1)..(1194): Ortholog of  Ceres SEQ ID NO 13597804 as cited in SEQ ID NO 64182
  misc_feature (1)..(1194): Ortholog of  Ceres SEQ ID NO 14302768 as cited in SEQ ID NO 64889
  misc_feature (1)..(1194): Ortholog of  Ceres SEQ ID NO 13598565 as cited in SEQ ID NO 65250
  misc_feature (1)..(1194): Ortholog of  Ceres SEQ ID NO 13598597 as cited in SEQ ID NO 65496
  misc_feature (1)..(1194): Ortholog of  Ceres SEQ ID NO 13596284 as cited in SEQ ID NO 68273
  misc_feature (1)..(1194): Ortholog of  Ceres SEQ ID NO 14308995 as cited in SEQ ID NO 0
  misc_feature (1)..(1194): Ortholog of  Ceres SEQ ID NO 15179068 as cited in SEQ ID NO 0
gaattcggcacgagaccttgtaaaccattaagaggctttgctcaattaacaagaaagaaaaaatgcttgtcgacgggaaactcgtctgcgtcaccggagccggcggctacattgcttcttggatcgttaagttactcttagagagaggctacaccgttagaggaaccgtaaggaacccaactgatcccaagaacaaccatctcagagagcttcaaggagccaaggaaagactcactcttcacagtgcagatcttctcgactacgaagctctctgtgccacaatcgacggttgcgatggcgttttccacactgcctctccgatgaccgacgatcccgagacaatgttggagccggcggtgaacggagccaagttcgtgattgacgcagcggctaaagccaaggtcaagcgcgtggttttcacgtcatcaattggtgcagtttacatgaaccctaaccgtgacactcaagccattgttgacgaaaactgctggagtgatcttgatttctgcaaaaacactaagaattggtattgctacgggaagatgttggcggaacaatcggcatgggagacggccaaagcaaaaggtgtggacttagtggtgctaaatccggttttggttctcggaccaccgctccagtcagcgatcaacgctagtctagtccatattctcaagtacctcaccggttcagccaagacctacgctaacttgactcaggtctacgtggacgtccgtgacgtggcactaggccatgttctggtctacgaagcaccctccgcctcaggccgttacatcttcgccgagaccgcacttgaccgcggagaggttgttgagattctggccaaattcttcccggagtatccacttcccaccaagtgttcggacgagaagaatccgagggctaagccatacaagtttactacccaaaagataaaagacttaggcttggaatttaaacccatcaagcaatctctttacgaatctgtcaagagcttgcaagagaaaggccatcttcctctacctcaagattcgaaccaaaacgaagtcatcatcgaatcttaggacacgatccacgaccctagaatctgatcatacctacatgaaaagctttattcttaagtaatacatacgttttgattttgactaaagtattgttaaatcttaaatcattatatatagctgattgttctttctt

SEQ ID NO: 76152 - protein, 332 aa, Arabidopsis thaliana
  peptide (1)..(332): Ceres Seq. ID no. 7106948
MLVDGKLVCVTGAGGYIASWIVKLLLERGYTVRGTVRNPTDPKNNHLRELQGAKERLTLHSADLLDYEALCATIDGCDGVFHTASPMTDDPETMLEPAVNGAKFVIDAAAKAKVKRVVFTSSIGAVYMNPNRDTQAIVDENCWSDLDFCKNTKNWYCYGKMLAEQSAWETAKAKGVDLVVLNPVLVLGPPLQSAINASLVHILKYLTGSAKTYANLTQVYVDVRDVALGHVLVYEAPSASGRYIFAETALDRGEVVEILAKFFPEYPLPTKCSDEKNPRAKPYKFTTQKIKDLGLEFKPIKQSLYESVKSLQEKGHLPLPQDSNQNEVIIES

SEQ ID NO: 76153 - protein, 246 aa, Arabidopsis thaliana
  peptide (1)..(246): Ceres Seq. ID no. 7106949
MTDDPETMLEPAVNGAKFVIDAAAKAKVKRVVFTSSIGAVYMNPNRDTQAIVDENCWSDLDFCKNTKNWYCYGKMLAEQSAWETAKAKGVDLVVLNPVLVLGPPLQSAINASLVHILKYLTGSAKTYANLTQVYVDVRDVALGHVLVYEAPSASGRYIFAETALDRGEVVEILAKFFPEYPLPTKCSDEKNPRAKPYKFTTQKIKDLGLEFKPIKQSLYESVKSLQEKGHLPLPQDSNQNEVIIES

SEQ ID NO: 76154 - protein, 239 aa, Arabidopsis thaliana
  peptide (1)..(239): Ceres Seq. ID no. 7106950
MLEPAVNGAKFVIDAAAKAKVKRVVFTSSIGAVYMNPNRDTQAIVDENCWSDLDFCKNTKNWYCYGKMLAEQSAWETAKAKGVDLVVLNPVLVLGPPLQSAINASLVHILKYLTGSAKTYANLTQVYVDVRDVALGHVLVYEAPSASGRYIFAETALDRGEVVEILAKFFPEYPLPTKCSDEKNPRAKPYKFTTQKIKDLGLEFKPIKQSLYESVKSLQEKGHLPLPQDSNQNEVIIES

SEQ ID NO: 76155 - DNA, 1253 bp, Arabidopsis thaliana
  misc_feature (1)..(1253): Ceres Seq. ID no. 7106951
  misc_feature (1)..(1253): Ortholog of  Ceres SEQ ID NO 13582619 as cited in SEQ ID NO 56520
  misc_feature (1)..(1253): Ortholog of  Ceres SEQ ID NO 13660872 as cited in SEQ ID NO 60830
  misc_feature (1)..(1253): Ortholog of  Ceres SEQ ID NO 12616221 as cited in SEQ ID NO 63291
gtcgaccacgcctccgtctttatctctcttttcctcttaaccatccactaatcaaacactaaaacctagaaaaaaaaaggatcaaatcatggagacggaagaagagatgaaggaaagtagtataagcatggtggaggcaaagttgcctccgggattcagatttcacccgaaggacgatgagcttgtctgcgattacttgatgagacgatcgcttcacaataatcatcgaccacctcttgtcctgatccaagtcgatctcaacaagtgtgagccttgggacatcccaaaaatggcatgcgtgggagggaaggattggtatttctacagccaaagagaccgaaaatacgcgacggggctgagaactaaccgagcaacggccaccggatattggaaagccaccggcaaagacagaaccattctaagaaagggtaagctagttgggatgaggaagacattggttttctatcaaggtcgagctcctcgaggccgtaaaaccgattgggtcatgcacgaattccgtctccaaggatctcatcatcctcccaatcattctctgagctctccaaaggaagactgggtcttgtgtagggtattccataagaatacggaaggagttatatgtagagacaacatgggaagctgttttgatgagacagcctctgcatcgcttcctccactgatggatccttacatcaactttgaccaagaaccctcttcttatctcagtgatgatcatcactacatcatcaatgagcacgtaccctgcttctccaatttgtcacagaaccaaaccttaaactcgaacctaaccaactcagtctctgaactcaagattccatgcaagaaccctaaccccttgtttactggtggttcagcctcagccacgctcacaggcctcgactcattctgttcttcagatcagatggttctcagagctctactcagtcagctcactaagattgatggaagcctcgggcctaaagaatcacagagttatggagaaggtagctcggagagcctcctgaccgacatcggtattccaagcactgtttggaattgctgatgatcgagtgtaacgagagttactattgctatattcctatccatgattggaacaattcttcggggggaaataacgtgtgcttgtctgattgtacaaacatttcctcactcttgtacccacggtagattcatgtaaaataccacttatgacgctagacatacatatatttcatcgtagttccatttgtttc

SEQ ID NO: 76156 - protein, 324 aa, Arabidopsis thaliana; identical to SEQ ID NO: 43483
  peptide (1)..(324): Ceres Seq. ID no. 7106952

SEQ ID NO: 76157 - protein, 318 aa, Arabidopsis thaliana; identical to SEQ ID NO: 43484
  peptide (1)..(318): Ceres Seq. ID no. 7106953

SEQ ID NO: 76158 - protein, 311 aa, Arabidopsis thaliana; identical to SEQ ID NO: 43485
  peptide (1)..(311): Ceres Seq. ID no. 7106954

SEQ ID NO: 76159 - DNA, 1397 bp, Arabidopsis thaliana
  misc_feature (1)..(1397): Ceres Seq. ID no. 7106981
  misc_feature (1)..(1397): Ortholog of  Ceres SEQ ID NO 15172321 as cited in SEQ ID NO 55415
  misc_feature (1348)..(1348): n is a, c, t, g, unknown, or other
  misc_feature (1357)..(1357): n is a, c, t, g, unknown, or other
ctgaaattaaacaaagcgagaaaaggcgatacaaacgatttcgaatgcttcatcttctcctttgaaaatccttcttctgcttaatgctgctagatatggatctcggtgttcttcttccatcattgcaatctgtttatgtgctggtgttttacttcgtttacttggccgttgccggagaaattctccccgggaaagttattcgcggcgtccttttatcagatggctctcaacttcgttaccgatgcaatggtctattggcactaatattgttggtagctattttgggaatctgtgcaaaacttggcattgtatcacctcttgtggttgcggatagaggacttgagttactctcagctacttttattttctgtgttttggtgacattagcattgtatgttactgggcgaagttcctcgaataagggttcttccctaaagcctcatgtctcaggaaatcttgtacatgactggtggtttggaatacagctgaatcctcagtttatgagcattgatctcaagtttttctttgtcagagccgggatgatgggatggctgcttatcaatctctctattctggcaaaaagtgtgcaggatggttccttgagtcagtcgatgattctttaccagatcttctgtgcgttatatatattggactactttgttcatgaagaatacatgacctctacgtgggacataattgcagagagactaggcttcatgctagtgtttggagatctcctgtggattcctttcacttttagcattcagggctggtggcttttgcacaacaaagtagaactaacagttcctgcgattgtagtcaattgccttgtcttcttgatagggtacatggtttttcgaggagctaacaaacaaaaacatatctttaagaagaacccaaaaacaccaatatggggcaagcctccagtggtagttggtggaaagttactggtttcaggctattggggaattgcaaggcactgtaattaccttggcgacttgatgcttgctctgtccttcagtttgccatgtggaataagttctccggttccatatttctacccgatataccttctgatactattgatatggagagaacgaagagacgaggttcgatgtgcagagaagtacaaggagatatgggcagagtatcttagacttgtcccctggagaatacttccttatgtttattagatgtgccaagagccaagtcatgaatcctttcagattcacctcttgttgtcttattttttccataatcttgttttattttagcaatgctcgaattgaaactttgtagtacacttttgaaaaataacttcagtccttaaaaaaaaaaaaaacctaanttactcccnctgggcggccgctggttttatatttgttgtaaaaattaaa

SEQ ID NO: 76160 - protein, 369 aa, Arabidopsis thaliana; identical to SEQ ID NO: 24309
  peptide (1)..(369): Ceres Seq. ID no. 7106982

SEQ ID NO: 76161 - protein, 365 aa, Arabidopsis thaliana; identical to SEQ ID NO: 24310
  peptide (1)..(365): Ceres Seq. ID no. 7106983

SEQ ID NO: 76162 - protein, 230 aa, Arabidopsis thaliana; identical to SEQ ID NO: 24311
  peptide (1)..(230): Ceres Seq. ID no. 7106984

SEQ ID NO: 76163 - DNA, 1704 bp, Arabidopsis thaliana
  misc_feature (1)..(1704): Ceres Seq. ID no. 7106997
  misc_feature (1)..(1704): Ortholog of  Ceres SEQ ID NO 15170811 as cited in SEQ ID NO 52649
  misc_feature (1)..(1704): Ortholog of  Ceres SEQ ID NO 13638331 as cited in SEQ ID NO 58047
  misc_feature (1)..(1704): Ortholog of  Ceres SEQ ID NO 15225845 as cited in SEQ ID NO 65125
  misc_feature (1)..(1704): Ortholog of  Ceres SEQ ID NO 15170135 as cited in SEQ ID NO 67647
ccacgcgtccgcactagtgttcgtcatctttgttcgattgaagtttgggaagtggtgatggtaataggagcagcagcgcgtgtagccatcggcggttgtcgaaagctcatctcgtcacatacctccctcctcctcgtctcttctcagtgtcgccagatgagtatggacgcacaaagcgtttctgaaaagcttaggagttctggtctattacgaactcaaggtctaattggaggcaagtggcttgactcgtatgacaataagacaatcaaggttaacaatccagcaaccggtgaaattatagctgatgttgcatgtatgggaacaaaagagacaaatgatgctattgcttcttcttatgaagcatttacttcttggagcagattgactgctggagagaggagtaaagttttacggagatggtatgacctcctgattgcacacaaggaagaacttggacaacttataactttggagcaaggaaaaccactcaaggaagccatcggagaggtagcatatggggcaagttttattgagtactatgcggaggaggcaaaacgtgtatatggtgatataattcctccgaatctgtctgatcgccgactgttggttctaaaacagcctgtcggtgttgttggtgcaattaccccttggaacttccccttagccatgattactcggaaggtcggccctgctcttgcttctggatgcacggtggttgttaaaccatctgaacttacgcccctaacagcacttgctgcggctgaacttgcacttcaagctggagttcctccgggggcacttaatgtggtcatgggaaatgctcctgaaattggggatgctttgcttacgagtccacaggtgagaaaaatcacgttcacgggatcaacagcagttgggaagaagttgatggcagctgctgcacctaccgtcaagaaggtttctctagaacttggcggcaacgcaccctctatagtatttgatgatgcagacctggatgtagctgtaaaaggaacgcttgcagcgaaatttaggaatagtggtcagacatgtgtttgtgcgaacagagtacttgtgcaagatggtatctatgataaatttgctgaggccttttctgaagcggttcaaaaattagaagtaggagatgggtttagggatgggacaacccagggtccacttataaatgatgcagcagtgcaaaaggtagagacatttgtacaagatgctgtttctaagggagcaaaaatcatcattggtggcaaaaggcacagtctagggatgactttctatgagcctactgttatccgcgatgtttcggataacatgatcatgtctaaggaggagatttttggacctgtagctccccttattcggttcaaaaccgaggaggacgctatcagaattgctaatgacacaattgcaggacttgctgcttatatattcacaaacagtgtccaaagatcttggcgtgtatttgaagcacttgaatatggacttgtaggggtgaacgaaggactcatatcaacagaggtggctccattcgggggagtgaagcagtctggtcttggaagggaaggatccaagtatggtatggacgaataccttgagatcaaatacgtatgcttgggagatatgaatagacactgatttggtttgtttgaaaagctttagaaattgtaagtttttctcctccactcgtatccttct

SEQ ID NO: 76164 - protein, 547 aa, Arabidopsis thaliana
  peptide (1)..(547): Ceres Seq. ID no. 7106998
PRVRTSVRHLCSIEVWEVVMVIGAAARVAIGGCRKLISSHTSLLLVSSQCRQMSMDAQSVSEKLRSSGLLRTQGLIGGKWLDSYDNKTIKVNNPATGEIIADVACMGTKETNDAIASSYEAFTSWSRLTAGERSKVLRRWYDLLIAHKEELGQLITLEQGKPLKEAIGEVAYGASFIEYYAEEAKRVYGDIIPPNLSDRRLLVLKQPVGVVGAITPWNFPLAMITRKVGPALASGCTVVVKPSELTPLTALAAAELALQAGVPPGALNVVMGNAPEIGDALLTSPQVRKITFTGSTAVGKKLMAAAAPTVKKVSLELGGNAPSIVFDDADLDVAVKGTLAAKFRNSGQTCVCANRVLVQDGIYDKFAEAFSEAVQKLEVGDGFRDGTTQGPLINDAAVQKVETFVQDAVSKGAKIIIGGKRHSLGMTFYEPTVIRDVSDNMIMSKEEIFGPVAPLIRFKTEEDAIRIANDTIAGLAAYIFTNSVQRSWRVFEALEYGLVGVNEGLISTEVAPFGGVKQSGLGREGSKYGMDEYLEIKYVCLGDMNRH

SEQ ID NO: 76165 - protein, 528 aa, Arabidopsis thaliana; identical to SEQ ID NO: 40529
  peptide (1)..(528): Ceres Seq. ID no. 7106999

SEQ ID NO: 76166 - protein, 495 aa, Arabidopsis thaliana; identical to SEQ ID NO: 40530
  peptide (1)..(495): Ceres Seq. ID no. 7107000

SEQ ID NO: 76167 - DNA, 1085 bp, Arabidopsis thaliana
  misc_feature (1)..(1085): Ceres Seq. ID no. 7107013
  misc_feature (1)..(1085): Ortholog of  Ceres SEQ ID NO 14312777 as cited in SEQ ID NO 55573
  misc_feature (1)..(1085): Ortholog of  Ceres SEQ ID NO 13595190 as cited in SEQ ID NO 55916
  misc_feature (1)..(1085): Ortholog of  Ceres SEQ ID NO 14302004 as cited in SEQ ID NO 63437
  misc_feature (1)..(1085): Ortholog of  Ceres SEQ ID NO 13599456 as cited in SEQ ID NO 0
gtcgacccacgcgtccgcgattctcaaagtcaagcaaaaaaaacgaaacaatggatgcgttctcttccttcttcgattctcaacctggtagcagaagctggagctatgattctcttaaaaacttccgtcagatttctccagccgttcagaatcatcttaaacgggtttatttgaccttatgttgtgctcttgtggcgtctgcctttggagcttacctccatgtgctctggaatatcggcggtattcttacaacgattggatgtattggaactatgatttggctcctttcatgtcctccttatgaacaccaaaaaaggctttctcttctgtttgtgtctgctgttcttgaaggtgcttctgttggccccttgatcaaagtggcaattgatgttgacccaagcatccttatcactgcatttgttggaactgcgatagcgtttgtctgtttctcagcagcagcaatgttagcaagacgcagggagtatctctaccttggaggactgctttcatctggcttgtctatgctaatgtggctccagtttgcctcttcaatctttggtggctctgcatctatctttaagtttgagttgtactttggacttttgatctttgtgggatacatggtggtggacacacaagagattatagaaaaggcacacctcggtgacatggactatgtaaaacattcgttgacccttttcactgactttgtagctgtgtttgttcggattctcatcataatgttgaagaactcagcagataaagaagagaagaagaagaaaaggagaaactgaggggatgtaaagtaaatttaactttatggttgttatcgtgtgtggccactttgaagatattacttgttagcactctctattggtgaccagacatgtttccactaaaaaggatctgcttgtttcacttctgcacaagtaccatcttcagattgtaaatgactcgagtgttgttcttcttttcataaacttttgttctttaagagtttggttctactgattgcatcttaccaagctaagaataatgtaggaaaatgataatcctgtttaaattttctaaaatgtgtgcatttc

SEQ ID NO: 76168 - protein, 263 aa, Arabidopsis thaliana
  peptide (1)..(263): Ceres Seq. ID no. 7107014
RPTRPRFSKSSKKNETMDAFSSFFDSQPGSRSWSYDSLKNFRQISPAVQNHLKRVYLTLCCALVASAFGAYLHVLWNIGGILTTIGCIGTMIWLLSCPPYEHQKRLSLLFVSAVLEGASVGPLIKVAIDVDPSILITAFVGTAIAFVCFSAAAMLARRREYLYLGGLLSSGLSMLMWLQFASSIFGGSASIFKFELYFGLLIFVGYMVVDTQEIIEKAHLGDMDYVKHSLTLFTDFVAVFVRILIIMLKNSADKEEKKKKRRN

SEQ ID NO: 76169 - protein, 247 aa, Arabidopsis thaliana; identical to SEQ ID NO: 23441
  peptide (1)..(247): Ceres Seq. ID no. 7107015

SEQ ID NO: 76170 - protein, 173 aa, Arabidopsis thaliana; identical to SEQ ID NO: 23442
  peptide (1)..(173): Ceres Seq. ID no. 7107016

SEQ ID NO: 76171 - DNA, 521 bp, Arabidopsis thaliana
  misc_feature (1)..(521): Ceres Seq. ID no. 7107017
  misc_feature (1)..(521): Ortholog of  Ceres SEQ ID NO 12556794 as cited in SEQ ID NO 23
  misc_feature (1)..(521): Ortholog of  Ceres SEQ ID NO 13595787 as cited in SEQ ID NO 59785
ccacgcgtccgaaaaaaaaaacagaaagtaacatgagatctctcttattagccgtgtgcctggttcttgctttacactgcggtgaagcagccgtgtcttgcaacacggtgattgcggatctttacccttgcttatcctacgtgactcagggcggaccggtcccaaccctctgctgcaacggtctcacaacactcaagagtcaggctcaaacttctgtggaccgtcagggggtctgtcgttgcatcaaatctgctattggaggactcactctctctcctagaaccatccaaaatgctttggaattgccttctaaatgtggtgtcgatctcccttacaagttcagcccttccactgactgcgacagtatccagtgagacaagcagaaaatcttaaaggaagctactacaagaactataataacctaataattaataaatgagggcattggtttgctagttgctaattgatcagtgatgtattgtcattttgaatgttctaatatcagcaggcacttatctctg

SEQ ID NO: 76172 - protein, 123 aa, Arabidopsis thaliana
  peptide (1)..(123): Ceres Seq. ID no. 7107018
TRPKKKTESNMRSLLLAVCLVLALHCGEAAVSCNTVIADLYPCLSYVTQGGPVPTLCCNGLTTLKSQAQTSVDRQGVCRCIKSAIGGLTLSPRTIQNALELPSKCGVDLPYKFSPSTDCDSIQ

SEQ ID NO: 76173 - protein, 113 aa, Arabidopsis thaliana; identical to SEQ ID NO: 36177
  peptide (1)..(113): Ceres Seq. ID no. 7107019

SEQ ID NO: 76174 - DNA, 1029 bp, Arabidopsis thaliana
  misc_feature (1)..(1029): Ceres Seq. ID no. 7107033
  misc_feature (1)..(1029): Ortholog of  Ceres SEQ ID NO 13660172 as cited in SEQ ID NO 67576
ttacctccgtcgcaggtgatgaggagatacagtccgccttattacagtcctcsgaggagaggatacggtggtcgaggtagaagtcctcctcctcctcctcctcgacgtggatatggtggtggtggtggtggtggtggacgtagaggatctagccatggaagtctcttggttcgtaacattcctcttgattgcagaccagaagagcttcgtgagccctttgagaggtttggacctgtgagagatgtctatatccccagagattattactcagggcaaccgcgggggtttgcgtttgtggagtttgttgatgcatatgatgctggggaggctcaaagaagcatgaacaggagaagcttttctggaagagagataacggtggttgttgcttcagagtctaggaaaaggcctgaagagatgcgtgtgaagactaggactcgtagtagggaaccttcaggctccagggatcgttctcatggacggtctcgttcacgttcaatctctcgatcacgttctccacgtcgtccgtcagattctagaagcagataccgatcaaggtcttactctcctgcaccaagacgaagaggaggtcctcctcgtggggaagaagatgaaaattacagtcgtaggtcctactcccctggctatgaaggtgctgctgctgctgctccagatcgggacagaaatggagacaatgagattagagaaaaaccgggctatgaagcagaggatagacgtcgtggtggaagagcagtttcaaggtcgccatcaggatccaggtccaggtctgtggaggtatctccaagatgaaacttatgtgaagaagtggccgaccaaaactttgtgcaacgctttatgggttttgcatttctctagtagtgcgtctctgtgtctttaaaaactccttactctggcttgtcaaagatattttgtcttgtgatgtgatgttacttgaaatcggtttcggtttatgggtcttattataaacaaaaaaaaggtaaatctcgagagatctatgaatcgtagatactg

SEQ ID NO: 76175 - protein, 268 aa, Arabidopsis thaliana
  peptide (1)..(268): Ceres Seq. ID no. 7107034
  misc_feature (18)..(18): Xaa is any aa, unknown or other
LPPSQVMRRYSPPYYSPXRRGYGGRGRSPPPPPPRRGYGGGGGGGGRRGSSHGSLLVRNIPLDCRPEELREPFERFGPVRDVYIPRDYYSGQPRGFAFVEFVDAYDAGEAQRSMNRRSFSGREITVVVASESRKRPEEMRVKTRTRSREPSGSRDRSHGRSRSRSISRSRSPRRPSDSRSRYRSRSYSPAPRRRGGPPRGEEDENYSRRSYSPGYEGAAAAAPDRDRNGDNEIREKPGYEAEDRRRGGRAVSRSPSGSRSRSVEVSPR

SEQ ID NO: 76176 - protein, 262 aa, Arabidopsis thaliana
  peptide (1)..(262): Ceres Seq. ID no. 7107035
  misc_feature (12)..(12): Xaa is any aa, unknown or other
MRRYSPPYYSPXRRGYGGRGRSPPPPPPRRGYGGGGGGGGRRGSSHGSLLVRNIPLDCRPEELREPFERFGPVRDVYIPRDYYSGQPRGFAFVEFVDAYDAGEAQRSMNRRSFSGREITVVVASESRKRPEEMRVKTRTRSREPSGSRDRSHGRSRSRSISRSRSPRRPSDSRSRYRSRSYSPAPRRRGGPPRGEEDENYSRRSYSPGYEGAAAAAPDRDRNGDNEIREKPGYEAEDRRRGGRAVSRSPSGSRSRSVEVSPR

SEQ ID NO: 76177 - protein, 155 aa, Arabidopsis thaliana
  peptide (1)..(155): Ceres Seq. ID no. 7107036
MNRRSFSGREITVVVASESRKRPEEMRVKTRTRSREPSGSRDRSHGRSRSRSISRSRSPRRPSDSRSRYRSRSYSPAPRRRGGPPRGEEDENYSRRSYSPGYEGAAAAAPDRDRNGDNEIREKPGYEAEDRRRGGRAVSRSPSGSRSRSVEVSPR

SEQ ID NO: 76178 - DNA, 907 bp, Arabidopsis thaliana
  misc_feature (1)..(907): Ceres Seq. ID no. 7107037
  misc_feature (1)..(907): Ortholog of  Ceres SEQ ID NO 13638658 as cited in SEQ ID NO 51921
  misc_feature (1)..(907): Ortholog of  Ceres SEQ ID NO 14306522 as cited in SEQ ID NO 53365
  misc_feature (1)..(907): Ortholog of  Ceres SEQ ID NO 15175175 as cited in SEQ ID NO 0
gcaaacgctagttaccggaagacacgtcttgagtttcgcagcatctctctcctctcctctgttcatatctctctttagaaatttctcaatgaacatactcaacagattgggtttgggatcaagtgggcaaaccaatatggatccttctccgatcgctcagggaaatgacgatgacacaccggcgccggggaatcagtttgcccaattcggagctggatgtttctggggtgtcgagctggcgtttcagagagtcccaggggtgactcagaccgaggctggatacacccaagggaccgtagacaatccttcatacggagatgtttgttctggtaccacaggccattcggaggttgttagggttcaatatgatcttaacgattgcacctatgaatctctgcttgatttgttctggtctaggcatgatcccaccactttgaatcgccaggtaaatgacgtgggaacccattacagatctggaatatacttctacacacccgagcaggagaaactagcccgtgagtcacttgaacgtcaccagcaccagcaacaaatggagagaaagatcatgactgaaatcttgccagctaagaaattctacagagctgaagagcatcatcaacagtatctgtcaaaaggtgggcggtttggccaagggcaatccactgccaaaggctgcaacgacccaatccgctgttacggctaataagctgctttcctctgtccctctccgaaaacagaggacttagcatcaaaggacttgtgtgtcaaatagattgtgtaaaacttgactaagttgttcacacgctatgtaactacttctttggaatttcattcgcaatgttgtaataaaaaaaaaaaaaaagggcggccgctctagaggatccaagcttagtactacgtgtgcatg

SEQ ID NO: 76179 - protein, 233 aa, Arabidopsis thaliana
  peptide (1)..(233): Ceres Seq. ID no. 7107038
QTLVTGRHVLSFAASLSSPLFISLFRNFSMNILNRLGLGSSGQTNMDPSPIAQGNDDDTPAPGNQFAQFGAGCFWGVELAFQRVPGVTQTEAGYTQGTVDNPSYGDVCSGTTGHSEVVRVQYDLNDCTYESLLDLFWSRHDPTTLNRQVNDVGTHYRSGIYFYTPEQEKLARESLERHQHQQQMERKIMTEILPAKKFYRAEEHHQQYLSKGGRFGQGQSTAKGCNDPIRCYG

SEQ ID NO: 76180 - protein, 204 aa, Arabidopsis thaliana
  peptide (1)..(204): Ceres Seq. ID no. 7107039
MNILNRLGLGSSGQTNMDPSPIAQGNDDDTPAPGNQFAQFGAGCFWGVELAFQRVPGVTQTEAGYTQGTVDNPSYGDVCSGTTGHSEVVRVQYDLNDCTYESLLDLFWSRHDPTTLNRQVNDVGTHYRSGIYFYTPEQEKLARESLERHQHQQQMERKIMTEILPAKKFYRAEEHHQQYLSKGGRFGQGQSTAKGCNDPIRCYG

SEQ ID NO: 76181 - protein, 188 aa, Arabidopsis thaliana
  peptide (1)..(188): Ceres Seq. ID no. 7107040
MDPSPIAQGNDDDTPAPGNQFAQFGAGCFWGVELAFQRVPGVTQTEAGYTQGTVDNPSYGDVCSGTTGHSEVVRVQYDLNDCTYESLLDLFWSRHDPTTLNRQVNDVGTHYRSGIYFYTPEQEKLARESLERHQHQQQMERKIMTEILPAKKFYRAEEHHQQYLSKGGRFGQGQSTAKGCNDPIRCYG

SEQ ID NO: 76182 - DNA, 1285 bp, Arabidopsis thaliana
  misc_feature (1)..(1285): Ceres Seq. ID no. 7107041
  misc_feature (1)..(1285): Ortholog of  Ceres SEQ ID NO 13587131 as cited in SEQ ID NO 331
  misc_feature (1)..(1285): Ortholog of  Ceres SEQ ID NO 13661176 as cited in SEQ ID NO 61114
  misc_feature (1)..(1285): Ortholog of  Ceres SEQ ID NO 14308991 as cited in SEQ ID NO 0
gcggccgcgtcgacgcgcggcggagccatggttctcaagactgagctttgccgattcagtggccagaaaatttaccctggtagagggatcagatttatccgatcggactctcaggtgtttttgtttctcaactccaaatgtaagaggtatttccacaacaagttgaagccatctaagctttgctggactgctatgtaccgaaagcagcacaagaaggacgcagcacaagaggctgtgaagagaaggagacgtgcaactaagaagccttactcaaggtcgattgtcggtgctactttggaggttattcagaagaagcgagcagagaagcctgaagttcgtgatgccgctagagaagctgccctacgtgagatcaaggagagaatcaagaagaccaaggacgagaagaaggcaaagaaggtcgagtatgcatcaaagcaacagaagtcacaagtgaagggaaatatccccaagagtgctgcacccaaggctgctaagatgggtggtggtggaggcagacgttgaatggagctatagagtagcccactcttctctcttcacttatctttctttcttgttttgacattgttttgttttgtcagccattttttagttttgcaccagatctaatatattcagtttatgaaaactttttgtttggtatcaaaagtcgacgcggccgcgatgncgggncngcgttcgacgtcgacgcggccgcggtttgatcatcttgtgagaaaaataatggctgcttcagtgatgctatcttcggtgacattgaaaccagctggtttcacggtggagaanacggcggctagaggattaccgtcgctcacaagagctcgtccctccttcaaaattgtcgcccagtggcgtcaagaagatcaagaccgacaagcccttcggaattaacggcagcatggacttgagggacggcgtcgacgcctccggcagaaagggcaagggatacggtgtttacaagtacgtcgacaagtatggagctaacgtcgatggatacagtcctatttacaacgagaacgagtggtcagcgagtggtgacgtgtacaagggaggagtcaccggattggcaatttgggcggtaactctcgccggaattcttgccggaggtgctcttcttgtgtacaacacaagtgctttggctcagtaaatcttaaagttgttagcgcatgtgtaatcatgtttctataaatgtttctgtgttgttctctttctctctaatgttgtaaaactcagacatactttgaatttataagacttctagtgtttg

SEQ ID NO: 76183 - protein, 173 aa, Arabidopsis thaliana
  peptide (1)..(173): Ceres Seq. ID no. 7107042
AAASTRGGAMVLKTELCRFSGQKIYPGRGIRFIRSDSQVFLFLNSKCKRYFHNKLKPSKLCWTAMYRKQHKKDAAQEAVKRRRRATKKPYSRSIVGATLEVIQKKRAEKPEVRDAAREAALREIKERIKKTKDEKKAKKVEYASKQQKSQVKGNIPKSAAPKAAKMGGGGGRR

SEQ ID NO: 76184 - protein, 164 aa, Arabidopsis thaliana; identical to SEQ ID NO: 29606
  peptide (1)..(164): Ceres Seq. ID no. 7107043

SEQ ID NO: 76185 - protein, 109 aa, Arabidopsis thaliana; identical to SEQ ID NO: 29607
  peptide (1)..(109): Ceres Seq. ID no. 7107044

SEQ ID NO: 76186 - DNA, 1102 bp, Arabidopsis thaliana
  misc_feature (1)..(1102): Ceres Seq. ID no. 7107045
  misc_feature (1)..(1102): Ortholog of  Ceres SEQ ID NO 13638877 as cited in SEQ ID NO 55794
  misc_feature (1)..(1102): Ortholog of  Ceres SEQ ID NO 13656156 as cited in SEQ ID NO 64620
tcgacccacgcgtccgcgatcgaagcaaaagcggcgcatctgaatcccaaacgagtgacgatgacgatcgattcgcagcaaaaaacgagcaaattcagatggggggaaatggacgaagacgaagatctggatttcttgctccctcccaagcaggtgattggtccagatgagaatggtttgaagacgacgatcgagtacaaattcaacgatgaagaaaataaggttaagataacgactaggacacgtgtccgcaagctagcttctgctcgactcaacaaacgagccatggagaggaggaactggcctaagttcggagacgcagccaatgaggaagctggtagccatctcactatggtttctaccgaagagatccttctcgaacgaccccgagctcctggtaccaaagcggatgaatcaaaggcaacaggagatggcttgtctcagctgggtaaaggtggtgcagttctcatggtgtgcaggatatgccacaagaaaggagatcactggacatcaaaatgtccatacaaggatctagctgcaccaaccgatgtcttcattgacaagccacccacaggggaatcatctaccatgtctgctgcacctggaactggcaaggccgcgtatgtcccgcctagcatgagagcaggtgcagacagaagcgctgtgggttcagacatgaggaggaggaacgatgagaactctgtgcgtgtaaccaatctgtccgaggatacccgtgaacctgacttgatggagctgttccacccgtttggagctgtcacacgtgtctatgtggccattgatcagaaaactggagtgagcagaggatttggtttcgtcaatttcgtgagcagagaagacgctcaaagagcaatcaacaaattgaatggttatggttatgataacctcatcctcagggttgaatgggcaactccaagaccaacctagaaagaaatgtctgatgttgagaccttaaaactcttctcattctcgtctttcttgttatggatttttgtttatcgaccagtttgtttgttggtttggtttctgtatgaatagatgagaatttgttcaatttctctttaatacataaggcatgcttttt

SEQ ID NO: 76187 - protein, 314 aa, Arabidopsis thaliana
  peptide (1)..(314): Ceres Seq. ID no. 7107046
STHASAIEAKAAHLNPKRVTMTIDSQQKTSKFRWGEMDEDEDLDFLLPPKQVIGPDENGLKTTIEYKFNDEENKVKITTRTRVRKLASARLNKRAMERRNWPKFGDAANEEAGSHLTMVSTEEILLERPRAPGTKADESKATGDGLSQLGKGGAVLMVCRICHKKGDHWTSKCPYKDLAAPTDVFIDKPPTGESSTMSAAPGTGKAAYVPPSMRAGADRSAVGSDMRRRNDENSVRVTNLSEDTREPDLMELFHPFGAVTRVYVAIDQKTGVSRGFGFVNFVSREDAQRAINKLNGYGYDNLILRVEWATPRPT

SEQ ID NO: 76188 - protein, 294 aa, Arabidopsis thaliana; identical to SEQ ID NO: 24880
  peptide (1)..(294): Ceres Seq. ID no. 7107047

SEQ ID NO: 76189 - protein, 278 aa, Arabidopsis thaliana; identical to SEQ ID NO: 24881
  peptide (1)..(278): Ceres Seq. ID no. 7107048

SEQ ID NO: 76190 - DNA, 1201 bp, Arabidopsis thaliana
  misc_feature (1)..(1201): Ceres Seq. ID no. 7107053
  misc_feature (1)..(1201): Ortholog of  Ceres SEQ ID NO 13664220 as cited in SEQ ID NO 61151
  misc_feature (1)..(1201): Ortholog of  Ceres SEQ ID NO 13597477 as cited in SEQ ID NO 65160
cccacgcgtccgcaatcatcgggccggacaatttaaagggcacgaaacacgtccttcaagatgctaagaccattcctcttcccgtcgatggaccagagagcctagagttcgatccacaaggtgaaggcccttacgttggcgtcaccgacggtcgcattctcaaatggcgcggtgaagaactcggctgggtcgatttcgcctacacttctcctcacagagataactgttcgagtcatgaggtagtaccaagttgtgggagaccattgggacttagcttcgagaggaaaacaggagatttgtacatatgtgatggttactttggggtcatgaaggtcggaccagagggaggcctggccgagttagttgttgatgaagccgaaggtcgtaaagttatgtttgccaaccaaggggatatagacgaagaggaagatattttctacttcaatgatagcagcgatacataccatttcagggacgtattttacgtgtctttgtccgggacaaaggttggaagagtaattagatacgatatgaagaagaaagaggccaaagttattatggacaaacttcgtttaccaaatggtctagctctaagcaaaaacggttcgtttgtagtcacatgcgagagtagtacgaacacttgccatagaatatgggtcaaaggtcccaaatccggaaccaacgaggttttcgcaacgctccctggttccccggacaatatccggcgtacgccaacaggcgatttctgggtcgcattacattgcaaaaagaatttgttcacacgtgcagttttgattcacacttgggtcggaaggtttttcatgaacacgatgaagatggagactgtaattcatttcatgaacggaggaaaacctcatggaattgtcgtgaaactctctggagagacaggagagattcttgagatacttgaggacagtgaagggaagacggtgaaatatgttagtgaggcttatgagacaaaagatggaaagttatggatcggatctgtgtattggccggccgtttgggttcttgatacatcggtttatgattccatatgagttagccaaaagaccaaacgccaaaatgaaataaattatcacttagttgtgtaatttgtttattagcgggaatgcatcttgtttttgtatcttcttgtttgttgcgtgagtgaattatatatgatgtaaacttggattct

SEQ ID NO: 76191 - protein, 352 aa, Arabidopsis thaliana
  peptide (1)..(352): Ceres Seq. ID no. 7107054
HASAIIGPDNLKGTKHVLQDAKTIPLPVDGPESLEFDPQGEGPYVGVTDGRILKWRGEELGWVDFAYTSPHRDNCSSHEVVPSCGRPLGLSFERKTGDLYICDGYFGVMKVGPEGGLAELVVDEAEGRKVMFANQGDIDEEEDIFYFNDSSDTYHFRDVFYVSLSGTKVGRVIRYDMKKKEAKVIMDKLRLPNGLALSKNGSFVVTCESSTNTCHRIWVKGPKSGTNEVFATLPGSPDNIRRTPTGDFWVALHCKKNLFTRAVLIHTWVGRFFMNTMKMETVIHFMNGGKPHGIVVKLSGETGEILEILEDSEGKTVKYVSEAYETKDGKLWIGSVYWPAVWVLDTSVYDSI

SEQ ID NO: 76192 - protein, 244 aa, Arabidopsis thaliana
  peptide (1)..(244): Ceres Seq. ID no. 7107055
MKVGPEGGLAELVVDEAEGRKVMFANQGDIDEEEDIFYFNDSSDTYHFRDVFYVSLSGTKVGRVIRYDMKKKEAKVIMDKLRLPNGLALSKNGSFVVTCESSTNTCHRIWVKGPKSGTNEVFATLPGSPDNIRRTPTGDFWVALHCKKNLFTRAVLIHTWVGRFFMNTMKMETVIHFMNGGKPHGIVVKLSGETGEILEILEDSEGKTVKYVSEAYETKDGKLWIGSVYWPAVWVLDTSVYDSI

SEQ ID NO: 76193 - protein, 222 aa, Arabidopsis thaliana
  peptide (1)..(222): Ceres Seq. ID no. 7107056
MFANQGDIDEEEDIFYFNDSSDTYHFRDVFYVSLSGTKVGRVIRYDMKKKEAKVIMDKLRLPNGLALSKNGSFVVTCESSTNTCHRIWVKGPKSGTNEVFATLPGSPDNIRRTPTGDFWVALHCKKNLFTRAVLIHTWVGRFFMNTMKMETVIHFMNGGKPHGIVVKLSGETGEILEILEDSEGKTVKYVSEAYETKDGKLWIGSVYWPAVWVLDTSVYDSI

SEQ ID NO: 76194 - DNA, 2076 bp, Arabidopsis thaliana
  misc_feature (1)..(2076): Ceres Seq. ID no. 7107064
  misc_feature (1)..(2076): Ortholog of  Ceres SEQ ID NO 14307728 as cited in SEQ ID NO 54710
  misc_feature (1888)..(1888): n is a, c, t, g, unknown, or other
ggaattcgcggccgccttcactcttttaacggacacttttcactgatctattcactcactcaaatcgccgccggagctaaatcaatcaacaatgacgtcgacctacacgagattcgataccgtatttctcttttctaggttcgccggcgctaagtattcgccgttattgccgtctccgtcgtttactttatctacttccggcattcatatcagaaccaaaccgaattctcgttttcactcgattatagcatcctcctcatcttcatctgtagtcgccggaactgatagcattgagattaaatcgttgccgacgaagcctattgaaggacaaaagactggaactagcggactccggaagaaggtgaaagttttcatggaagataattatttagccaactggattcaggcattgtttaattcattgccacttgaggattataagaatgcaacgttggttttaggaggtgatggtcgttactttaacaaagaagcttcacagatcattatcaaaattgctgctgggaatggagttggacaaattttagttggaaaggaaggcattttgtcaaccccagcggtttccgctgtaatcaggaaaagaaaggcaaatggaggattcattatgagtgcaagccataatcctggtggacctgaatatgactggggtatcaagttcaattacagcagtggtcagcctgctcctgaaaccattactgacaaaatatatggaaatacactttcaatctctgagattaaggtggcagagattcctgatattgatctttctcaagttggagtgaccaaatatgggaatttcagtgtagaagttatagatcctgtttccgactatttggagctcatggaggatgttttcgactttgatctcatcagaggtcttctttcaagatcagattttgggttcatgtttgatgccatgcatgctgttactggtgcttatgcgaaaccaatttttgtcgacaatcttggagccaaaccggattcaatttccaacggagttcccctggaagattttgggcatggccatcctgatcctaatttgacatatgcaaaggatttggttgatgtcatgtatcgtgacaatggaccggatttcggagcagcaagtgatggtgatggtgacagaaatatggttttaggaaacaaattctttgtcactccttcagactctgtagctatcatcgcagccaatgcacaagaagcaattccatatttccgtgctggtcctaaggggctggcacgttctatgccgacaagtggtgctcttgatcgtgttgccgagaagttgaagcttcctttcttcgaggttcccactggatggaaattttttggaaatcttatggatgctggaaaattgtcaatctgtggagaagagagctttggcacagtttctgatcacatccgtgagaaggatggaatatgggctgtgttggcgtggctttcgatccttgctcatcgcaacaaggacacgaaaccaggggacaagttggtgtctgttgcagatgttgtgaaagagtattgggcgacatacggaaggaactttttttcaagatacgactatgaagaatgtgaatctgaaggagccaataaaatgatcgagtatcttagagaaatcttgtctaagagcaaggccggtgacgtttatggaaactatgtcctccagtttgcagatgacttctcatacacagaccctgttgatggaagtgttgcatccaagcaaggtgttcggtttgtgttcacggatggatccagaatcatatttcgtttatccggaactggctcagctggagctacagtgcgaatatacattgaacaatttgagccagacgtttcaaaacatgatgtggatgcacaaatagctcttaaaccnttaatcgatcttgcattgtctgtatcaaagctgaaggacttcacagggagggagaagcccactgtcattacatgaagagaagtgtcacatggtcctttcgataaggcaatttgggttcctgacttcagttttgtctgccatgtttatttgaaaattccagagcaatgaaatgcttatccgcggccgcg

SEQ ID NO: 76195 - protein, 623 aa, Arabidopsis thaliana
  peptide (1)..(623): Ceres Seq. ID no. 7107065
  misc_feature (599)..(599): Xaa is any aa, unknown or other
MTSTYTRFDTVFLFSRFAGAKYSPLLPSPSFTLSTSGIHIRTKPNSRFHSIIASSSSSSVVAGTDSIEIKSLPTKPIEGQKTGTSGLRKKVKVFMEDNYLANWIQALFNSLPLEDYKNATLVLGGDGRYFNKEASQIIIKIAAGNGVGQILVGKEGILSTPAVSAVIRKRKANGGFIMSASHNPGGPEYDWGIKFNYSSGQPAPETITDKIYGNTLSISEIKVAEIPDIDLSQVGVTKYGNFSVEVIDPVSDYLELMEDVFDFDLIRGLLSRSDFGFMFDAMHAVTGAYAKPIFVDNLGAKPDSISNGVPLEDFGHGHPDPNLTYAKDLVDVMYRDNGPDFGAASDGDGDRNMVLGNKFFVTPSDSVAIIAANAQEAIPYFRAGPKGLARSMPTSGALDRVAEKLKLPFFEVPTGWKFFGNLMDAGKLSICGEESFGTVSDHIREKDGIWAVLAWLSILAHRNKDTKPGDKLVSVADVVKEYWATYGRNFFSRYDYEECESEGANKMIEYLREILSKSKAGDVYGNYVLQFADDFSYTDPVDGSVASKQGVRFVFTDGSRIIFRLSGTGSAGATVRIYIEQFEPDVSKHDVDAQIALKXLIDLALSVSKLKDFTGREKPTVIT

SEQ ID NO: 76196 - protein, 529 aa, Arabidopsis thaliana
  peptide (1)..(529): Ceres Seq. ID no. 7107066
  misc_feature (505)..(505): Xaa is any aa, unknown or other
MEDNYLANWIQALFNSLPLEDYKNATLVLGGDGRYFNKEASQIIIKIAAGNGVGQILVGKEGILSTPAVSAVIRKRKANGGFIMSASHNPGGPEYDWGIKFNYSSGQPAPETITDKIYGNTLSISEIKVAEIPDIDLSQVGVTKYGNFSVEVIDPVSDYLELMEDVFDFDLIRGLLSRSDFGFMFDAMHAVTGAYAKPIFVDNLGAKPDSISNGVPLEDFGHGHPDPNLTYAKDLVDVMYRDNGPDFGAASDGDGDRNMVLGNKFFVTPSDSVAIIAANAQEAIPYFRAGPKGLARSMPTSGALDRVAEKLKLPFFEVPTGWKFFGNLMDAGKLSICGEESFGTVSDHIREKDGIWAVLAWLSILAHRNKDTKPGDKLVSVADVVKEYWATYGRNFFSRYDYEECESEGANKMIEYLREILSKSKAGDVYGNYVLQFADDFSYTDPVDGSVASKQGVRFVFTDGSRIIFRLSGTGSAGATVRIYIEQFEPDVSKHDVDAQIALKXLIDLALSVSKLKDFTGREKPTVIT

SEQ ID NO: 76197 - protein, 446 aa, Arabidopsis thaliana
  peptide (1)..(446): Ceres Seq. ID no. 7107067
  misc_feature (422)..(422): Xaa is any aa, unknown or other
MSASHNPGGPEYDWGIKFNYSSGQPAPETITDKIYGNTLSISEIKVAEIPDIDLSQVGVTKYGNFSVEVIDPVSDYLELMEDVFDFDLIRGLLSRSDFGFMFDAMHAVTGAYAKPIFVDNLGAKPDSISNGVPLEDFGHGHPDPNLTYAKDLVDVMYRDNGPDFGAASDGDGDRNMVLGNKFFVTPSDSVAIIAANAQEAIPYFRAGPKGLARSMPTSGALDRVAEKLKLPFFEVPTGWKFFGNLMDAGKLSICGEESFGTVSDHIREKDGIWAVLAWLSILAHRNKDTKPGDKLVSVADVVKEYWATYGRNFFSRYDYEECESEGANKMIEYLREILSKSKAGDVYGNYVLQFADDFSYTDPVDGSVASKQGVRFVFTDGSRIIFRLSGTGSAGATVRIYIEQFEPDVSKHDVDAQIALKXLIDLALSVSKLKDFTGREKPTVIT

SEQ ID NO: 76198 - DNA, 714 bp, Arabidopsis thaliana
  misc_feature (1)..(714): Ceres Seq. ID no. 7107071
  misc_feature (1)..(714): Ortholog of  Ceres SEQ ID NO 12473409 as cited in SEQ ID NO 104
  misc_feature (1)..(714): Ortholog of  Ceres SEQ ID NO 15170477 as cited in SEQ ID NO 52825
  misc_feature (1)..(714): Ortholog of  Ceres SEQ ID NO 13595055 as cited in SEQ ID NO 55744
  misc_feature (1)..(714): Ortholog of  Ceres SEQ ID NO 13662009 as cited in SEQ ID NO 61951
cgcggccgctttggagaaacctctcctctctctatctatagccatggctgctttcacttgtacctctcgtcctccgatttctctccgctccgagaccagaatcgtatcctcatcaccatcggcttcttctctctcttctcggcggatgttcgccgtcttaccggaatcatcaggtttgagaatccgtctttctctctctccggcttcgttgacctcgattcatcaacctagggtttctcgattacgaagagccgtcgtctgtgaagctcaggaaactactaccgatattcaagtggtcaatgactcgacatgggactttctagttcttaaagcaactgggcctgtagttgtcgacttttgggcaccatggtgtggaccttgcaagatgattgatccgcttgtaaacgatctagcacagcattacactgggaagatcaagttctacaaattaaacactgatgaatctcctaatactcccggccagtacggagttagaagcatcccaacgatcatgatctttgtcggtggcgagaagaaggatacaatcataggtgcagtgcccaaaaccacactcacatctagcctcgacaagttcttgccatgaaatatcacttgtggagtctgtaagatctcgtatctctctgtctctcgttcttgttctcattatctctgtaactcattatcactgaacatctagacctggatgcggccgcg

SEQ ID NO: 76199 - protein, 200 aa, Arabidopsis thaliana
  peptide (1)..(200): Ceres Seq. ID no. 7107072
AAALEKPLLSLSIAMAAFTCTSRPPISLRSETRIVSSSPSASSLSSRRMFAVLPESSGLRIRLSLSPASLTSIHQPRVSRLRRAVVCEAQETTTDIQVVNDSTWDFLVLKATGPVVVDFWAPWCGPCKMIDPLVNDLAQHYTGKIKFYKLNTDESPNTPGQYGVRSIPTIMIFVGGEKKDTIIGAVPKTTLTSSLDKFLP

SEQ ID NO: 76200 - protein, 186 aa, Arabidopsis thaliana
  peptide (1)..(186): Ceres Seq. ID no. 7107073
MAAFTCTSRPPISLRSETRIVSSSPSASSLSSRRMFAVLPESSGLRIRLSLSPASLTSIHQPRVSRLRRAVVCEAQETTTDIQVVNDSTWDFLVLKATGPVVVDFWAPWCGPCKMIDPLVNDLAQHYTGKIKFYKLNTDESPNTPGQYGVRSIPTIMIFVGGEKKDTIIGAVPKTTLTSSLDKFLP

SEQ ID NO: 76201 - protein, 152 aa, Arabidopsis thaliana
  peptide (1)..(152): Ceres Seq. ID no. 7107074
MFAVLPESSGLRIRLSLSPASLTSIHQPRVSRLRRAVVCEAQETTTDIQVVNDSTWDFLVLKATGPVVVDFWAPWCGPCKMIDPLVNDLAQHYTGKIKFYKLNTDESPNTPGQYGVRSIPTIMIFVGGEKKDTIIGAVPKTTLTSSLDKFLP

SEQ ID NO: 76202 - DNA, 1304 bp, Arabidopsis thaliana
  misc_feature (1)..(1304): Ceres Seq. ID no. 7107094
  misc_feature (1)..(1304): Ortholog of  Ceres SEQ ID NO 14302154 as cited in SEQ ID NO 0
atgaagataccccaccaaacccaaaaaaagagatctggaattcggatcctcgagatttaccgtctctctctcgcgctcccaatttctccgccggcgggaaaaccatgtcgcacttcggaaggtcaggtccaccggatatcagcgacacctactcacttctcgtccttaacatcaccttccgtacgactgctgatgatctctatcctctattcgcaaagtatggaaaggtcgttgatgtgtttattcccagagatcgaaggactggtgattcgcgtggttttgcgtttgttcggtataagtataaagacgaagctcacaaagcagtggaaaggcttgatggaagagttgttgatggcagagaaataactgttcagtttgcgaaatatgggccaaatgctgaaaaaatttccaaaggaagagttgtggaaccaccgccgaagtcacgaagatctagaagccgtagtcctaggcggagtcgtagtcctaggaggagccgtagcccgcctagacgtcgtagtcccagaagaagccgcagtcctcgtaggaggtcccgagatgactatagggaaaaagactaccggaagcggagcaggagcagaagctatgacaggcgtgaaaggcatgaggagaaggatagagatcatcgtcgtcgcactaggtctcgtagtgccagcccagatgaaaaacgcagagtcagaggccgttatgataatgagagccgcagtcacagtcgttccttgagtgcatctcctgctcgccgcagccctagaagttcctccccacagaaaacctctcctgctagagaagtttctcctgataagcgtagcaatgagaggtctccatctcctcgtcgcagcctcagcccaagaagccctgctttgcaaaaggcctctccttctaaggatatgtctcctgaaaggcgtagcaatgagaggtccccatctcctggtagccctgctcctctgcgcaaagttgatgctgcttctcgaagtcaatctccttatgctgcggaatgactgcagccacttgtgaaagtgatacggtgtatgatgaaaaacacgtttgcttgtactgatgatgtttcatcattaagcactggaacgtctaccctctgtagtattacttgctttccgtaggtgccctcaaactactgagtactgactgtatctttgtttcctgttatcgttctggtttagtgttcatgtgcaagaattattactgtttgaacagcctttttagtctctgttttatttgaaagtgaactctcgagagatctatgaatcgtagatactgaaaaaccccgc

SEQ ID NO: 76203 - protein, 337 aa, Arabidopsis thaliana
  peptide (1)..(337): Ceres Seq. ID no. 7107095
EDTPPNPKKEIWNSDPRDLPSLSRAPNFSAGGKTMSHFGRSGPPDISDTYSLLVLNITFRTTADDLYPLFAKYGKVVDVFIPRDRRTGDSRGFAFVRYKYKDEAHKAVERLDGRVVDGREITVQFAKYGPNAEKISKGRVVEPPPKSRRSRSRSPRRSRSPRRSRSPPRRRSPRRSRSPRRRSRDDYREKDYRKRSRSRSYDRRERHEEKDRDHRRRTRSRSASPDEKRRVRGRYDNESRSHSRSLSASPARRSPRSSSPQKTSPAREVSPDKRSNERSPSPRRSLSPRSPALQKASPSKDMSPERRSNERSPSPGSPAPLRKVDAASRSQSPYAAE

SEQ ID NO: 76204 - protein, 303 aa, Arabidopsis thaliana
  peptide (1)..(303): Ceres Seq. ID no. 7107096
MSHFGRSGPPDISDTYSLLVLNITFRTTADDLYPLFAKYGKVVDVFIPRDRRTGDSRGFAFVRYKYKDEAHKAVERLDGRVVDGREITVQFAKYGPNAEKISKGRVVEPPPKSRRSRSRSPRRSRSPRRSRSPPRRRSPRRSRSPRRRSRDDYREKDYRKRSRSRSYDRRERHEEKDRDHRRRTRSRSASPDEKRRVRGRYDNESRSHSRSLSASPARRSPRSSSPQKTSPAREVSPDKRSNERSPSPRRSLSPRSPALQKASPSKDMSPERRSNERSPSPGSPAPLRKVDAASRSQSPYAAE

SEQ ID NO: 76205 - DNA, 2262 bp, Arabidopsis thaliana
  misc_feature (1)..(2262): Ceres Seq. ID no. 7107097
  misc_feature (1)..(2262): Ortholog of  Ceres SEQ ID NO 13660025 as cited in SEQ ID NO 67389
ggcatatcaacagataaagtcttgaactttgatcaagaattttaaacggagttcttactcttctcgtcggtgaaagaaaaatcgagatgggttcaactccgttttgctattcgatcaatccatctccatcaaagcttgatttcacaaggacccatgtgtttagtcccgttgctaaacagttttacttagatttatcatcgttttccggaagatccggaggaggattatccgtgtttaggagccggaaaactttgctcggagtaaaggcggcgacggcgttagttgagaaggaggagaagagagaggcggtgacggagaagaagaaatcgagggttttagttgccggaggtggaatcggaggattggtgtttgctttagcggctaagaagaaaggattcgatgtgttagtgtttgagaaagatttgagtgctataagaggagaaggaaaatacagaggcccgattcaaatacagagcaacgctttagctgctttggaagctattgatattgaagttgctgaacaagttatggaagctgggtgtatcactggtgatcggattaacggtctcgttgatggtatctctggtacttggtatgtaaagtttgatactttcactcctgcggcgtcacggggacttcctgtgactagagtaattagtagaatgactctgcagcagattctagcacgtgcggttggagaagatgtgattagaaacgagagtaatgttgttgattttgaagattctggagataaggttactgtggtactcgagaatggtcaacgctatgaaggtgatctgcttgtgggtgcagatggcatttggtctaaggtgagaaataatttgtttggccgtagtgaagctacttattcaggctacacttgttacacggggattgcagattttataccagcggatatcgagtctgttggctaccgggttttcttgggacacaaacagtactttgtttcttcggatgttggtggtggaaaaatgcaatggtatgcatttcacgaggaaccagctggtggggctgatgctccaaatggtatgaagaaaaggttgtttgaaatatttgacggttggtgcgacaatgtactcgacttgttgcatgcgactgaggaggaagccattctgagaagagatatttatgatagaagtcctggttttacttggggtaaagggcgtgttacgctgctcggggattctatccatgcgatgcagccaaatatgggtcaaggtggatgcatggccattgaggatagttttcaactagcattggagcttgatgaagcatggaaacagagtgttgaaacgactacacctgttgatgttgtttcctctttgaaaagatatgaggaatctagaagactgagagtcgctattatccatgcaatggcgaggatggctgcaattatggcttccacttacaaagcatacttaggtgttgggcttggtcctctgtctttcttgacaaagtttagagtaccacatccaggaagagttggtggtagattcttcgttgacattgctatgccatcgatgcttgactgggtccttggaggtaacagtgaaaaactccaaggaaggccacctagttgcagactcactgacaaagccgatgaccggcttcgagagtggtttgaagatgacgatgctcttgaacgtactataaagggagaatggtatctaattccacacggcgacgattgttgcgtttcggaaacattatgtctaaccaaagatgaagatcaaccttgcatcgtcggaagcgaaccagatcaagattttcctggaatgcgcattgtgatcccttcgtctcaggtttcgaagatgcatgctcgtgtgatttacaaagacggagctttcttcttgatggatcttcgaagcgaacacggaacctatgtgaccgataacgaaggaagaagatatagagcaacaccgaattttcccgcgcggtttagatcgtccgacatcatcgagtttggttcagataagaaggcggcgtttagggtaaaagtaatcaggaaaactccgaaatcgacgaggaagaatgagagtaacaacgataaattacttcagacagcttgaaataagtaaaccgatggtgaaattaagtaattttaatcggtttggcagataatttgagtagtaattttctcaaaagaaaaaaaatctgctttcagctattccttgcatgacaatgtatatataggtctgaaacaaaatataaattatacaagacattaatcttcatttcttc

SEQ ID NO: 76206 - protein, 667 aa, Arabidopsis thaliana
  peptide (1)..(667): Ceres Seq. ID no. 7107098
MGSTPFCYSINPSPSKLDFTRTHVFSPVAKQFYLDLSSFSGRSGGGLSVFRSRKTLLGVKAATALVEKEEKREAVTEKKKSRVLVAGGGIGGLVFALAAKKKGFDVLVFEKDLSAIRGEGKYRGPIQIQSNALAALEAIDIEVAEQVMEAGCITGDRINGLVDGISGTWYVKFDTFTPAASRGLPVTRVISRMTLQQILARAVGEDVIRNESNVVDFEDSGDKVTVVLENGQRYEGDLLVGADGIWSKVRNNLFGRSEATYSGYTCYTGIADFIPADIESVGYRVFLGHKQYFVSSDVGGGKMQWYAFHEEPAGGADAPNGMKKRLFEIFDGWCDNVLDLLHATEEEAILRRDIYDRSPGFTWGKGRVTLLGDSIHAMQPNMGQGGCMAIEDSFQLALELDEAWKQSVETTTPVDVVSSLKRYEESRRLRVAIIHAMARMAAIMASTYKAYLGVGLGPLSFLTKFRVPHPGRVGGRFFVDIAMPSMLDWVLGGNSEKLQGRPPSCRLTDKADDRLREWFEDDDALERTIKGEWYLIPHGDDCCVSETLCLTKDEDQPCIVGSEPDQDFPGMRIVIPSSQVSKMHARVIYKDGAFFLMDLRSEHGTYVTDNEGRRYRATPNFPARFRSSDIIEFGSDKKAAFRVKVIRKTPKSTRKNESNNDKLLQTA

SEQ ID NO: 76207 - protein, 520 aa, Arabidopsis thaliana; identical to SEQ ID NO: 49000
  peptide (1)..(520): Ceres Seq. ID no. 7107099

SEQ ID NO: 76208 - protein, 475 aa, Arabidopsis thaliana; identical to SEQ ID NO: 49001
  peptide (1)..(475): Ceres Seq. ID no. 7107100

SEQ ID NO: 76209 - DNA, 1926 bp, Arabidopsis thaliana
  misc_feature (1)..(1926): Ceres Seq. ID no. 7107101
  misc_feature (1)..(1926): Ortholog of  Ceres SEQ ID NO 13663520 as cited in SEQ ID NO 60787
ccacgcgtccgtcatttctcatcataacaaagagagagaaaaaaactatggaattgacactgaattcctcgagttctcttatcaaacgtaaagatgccaagagttctagaaaccaagaaagttcctccaacaacatgacctttgcgaagatgaagccgccaacatatcagttccaagcaaagaactcggttaaggaaatgaagttcactcacgagaagaccttcacgccagaaggtgaaacccttgagaaatgggagaagctccacgttctctcatacccacactccaagaacgacgctagcgttccggtgttcgtcatgttaccgctcgacacagtaacaatgtcagggcatttgaacaaaccacgagccatgaacgctagtttgatggctctgaaaggagctggtgtggaaggtgtgatggtggatgcttggtggggattggtggagaaagatggacctatgaattataactgggaaggctatgccgagcttatacagatggttcaaaagcacggtctcaaactccaggtcgttatgtcattccatcaatgtggaggaaacgtaggagactcttgcagtatccccttgcctccatgggtgcttgaagagatcagcaagaaccctgatcttgtctacacagacaaatctgggagaaggaaccctgaatatatctccttgggatgtgattctgtgcctgtcctaagaggaagaacacctatccaggtctactcagatttcatgaggagcttccgtgaacgatttgaaggctacataggaggagttattgcggaaattcaagtaggaatgggaccttgtggagaattgagatacccatcataccctgaaagcaacgggacctggagattccccggaattggagagttccagtgctacgacaagtatatgaaatcgtcacttcaggcatatgctgaatcaattgggaaaactaactggggaacaagcggacctcatgatgccggcgagtacaagaacctcccagaagatactgaatttttcaggagagacggaacatggaatagcgagtatggaaagtttttcatggaatggtactccgggaagctgctagaacatggagaccaactcctatcttcagcgaaaggtatctttcaaggaagcggagcaaagctatcaggaaaggtagctggaattcactggcactacaacaccaggtcacacgcagctgagctaaccgctggatattacaacacaagaaaccatgacgggtatctgccaatagctaagatgttcaacaaacatggagttgtgctcaacttcacctgcatggagatgaaagacggggagcaacctgagcacgcgaattgctcaccagaaggtctggtcaagcaagtacagaacgcgacaaggcaggccggaaccgaactagcaggggagaacgcgctagaacgatatgactcgagcgcattcggacaagtggtagcaacaaataggtcagattctggaaatgggttaaccgcatttacttacctaagaatgaacaagcggttatttgagggtcaaaattggcagcagttagtggagtttgttaagaacatgaaggaaggtggtcatgggaggagactctcaaaagaagacacaactggaagtgacctttatgttggatttgtcaaaggcaagatcgctgagaatgtggaggaggctgctttagtgtaatttcccacataggtacatacatatagtgtggtgtttattgtattcctgtctgataaataactagagagatcaaaccagtaagagtgttaaagctatagatttgcacaattctgggtcagagtcagagcaaagagaagcaaaatcaagatgatgtacacttagatgtatcctatgagttttccttgtacatcatcttcatactcttaatctcaaatactatgcatttttctcc

SEQ ID NO: 76210 - protein, 563 aa, Arabidopsis thaliana
  peptide (1)..(563): Ceres Seq. ID no. 7107102
TRPSFLIITKREKKTMELTLNSSSSLIKRKDAKSSRNQESSSNNMTFAKMKPPTYQFQAKNSVKEMKFTHEKTFTPEGETLEKWEKLHVLSYPHSKNDASVPVFVMLPLDTVTMSGHLNKPRAMNASLMALKGAGVEGVMVDAWWGLVEKDGPMNYNWEGYAELIQMVQKHGLKLQVVMSFHQCGGNVGDSCSIPLPPWVLEEISKNPDLVYTDKSGRRNPEYISLGCDSVPVLRGRTPIQVYSDFMRSFRERFEGYIGGVIAEIQVGMGPCGELRYPSYPESNGTWRFPGIGEFQCYDKYMKSSLQAYAESIGKTNWGTSGPHDAGEYKNLPEDTEFFRRDGTWNSEYGKFFMEWYSGKLLEHGDQLLSSAKGIFQGSGAKLSGKVAGIHWHYNTRSHAAELTAGYYNTRNHDGYLPIAKMFNKHGVVLNFTCMEMKDGEQPEHANCSPEGLVKQVQNATRQAGTELAGENALERYDSSAFGQVVATNRSDSGNGLTAFTYLRMNKRLFEGQNWQQLVEFVKNMKEGGHGRRLSKEDTTGSDLYVGFVKGKIAENVEEAALV

SEQ ID NO: 76211 - protein, 548 aa, Arabidopsis thaliana; identical to SEQ ID NO: 23678
  peptide (1)..(548): Ceres Seq. ID no. 7107103

SEQ ID NO: 76212 - protein, 519 aa, Arabidopsis thaliana; identical to SEQ ID NO: 23679
  peptide (1)..(519): Ceres Seq. ID no. 7107104

SEQ ID NO: 76213 - DNA, 1233 bp, Arabidopsis thaliana
  misc_feature (1)..(1233): Ceres Seq. ID no. 7107105
  misc_feature (1)..(1233): Ortholog of  Ceres SEQ ID NO 14313268 as cited in SEQ ID NO 66794
cgacccacgcgtccgctctctggtnaagaaaccaatgcatttcggcgacagcctgggggngaaaagccatcgatcgaccgagaaagcgaaaagagagagagatgagactcgtcgtctcaagctgtctactagttgcagctccttttctctcctctctgttacgagtctcactcgccactgttgtcctcaattccatctccgcctcttttgccgatctcccagccaaatttgacggctccgtgaccaaaaacggaatctgtggagctctatacgtcgcagatcctctcgacggttgctcaccgcttctccacgccgccgcatccaactggacgcaacacagaactactaagttcgctttgataatcagaggcgaatgttcttttgaggataagctgctcaatgcccagaactcaggttttcaagctgtgattgtctatgacaacattgacaacgaagatctcatcgtcatgaaggtgaaccctcaggacattacagttgatgcagtcttcgtttcaaatgtcgccggtgagattttgagaaagtacgcgagaggccgagatggtgaatgctgccttaatccgccagacagagggagcgcttggactgtgttggccatctccttcttctctctccttcttatagtcactttcctgttgattgccttctttgcacccagacactggacccaatggcgagggaggcacaccaggaccatcaggttagatgcaaagctcgtccacacactcccctgcttcaccttcactgattctgctcaccacaaggccggggaaacatgtgctatatgtctcgaggattacagatttggagaaagcctcagacttctcccctgccaacatgcttttcacttgaattgcatcgactcttggttgacaaaatggggtacatcttgccctgtgtgcaagcatgacataagaaccgagactatgtcttctgaggtacataaacgagagagtccgagaacagatacaagtacgagtagatttgcctttgcccaatccagtcaaagccgttagagttattatcggcttagcagctgaacactcatatcagtgctcggttacctggatcaggtccaggtttgcatcttatattgaatggntaatcatggtgggataagtttaggtaaagggaccggatctgccatactgggcgggctttgctggattccagatcaaaaagatatganttgctttgcctctttttctttgcatg

SEQ ID NO: 76214 - protein, 343 aa, Arabidopsis thaliana
  peptide (1)..(343): Ceres Seq. ID no. 7107106
  misc_feature (8)..(8): Xaa is any aa, unknown or other
  misc_feature (20)..(20): Xaa is any aa, unknown or other
THASALWXRNQCISATAWGXKAIDRPRKRKEREMRLVVSSCLLVAAPFLSSLLRVSLATVVLNSISASFADLPAKFDGSVTKNGICGALYVADPLDGCSPLLHAAASNWTQHRTTKFALIIRGECSFEDKLLNAQNSGFQAVIVYDNIDNEDLIVMKVNPQDITVDAVFVSNVAGEILRKYARGRDGECCLNPPDRGSAWTVLAISFFSLLLIVTFLLIAFFAPRHWTQWRGRHTRTIRLDAKLVHTLPCFTFTDSAHHKAGETCAICLEDYRFGESLRLLPCQHAFHLNCIDSWLTKWGTSCPVCKHDIRTETMSSEVHKRESPRTDTSTSRFAFAQSSQSR

SEQ ID NO: 76215 - protein, 310 aa, Arabidopsis thaliana; identical to SEQ ID NO: 45641
  peptide (1)..(310): Ceres Seq. ID no. 7107107

SEQ ID NO: 76216 - protein, 188 aa, Arabidopsis thaliana; identical to SEQ ID NO: 45642
  peptide (1)..(188): Ceres Seq. ID no. 7107108

SEQ ID NO: 76217 - DNA, 1603 bp, Arabidopsis thaliana
  misc_feature (1)..(1603): Ceres Seq. ID no. 7107113
  misc_feature (1)..(1603): Ortholog of  Ceres SEQ ID NO 13654989 as cited in SEQ ID NO 63117
  misc_feature (1)..(1603): Ortholog of  Ceres SEQ ID NO 13584744 as cited in SEQ ID NO 69137
ggtgactgctgatccatctaaagtcctacgcccgactactaggaaatcgaaaagcaatacggctattattgcaggcgcacagtggtgcagttgttctggcccttatcattgggttttgtgtgtttggtgcttaccgcagacgtaagcgtggtgattaccagcctgctagtgatgcaacatcagggtggcttccactatctctgtatggaaactcacattctgctggctcggcgaagaaaacacaacaggaagttatgcctcgtccttccgtcaaatctttgccgtcacttctcgtttgctgagatcaaagctgccactaaaaactttgatgagtcccgggtgcttggtgttggtggtttcggcaaggtttacagaggagagattgatggcggaactacaaaggtagccatcaagagaggcaacccaatgtccgagcaaggtgtacatgagttccagactgagattgaaatgctttcaaagcttagacatcgtcatcttgtgtccttgattggatactgtgaagagaactgcgaaatgatcttagtctatgattacatggctcatggtacaatgagggagcatctctacaaaacccagaatccttctcttccatggaagcaacgtcttgagatatgcattggagcagcccgaggtttacactatctacacactggtgcaaaacacacaatcatccatagagatgtgaagacaacaaacattctattggatgagaagtgggtggccaaggtctctgattttggtctatcgaagactggtcctacactagaccacacacacgtaagcacagttgtgaaaggaagtttcggttatcttgacccagagtatttcagacggcagcaactgactgagaaatccgatgtctactcctttggcgttgttctattcgaagctctatgcgctcgtccagccttgaacccaacacttgcaaaggaacaagtgagcttagctgagtgggcaccatactgctacaagaaaggcatgctagatcaaatcgttgatccctacctcaagggcaagatcacaccagaatgcttcaaaaagtttgctgaaaccgcgatgaagtgtgttctagaccagggcattgagagaccatcaatggagatgttctgtggaacttagaatttgcgttgcagctcaggaagcgcagaagagaacgaaaggagtatcgtgactcggcataggtagagattaagtacgatgatggaaactgtaaaggaaagaacgacaagagttctgatgtgtatgaagggaatgtgacggactcgaggagcagtggaatagatatgagcatcggtggtcggagtttggccagcgaagattcagatggactcactccaagtgctgtgttttctcagatcatgaatccaaagggacgttagagaagtcttataacacggtacaacactactacctttctaaaccggctccatccaaaggagaccgttcgtttctcttttttttatattttttttcctcttaactatttattattattctctttgctgttatttatttagaattttggatttgtgtatttgatactgccacgatggagagtgtaaaaaataatgtattttttttt

SEQ ID NO: 76218 - protein, 322 aa, Arabidopsis thaliana
  peptide (1)..(322): Ceres Seq. ID no. 7107114
MQHQGGFHYLCMETHILLARRRKHNRKLCLVLPSNLCRHFSFAEIKAATKNFDESRVLGVGGFGKVYRGEIDGGTTKVAIKRGNPMSEQGVHEFQTEIEMLSKLRHRHLVSLIGYCEENCEMILVYDYMAHGTMREHLYKTQNPSLPWKQRLEICIGAARGLHYLHTGAKHTIIHRDVKTTNILLDEKWVAKVSDFGLSKTGPTLDHTHVSTVVKGSFGYLDPEYFRRQQLTEKSDVYSFGVVLFEALCARPALNPTLAKEQVSLAEWAPYCYKKGMLDQIVDPYLKGKITPECFKKFAETAMKCVLDQGIERPSMEMFCGT

SEQ ID NO: 76219 - protein, 311 aa, Arabidopsis thaliana
  peptide (1)..(311): Ceres Seq. ID no. 7107115
METHILLARRRKHNRKLCLVLPSNLCRHFSFAEIKAATKNFDESRVLGVGGFGKVYRGEIDGGTTKVAIKRGNPMSEQGVHEFQTEIEMLSKLRHRHLVSLIGYCEENCEMILVYDYMAHGTMREHLYKTQNPSLPWKQRLEICIGAARGLHYLHTGAKHTIIHRDVKTTNILLDEKWVAKVSDFGLSKTGPTLDHTHVSTVVKGSFGYLDPEYFRRQQLTEKSDVYSFGVVLFEALCARPALNPTLAKEQVSLAEWAPYCYKKGMLDQIVDPYLKGKITPECFKKFAETAMKCVLDQGIERPSMEMFCGT

SEQ ID NO: 76220 - protein, 237 aa, Arabidopsis thaliana
  peptide (1)..(237): Ceres Seq. ID no. 7107116
MSEQGVHEFQTEIEMLSKLRHRHLVSLIGYCEENCEMILVYDYMAHGTMREHLYKTQNPSLPWKQRLEICIGAARGLHYLHTGAKHTIIHRDVKTTNILLDEKWVAKVSDFGLSKTGPTLDHTHVSTVVKGSFGYLDPEYFRRQQLTEKSDVYSFGVVLFEALCARPALNPTLAKEQVSLAEWAPYCYKKGMLDQIVDPYLKGKITPECFKKFAETAMKCVLDQGIERPSMEMFCGT

SEQ ID NO: 76221 - DNA, 1575 bp, Arabidopsis thaliana
  misc_feature (1)..(1575): Ceres Seq. ID no. 7107125
  misc_feature (1)..(1575): Ortholog of  Ceres SEQ ID NO 13595870 as cited in SEQ ID NO 62101
  misc_feature (1)..(1575): Ortholog of  Ceres SEQ ID NO 13590241 as cited in SEQ ID NO 63878
  misc_feature (1)..(1575): Ortholog of  Ceres SEQ ID NO 13657939 as cited in SEQ ID NO 66349
ccacgcgtccgctttaccctttcgagaaaaaagaaaagaaaaaagaacttgttttcctcttcagcaagacacataaatcgtaatccattttctctcaactttaggaatctcaaatctccgatttggaaatccggcgacaatggtgagagatattgaagatgagattagagacgagaagaatcctcgtcctcttgatgaagatgatatcgctctcctcaagacttatgggttagggccttactctgcacctatcaagaaagtggagaaagaaattaaggatctcgccaagaagatcaacgatctatgtggtatcaaggagtctgatactggtttagctcctcccagtcaatgggatcttgtatctgataagcaaatgatgcaagaagagcaacctctgcaggttgcgagatgcacaaagattataagtccaaacactgaagacgccaaatacgtcataaatgtcaaacaaattgctaagtttgttgttggacttggcgataaagtttctcccactgatattgaggaaggcatgcgtgttggagttgatcggaataaatatcagattcagattcctctacctcccaaaatcgatcctagcgtgaccatgatgactgtcgaagagaaacctgatgtaacttacaatgatgttggtggatgcaaggagcagattgagaagatgcgagaggttgttgaactgccaatgcttcatccagagaaatttgtgaagcttggaatagatcctcccaagggtgttctctgctacggacctcctggtactggtaaaactcttctggctagagctgtggccaacagaaccgatgcttgctttatcagggttattggaagtgagcttgttcagaagtatgttggtgaaggagctaggatggttcgtgaactgtttcagatggcacggtccaagaaagcctgcattgtgttctttgacgaagttgatgccattggtggtgcaagatttgatgatggtgttggtggtgataacgaagtccaacgtactatgcttgagattgtgaatcagcttgatgggtttgacgcacgtggtaacatcaaggttcttatggcaacaaacaggcctgacacactagacccagctcttttacgttctggacgtcttgaccgtaaggttgagtttggtctacctgacctggagagcagaacacagatcttcaagattcacacaagaaccatgaactgcgaaagagacatccgtttcgaactccttgctcgcctctgcccaaactcaacgggagctgatattcgaagtgtatgcactgaagcaggaatgtacgcaatcagagctaggagaaagactgtgactgagaaagactttctagacgcagtgaacaaagtcattaaaggttaccaaaagttcagtgccactcccaagtatatggtctacaattagagagattgagacagatagaagaactccgaaataaaactccgaaacactctttgttctttgtttgtgtctcttcccttcaagctcttttgtagtacttgtttcacaacttattccagtaactcgggtttatcttcttcaatgtctactacttttgg

SEQ ID NO: 76222 - protein, 426 aa, Arabidopsis thaliana
  peptide (1)..(426): Ceres Seq. ID no. 7107126
MVRDIEDEIRDEKNPRPLDEDDIALLKTYGLGPYSAPIKKVEKEIKDLAKKINDLCGIKESDTGLAPPSQWDLVSDKQMMQEEQPLQVARCTKIISPNTEDAKYVINVKQIAKFVVGLGDKVSPTDIEEGMRVGVDRNKYQIQIPLPPKIDPSVTMMTVEEKPDVTYNDVGGCKEQIEKMREVVELPMLHPEKFVKLGIDPPKGVLCYGPPGTGKTLLARAVANRTDACFIRVIGSELVQKYVGEGARMVRELFQMARSKKACIVFFDEVDAIGGARFDDGVGGDNEVQRTMLEIVNQLDGFDARGNIKVLMATNRPDTLDPALLRSGRLDRKVEFGLPDLESRTQIFKIHTRTMNCERDIRFELLARLCPNSTGADIRSVCTEAGMYAIRARRKTVTEKDFLDAVNKVIKGYQKFSATPKYMVYN

SEQ ID NO: 76223 - protein, 348 aa, Arabidopsis thaliana
  peptide (1)..(348): Ceres Seq. ID no. 7107127
MMQEEQPLQVARCTKIISPNTEDAKYVINVKQIAKFVVGLGDKVSPTDIEEGMRVGVDRNKYQIQIPLPPKIDPSVTMMTVEEKPDVTYNDVGGCKEQIEKMREVVELPMLHPEKFVKLGIDPPKGVLCYGPPGTGKTLLARAVANRTDACFIRVIGSELVQKYVGEGARMVRELFQMARSKKACIVFFDEVDAIGGARFDDGVGGDNEVQRTMLEIVNQLDGFDARGNIKVLMATNRPDTLDPALLRSGRLDRKVEFGLPDLESRTQIFKIHTRTMNCERDIRFELLARLCPNSTGADIRSVCTEAGMYAIRARRKTVTEKDFLDAVNKVIKGYQKFSATPKYMVYN

SEQ ID NO: 76224 - protein, 347 aa, Arabidopsis thaliana
  peptide (1)..(347): Ceres Seq. ID no. 7107128
MQEEQPLQVARCTKIISPNTEDAKYVINVKQIAKFVVGLGDKVSPTDIEEGMRVGVDRNKYQIQIPLPPKIDPSVTMMTVEEKPDVTYNDVGGCKEQIEKMREVVELPMLHPEKFVKLGIDPPKGVLCYGPPGTGKTLLARAVANRTDACFIRVIGSELVQKYVGEGARMVRELFQMARSKKACIVFFDEVDAIGGARFDDGVGGDNEVQRTMLEIVNQLDGFDARGNIKVLMATNRPDTLDPALLRSGRLDRKVEFGLPDLESRTQIFKIHTRTMNCERDIRFELLARLCPNSTGADIRSVCTEAGMYAIRARRKTVTEKDFLDAVNKVIKGYQKFSATPKYMVYN

SEQ ID NO: 76225 - DNA, 1373 bp, Arabidopsis thaliana
  misc_feature (1)..(1373): Ceres Seq. ID no. 7107165
  misc_feature (1)..(1373): Ortholog of  Ceres SEQ ID NO 15177291 as cited in SEQ ID NO 52286
  misc_feature (1)..(1373): Ortholog of  Ceres SEQ ID NO 13595164 as cited in SEQ ID NO 56222
  misc_feature (1)..(1373): Ortholog of  Ceres SEQ ID NO 13591068 as cited in SEQ ID NO 69043
  misc_feature (1)..(1373): Ortholog of  Ceres SEQ ID NO 13623041 as cited in SEQ ID NO 0
ccgacccacgcgtccgctcctctaaacttttcttcactctcttgtctcttcaaacttcggttactccgttttagtcgacaacaatggcctctgtttcaaggaggttactgaggagagagacgatcccctgtttcagccacaccgtgaggaaactcttctccaccgttggatctccttcttttgctcagagactcagagatctccccaaagacttcccctctaccaacgccaaacgtgacgcctctctgcttattgggaaaacgcctcttgtgttcctcaacaaagtcactgaaggttgtgaagcgtatgttgcagccaaacaagaacatttccagccaacttgtagcattaaagacagaccagctatagccatgattgcagatgcagagaagaaaaaactaatcatccctggaaaaacaacactgatagagcctacttcaggaaacatgggaatcagtttggctttcatggctgctatgaaagggtacaggattataatgacgatgccttcgtacactagcttggagaggagagtcacgatgagatcctttggtgctgagcttgttctcactgatccagccaaaggaatgggtggaactgttaagaaagcttatgacctccttgatagtactcctgatgctttcatgtgtcaacagtttgctaatcctgcaaacactcagattcattttgatacaactggtcctgagatttgggaagatacacttggaaatgttgatatatttgtgatgggaattggcagtggaggcacagtctctggtgttggccgataccttaaatctaaaaaccccaatgtcaagatatatggagtggagcctgctgaaagcaacatactcaacggtggcaaaccaggtccacatgctatcacaggcaatggtgttggattcaaaccagaaatcttggatatggatgttatggagagtgttcttgaggttagtagtgaggatgctataaagatggctagagaattggcattgaaagaaggtctcatggttgggatatcgtcgggagctaacaccgtggcagcaattagactggcgaaaatgccagagaataaaggcaaactcattgtgacaattcatgcgagcttcggagaaagatatctgtcgtctgttctgtttgatgagctgaggaaagaagcagaggagatgaagccagtttcagtggattgatgaaggaagactgacactttaccaaaaatctcgggagcaaaagattataaaaagaaagatgtaagagtaataagtttgtgtttatattgttctattgttgatgtataatataatcacagtattgttgatgttgatcttggatattgaagatccaactaaataaagttcatcattttctgtttc

SEQ ID NO: 76226 - protein, 368 aa, Arabidopsis thaliana; identical to SEQ ID NO: 22215
  peptide (1)..(368): Ceres Seq. ID no. 7107166

SEQ ID NO: 76227 - protein, 272 aa, Arabidopsis thaliana; identical to SEQ ID NO: 22216
  peptide (1)..(272): Ceres Seq. ID no. 7107167

SEQ ID NO: 76228 - protein, 247 aa, Arabidopsis thaliana; identical to SEQ ID NO: 22217
  peptide (1)..(247): Ceres Seq. ID no. 7107168

SEQ ID NO: 76229 - DNA, 1940 bp, Arabidopsis thaliana
  misc_feature (1)..(1940): Ceres Seq. ID no. 7107228
  misc_feature (1)..(1940): Ortholog of  Ceres SEQ ID NO 13532807 as cited in SEQ ID NO 53012
  misc_feature (1)..(1940): Ortholog of  Ceres SEQ ID NO 13663060 as cited in SEQ ID NO 60964
  misc_feature (1)..(1940): Ortholog of  Ceres SEQ ID NO 13500573 as cited in SEQ ID NO 67431
  misc_feature (1)..(1940): Ortholog of  Ceres SEQ ID NO 13656501 as cited in SEQ ID NO 69206
cgtacccatggggaaaagtttctccctttgttagagattttaatttgtctggtttgaactgcattagggtttctagaaggaattatattctcatggatcctcataaaaaggttgcactggagactgagttctttacagaatacggtgaagctagccgataccaaatccaagaagttatagggaaaggaagttacggtgttgtggcatctgcaatcgacacacattcatgcgaaaaggttgccattaagaaaagcaatgatgtgtttgagcacgtctctgatgcaacgcggattctaagagagatcaagcttctcaggttgctccgccatcctgatatagtggagataaagcatgtaatgcttcctccttcacgccgtgatttcagagacatttatgttgttttcgagttgatggaatcagatcttcaccaagttatcaaggcgaacgatgatcttacacctgagcactaccagtttttcctctaccagcttcttcgtggtctgaagttcatacacacagctaatgtgtttcatcgtgatttgaagcctaaaaatattctagccaactctgattgcaagttgaagatttgcgactttgggcttgctcgagtgtcctttaatgatgcaccttcggctatattctggactgactatgttgctaaccgatggtaccgtgcgccagaactttgtggctctttcttctccaaatatactcctgccattgatatatggagcataggatgcatatttgcagaaatgctcactgggaagccattgtttcctgggaagaatgtggtgcaccaattggatattatgactgatttgcttggtactcctcctcccgaagctattgcaaggattcgtaatgaaaaggcgaggagatatctcggcaatatgaggagaaaaccgccagttccattcactcacaaatttcctcatgtagacccattggcccttcgcttactgcaccgtcttcttgcatttgatcccaaagaccgtccctcagctgaagaggcactggcagatccttacttctatggtctggcaaacgttgatcgggaaccatctactcaaccgattccgaaactcgagtttgagtttgaaagaaggaagttaacaaaagaagatgtgagagaattgatctacagagagatattagagtatcatcctcagatgctgcaagaatatcttcgaggtggagaacagactagcttcatgtacccaagtggtgttgatcgctttaagagacaatttgctcatcttgaggaaaattacggtaagggtgagaaaggctcacctcttcaacgccaacacgcttccttgcctagagagcgagtccctgctcctaagaaagagaatggatcacataatcacgatatcgagaacagatccatagcgtctttagtcacgaccctcgaaagccctccaacgtcacaacacgaggggtcagactacaggaatgggacgagccagcagggttacagcgctcgcagcttgctgaaaagtgccagcatcagtgcatctaaatgcattggcatgaaaccaagaaacaagtccgagtacggggaatcaaacaatgatacggttgatgctctgtctcaaaaggtcgcggctctccacacttgacttgtttcagagattgaggattgaaacttgttgctaacagtagacggctgattctacaagtcttgtacacatctctcagagaagacgaagaagaagtctgatcttgatagagatattgagaaacatgactcatgagctatgaacaaaacaacttaacctctaattggtcttcaatttgtccatcaagtcgagttgtattaaaaatggatggagaatataattaaaggagaattgtgttaacccctggatttatgccttacaagtatttgactttatcaggcattataaattatagttaaagtgtgtgtttccttc

SEQ ID NO: 76230 - protein, 540 aa, Arabidopsis thaliana
  peptide (1)..(540): Ceres Seq. ID no. 7107229
YPWGKVSPFVRDFNLSGLNCIRVSRRNYILMDPHKKVALETEFFTEYGEASRYQIQEVIGKGSYGVVASAIDTHSCEKVAIKKSNDVFEHVSDATRILREIKLLRLLRHPDIVEIKHVMLPPSRRDFRDIYVVFELMESDLHQVIKANDDLTPEHYQFFLYQLLRGLKFIHTANVFHRDLKPKNILANSDCKLKICDFGLARVSFNDAPSAIFWTDYVANRWYRAPELCGSFFSKYTPAIDIWSIGCIFAEMLTGKPLFPGKNVVHQLDIMTDLLGTPPPEAIARIRNEKARRYLGNMRRKPPVPFTHKFPHVDPLALRLLHRLLAFDPKDRPSAEEALADPYFYGLANVDREPSTQPIPKLEFEFERRKLTKEDVRELIYREILEYHPQMLQEYLRGGEQTSFMYPSGVDRFKRQFAHLEENYGKGEKGSPLQRQHASLPRERVPAPKKENGSHNHDIENRSIASLVTTLESPPTSQHEGSDYRNGTSQQGYSARSLLKSASISASKCIGMKPRNKSEYGESNNDTVDALSQKVAALHT

SEQ ID NO: 76231 - protein, 510 aa, Arabidopsis thaliana
  peptide (1)..(510): Ceres Seq. ID no. 7107230
MDPHKKVALETEFFTEYGEASRYQIQEVIGKGSYGVVASAIDTHSCEKVAIKKSNDVFEHVSDATRILREIKLLRLLRHPDIVEIKHVMLPPSRRDFRDIYVVFELMESDLHQVIKANDDLTPEHYQFFLYQLLRGLKFIHTANVFHRDLKPKNILANSDCKLKICDFGLARVSFNDAPSAIFWTDYVANRWYRAPELCGSFFSKYTPAIDIWSIGCIFAEMLTGKPLFPGKNVVHQLDIMTDLLGTPPPEAIARIRNEKARRYLGNMRRKPPVPFTHKFPHVDPLALRLLHRLLAFDPKDRPSAEEALADPYFYGLANVDREPSTQPIPKLEFEFERRKLTKEDVRELIYREILEYHPQMLQEYLRGGEQTSFMYPSGVDRFKRQFAHLEENYGKGEKGSPLQRQHASLPRERVPAPKKENGSHNHDIENRSIASLVTTLESPPTSQHEGSDYRNGTSQQGYSARSLLKSASISASKCIGMKPRNKSEYGESNNDTVDALSQKVAALHT

SEQ ID NO: 76232 - protein, 422 aa, Arabidopsis thaliana
  peptide (1)..(422): Ceres Seq. ID no. 7107231
MLPPSRRDFRDIYVVFELMESDLHQVIKANDDLTPEHYQFFLYQLLRGLKFIHTANVFHRDLKPKNILANSDCKLKICDFGLARVSFNDAPSAIFWTDYVANRWYRAPELCGSFFSKYTPAIDIWSIGCIFAEMLTGKPLFPGKNVVHQLDIMTDLLGTPPPEAIARIRNEKARRYLGNMRRKPPVPFTHKFPHVDPLALRLLHRLLAFDPKDRPSAEEALADPYFYGLANVDREPSTQPIPKLEFEFERRKLTKEDVRELIYREILEYHPQMLQEYLRGGEQTSFMYPSGVDRFKRQFAHLEENYGKGEKGSPLQRQHASLPRERVPAPKKENGSHNHDIENRSIASLVTTLESPPTSQHEGSDYRNGTSQQGYSARSLLKSASISASKCIGMKPRNKSEYGESNNDTVDALSQKVAALHT

SEQ ID NO: 76233 - DNA, 626 bp, Arabidopsis thaliana
  misc_feature (1)..(626): Ceres Seq. ID no. 7107240
  misc_feature (1)..(626): Ortholog of  Ceres SEQ ID NO 12610954 as cited in SEQ ID NO 55930
  misc_feature (1)..(626): Ortholog of  Ceres SEQ ID NO 12625335 as cited in SEQ ID NO 63326
  misc_feature (1)..(626): Ortholog of  Ceres SEQ ID NO 12566590 as cited in SEQ ID NO 0
ccacgcgtccgcaaaactcttctattttcctctgtcttcaaaaccacagagatctcttcatggctccaattactgtcggcgatgttgtaccagacggaactatctctttcttcgatgaaaatgatcagcttcagaccgtctccgttcactctatcgccgccggtaaaaaagtcattctctttggtgttcctggtgctttcactcccacatgcagtatgagccatgtgcctggattcattgggaaagcagaggagctgaagtcaaagggtattgatgagatcatttgctttagtgtgaatgatccatttgtgatgaaggcatggggaaaaacatatccagagaacaagcatgtgaagtttgtagcagatgggtctggagaatacacgcatcttcttggacttgagcttgaccttaaggacaagggttctggtattagttcagggagattcgctttgttgcttgataaccttaaggtgactgtagccaatgttgaatctggtggcgagttcacggtttccagcgcagaggatattctcaaggctctttaagaaactttatcgtttcgcttgttgtattgtgaatctaaactgctgtatgtgaagaagagatttctatagcttgatttc

SEQ ID NO: 76234 - protein, 181 aa, Arabidopsis thaliana
  peptide (1)..(181): Ceres Seq. ID no. 7107241
TRPQNSSIFLCLQNHRDLFMAPITVGDVVPDGTISFFDENDQLQTVSVHSIAAGKKVILFGVPGAFTPTCSMSHVPGFIGKAEELKSKGIDEIICFSVNDPFVMKAWGKTYPENKHVKFVADGSGEYTHLLGLELDLKDKGSGISSGRFALLLDNLKVTVANVESGGEFTVSSAEDILKAL

SEQ ID NO: 76235 - protein, 162 aa, Arabidopsis thaliana
  peptide (1)..(162): Ceres Seq. ID no. 7107242
MAPITVGDVVPDGTISFFDENDQLQTVSVHSIAAGKKVILFGVPGAFTPTCSMSHVPGFIGKAEELKSKGIDEIICFSVNDPFVMKAWGKTYPENKHVKFVADGSGEYTHLLGLELDLKDKGSGISSGRFALLLDNLKVTVANVESGGEFTVSSAEDILKAL

SEQ ID NO: 76236 - protein, 110 aa, Arabidopsis thaliana
  peptide (1)..(110): Ceres Seq. ID no. 7107243
MSHVPGFIGKAEELKSKGIDEIICFSVNDPFVMKAWGKTYPENKHVKFVADGSGEYTHLLGLELDLKDKGSGISSGRFALLLDNLKVTVANVESGGEFTVSSAEDILKAL

SEQ ID NO: 76237 - DNA, 1274 bp, Arabidopsis thaliana
  misc_feature (1)..(1274): Ceres Seq. ID no. 7107266
  misc_feature (1)..(1274): Ortholog of  Ceres SEQ ID NO 15168521 as cited in SEQ ID NO 58180
ccacgcgtccggagtaagggaaccaacatcagctagaatgtgtcacaactgaccagaaccctaataattacttacggcagctctcatcaccaccgacttctcaggttgcaggttcgagtcaagctagagtgaattcaatggtggaacgtgctcggatcgcaaaagtcccattgcctgaagcagctctaaattgccctagatgtgactcaaccaatactaagttctgttacttcaataactatagccttactcaacctcgccatttctgcaaaacatgtcgtcgctattggacacgtggcggttccttgaggaatgttcctgttggaggaggctttaggaggaacaagagaagcaaatccagatcgaaatctacggtcgtggtctcgactgataatactactagtacttcatcacttacttctcgcccaagttactcaaaccctagcaagtttcatagctacggtcaaatcccggagtttaattccaacttgcccatcttgcctcctctccaaagccttggagattacaattcaagcaacactggattagattttggtggaactcaaataagcaacatgataagtggtatgagttctagtggtgggatcttggatgcatggagaatacctccatcacaacaagctcagcaattccctttcttgatcaacactaccggattggtgcaatcttcaaacgcgttatatccattactagaaggcggggttagcgccacgcaaacaagaaatgtgaaggcggaagagaatgatcaggatcggggtagggatggggatggagtgaataacttatcaagaaactttttgggtaatatcaacataaactcaggcaggaacgaggaatacacatcatggggaggtaacagttcttggaccggtttcacctccaacaactcaacaggccatctctcattctaagtactcagcactagctattcttgatgattcttttgttggttggggtgtacattggtgcttgtcatgcgagttattgctgaggaagatcaaaccatgcagctatatccaaaggctaattttgaggctcaaaggaaaggtatggttataaaactatctttttgatcctttaaaagatcttcaaagtgtgagtatgtttattggttggcttctggtgatatttatgttttattagaatttggtcttatatattggctatatatagaggtgtgggtgatatgtatgaattcaagagttgatgttggaaacttttttgtgtgttcattgaataatcatcgaattctc

SEQ ID NO: 76238 - protein, 264 aa, Arabidopsis thaliana
  peptide (1)..(264): Ceres Seq. ID no. 7107267
MVERARIAKVPLPEAALNCPRCDSTNTKFCYFNNYSLTQPRHFCKTCRRYWTRGGSLRNVPVGGGFRRNKRSKSRSKSTVVVSTDNTTSTSSLTSRPSYSNPSKFHSYGQIPEFNSNLPILPPLQSLGDYNSSNTGLDFGGTQISNMISGMSSSGGILDAWRIPPSQQAQQFPFLINTTGLVQSSNALYPLLEGGVSATQTRNVKAEENDQDRGRDGDGVNNLSRNFLGNININSGRNEEYTSWGGNSSWTGFTSNNSTGHLSF

SEQ ID NO: 76239 - DNA, 1331 bp, Arabidopsis thaliana
  misc_feature (1)..(1331): Ceres Seq. ID no. 7107287
  misc_feature (1)..(1331): Ortholog of  Ceres SEQ ID NO 13654928 as cited in SEQ ID NO 62546
gagtaaaaccctttctgtctgagtaagaggaaaccaacatggagatgggttccaactcgggtccgggtcatggtccgggtcaggcagagtcgggtggttcctccactgagtcatcctctttcagtggagggctcatgtttggccagaagatctacttcgaggacggtggtggtggatccgggtcttcttcctcaggtggtcgttcaaacagacgtgtccgtggaggcgggtcgggtcagtcgggtcagataccaaggtgccaagtggaaggttgtgggatggatctaaccaatgcaaaaggttattactcgagacaccgagtttgtggagtgcactctaaaacacctaaagtcactgtggctggtatcgaacagaggttttgtcaacagtgcagcaggtttcatcagcttccggaatttgacctagagaaaaggagttgccgcaggagactcgctggtcataatgagcgacgaaggaagccacagcctgcgtctctctctgtgttagcttctcgttacgggaggatcgcaccttcgctttacgaaaatggtgatgctggaatgaatggaagctttcttgggaaccaagagataggatggccaagttcaagaacattggatacaagagtgatgaggcggccagtgtcatcaccgtcatggcagatcaatccaatgaatgtatttagtcaaggttcagttggtggaggagggacaagcttctcatctccagagattatggacactaaactagagagctacaagggaattggcgactcaaactgtgctctctctcttctgtcaaatccacatcaaccacatgacaacaacaacaacaacaacaacaacaacaacaacaacaacaacaacaacaacaacaacaatacatggcgagcttcttcaggttttggcccgatgacggttacaatggctcaaccaccacctgcacctagccagcatcagtatctgaacccgccttgggtattcaaggacaatgataatgatatgtctcctgttttgaatttaggtcagataagtagtggcacggcaatgggtgagttcgagttatctgatcaccatcatcaaagtaggagacagtacatggaagatgagaacacaagggcttatgactcttcttctcaccataccaactggtctctctgacttgtctttgcatcagagaatcttcttacaatgaacgattctgcaatatcttatctttttgcttctttgtttattctgttatctgctatcaataaaccagacaattgttgccagataatggcttttgattttgatttgttgttttatctccatgaaaatccaagttatgag

SEQ ID NO: 76240 - protein, 373 aa, Arabidopsis thaliana
  peptide (1)..(373): Ceres Seq. ID no. 7107288
MEMGSNSGPGHGPGQAESGGSSTESSSFSGGLMFGQKIYFEDGGGGSGSSSSGGRSNRRVRGGGSGQSGQIPRCQVEGCGMDLTNAKGYYSRHRVCGVHSKTPKVTVAGIEQRFCQQCSRFHQLPEFDLEKRSCRRRLAGHNERRRKPQPASLSVLASRYGRIAPSLYENGDAGMNGSFLGNQEIGWPSSRTLDTRVMRRPVSSPSWQINPMNVFSQGSVGGGGTSFSSPEIMDTKLESYKGIGDSNCALSLLSNPHQPHDNNNNNNNNNNNNNNNNNNNNTWRASSGFGPMTVTMAQPPPAPSQHQYLNPPWVFKDNDNDMSPVLNLGQISSGTAMGEFELSDHHHQSRRQYMEDENTRAYDSSSHHTNWSL

SEQ ID NO: 76241 - protein, 371 aa, Arabidopsis thaliana
  peptide (1)..(371): Ceres Seq. ID no. 7107289
MGSNSGPGHGPGQAESGGSSTESSSFSGGLMFGQKIYFEDGGGGSGSSSSGGRSNRRVRGGGSGQSGQIPRCQVEGCGMDLTNAKGYYSRHRVCGVHSKTPKVTVAGIEQRFCQQCSRFHQLPEFDLEKRSCRRRLAGHNERRRKPQPASLSVLASRYGRIAPSLYENGDAGMNGSFLGNQEIGWPSSRTLDTRVMRRPVSSPSWQINPMNVFSQGSVGGGGTSFSSPEIMDTKLESYKGIGDSNCALSLLSNPHQPHDNNNNNNNNNNNNNNNNNNNNTWRASSGFGPMTVTMAQPPPAPSQHQYLNPPWVFKDNDNDMSPVLNLGQISSGTAMGEFELSDHHHQSRRQYMEDENTRAYDSSSHHTNWSL

SEQ ID NO: 76242 - protein, 341 aa, Arabidopsis thaliana
  peptide (1)..(341): Ceres Seq. ID no. 7107290
MFGQKIYFEDGGGGSGSSSSGGRSNRRVRGGGSGQSGQIPRCQVEGCGMDLTNAKGYYSRHRVCGVHSKTPKVTVAGIEQRFCQQCSRFHQLPEFDLEKRSCRRRLAGHNERRRKPQPASLSVLASRYGRIAPSLYENGDAGMNGSFLGNQEIGWPSSRTLDTRVMRRPVSSPSWQINPMNVFSQGSVGGGGTSFSSPEIMDTKLESYKGIGDSNCALSLLSNPHQPHDNNNNNNNNNNNNNNNNNNNNTWRASSGFGPMTVTMAQPPPAPSQHQYLNPPWVFKDNDNDMSPVLNLGQISSGTAMGEFELSDHHHQSRRQYMEDENTRAYDSSSHHTNWSL

SEQ ID NO: 76243 - DNA, 901 bp, Arabidopsis thaliana
  misc_feature (1)..(901): Ceres Seq. ID no. 7107315
  misc_feature (1)..(901): Ortholog of  Ceres SEQ ID NO 14308727 as cited in SEQ ID NO 58726
  misc_feature (1)..(901): Ortholog of  Ceres SEQ ID NO 13663517 as cited in SEQ ID NO 66850
gaattcggcacgagacccaccaagaggatcaaccagtctcttccccttcagattctcctttccacagtaatggatcaacaagaccatggacagtctggagctatgaactatggcacaaacccataccaaaccaacccgatgagcaccactgctgctactgtagcaggaggtgcggcacaaccaggccagctggcgttccaccagatccatcagcagcagcagcagcaacagctggcacagcagcttcaagcattttgggagaaccaattcaaagagattgagaagactaccgatttcaagaagcacagccttccccttgcgagaatcaagaaaatcatgaaagcggatgaagatgtccgtatgatctcggctgaggcgcctgtcgtgtttgcaagggcctgtgagatgttcatcctggagctgacactcaggtcgtggaaccacactgaggagaataagaggcggacgttgcagaagaacgatattgctgctgctgtgactagaaccgatatttttgatttccttgtggatattgttccccgggaggatctccgagatgaagtcttgggaagtattccgaggggcactgtcccggaagctgctgctgctggttacccgtatggatacttgcctgcaggaactgctccaataggaaatccgggaatggttatgggtaatcccggtggtgcgtatccacctaatccttatatgggtcaaccaatgtggcaacaacaggcacctgaccaacctgaccaggaaaattagcaagaaactgtgagtcttcccgcttcttttaggcctaccttgtagtcttggggttttgtttctgttttcgaataatggtaacctttgtataacttatttcagtatcgtctcagtttggtactatgtcagttttggt

SEQ ID NO: 76244 - protein, 254 aa, Arabidopsis thaliana
  peptide (1)..(254): Ceres Seq. ID no. 7107316
EFGTRPTKRINQSLPLQILLSTVMDQQDHGQSGAMNYGTNPYQTNPMSTTAATVAGGAAQPGQLAFHQIHQQQQQQQLAQQLQAFWENQFKEIEKTTDFKKHSLPLARIKKIMKADEDVRMISAEAPVVFARACEMFILELTLRSWNHTEENKRRTLQKNDIAAAVTRTDIFDFLVDIVPREDLRDEVLGSIPRGTVPEAAAAGYPYGYLPAGTAPIGNPGMVMGNPGGAYPPNPYMGQPMWQQQAPDQPDQEN

SEQ ID NO: 76245 - protein, 231 aa, Arabidopsis thaliana
  peptide (1)..(231): Ceres Seq. ID no. 7107317
MDQQDHGQSGAMNYGTNPYQTNPMSTTAATVAGGAAQPGQLAFHQIHQQQQQQQLAQQLQAFWENQFKEIEKTTDFKKHSLPLARIKKIMKADEDVRMISAEAPVVFARACEMFILELTLRSWNHTEENKRRTLQKNDIAAAVTRTDIFDFLVDIVPREDLRDEVLGSIPRGTVPEAAAAGYPYGYLPAGTAPIGNPGMVMGNPGGAYPPNPYMGQPMWQQQAPDQPDQEN

SEQ ID NO: 76246 - protein, 220 aa, Arabidopsis thaliana
  peptide (1)..(220): Ceres Seq. ID no. 7107318
MNYGTNPYQTNPMSTTAATVAGGAAQPGQLAFHQIHQQQQQQQLAQQLQAFWENQFKEIEKTTDFKKHSLPLARIKKIMKADEDVRMISAEAPVVFARACEMFILELTLRSWNHTEENKRRTLQKNDIAAAVTRTDIFDFLVDIVPREDLRDEVLGSIPRGTVPEAAAAGYPYGYLPAGTAPIGNPGMVMGNPGGAYPPNPYMGQPMWQQQAPDQPDQEN

SEQ ID NO: 76247 - DNA, 793 bp, Arabidopsis thaliana
  misc_feature (1)..(793): Ceres Seq. ID no. 7107322
  misc_feature (1)..(793): Ortholog of  Ceres SEQ ID NO 14307801 as cited in SEQ ID NO 59512
  misc_feature (1)..(793): Ortholog of  Ceres SEQ ID NO 14309110 as cited in SEQ ID NO 0
ccgacgacgacatgttacgatccctacgcttctcgctttacgcttcttctaattctactccgatttctacaccaattgaggcccgacagttactgagttcatgcaatagattttacggtctgtcctcttcgagctcttcttcctcccttactacttcatctttgatcggaaatcttgttttctcatcaaggaatcagtctctctccgtaaaggtccaagcgttagctgctgaaaccgaacagccaaaatggtgggagaggaaagcagggccaaacatgattgacattacctccgctgagcagtttctcaacgcgttaaaagatgcgggagatagattagttatcgtagatttttacggaacttggtgtggttcttgccgtgcaatgttcccaaagctctgcaaaacggcgaaagaacaccctaacatcttgttccttaaagtaaactttgacgagaacaagtctctctgcaaaagcttaaacgtcaaggtgttaccgtatttccacttctaccgcggtgctgatggccaagtcgaatccttctcatgctctcttgccaagttccagaaactgagagaggcgatagagagacacaatgtaggaagtatcagtaacatctcttcttcagcttctgagaaagttgaagattcaagtgaataatcaatgcctggttcagattgatcacagattattttgttaaatcgcttccctgtatatatgttgactgcattttccatgtggtgcatcataattcataatttttgtacataaataaatgagtctgacttcgagtt

SEQ ID NO: 76248 - protein, 218 aa, Arabidopsis thaliana
  peptide (1)..(218): Ceres Seq. ID no. 7107323
DDDMLRSLRFSLYASSNSTPISTPIEARQLLSSCNRFYGLSSSSSSSSLTTSSLIGNLVFSSRNQSLSVKVQALAAETEQPKWWERKAGPNMIDITSAEQFLNALKDAGDRLVIVDFYGTWCGSCRAMFPKLCKTAKEHPNILFLKVNFDENKSLCKSLNVKVLPYFHFYRGADGQVESFSCSLAKFQKLREAIERHNVGSISNISSSASEKVEDSSE

SEQ ID NO: 76249 - protein, 215 aa, Arabidopsis thaliana
  peptide (1)..(215): Ceres Seq. ID no. 7107324
MLRSLRFSLYASSNSTPISTPIEARQLLSSCNRFYGLSSSSSSSSLTTSSLIGNLVFSSRNQSLSVKVQALAAETEQPKWWERKAGPNMIDITSAEQFLNALKDAGDRLVIVDFYGTWCGSCRAMFPKLCKTAKEHPNILFLKVNFDENKSLCKSLNVKVLPYFHFYRGADGQVESFSCSLAKFQKLREAIERHNVGSISNISSSASEKVEDSSE

SEQ ID NO: 76250 - protein, 127 aa, Arabidopsis thaliana
  peptide (1)..(127): Ceres Seq. ID no. 7107325
MIDITSAEQFLNALKDAGDRLVIVDFYGTWCGSCRAMFPKLCKTAKEHPNILFLKVNFDENKSLCKSLNVKVLPYFHFYRGADGQVESFSCSLAKFQKLREAIERHNVGSISNISSSASEKVEDSSE

SEQ ID NO: 76251 - DNA, 843 bp, Arabidopsis thaliana
  misc_feature (1)..(843): Ceres Seq. ID no. 7107338
  misc_feature (1)..(843): Ortholog of  Ceres SEQ ID NO 15172729 as cited in SEQ ID NO 56037
  misc_feature (1)..(843): Ortholog of  Ceres SEQ ID NO 12586351 as cited in SEQ ID NO 64028
  misc_feature (1)..(843): Ortholog of  Ceres SEQ ID NO 13584899 as cited in SEQ ID NO 64830
  misc_feature (1)..(843): Ortholog of  Ceres SEQ ID NO 13654441 as cited in SEQ ID NO 67814
  misc_feature (1)..(843): Ortholog of  Ceres SEQ ID NO 13596128 as cited in SEQ ID NO 67831
  misc_feature (1)..(843): Ortholog of  Ceres SEQ ID NO 12585194 as cited in SEQ ID NO 68878
  misc_feature (1)..(843): Ortholog of  Ceres SEQ ID NO 12589186 as cited in SEQ ID NO 0
gaattcgcggccgcaagaaacagagaaaaagagagagagacccctaatggctgagaaagaagaagtgaagcttttggggatatgggcgagcccttttagccgtcgggtcgagatggctctcaaactcaaaggcataccgtacgagtacgtggaagagatactggagaacaaaagccctttgcttcttgctcttaaccctattcacaagaaagtccctgttcttgtccacaatggtaaaaccattctcgagtctcatgtgattcttgaatacatcgatgagacttggccacaaaatccaattctccctcaagatccttatgaaagatccaaagctcgtttctttgctaaactcgtcgatgaacagattatgaacgtggggtttatatcaatggcaagagcagacgagaaaggaagagaagttttagccgagcaggtaagagaactgattatgtatctcgagaaagaacttgtcggaaaagattacttcggaggcaagactgtcggattcttggactttgtcgccggaagtttaattccgttttgtttggagagaggttgggaaggaataggattggaagtgattacagaggagaagtttccagagttcaagagatgggttaggaatttggagaaggttgagattgttaaagattgtgttccaccaagagaggaacatgtagaacacatgaactatatggcagagagagtgagatcttcttaagaaaacaaatcatgtttagttcttgatcatgcaatgtttgtatggttatgttgttgtttattttattgaatatctttgtatgttgtgtggttgagaagtgaggttttagcggccgcgaattc

SEQ ID NO: 76252 - protein, 239 aa, Arabidopsis thaliana
  peptide (1)..(239): Ceres Seq. ID no. 7107339
NSRPQETEKKRERPLMAEKEEVKLLGIWASPFSRRVEMALKLKGIPYEYVEEILENKSPLLLALNPIHKKVPVLVHNGKTILESHVILEYIDETWPQNPILPQDPYERSKARFFAKLVDEQIMNVGFISMARADEKGREVLAEQVRELIMYLEKELVGKDYFGGKTVGFLDFVAGSLIPFCLERGWEGIGLEVITEEKFPEFKRWVRNLEKVEIVKDCVPPREEHVEHMNYMAERVRSS

SEQ ID NO: 76253 - protein, 224 aa, Arabidopsis thaliana; identical to SEQ ID NO: 27461
  peptide (1)..(224): Ceres Seq. ID no. 7107340

SEQ ID NO: 76254 - protein, 202 aa, Arabidopsis thaliana; identical to SEQ ID NO: 27462
  peptide (1)..(202): Ceres Seq. ID no. 7107341

SEQ ID NO: 76255 - DNA, 2674 bp, Arabidopsis thaliana
  misc_feature (1)..(2674): Ceres Seq. ID no. 7107346
  misc_feature (1)..(2674): Ortholog of  Ceres SEQ ID NO 13600595 as cited in SEQ ID NO 629
atgagcaaatcaagtagaattaggatgaagtcgagaacacgatacttgatagcgattctacttgtaatttcgctctgttccaaggcaagcagccatgatgatgagaaaaagaagaaaggagtaacatacgacggaacttcattgatcataaatggaaaaagagagctctttttctctggttctgttcattaccctcgaagcacacctgacatgtggcccagtatcattgacaaagctagaattgggggacttaacaccatccaaacttatgttttctggaatgtccatgagcctgaacaaggcaagtatgatttcaaggggagatttgacttggtgaaattcatcaaactaatccacgagaaaggtctctatgtcactctcagactcggaccctttatccaagccgaatggaaccacggagggttgccgtactggctacgcgaggtcccagatgtttacttccgtacaaataatgaaccttttaaggaacatacagagagatatgtgaggaaaatacttgggatgatgaaggaagagaagctgttcgcttcacaaggaggtcccatcatcttgggacagatagagaatgagtacaacgcggttcagctagcctacaaggagaatggagagaagtatataaaatgggcagcaaatttggtggagtcaatgaatctgggaatcccctgggttatgtgcaaacaaaacgatgctcctggcaatctgattaatgcttgtaatggaaggcattgcggagatactttcccaggaccaaacagacacgataagccctccttatggaccgagaattggactactcagtttcgagtttttggggatcctccaacacagagaacagccgaagatattgcattctcagtcgctagatacttctctaagaacggatcccatgtcaactactacatgtaccatggcggaacaaacttcggacgcacgtctgctcatttcgttaccactcgttactatgacgatgcgccacttgacgaatttggtttggagaaagctccaaaatacggtcacctaaaacatgtgcacagagcacttagattgtgcaagaaggcacttttttggggtcaacttcgcgcccagacacttggtcccgataccgaggttaggtactacgagcagccagggacaaaagtgtgtgcggctttcttatcgaacaataacacaagagatactaatacgattaaattcaaaggtcaagattacgttttaccgtctcgttctatcagcatcttaccggattgtaaaacagtcgtttacaatactgcacagattgtagcccaacacagttggagagattttgtcaagtcagagaagacaagcaaaggtctcaaatttgagatgtttagtgaaaatattccttccttacttgacggtgattctttgattccgggggagctttattacttaactaaagacaaaacagattatgcttggtataccacaagcgtaaagattgacgaagatgactttccagaccaaaaaggtctgaagactatactgagagtagcgagtcttggtcacgcactgatcgtttacgttaacggagagtacgcagggaaagcacatggacgccatgaaatgaagagtttcgagtttgcaaaaccagtgaactttaaaaccggagataatcgcatttcaattttgggtgtactaaccggattaccagacagtggatcatacatggaacacaggtttgctggtccacgtgctatttcaatcatcggtttaaagtcaggaacgcgagatttgaccgagaacaatgaatggggacatttggccggtttggaaggtgaaaagaaagaggtgtacacagaggaaggatctaagaaggtgaaatgggagaaagatggtgaacgtaagcctcttacgtggtacaagacctactttgagacaccagagggagtgaacgcggtcgcgattaggatgaaaggaatggggaagggattgatttgggttaatggaattggcgtagggagatattggatgtctttcctttctccactgggagagccaactcaaacggagtaccatataccgagatctttcatgaagggggagaagaagaagaacatgctggtgattctcgaggaagaaccaggggtgaagttagagtctattgatttcgtgttggtgaatagagacacaatctgtagtaatgtcggggaggattacccagtatcggtgaaatcgtggaagagagaagggccaaagatagtttcgagaagcaaagatatgaggctaaaggcagtgatgaggtgtccaccggagaaacaaatggtggaagtacaatttgcaagcttcggagatccgacaggaacttgtggtaacttcacaatggggaagtgctctgcatctaagtcaaaggaggtggtcgagaaggagtgtttgggtaggaattattgttccatagtagtagcgagggagacttttggggacaaagggtgtccggagatagtgaagacattggcagtgcaagtcaagtgtgagaagaaagaaggaaaacaagatgagaagaagaagaaagaagataaagacgaagaggaagaggacgatgaagatgatgatgaagaagaagaagaagaagacaaagagaacaaagatacaaaggatatggagaacaaaaatcaagatatgtaaacaagactac

SEQ ID NO: 76256 - protein, 887 aa, Arabidopsis thaliana
  peptide (1)..(887): Ceres Seq. ID no. 7107347
MSKSSRIRMKSRTRYLIAILLVISLCSKASSHDDEKKKKGVTYDGTSLIINGKRELFFSGSVHYPRSTPDMWPSIIDKARIGGLNTIQTYVFWNVHEPEQGKYDFKGRFDLVKFIKLIHEKGLYVTLRLGPFIQAEWNHGGLPYWLREVPDVYFRTNNEPFKEHTERYVRKILGMMKEEKLFASQGGPIILGQIENEYNAVQLAYKENGEKYIKWAANLVESMNLGIPWVMCKQNDAPGNLINACNGRHCGDTFPGPNRHDKPSLWTENWTTQFRVFGDPPTQRTAEDIAFSVARYFSKNGSHVNYYMYHGGTNFGRTSAHFVTTRYYDDAPLDEFGLEKAPKYGHLKHVHRALRLCKKALFWGQLRAQTLGPDTEVRYYEQPGTKVCAAFLSNNNTRDTNTIKFKGQDYVLPSRSISILPDCKTVVYNTAQIVAQHSWRDFVKSEKTSKGLKFEMFSENIPSLLDGDSLIPGELYYLTKDKTDYAWYTTSVKIDEDDFPDQKGLKTILRVASLGHALIVYVNGEYAGKAHGRHEMKSFEFAKPVNFKTGDNRISILGVLTGLPDSGSYMEHRFAGPRAISIIGLKSGTRDLTENNEWGHLAGLEGEKKEVYTEEGSKKVKWEKDGERKPLTWYKTYFETPEGVNAVAIRMKGMGKGLIWVNGIGVGRYWMSFLSPLGEPTQTEYHIPRSFMKGEKKKNMLVILEEEPGVKLESIDFVLVNRDTICSNVGEDYPVSVKSWKREGPKIVSRSKDMRLKAVMRCPPEKQMVEVQFASFGDPTGTCGNFTMGKCSASKSKEVVEKECLGRNYCSIVVARETFGDKGCPEIVKTLAVQVKCEKKEGKQDEKKKKEDKDEEEEDDEDDDEEEEEEDKENKDTKDMENKNQDM

SEQ ID NO: 76257 - protein, 879 aa, Arabidopsis thaliana
  peptide (1)..(879): Ceres Seq. ID no. 7107348
MKSRTRYLIAILLVISLCSKASSHDDEKKKKGVTYDGTSLIINGKRELFFSGSVHYPRSTPDMWPSIIDKARIGGLNTIQTYVFWNVHEPEQGKYDFKGRFDLVKFIKLIHEKGLYVTLRLGPFIQAEWNHGGLPYWLREVPDVYFRTNNEPFKEHTERYVRKILGMMKEEKLFASQGGPIILGQIENEYNAVQLAYKENGEKYIKWAANLVESMNLGIPWVMCKQNDAPGNLINACNGRHCGDTFPGPNRHDKPSLWTENWTTQFRVFGDPPTQRTAEDIAFSVARYFSKNGSHVNYYMYHGGTNFGRTSAHFVTTRYYDDAPLDEFGLEKAPKYGHLKHVHRALRLCKKALFWGQLRAQTLGPDTEVRYYEQPGTKVCAAFLSNNNTRDTNTIKFKGQDYVLPSRSISILPDCKTVVYNTAQIVAQHSWRDFVKSEKTSKGLKFEMFSENIPSLLDGDSLIPGELYYLTKDKTDYAWYTTSVKIDEDDFPDQKGLKTILRVASLGHALIVYVNGEYAGKAHGRHEMKSFEFAKPVNFKTGDNRISILGVLTGLPDSGSYMEHRFAGPRAISIIGLKSGTRDLTENNEWGHLAGLEGEKKEVYTEEGSKKVKWEKDGERKPLTWYKTYFETPEGVNAVAIRMKGMGKGLIWVNGIGVGRYWMSFLSPLGEPTQTEYHIPRSFMKGEKKKNMLVILEEEPGVKLESIDFVLVNRDTICSNVGEDYPVSVKSWKREGPKIVSRSKDMRLKAVMRCPPEKQMVEVQFASFGDPTGTCGNFTMGKCSASKSKEVVEKECLGRNYCSIVVARETFGDKGCPEIVKTLAVQVKCEKKEGKQDEKKKKEDKDEEEEDDEDDDEEEEEEDKENKDTKDMENKNQDM

SEQ ID NO: 76258 - protein, 817 aa, Arabidopsis thaliana
  peptide (1)..(817): Ceres Seq. ID no. 7107349
MWPSIIDKARIGGLNTIQTYVFWNVHEPEQGKYDFKGRFDLVKFIKLIHEKGLYVTLRLGPFIQAEWNHGGLPYWLREVPDVYFRTNNEPFKEHTERYVRKILGMMKEEKLFASQGGPIILGQIENEYNAVQLAYKENGEKYIKWAANLVESMNLGIPWVMCKQNDAPGNLINACNGRHCGDTFPGPNRHDKPSLWTENWTTQFRVFGDPPTQRTAEDIAFSVARYFSKNGSHVNYYMYHGGTNFGRTSAHFVTTRYYDDAPLDEFGLEKAPKYGHLKHVHRALRLCKKALFWGQLRAQTLGPDTEVRYYEQPGTKVCAAFLSNNNTRDTNTIKFKGQDYVLPSRSISILPDCKTVVYNTAQIVAQHSWRDFVKSEKTSKGLKFEMFSENIPSLLDGDSLIPGELYYLTKDKTDYAWYTTSVKIDEDDFPDQKGLKTILRVASLGHALIVYVNGEYAGKAHGRHEMKSFEFAKPVNFKTGDNRISILGVLTGLPDSGSYMEHRFAGPRAISIIGLKSGTRDLTENNEWGHLAGLEGEKKEVYTEEGSKKVKWEKDGERKPLTWYKTYFETPEGVNAVAIRMKGMGKGLIWVNGIGVGRYWMSFLSPLGEPTQTEYHIPRSFMKGEKKKNMLVILEEEPGVKLESIDFVLVNRDTICSNVGEDYPVSVKSWKREGPKIVSRSKDMRLKAVMRCPPEKQMVEVQFASFGDPTGTCGNFTMGKCSASKSKEVVEKECLGRNYCSIVVARETFGDKGCPEIVKTLAVQVKCEKKEGKQDEKKKKEDKDEEEEDDEDDDEEEEEEDKENKDTKDMENKNQDM

SEQ ID NO: 76259 - DNA, 2658 bp, Arabidopsis thaliana
  misc_feature (1)..(2658): Ceres Seq. ID no. 7107362
  misc_feature (1)..(2658): Ortholog of  Ceres SEQ ID NO 13594958 as cited in SEQ ID NO 55996
  misc_feature (1)..(2658): Ortholog of  Ceres SEQ ID NO 15180204 as cited in SEQ ID NO 0
gccgccagtgtgagtaatttaggccagatccaattcggaccaaatcagaacccaaaattcgactcacttgtctcactcgactcgaatctccattctttgtctgaaagtttcttcctttttgtttaaccaatggcgacctttatcaatctggaggattccccaatgtttcagaaacaggtttgttccttggaggggacagctgacgagcttaaagatcgttgtcagaagctatacaaaggtgttaagaagtttatggggactttgggagaggcatctaaaggagaaagtgcttttgcagcttgtctggaagaatttgggggtggacctgatgatcctatcagtctttcaattggagggcccgttatatccaaattcataaatgcacttcgagagcttgcctcttataaggagtttctttgctcacaggtggagcatgtgctacttgagaggttgatgaactttattagtgttgatctacaagaagctaaggagtctcgccatcgatttgataaagctgctcattcgtatgatcagtcgcgcgaaaagtttgtgtctttaaagaagaatacaagaggagaaattgtggcagagttggaagaggatctggagaattcaaagtcaacatttgagaagagccgtttcaatctagtgaattcactgatgactattgaagcgaaaaagaagtatgagtttttagaatctattagcgcaattatggatgcccatctgagatatttcaaacttggatatgacttgttgaatcaactggaaccatttatccatcagatattaacatatgctcagcaatcaaaagaacagtctaagattgaacaagatcgactagcaagacgcattcaagaattcaggacccagtctgaattagacagccaacagctggtcgctaatgcagagtcgtctggtgctaacgggaaccgtgttggtgggaatatcccttacaaaaataccgaaacaagtttaacagcagacaaggaagtaattaaacaggggtatctattaaagcgttcgtcaagtttgagaactgattggaaaagaaagttttttgtccttgatagtcatggctccatgtactattacagaactaatggtaataaatcaatgggatctcatcatcactatagtggatcatctgaccataatactggagtttttggtcgatttcgggcaagacataatcgatcaggttcgctcactgagggcagcttaggctataatactattgatcttcgcacttctttgataaaactagacgcagaagacatggatcttcgtctctgtttcagaattatttctcctcaaaaaacttacacacttcaggctgaaaatggagcagataggatggactgggtaaataagatcacaaaagctatagggacgcttctcaattctcattttctgcaacagtcacctgtgcgatacttggataaagacaactccagttctgctcctgctaatgctgtcgtctccggggatcaaattcgacataatgattcaagacaaaatatcggggatgatgtctcaacaatactcagaggacttccgggaaataatgcatgtgcagagtgcaatgctcctgagcccgattgggcatcgttaaatcttggagttttgttgtgcattcaatgctctggtgttcacaggaatctcggggttcatatatccaaggtgaggtccctctcattagatgtgaaagtgtgggagccaacgatcttggacttatttagaaatttgggtaatgtatactgtaattcactgtgggagggactacttcaccttgacgatgactgcgaagacggatcagcattgtcgcatgcttcagtttcaaaaccatgtccagaagattcctttagtgtgaaggagaaatacattctaggaaagtacctggagaaagcattagtcatcaaggatgaaagtgaagcaaacctttctgctgcgagtagaatatgggaagctgttcaaagcagaaacatacgagaaatctatcgacttatagttactactggggatgtaaatatcatcaataccaagtttgatgatataactgatatcgatgcatatcaccatattgatgcagcagagaaagcagtaaagaaaagacatgatccaactgtatgtcagagaattaaagaatccaacgaaccaagaagctgtcttcaaggatgctccttgctccatgtggcttgtcacattggtgactctgtcttgcttgaattgttgttgcagtttggtgctgacctaaacataagagattatcacggaaggactccgttgcaccattgcatatcatcagggaaccacaaatttgcaaagattctactgcgaagaggagcacgtccgtcgatagaggacgatggagggctaagcgttctagaaagagcgatggaaatgggagcgataactgatgaagagctctttcttctcttagccgagtgcgcataaaccttcactgcacaccgacatgcacagcttctttagaracacctttggraagaccctaaaacgcaaaacaaggaggtggtacaagctactagattccgtaaaggcatgatgaaacagccttttgagtcgttgtttgtcaatgtacaagggatatgattttactgacctacagtttatctctactcacttttcaagtttcgg

SEQ ID NO: 76260 - protein, 775 aa, Arabidopsis thaliana; identical to SEQ ID NO: 45091
  peptide (1)..(775): Ceres Seq. ID no. 7107363

SEQ ID NO: 76261 - protein, 764 aa, Arabidopsis thaliana; identical to SEQ ID NO: 45092
  peptide (1)..(764): Ceres Seq. ID no. 7107364

SEQ ID NO: 76262 - protein, 734 aa, Arabidopsis thaliana; identical to SEQ ID NO: 45093
  peptide (1)..(734): Ceres Seq. ID no. 7107365

SEQ ID NO: 76263 - DNA, 1122 bp, Arabidopsis thaliana
  misc_feature (1)..(1122): Ceres Seq. ID no. 7107396
  misc_feature (1)..(1122): Ortholog of  Ceres SEQ ID NO 12484482 as cited in SEQ ID NO 53324
ccacgcgtccgcacaaacagaggcagagatcttaagagttaaagactaatcccaacaatggcgtctctcaaagtcccaagcaatgttcctcttcccgaagatgacgccgagcaactccacaaggctttttcaggatggggtaccaacgagaagctgatcatatcaatactagctcacaggaacgcagcacaacgcagcttgatccgcagcgtttatgcagctacctacaatgaggatcttctcaaagcattagacaaagagctttctagcgactttgagagagctgtgatgttgtggactcttgatccaccagagagagatgcttatttggctaaagaatccaccaagatgttcaccaagaacaattgggttcttgttgaaatcgcttgcacaaggcctgctcttgagcttatcaaggtcaagcaagcttaccaagctcgatacaagaaatcaatcgaggaagatgtcgcgcaacacacatctggtgaccttcgtaagctcttgcttcctcttgtgagcactttcaggtatgaaggagatgatgtgaacatgatgcttgcaagatctgaagctaagatacttcacgagaaggtctcagagaaatcttacagtgacgatgacttcatcagaatcttgacaacaagaagcaaagcacagctcggtgcaacactcaaccactacaacaacgagtatggaaacgccattaacaagaacttgaaggaagagtcggacgacaatgactacatgaaactactaagagctgtaatcacatgtttgacataccctgagaagcattttgagaaggttcttcgtctatcaatcaacaaaatgggaacagacgaatggggactaacccgagtcgtgactacacgaactgaagttgacatggaacgcatcaaagaggaatatcagcgaagaaacagcattcctttggaccgtgctatcgccaaagacacttctggtgactatgaggacatgcttgttgctcttctcggacatggcgatgcttgaaactgtttcaactttcgagttcctcctttctcttactgcatggtttgttttaaataaaagagttgtgaaactggttctgcaactatttatcaatgatcgtttgagtttgtt

SEQ ID NO: 76264 - protein, 317 aa, Arabidopsis thaliana; identical to SEQ ID NO: 26096
  peptide (1)..(317): Ceres Seq. ID no. 7107397

SEQ ID NO: 76265 - protein, 240 aa, Arabidopsis thaliana; identical to SEQ ID NO: 26097
  peptide (1)..(240): Ceres Seq. ID no. 7107398

SEQ ID NO: 76266 - protein, 220 aa, Arabidopsis thaliana; identical to SEQ ID NO: 26098
  peptide (1)..(220): Ceres Seq. ID no. 7107399

SEQ ID NO: 76267 - DNA, 2564 bp, Arabidopsis thaliana
  misc_feature (1)..(2564): Ceres Seq. ID no. 7107400
  misc_feature (1)..(2564): Ortholog of  Ceres SEQ ID NO 13600310 as cited in SEQ ID NO 5086
gacgaagatggaaaagatctgtgtcgcagtcagggtaagaccgccggcgccggaaaacggagcttcactctggaaagtcgaagataatcggatctctcttcataaatcactcgacactccaatcacaaccgcttctcacgcttttgatcatgtgttcgacgaaagttctacgaatgctagtgtctacgagcttcttactaaggatatcatacatgccgctgttgagggttttaatggtactgcatttgcttatgggcaaactagtagtgggaagacgtttacgatgacgggctctgaaactgatcctggaattattcgaagatctgttcgagatgtgtttgaaagaatacatatgatatctgatcgtgagtttctcatccgggtttcgtacatggaaatttacaacgaagaaattaatgatcttttagctgttgagaaccagagactgcaaattcatgagcatttggagcgtggagtgtttgttgctggtcttaaggaagaaattgttagtgatgctgaacagattctaaagcttatagattctggagaagttaataggcactttggcgagacaaacatgaatgttcatagtagcaggtctcacaccatattcagaatggtgattgagagcaggggaaaagataatagttcttcagatgctattcgtgtctcagtcttgaatttggtcgatttagctggatctgagcgaattgctaaaactggtgctggtggtgtacgcttgcaagaagggaagtacattaataagagcttaatgattcttggtaatgtcatcaataaattaagtgacagtacaaagctaagggcacatattccgtaccgagatagtaagctgactcgaattcttcagcctgcacttggtggtaatgcaaagacctgcattatatgcactatcgcaccagaagagcatcatattgaggaatcaaaaggaactctccaatttgcaagcagagcaaagcgcatcaccaactgtgctcaagtgaatgagatcttgactgatgccgctttattgaagcgccaaaagttggagatagaagagctacgcatgaagcttcagggatctcatgcggaagtgttggaacaagagatcttaaatttaagcaatcagatgctgaagtatgagttggaatgtgaaaggctaaaaacacaactggaagaagagaaaaggaagcagaaggagcaggaaaattgcatcaaggagcaacagatgaaaattgagaaccttaacaattttgtcactaattctgacttcaagaggaaccagtcagaggactttatcatttcaagaaagactccagatgggctatgcaatgtcaatgacactagcgatgttcctggaaccccttgctttaaatcagcttcccgttcctttgtggttgctcggtcaaataattattcaggactatctgattttagtccgatggttcattccctgggggacgtggccgatgaagatacttggatgaaactaaacaagggttttgttgcagaccttgatcaaatccaatttacacctgctgttaaatgtcaacccactcctttaagtattgcaaccacggagtgcccgcgtgaaaatcactcagaggtggaagatctcaaaagtcggattcagttgctgaccaatgagaatgacagtcttcaggtaaaatttaatgaacaagtactcctgagcaacaatctgatgcaagagatgtctgagctcaaacaagaaacgcttactgtgaaagaaattccgaataggttatctgagtcagttgctaattgcaaagatgtctacaaggatgtcatagtcactatgaagagcttaatcactgacaaggaatctccaacggcaaacctgctcctgggtacaactgaaatcacaacgagcctactggcaactctagaaacacaattctcaatgataatggatggtcagaaaacgggtagtagcatagatcatcctttatctgaccattgggaaacacttcgtgtgaatctgaagaacacaacgacgttgttgctgtcagacgcacaagcaaaagatgaatttttgaactcccacaacaagggacaagaaacagctgctttggaggagaagaaactgaagtctgagctcatcatcatcaaggaaagatacaacgagctcgagaaagagttgtgtttggataaacagcttctagaagcttcaagagaaagtcatgagaagctgataaaagaggtacagttcctgaaggaagaaagagattctttagatagaaaaatctctcaatcaactcagagattgagagtgattgcaagtgataaagagaatgctttgaaagatcttaatgtggaagtgaagaggaggaaagatatggaggaagagattaagcacatcagcattgctttcgctaccaggcacaaatcttttgtgtcttttcacagtgaaatcaagtccaaaatgcagaaactaaccactcaaaactcaaaagctccttagcaaaaacagttaagtttgttgaatttgtatgtttaatttatcaccggattcgctaatgttgattaagaaagtgaagaacctattt

SEQ ID NO: 76268 - protein, 825 aa, Arabidopsis thaliana
  peptide (1)..(825): Ceres Seq. ID no. 7107401
TKMEKICVAVRVRPPAPENGASLWKVEDNRISLHKSLDTPITTASHAFDHVFDESSTNASVYELLTKDIIHAAVEGFNGTAFAYGQTSSGKTFTMTGSETDPGIIRRSVRDVFERIHMISDREFLIRVSYMEIYNEEINDLLAVENQRLQIHEHLERGVFVAGLKEEIVSDAEQILKLIDSGEVNRHFGETNMNVHSSRSHTIFRMVIESRGKDNSSSDAIRVSVLNLVDLAGSERIAKTGAGGVRLQEGKYINKSLMILGNVINKLSDSTKLRAHIPYRDSKLTRILQPALGGNAKTCIICTIAPEEHHIEESKGTLQFASRAKRITNCAQVNEILTDAALLKRQKLEIEELRMKLQGSHAEVLEQEILNLSNQMLKYELECERLKTQLEEEKRKQKEQENCIKEQQMKIENLNNFVTNSDFKRNQSEDFIISRKTPDGLCNVNDTSDVPGTPCFKSASRSFVVARSNNYSGLSDFSPMVHSLGDVADEDTWMKLNKGFVADLDQIQFTPAVKCQPTPLSIATTECPRENHSEVEDLKSRIQLLTNENDSLQVKFNEQVLLSNNLMQEMSELKQETLTVKEIPNRLSESVANCKDVYKDVIVTMKSLITDKESPTANLLLGTTEITTSLLATLETQFSMIMDGQKTGSSIDHPLSDHWETLRVNLKNTTTLLLSDAQAKDEFLNSHNKGQETAALEEKKLKSELIIIKERYNELEKELCLDKQLLEASRESHEKLIKEVQFLKEERDSLDRKISQSTQRLRVIASDKENALKDLNVEVKRRKDMEEEIKHISIAFATRHKSFVSFHSEIKSKMQKLTTQNSKAP

SEQ ID NO: 76269 - protein, 823 aa, Arabidopsis thaliana; identical to SEQ ID NO: 44810
  peptide (1)..(823): Ceres Seq. ID no. 7107402

SEQ ID NO: 76270 - protein, 731 aa, Arabidopsis thaliana; identical to SEQ ID NO: 44811
  peptide (1)..(731): Ceres Seq. ID no. 7107403

SEQ ID NO: 76271 - DNA, 1450 bp, Arabidopsis thaliana
  misc_feature (1)..(1450): Ceres Seq. ID no. 7107412
  misc_feature (1)..(1450): Ortholog of  Ceres SEQ ID NO 14311721 as cited in SEQ ID NO 51363
gaattcggcacgagctgacgtcagcatacctgctaccacttccagagttcaatcgatcttcgcctcgttgaaacgttttccctcttcgattatcaacagtgtctccactcgtatcatcaccgcctccaactaattttgccatctctctcgttgttccaatttgattctactagtgagctccgatttaatttagggttttgaaagatgtcagctttgaaaaattacggcttgatctccattgattctgccctccattttcctcgatcaaatcaattgcagagctataagaggaatgcaaaatgggtctctccaatagcagctgttgtacctaacttccatcttcctatgcgcagtctcgaggataaaaacaggacaaacacagacgacataaggtcccttagagtgatcacagccattaagacaccgtatctacctgatggaagattcgacctccaagcatacgatgacttagtcaacacgcagatagaaaacggtgctgaaggtgtgattgttggtggtacaactggtgaaggccaattgatgagctgggatgagcacataatgcttatcggccatactgtaaattgttttgggggaaggatcaaagtcattggaaacactggaagtaactcgactagggaagctattcatgccactgagcaaggattcgccatgggaatgcacggggcactgcacattaacccttactatggaaaaacatccattgaaggcatgaatgcgcattttcaaaccgttcttcatatgggaccgactattatatacaacgtgccaggtcgaacgtgccaggatatacctccccaggttatctttaaactctctcagaaccctaatatggctggggttaaggaatgcgttggtaataaccgagttgaagagtatactgagaagggaattgtcgtttggagtggaaatgatgatcagtgccatgattctagatgggatcacggtgccactggagtgatatcggttactagcaatttagttccgggtttgatgaggaagttgatgtttgaaggtagaaactcagcgttgaacgaaaagcttcttcctttaatggattggctattccaagaaccgaatcccattggtgtaaacactgctttggctcagttaggagttgcgaggccggtttttcggttaccttatgtgccattgcctctgtccaaaaggattgagttcgttaaactggtgaaggaaatcggaagggagcattttgtaggagacagagatgttcaggtacttgatgatgatgacttcatcttaatcggtcgatattagagtctcttccctgaagattggttgtgtttatactttcttcgttcagttgttagttatttagctgatgagaaactcacagatggatcaagacttctacttgttgtaatgtttggtctgttacttttggtgatgaatctaatggcttttgctt

SEQ ID NO: 76272 - protein, 364 aa, Arabidopsis thaliana
  peptide (1)..(364): Ceres Seq. ID no. 7107413
MSALKNYGLISIDSALHFPRSNQLQSYKRNAKWVSPIAAVVPNFHLPMRSLEDKNRTNTDDIRSLRVITAIKTPYLPDGRFDLQAYDDLVNTQIENGAEGVIVGGTTGEGQLMSWDEHIMLIGHTVNCFGGRIKVIGNTGSNSTREAIHATEQGFAMGMHGALHINPYYGKTSIEGMNAHFQTVLHMGPTIIYNVPGRTCQDIPPQVIFKLSQNPNMAGVKECVGNNRVEEYTEKGIVVWSGNDDQCHDSRWDHGATGVISVTSNLVPGLMRKLMFEGRNSALNEKLLPLMDWLFQEPNPIGVNTALAQLGVARPVFRLPYVPLPLSKRIEFVKLVKEIGREHFVGDRDVQVLDDDDFILIGRY

SEQ ID NO: 76273 - protein, 317 aa, Arabidopsis thaliana
  peptide (1)..(317): Ceres Seq. ID no. 7107414
MRSLEDKNRTNTDDIRSLRVITAIKTPYLPDGRFDLQAYDDLVNTQIENGAEGVIVGGTTGEGQLMSWDEHIMLIGHTVNCFGGRIKVIGNTGSNSTREAIHATEQGFAMGMHGALHINPYYGKTSIEGMNAHFQTVLHMGPTIIYNVPGRTCQDIPPQVIFKLSQNPNMAGVKECVGNNRVEEYTEKGIVVWSGNDDQCHDSRWDHGATGVISVTSNLVPGLMRKLMFEGRNSALNEKLLPLMDWLFQEPNPIGVNTALAQLGVARPVFRLPYVPLPLSKRIEFVKLVKEIGREHFVGDRDVQVLDDDDFILIGRY

SEQ ID NO: 76274 - protein, 252 aa, Arabidopsis thaliana
  peptide (1)..(252): Ceres Seq. ID no. 7107415
MSWDEHIMLIGHTVNCFGGRIKVIGNTGSNSTREAIHATEQGFAMGMHGALHINPYYGKTSIEGMNAHFQTVLHMGPTIIYNVPGRTCQDIPPQVIFKLSQNPNMAGVKECVGNNRVEEYTEKGIVVWSGNDDQCHDSRWDHGATGVISVTSNLVPGLMRKLMFEGRNSALNEKLLPLMDWLFQEPNPIGVNTALAQLGVARPVFRLPYVPLPLSKRIEFVKLVKEIGREHFVGDRDVQVLDDDDFILIGRY

SEQ ID NO: 76275 - DNA, 1721 bp, Arabidopsis thaliana
  misc_feature (1)..(1721): Ceres Seq. ID no. 7107459
  misc_feature (1)..(1721): Ortholog of  Ceres SEQ ID NO 13594209 as cited in SEQ ID NO 59089
  misc_feature (1)..(1721): Ortholog of  Ceres SEQ ID NO 15169599 as cited in SEQ ID NO 66096
  misc_feature (1)..(1721): Ortholog of  Ceres SEQ ID NO 13502874 as cited in SEQ ID NO 66298
  misc_feature (1)..(1721): Ortholog of  Ceres SEQ ID NO 14308011 as cited in SEQ ID NO 69234
cagtgtgagtaatttagaaacaatatcattgcggatacacaaactataatggacctcctcttgctggagaagtctctaatcgccgtcttcgtggcggtgattctcgccacggtgatttcaaagctccgcggcaagaaattgaagctacctccaggtcctataccaattccgatcttcggaaactggcttcaagtaggagatgacctcaaccaccgtaatctcgtcgattacgctaagaaattcggcgatctcttcctcctccgtatgggtcagcgtaacctagtcgtcgtctcttcaccggatctaaccaaggaagtgctccacacacaaggcgttgagtttggatctagaacgagaaacgtcgtgttcgacattttcaccgggaaaggtcaagatatggtgttcactgtttacggcgagcattggaggaagatgagaagaatcatgacggttcctttcttcaccaacaaagttgttcaacagaatcgtgaaggttgggagtttgaagcagctagtgttgttgaagatgttaagaagaatccagattctgctacgaaaggaatcgtgttgaggaaacgtttgcaattgatgatgtataacaatatgttccgtatcatgttcgatagaagatttgagagtgaggatagtcctcttttccttaggcttaaggctttgaatggtgagagaagtcgattagctcagagctttgagtataactatggagatttcattcctatccttagaccattcctcagaggctatttgaagatttgtcaagatgtgaaagatcgaagaatcgctcttttcaagaagtactttgttgatgagaggaagcaaattgcgagttctaagcctacaggtagtgaaggattgaaatgtgccattgatcacatccttgaagctgagcagaagggagaaatcaacgaggacaatgttctttacatcgtcgagaacatcaatgtcgccgcgattgagacaacattgtggtctatcgagtggggaattgcagagctagtgaaccatcctgaaatccagagtaagctaaggaacgaactcgacacggttcttggaccgggtgtgcaagtcaccgagcctgatcttcacaaacttccataccttcaagctgtggttaaggagactcttcgtctgagaatggcgattcctctcctcgtgcctcacatgaacctccatgatgcgaagctcgctggctacgatatcccagcagaaagcaaaatccttgttaatgcttggtggctagcaaacaaccccaacagctggaagaagcctgaagagtttagaccagagaggttctttgaagaagaatcgcacgtggaagctaacggaaatgacttcaggtatgtgccgtttggtgttggacgtagaagctgtcccgggattatattggcattacctattttggggatcaccattggtaggatggtccagaacttcgagcttcttcctcctccaggacagtctaaagtggatactagtgagaaaggtggacaattcagcttgcacatccttaaccactccataatcgttatgaaaccaaggaactgttaaactttctgcacaaaaaaaggatgaagatgactttataaatgtttgtgaaatctgttgaaatattcccttgttttgcttttgtgagatgtttttgtgtaaaatgtctttaaatggttgttctacgattgcaataataattagtggtgctcattctt

SEQ ID NO: 76276 - protein, 505 aa, Arabidopsis thaliana
  peptide (1)..(505): Ceres Seq. ID no. 7107460
MDLLLLEKSLIAVFVAVILATVISKLRGKKLKLPPGPIPIPIFGNWLQVGDDLNHRNLVDYAKKFGDLFLLRMGQRNLVVVSSPDLTKEVLHTQGVEFGSRTRNVVFDIFTGKGQDMVFTVYGEHWRKMRRIMTVPFFTNKVVQQNREGWEFEAASVVEDVKKNPDSATKGIVLRKRLQLMMYNNMFRIMFDRRFESEDSPLFLRLKALNGERSRLAQSFEYNYGDFIPILRPFLRGYLKICQDVKDRRIALFKKYFVDERKQIASSKPTGSEGLKCAIDHILEAEQKGEINEDNVLYIVENINVAAIETTLWSIEWGIAELVNHPEIQSKLRNELDTVLGPGVQVTEPDLHKLPYLQAVVKETLRLRMAIPLLVPHMNLHDAKLAGYDIPAESKILVNAWWLANNPNSWKKPEEFRPERFFEEESHVEANGNDFRYVPFGVGRRSCPGIILALPILGITIGRMVQNFELLPPPGQSKVDTSEKGGQFSLHILNHSIIVMKPRNC

SEQ ID NO: 76277 - protein, 433 aa, Arabidopsis thaliana
  peptide (1)..(433): Ceres Seq. ID no. 7107461
MGQRNLVVVSSPDLTKEVLHTQGVEFGSRTRNVVFDIFTGKGQDMVFTVYGEHWRKMRRIMTVPFFTNKVVQQNREGWEFEAASVVEDVKKNPDSATKGIVLRKRLQLMMYNNMFRIMFDRRFESEDSPLFLRLKALNGERSRLAQSFEYNYGDFIPILRPFLRGYLKICQDVKDRRIALFKKYFVDERKQIASSKPTGSEGLKCAIDHILEAEQKGEINEDNVLYIVENINVAAIETTLWSIEWGIAELVNHPEIQSKLRNELDTVLGPGVQVTEPDLHKLPYLQAVVKETLRLRMAIPLLVPHMNLHDAKLAGYDIPAESKILVNAWWLANNPNSWKKPEEFRPERFFEEESHVEANGNDFRYVPFGVGRRSCPGIILALPILGITIGRMVQNFELLPPPGQSKVDTSEKGGQFSLHILNHSIIVMKPRNC

SEQ ID NO: 76278 - protein, 389 aa, Arabidopsis thaliana
  peptide (1)..(389): Ceres Seq. ID no. 7107462
MVFTVYGEHWRKMRRIMTVPFFTNKVVQQNREGWEFEAASVVEDVKKNPDSATKGIVLRKRLQLMMYNNMFRIMFDRRFESEDSPLFLRLKALNGERSRLAQSFEYNYGDFIPILRPFLRGYLKICQDVKDRRIALFKKYFVDERKQIASSKPTGSEGLKCAIDHILEAEQKGEINEDNVLYIVENINVAAIETTLWSIEWGIAELVNHPEIQSKLRNELDTVLGPGVQVTEPDLHKLPYLQAVVKETLRLRMAIPLLVPHMNLHDAKLAGYDIPAESKILVNAWWLANNPNSWKKPEEFRPERFFEEESHVEANGNDFRYVPFGVGRRSCPGIILALPILGITIGRMVQNFELLPPPGQSKVDTSEKGGQFSLHILNHSIIVMKPRNC

SEQ ID NO: 76279 - DNA, 674 bp, Arabidopsis thaliana
  misc_feature (1)..(674): Ceres Seq. ID no. 7107465
  misc_feature (1)..(674): Ortholog of  Ceres SEQ ID NO 13594647 as cited in SEQ ID NO 52208
  misc_feature (1)..(674): Ortholog of  Ceres SEQ ID NO 13637658 as cited in SEQ ID NO 53077
  misc_feature (1)..(674): Ortholog of  Ceres SEQ ID NO 13664275 as cited in SEQ ID NO 61120
  misc_feature (1)..(674): Ortholog of  Ceres SEQ ID NO 15174168 as cited in SEQ ID NO 61888
  misc_feature (1)..(674): Ortholog of  Ceres SEQ ID NO 12635311 as cited in SEQ ID NO 0
  misc_feature (1)..(674): Ortholog of  Ceres SEQ ID NO 13599510 as cited in SEQ ID NO 0
  misc_feature (1)..(674): Ortholog of  Ceres SEQ ID NO 13599622 as cited in SEQ ID NO 0
  misc_feature (1)..(674): Ortholog of  Ceres SEQ ID NO 13600020 as cited in SEQ ID NO 0
agtgtgagtaatttaggcgtcgtttaacatgcagtcagtgttcgctgctccttccggtgtattgactacacgcaacatcagaaacacaaaccaactcttcttcaagaggattgctccggtaggagtcagatgcatggctcagggcgatcctatcaaggaagatccttctgtgccctcgacctcgacttcggccactccaccacaaatgccacagtctcctcctccaccagttagcaagcctaaggtgagtacgaagtttggagatttgctagcgtttagcggtccagcacccgagaggatcaacgggagactagcaatggttggattcgtggcggccatcgccatggagttatcaaagggagaaaacgtgtttgctcagatctctgacggtggtgtcgggtggtttctaggaacaacagcgttgttgacgttggcatcgatggttccgttgttcaagggaataagggcagaggcaaagtcaaaagggttcatgacttcagacgccgagctatggaacggtcggtttgcgatgctcggtctcgttgcgttggccttcaccgagtacgtcactggtgggactctagtctaaagctaaagctttttgtttgctagtttaaggacaaatttggagaatgattatgtaacgcatagattgatttaatactatgagtttt

SEQ ID NO: 76280 - protein, 186 aa, Arabidopsis thaliana
  peptide (1)..(186): Ceres Seq. ID no. 7107466
MQSVFAAPSGVLTTRNIRNTNQLFFKRIAPVGVRCMAQGDPIKEDPSVPSTSTSATPPQMPQSPPPPVSKPKVSTKFGDLLAFSGPAPERINGRLAMVGFVAAIAMELSKGENVFAQISDGGVGWFLGTTALLTLASMVPLFKGIRAEAKSKGFMTSDAELWNGRFAMLGLVALAFTEYVTGGTLV

SEQ ID NO: 76281 - protein, 151 aa, Arabidopsis thaliana
  peptide (1)..(151): Ceres Seq. ID no. 7107467
MAQGDPIKEDPSVPSTSTSATPPQMPQSPPPPVSKPKVSTKFGDLLAFSGPAPERINGRLAMVGFVAAIAMELSKGENVFAQISDGGVGWFLGTTALLTLASMVPLFKGIRAEAKSKGFMTSDAELWNGRFAMLGLVALAFTEYVTGGTLV

SEQ ID NO: 76282 - protein, 127 aa, Arabidopsis thaliana
  peptide (1)..(127): Ceres Seq. ID no. 7107468
MPQSPPPPVSKPKVSTKFGDLLAFSGPAPERINGRLAMVGFVAAIAMELSKGENVFAQISDGGVGWFLGTTALLTLASMVPLFKGIRAEAKSKGFMTSDAELWNGRFAMLGLVALAFTEYVTGGTLV

SEQ ID NO: 76283 - DNA, 1593 bp, Arabidopsis thaliana
  misc_feature (1)..(1593): Ceres Seq. ID no. 7107469
  misc_feature (1)..(1593): Ortholog of  Ceres SEQ ID NO 14302251 as cited in SEQ ID NO 62093
gacccacgcgtccgcaatttctccgtcactatcataaccatggcggtgctttcatctgcagatcgagctagtaatgagaagaaggtgaagagttcatactttgatttgccacctatggaaatgtctgtagcatttcctcaagcaactccagcctctacatttccaccttgtacttcagactattatcatttcaatgatctactgactccggaagaacaagctatccggaagaaagtgagggaatgcatggagaaagaagttgctccaataatgacagagtactgggagaaagcagaatttccattccatatcactccaaagcttggggctatgggtgttgctggtggctcgatcaagggttatggatgtcctggtctctccatcaccgccaatgcaattgccacagcagaaatagctagagttgatgcaagttgttcgactttcattttggtgcattcttctttgggcatgctcactattgcactctgtggatcagaagcacagaaggagaagtatttgccttctttggctcaattgaatactgtggcttgttgggctttgacagagcccgacaatggaagcgatgcaagtggtctaggaacgactgcaacaaaggttgaaggaggttggaaaattaatggacaaaagcgttggattggaaacagcacctttgcagatctgttgatcatctttgcgaggaatacaacaactaaccaaatcaacggattcatagtcaagaaagatgcgcctggcctaaaggctactaagatcccaaataaaataggtttacgtatggttcaaaatggagatattctactacagaatgtctttgttccagatgaggatcggttacctggggtaaattcttttcaggacaccagcaaggttctggctgtctcacgtgtaatggtggcctggcaaccaatcggcatatcaatgggaatctacgatatgtgccacaggtatctgaaggagaggaaacagtttggagcaccgttggctgctttccagttaaaccaacagaagcttgtgcagatgctgggtaacgttcaagcgatgtttctaatgggttggcgtctctgcaagctgtatgagacgggtcagatgactccaggtcaagccagtttaggaaaggcatggatttcatcaaaagcgagagaaactgcttcgctaggtcgggaattacttggtgggaatggaattctagcagattttctggtagcaaaggctttctgtgaccttgaacccatttatacatacgaagggacttatgatataaacaccttagtaacagggagggaagtaacgggtattgcgagtttcaaaccggctacacgtagccgtctctaagttaaaaggttgtccattgtttgttgttgtctgttggttagtattgatattgtgatgtggggtttacatctacaaatgtgccaaataatctgacccaaaaagatttagggtccaatgggggaataatatcgttgttgcaaaacataatccagttattgcttcttgcaatatggattcgtcttgtggcttgtactgggggaaataccatttgttaaccttttattaattcaaattgccaatgtc

SEQ ID NO: 76284 - protein, 449 aa, Arabidopsis thaliana
  peptide (1)..(449): Ceres Seq. ID no. 7107470
DPRVRNFSVTIITMAVLSSADRASNEKKVKSSYFDLPPMEMSVAFPQATPASTFPPCTSDYYHFNDLLTPEEQAIRKKVRECMEKEVAPIMTEYWEKAEFPFHITPKLGAMGVAGGSIKGYGCPGLSITANAIATAEIARVDASCSTFILVHSSLGMLTIALCGSEAQKEKYLPSLAQLNTVACWALTEPDNGSDASGLGTTATKVEGGWKINGQKRWIGNSTFADLLIIFARNTTTNQINGFIVKKDAPGLKATKIPNKIGLRMVQNGDILLQNVFVPDEDRLPGVNSFQDTSKVLAVSRVMVAWQPIGISMGIYDMCHRYLKERKQFGAPLAAFQLNQQKLVQMLGNVQAMFLMGWRLCKLYETGQMTPGQASLGKAWISSKARETASLGRELLGGNGILADFLVAKAFCDLEPIYTYEGTYDINTLVTGREVTGIASFKPATRSRL

SEQ ID NO: 76285 - protein, 436 aa, Arabidopsis thaliana; identical to SEQ ID NO: 26763
  peptide (1)..(436): Ceres Seq. ID no. 7107471

SEQ ID NO: 76286 - protein, 411 aa, Arabidopsis thaliana; identical to SEQ ID NO: 26764
  peptide (1)..(411): Ceres Seq. ID no. 7107472

SEQ ID NO: 76287 - DNA, 1438 bp, Arabidopsis thaliana
  misc_feature (1)..(1438): Ceres Seq. ID no. 7107490
  misc_feature (1)..(1438): Ortholog of  Ceres SEQ ID NO 13596509 as cited in SEQ ID NO 62004
  misc_feature (1)..(1438): Ortholog of  Ceres SEQ ID NO 13659971 as cited in SEQ ID NO 67565
  misc_feature (1)..(1438): Ortholog of  Ceres SEQ ID NO 13500385 as cited in SEQ ID NO 67583
gaattccggaggtttcaggcaccattttctccttccgccgccgccatggaatcacttccccagccgcaaaaccaatcatctccggcaacgactccggcgaagatcctccttgggaaatacgaactcggtcgtcgtctcggtagcggaagcttcgcgaaagtccatttagctcgatcaatcgaatccgacgagctcgtcgccgttaaaatcatcgagaagaagaaaacaatcgaatccggtatggaaccaagaataatcagagagatcgatgcgatgcgtcgtcttcgtcatcatccaaacatactcaagatccatgaagttatggcaaccaaatctaagatctatctcgtaatggaactcgcttccggtggtgaacttttctcaaaagtcctccgtcgtggacgtcttcctgaatcaacggcgcgtcgttactttcaacaactcgcctccgctcttcgtttctctcaccaagacggtgtcgctcaccgtgatgtgaaacctcagaatctactcttagatgagcaaggtaacctcaaggtctctgactttggtttatcagctttaccggagcatctacaaaacggattgcttcacacggcgtgtggtactccggcttatacagctccggaggttatttcacggaggggatacgacggagcaaaagctgatgcgtggtcttgtggtgtgattttgtttgttttattggttggcgatgttccatttgatgattcgaatatcgctgcgatgtatcggaagattcatcggagagattatcggtttccgagctggatttcgaaacaagctaaatcgataatctatcagatgttagatccgaatccagtaacgaggatgagtattgaaacagtgatgaaaacgaattggttcaagaagtctctagagacttctgagtttcatcgtaacgtctttgattcggaagtagagatgaaatcgagtgttaattcgattactgcttttgatttgatctcgttatcgtcgggattagatctttctggattgtttgaggctaagaagaagaaggagaggagattcacggcgaaggtttcgggtgttgaagtggaggagaaggcgaagatgattggggagaagttaggttatgtagtgaagaagaagatgatgaagaaggaaggagaagtgaaggttgttggattagggagaggaagaactgtgattgtggtggaagcagtggagttaacggtggatgttgtggtggttgaagtgaaagttgttgaaggtgaagaagatgattcacggtggtctgatttgattactgagcttgaagatatagttctttcatggcacaatgacatcatgtaaatagattgtgactttgtggattttagtctcttttttgttttgtttctgttcagttttgtataatccatgaagaaatcaaaatctcccgcttcattgtcttttt

SEQ ID NO: 76288 - protein, 444 aa, Arabidopsis thaliana
  peptide (1)..(444): Ceres Seq. ID no. 7107491
EFRRFQAPFSPSAAAMESLPQPQNQSSPATTPAKILLGKYELGRRLGSGSFAKVHLARSIESDELVAVKIIEKKKTIESGMEPRIIREIDAMRRLRHHPNILKIHEVMATKSKIYLVMELASGGELFSKVLRRGRLPESTARRYFQQLASALRFSHQDGVAHRDVKPQNLLLDEQGNLKVSDFGLSALPEHLQNGLLHTACGTPAYTAPEVISRRGYDGAKADAWSCGVILFVLLVGDVPFDDSNIAAMYRKIHRRDYRFPSWISKQAKSIIYQMLDPNPVTRMSIETVMKTNWFKKSLETSEFHRNVFDSEVEMKSSVNSITAFDLISLSSGLDLSGLFEAKKKKERRFTAKVSGVEVEEKAKMIGEKLGYVVKKKMMKKEGEVKVVGLGRGRTVIVVEAVELTVDVVVVEVKVVEGEEDDSRWSDLITELEDIVLSWHNDIM

SEQ ID NO: 76289 - protein, 429 aa, Arabidopsis thaliana
  peptide (1)..(429): Ceres Seq. ID no. 7107492
MESLPQPQNQSSPATTPAKILLGKYELGRRLGSGSFAKVHLARSIESDELVAVKIIEKKKTIESGMEPRIIREIDAMRRLRHHPNILKIHEVMATKSKIYLVMELASGGELFSKVLRRGRLPESTARRYFQQLASALRFSHQDGVAHRDVKPQNLLLDEQGNLKVSDFGLSALPEHLQNGLLHTACGTPAYTAPEVISRRGYDGAKADAWSCGVILFVLLVGDVPFDDSNIAAMYRKIHRRDYRFPSWISKQAKSIIYQMLDPNPVTRMSIETVMKTNWFKKSLETSEFHRNVFDSEVEMKSSVNSITAFDLISLSSGLDLSGLFEAKKKKERRFTAKVSGVEVEEKAKMIGEKLGYVVKKKMMKKEGEVKVVGLGRGRTVIVVEAVELTVDVVVVEVKVVEGEEDDSRWSDLITELEDIVLSWHNDIM

SEQ ID NO: 76290 - protein, 364 aa, Arabidopsis thaliana
  peptide (1)..(364): Ceres Seq. ID no. 7107493
MEPRIIREIDAMRRLRHHPNILKIHEVMATKSKIYLVMELASGGELFSKVLRRGRLPESTARRYFQQLASALRFSHQDGVAHRDVKPQNLLLDEQGNLKVSDFGLSALPEHLQNGLLHTACGTPAYTAPEVISRRGYDGAKADAWSCGVILFVLLVGDVPFDDSNIAAMYRKIHRRDYRFPSWISKQAKSIIYQMLDPNPVTRMSIETVMKTNWFKKSLETSEFHRNVFDSEVEMKSSVNSITAFDLISLSSGLDLSGLFEAKKKKERRFTAKVSGVEVEEKAKMIGEKLGYVVKKKMMKKEGEVKVVGLGRGRTVIVVEAVELTVDVVVVEVKVVEGEEDDSRWSDLITELEDIVLSWHNDIM

SEQ ID NO: 76291 - DNA, 1274 bp, Arabidopsis thaliana
  misc_feature (1)..(1274): Ceres Seq. ID no. 7107496
  misc_feature (1)..(1274): Ortholog of  Ceres SEQ ID NO 14313583 as cited in SEQ ID NO 55431
  misc_feature (1)..(1274): Ortholog of  Ceres SEQ ID NO 12476493 as cited in SEQ ID NO 58163
  misc_feature (1)..(1274): Ortholog of  Ceres SEQ ID NO 12617090 as cited in SEQ ID NO 64005
  misc_feature (1)..(1274): Ortholog of  Ceres SEQ ID NO 13597233 as cited in SEQ ID NO 64370
  misc_feature (1)..(1274): Ortholog of  Ceres SEQ ID NO 14302844 as cited in SEQ ID NO 65379
  misc_feature (1)..(1274): Ortholog of  Ceres SEQ ID NO 15226354 as cited in SEQ ID NO 0
tcaaaatcaaaaaaattctatcaaacaaggaaatatatcaatggcggtattgtctaaaccggtagcaataccaaaatccgggttctctctaatcccggttatagatatgtctgacccagaatccaaacatgccctcgtgaaagcatgcgaagacttcggcttcttcaaggtgatcaaccatggcgtttccgcagagctagtctctgttttagaacacgagaccgtcgatttcttctcgttgcccaagtcagagaaaacccaagtcgcaggttatcccttcggatacgggaacagtaagattggtcggaatggtgacgtgggttgggttgagtacttgttgatgaacgctaatcatgattccggttcgggtccactatttccaagtcttctcaaaagcccgggaactttcagaaacgcattggaagagtacacaacatcagtgagaaaaatgacattcgatgttttggagaagatcacagatgggctagggatcaaaccgaggaacacacttagcaagcttgtgtctgaccaaaacacggactcgatattgagacttaatcactatccaccatgtcctcttagcaataagaaaaccaatggtggtaagaatgtgattggttttggtgaacacacagatcctcaaatcatctctgtcttaagatctaacaacacttctggtctccaaattaatctaaatgatggctcatggatctctgtccctcccgatcacacttccttcttcttcaacgttggtgactctctccaggtgatgacaaatgggaggttcaagagcgtgaggcatagggttttagctaactgtaaaaaatctagggtttctatgatttacttcgctggaccttcattgactcagagaatcgctccgttgacatgtttgatagacaatgaggacgagaggttgtacgaggagtttacttggtctgaatacaaaaactctacctacaactctagattgtctgataataggcttcaacaattcgaaaggaagactataaaaaatctcctaaattgattgatatatctatttaatctataagtgtgtgctacatacagacaatgcatctgtatattttgaagttaatgttatttgttaatccaataactgtaaaaacatgcaagagtgtgtttgtttgtttcgtaatatcaacatcgctcccatcttttatggataaaaaaaaaaaaaaaaaaaacactgttttgatgtaagctacattttactttatgtgtacatcttattgtgttaaataaattatttc

SEQ ID NO: 76292 - protein, 342 aa, Arabidopsis thaliana
  peptide (1)..(342): Ceres Seq. ID no. 7107497
QNQKNSIKQGNISMAVLSKPVAIPKSGFSLIPVIDMSDPESKHALVKACEDFGFFKVINHGVSAELVSVLEHETVDFFSLPKSEKTQVAGYPFGYGNSKIGRNGDVGWVEYLLMNANHDSGSGPLFPSLLKSPGTFRNALEEYTTSVRKMTFDVLEKITDGLGIKPRNTLSKLVSDQNTDSILRLNHYPPCPLSNKKTNGGKNVIGFGEHTDPQIISVLRSNNTSGLQINLNDGSWISVPPDHTSFFFNVGDSLQVMTNGRFKSVRHRVLANCKKSRVSMIYFAGPSLTQRIAPLTCLIDNEDERLYEEFTWSEYKNSTYNSRLSDNRLQQFERKTIKNLLN

SEQ ID NO: 76293 - protein, 329 aa, Arabidopsis thaliana; identical to SEQ ID NO: 43184
  peptide (1)..(329): Ceres Seq. ID no. 7107498

SEQ ID NO: 76294 - protein, 307 aa, Arabidopsis thaliana; identical to SEQ ID NO: 43185
  peptide (1)..(307): Ceres Seq. ID no. 7107499

SEQ ID NO: 76295 - DNA, 943 bp, Arabidopsis thaliana
  misc_feature (1)..(943): Ceres Seq. ID no. 7107512
  misc_feature (1)..(943): Ortholog of  Ceres SEQ ID NO 12635513 as cited in SEQ ID NO 0
gaccacgcgtccggagacacaaccaacactcatttctccacatcttgagagaaaaaacagagcaagtatattagagatctcatggcgatggcggtctccggagctgtcctcagtgggattggttcttcgttcctcaccggaggcaagagaggtgccaccgcattggcaagcggcgtaggcactggagctcagagagttggcaggaaaactcttattgtcgctgctgcggctgctcagcctaagaaatcttggatccctgccgttaaaggtggtggcaacttccttgaccctgaatggctcgatggctcgctaccaggagatttcgggttcgacccattgggtttggggaaagacccggcttttctgaaatggtacagagaggctgagctgatccatggccgatgggcgatggcagcggttcttgggatcttcgtcggccaggcctggagcggtgtggcatggtttgaagctggagcccagccagacgcgatcgctcccttctcgttcgggtcgcttcttggaacccaattgcttctcatgggttgggtggagagcaaacgatgggtcgatttcttcaacccggattctcaatcggttgagtgggcaacgccatggtcgaagaccgccgagaatttcgcgaactataccggcgatcagggataccccggtgggagattcttcgatccgttgggtctcgccgggaaaaaccgcgacggtgtttatgagccggactttgagaagctggagaggctgaaattggcagagattaagcactcgaggctcgcaatggttgccatgttgatcttttactttgaggccgggcaggggaaaacgcctctcggtgctcttggtttgtgagaaaacggcatgatgtttttgattctgtagatacaatttctcttccaaaaacctaatgtttctcttcttcaatgtgacatttggg

SEQ ID NO: 76296 - protein, 258 aa, Arabidopsis thaliana
  peptide (1)..(258): Ceres Seq. ID no. 7107513
MAMAVSGAVLSGIGSSFLTGGKRGATALASGVGTGAQRVGRKTLIVAAAAAQPKKSWIPAVKGGGNFLDPEWLDGSLPGDFGFDPLGLGKDPAFLKWYREAELIHGRWAMAAVLGIFVGQAWSGVAWFEAGAQPDAIAPFSFGSLLGTQLLLMGWVESKRWVDFFNPDSQSVEWATPWSKTAENFANYTGDQGYPGGRFFDPLGLAGKNRDGVYEPDFEKLERLKLAEIKHSRLAMVAMLIFYFEAGQGKTPLGALGL

SEQ ID NO: 76297 - protein, 256 aa, Arabidopsis thaliana
  peptide (1)..(256): Ceres Seq. ID no. 7107514
MAVSGAVLSGIGSSFLTGGKRGATALASGVGTGAQRVGRKTLIVAAAAAQPKKSWIPAVKGGGNFLDPEWLDGSLPGDFGFDPLGLGKDPAFLKWYREAELIHGRWAMAAVLGIFVGQAWSGVAWFEAGAQPDAIAPFSFGSLLGTQLLLMGWVESKRWVDFFNPDSQSVEWATPWSKTAENFANYTGDQGYPGGRFFDPLGLAGKNRDGVYEPDFEKLERLKLAEIKHSRLAMVAMLIFYFEAGQGKTPLGALGL

SEQ ID NO: 76298 - protein, 149 aa, Arabidopsis thaliana; identical to SEQ ID NO: 40174
  peptide (1)..(149): Ceres Seq. ID no. 7107515

SEQ ID NO: 76299 - DNA, 1024 bp, Arabidopsis thaliana
  misc_feature (1)..(1024): Ceres Seq. ID no. 7107516
  misc_feature (1)..(1024): Ortholog of  Ceres SEQ ID NO 12557497 as cited in SEQ ID NO 43
  misc_feature (1)..(1024): Ortholog of  Ceres SEQ ID NO 15177850 as cited in SEQ ID NO 51765
  misc_feature (1)..(1024): Ortholog of  Ceres SEQ ID NO 14303417 as cited in SEQ ID NO 54923
  misc_feature (1)..(1024): Ortholog of  Ceres SEQ ID NO 15169084 as cited in SEQ ID NO 59115
  misc_feature (1)..(1024): Ortholog of  Ceres SEQ ID NO 12635723 as cited in SEQ ID NO 0
gacccacgcgtccgcgcgacagaactaactaacgacgccgggagatggccgccacttcaaccgccgctgctgcttcttcaatcatgggtacccgggtggtttccgacattagctccaattcaagccggttcacagcccggttcggattcggaaccaagaaagcatctcccaaaaaggctaagacggttatctcagaccggcctctatggttcccaggcgcaaaatcacccgaatatctcgacggttcacttgtcggggactacgggttcgatccttttggtttaggcaaaccggcggagtatctccaattcgatttggattccttggaccagaacttagccaagaacttatacggagaagtgatcgggactcgtaccgaggcggtggaccccaaatcgacgccgtttcagccatatagtgaagtcttcgggctacaaagattcagagaatgtgagctgattcacggtcggtgggcaatgctcgccactcttggcgctatcaccgtcgaatggctcaccggtgttacttggcaagacgccggcaaggtagagctagtggatggatcatcttacttaggacagccattgccgttctctatctcgacattgatatggatcgaagtgttagtgatcggctacattgagttccaacgaaacgctgaactggactcggagaagcgtttgtatccaggaggcaagttctttgacccgttaggactagcgtctgacccggtgaagaaggctcagcttcagctagctgagatcaaacatgctcgtttagccatggttggattcttgggttttgcggttcaggcggctgcaaccggtaaaggaccgctcaacaactgggcgactcaccttagtgacccacttcacaccaccattatcgataccttctcttcctcctgatgtggtggcttttagcttctactggtgtcatgtaatgatgtggtggcttttagcttctactggtgtcatgtaatgatgtaacgtcgttattttaaagaaaatttggcaccttttgt

SEQ ID NO: 76300 - protein, 287 aa, Arabidopsis thaliana; identical to SEQ ID NO: 34996
  peptide (1)..(287): Ceres Seq. ID no. 7107517

SEQ ID NO: 76301 - protein, 274 aa, Arabidopsis thaliana; identical to SEQ ID NO: 34997
  peptide (1)..(274): Ceres Seq. ID no. 7107518

SEQ ID NO: 76302 - protein, 143 aa, Arabidopsis thaliana; identical to SEQ ID NO: 34998
  peptide (1)..(143): Ceres Seq. ID no. 7107519

SEQ ID NO: 76303 - DNA, 921 bp, Arabidopsis thaliana
  misc_feature (1)..(921): Ceres Seq. ID no. 7107520
  misc_feature (1)..(921): Ortholog of  Ceres SEQ ID NO 13595072 as cited in SEQ ID NO 55971
ccacgcgtccgcaagaagaacaacaacactaagcaaaaagaaaagctcaagccgagagagacaatggcatcaacattcacgagctcaagcagtgttcttaccccaacaacattccttggccagactaaagcctcaagctttaacccccttcgtgatgttgtctctctcggatctcccaagtacactatgggaaatgatctttggtatggacctgacagagtgaagtacttaggacccttttccgttcaaactccgtcttacctcaccggagaattccctggcgattatggttgggacaccgccggtttatccgcagaccctgaagcctttgccaaaaacagagctcttgaggtgatccatgggagatgggcaatgttgggagcttttggttgcataacccctgaagttcttcaaaagtgggtccgtgtggacttcaaagaaccagtctggttcaaagccggttcacaaatcttctccgaaggcggtttggactacttaggcaacccaaacctagtccatgctcagagcattttagccgtccttggcttccaagtcatcctcatgggtttggttgaaggtttccgcatcaacggtcttgatggtgttggcgaaggcaacgacttgtaccccggtgggcaatactttgacccgttgggtctcgctgatgatccagttacttttgctgagcttaaggtgaaagagatcaagaacggaagattggctatgttctctatgtttggcttctttgttcaagccattgttactggaaaaggtcctttggagaatctccttgaccatcttgacaaccctgttgctaacaatgcgtgggctttcgcaactaagtttgcacctggagcttaaattttcaagtcttgatgtgattcttgtaatgatatgaacataacctttcttgttcctctc

SEQ ID NO: 76304 - protein, 286 aa, Arabidopsis thaliana
  peptide (1)..(286): Ceres Seq. ID no. 7107521
PRVRKKNNNTKQKEKLKPRETMASTFTSSSSVLTPTTFLGQTKASSFNPLRDVVSLGSPKYTMGNDLWYGPDRVKYLGPFSVQTPSYLTGEFPGDYGWDTAGLSADPEAFAKNRALEVIHGRWAMLGAFGCITPEVLQKWVRVDFKEPVWFKAGSQIFSEGGLDYLGNPNLVHAQSILAVLGFQVILMGLVEGFRINGLDGVGEGNDLYPGGQYFDPLGLADDPVTFAELKVKEIKNGRLAMFSMFGFFVQAIVTGKGPLENLLDHLDNPVANNAWAFATKFAPGA

SEQ ID NO: 76305 - protein, 265 aa, Arabidopsis thaliana; identical to SEQ ID NO: 21703
  peptide (1)..(265): Ceres Seq. ID no. 7107522

SEQ ID NO: 76306 - protein, 224 aa, Arabidopsis thaliana; identical to SEQ ID NO: 21704
  peptide (1)..(224): Ceres Seq. ID no. 7107523

SEQ ID NO: 76307 - DNA, 1891 bp, Arabidopsis thaliana
  misc_feature (1)..(1891): Ceres Seq. ID no. 7107532
  misc_feature (1)..(1891): Ortholog of  Ceres SEQ ID NO 14304823 as cited in SEQ ID NO 54902
gttgttcgaacaaacaaaaaaagaaatagagagagactcaagaagagaagagagactagagagagatccccattcagaaaataaaaatagaacccaacaaaaccaaaattcccaaattgaccccaaaatttacgttcctcgtcaatgaccccgcgttccctggacctcccgccgctgttcctggggtagtcgagccactggtgcccggcgccggagcagatcccggcgaaggagcagagcccggtgctgcatcttctgtgaaactcaacacacggtgggagcccaaattatcaggaccgaaaggatgtacaccgggacgaccgttggtaacattgccgccgatctgccatacctgattcacactatcagctcccgccggaaccttaaccgtcgtgaaaatggcgatcctaccgccgcttaacgactcggcgcgtagattccaaaaatcaaaagcaagtttaccttcgacgagactgctgtagctgctaatgttgtacgtcttcacgaccggagccgcaccaccgccggatctgtaagcgaggaaggcttgagaaccagccatcttagtccccgtagggttaatagcccaagcgacccagccaccgttggcttgagatggagtggcgacgaaagcgacggagagagatgaatttgaggaattgtaggtgtaatggaggtaggaattgagtaccggaaggtcttcgcaactatcgaacggaccggcggagttcaagttctgtgatttgcaagcctgttgtgaaatcgccggtgagattagcgagacgaaacaagcaacggctaggattagaagagaagaagaagaagaagccatggctgagttctgttctgaaaaaacgacggtggatccacttctgagagatttggatgagaagaaagagagtttccggcgaaacgtggtgtctctggctacggagctgaagcaagtgaggggccgtttggtttctcaagaacaatcttttcttaaagagaccattactagaaaagaagcagagaaaaggggaaagaatatggaaatggagatttgtaaattgcagaagagattggaagaaaggaattgtcagcttgaagcttctgcatctgctgctgataagtttatcaaagagttggaggaatttagattaaagcttgatacaaccaagcaaaccgcagaggcaagtgctgattctgctcaatctacaaagatccaatgctcaatgctaaagcaacaacttgacgacaaaacacgttctctcagagaacaagaagaccgtatgactcagcttggtcatcagcttgatgatctacagagaggtctgagcttgagagagtgctcagaaaagcagcttagagaagaagttaggagaatcgagcgtgaggttactgaggccattgcaaaagcgggaataggtggcatggacagcgagctccagaaacttctagaagatgtgtctccaatgaaatttgagaggatgaataggctagttgaagtaaaagacgaagagattacaaaactgaaagatgagataaggttaatgtcaggtcaatggaaacataagactaaggaactcgaatctcagctggagaaacagagaagaactgatcaagatttgaagaagaaggtattgaagctagagttctgtttacaagaagctcgaagccagacaagaaagctgcagaggaaaggggaaagaagggacatggagatcaaagagataagagatcttatatcggagaagcaaaaccttaacaatgagtcttgggataaacagaagttctgggacaattcagggttcaagattgttgtatcaatgtctatgttgatgttagtggtagtctccaagagatgatgaattttgtaatgtataaatttagttgcagatagttgatgagg

SEQ ID NO: 76308 - protein, 338 aa, Arabidopsis thaliana
  peptide (1)..(338): Ceres Seq. ID no. 7107533
MAEFCSEKTTVDPLLRDLDEKKESFRRNVVSLATELKQVRGRLVSQEQSFLKETITRKEAEKRGKNMEMEICKLQKRLEERNCQLEASASAADKFIKELEEFRLKLDTTKQTAEASADSAQSTKIQCSMLKQQLDDKTRSLREQEDRMTQLGHQLDDLQRGLSLRECSEKQLREEVRRIEREVTEAIAKAGIGGMDSELQKLLEDVSPMKFERMNRLVEVKDEEITKLKDEIRLMSGQWKHKTKELESQLEKQRRTDQDLKKKVLKLEFCLQEARSQTRKLQRKGERRDMEIKEIRDLISEKQNLNNESWDKQKFWDNSGFKIVVSMSMLMLVVVSKR

SEQ ID NO: 76309 - protein, 272 aa, Arabidopsis thaliana; identical to SEQ ID NO: 39867
  peptide (1)..(272): Ceres Seq. ID no. 7107534

SEQ ID NO: 76310 - protein, 270 aa, Arabidopsis thaliana; identical to SEQ ID NO: 39868
  peptide (1)..(270): Ceres Seq. ID no. 7107535

SEQ ID NO: 76311 - DNA, 1694 bp, Arabidopsis thaliana
  misc_feature (1)..(1694): Ceres Seq. ID no. 7107540
  misc_feature (1)..(1694): Ortholog of  Ceres SEQ ID NO 13542155 as cited in SEQ ID NO 64236
acctgatttgagctgtttctttctctttcgaactctccgtcacttccatttcatttctatttgaatcttctcaaagctacacagatctctggaatcgaaaaagcttgagctgtgttaatggcggaggagaaatgggtggtgatggtgacggcgcagactccaacgaatatcgccgtgattaagtattggggaaagagagatgaggttcggattcttcccattaatgatagcattagcgtcacgcttgatcctgatcacctctgtactctcaccaccgtcgctgttagtccttcctttgatcgagatcgaatgtggctcaatggcaaggaaatctcgctttctggaagtaggtaccagaattgcttgagggaaattcgaagtcgtgctgatgatgtagaagataaagaaaagggtatcaagattgcgaagaaagattgggagaagctgcatctgcacattgcttctcataacaacttccctactgctgctggcttagcatcttctgctgctggttttgcttgcttagtttttgctcttgccaagttgatgaatgtaaatgaagatccaagccaactttctgctatagcaaggcaaggttcaggaagtgcttgccgtagtttatttgggggatttgtcaagtggaatatgggaaacaaagaagatggaagtgacagtgttgcagttcaactggtagatgataagcactgggatgatcttgttatcattattgctgtggttagttcacgacagaaggaaacaagcagcacctcgggaatgcgtgagagtgttgagacaagtttgcttttacagcatagagcaaaggaagttgtcccagtacggattttgcaaatggaagaagctataaagaatcgagatttcacatcttttacaaaattgacgtgttcagacagtaatcagtttcatgctgtttgtatggatacatctccacccatattctacatgaatgacacctcccacaggataatcagcttagttgaaaagtggaaccgttctgccggtacaccagagattgcttatacatttgatgctggcccaaatgcagtcatgattgcaagaaacaggaaagtagcagttgaattgctgcaggggctgctctactgcttccctcctaagcctgacacagacatgaagagttacgtactgggggatacatcgatagtaaaagaggcaggcttggaaggagagcttccacaaggaattaaagacaaaattggaagtcaggatcaaaaaggtgaagtgagttattttatatgcagcagacctggaagaggtcctgtggtgcttcaagaccaaactcaagctcttctccatcctcaaactggcctccccaaataaccatttctatgtcttgttgttacttcaactctgagatttgcaacagcttcatcttttgctttgccagctccaactcttgtcctaagagagcactcttctgaatcttttcccaattatttgtgtttacgtacaattcttctgcatcgggtgcaaaaaacaaaacaatcaatattgcaaacgaataagatcatcccagtgcttatcatctaccagttgaactgcaacactgtcacttccatcttctttgtttcccatattccacttgacaaatcccccaaataaactacggcaagcacttcctgaaccttgccttgctatagcagaaagttggcttgatc

SEQ ID NO: 76312 - protein, 412 aa, Arabidopsis thaliana; identical to SEQ ID NO: 23100
  peptide (1)..(412): Ceres Seq. ID no. 7107541

SEQ ID NO: 76313 - protein, 404 aa, Arabidopsis thaliana; identical to SEQ ID NO: 23101
  peptide (1)..(404): Ceres Seq. ID no. 7107542

SEQ ID NO: 76314 - protein, 348 aa, Arabidopsis thaliana; identical to SEQ ID NO: 23102
  peptide (1)..(348): Ceres Seq. ID no. 7107543

SEQ ID NO: 76315 - DNA, 943 bp, Arabidopsis thaliana
  misc_feature (1)..(943): Ceres Seq. ID no. 7107556
  misc_feature (1)..(943): Ortholog of  Ceres SEQ ID NO 12557497 as cited in SEQ ID NO 43
  misc_feature (1)..(943): Ortholog of  Ceres SEQ ID NO 13600601 as cited in SEQ ID NO 497
  misc_feature (1)..(943): Ortholog of  Ceres SEQ ID NO 13664283 as cited in SEQ ID NO 61283
  misc_feature (1)..(943): Ortholog of  Ceres SEQ ID NO 12635513 as cited in SEQ ID NO 0
  misc_feature (1)..(943): Ortholog of  Ceres SEQ ID NO 15179044 as cited in SEQ ID NO 0
  misc_feature (1)..(943): Ortholog of  Ceres SEQ ID NO 15179333 as cited in SEQ ID NO 0
gacccacgcgtccgtgaaggtcaacaacgtcgagaataatggcatcatctctttgtgcttcttctgccatcgctgccatttcttctccaagtttcttgggtggtaagaaactgaggctgaagaagaagttgactgttccagctgtctccaggccagatgcgtcggtgcgcgccgtcgcagctgatccagatagaccaatctggttcccgggaagcactcctccagagtggctagacggtagcctccctggtgacttcggatttgatcctcttggtctttcatcggacccggacagtctaaaatggaacgtacaagccgagatagtccactgccgatgggctatgctaggagccgccgggatattcatcccagagttcctaacgaagatcggaatcctcaacactccgtcatggtacacggcgggagagcaagagtatttcacggacaaaaccacactctttgtcgttgagctcatcttgatcggatgggcagaaggacgtagatgggccgatatcatcaagcccggtagcgtcaacactgacccagtcttcccaaacaacaaactgacgggcacagacgttggttacccaggtgggttatggttcgacccgttgggttggggatccggtagcccggctaaactcaaggagttgaggaccaaggagatcaagaacggaaggttggctatgttggcagtgatgggtgcttggttccaacacatctacacgggcactggtcctattgataacctttttgcacatcttgctgatcctggtcacgccacaatcttcgctgctttcacacccaagtgagacaacgaaaaagggttatggggaggtgaatgcgtttgtgtgtgatcatgtttgtacaaatatcattttgaacttaaaattattatgtactttatataaattgtggtcgaatgcaaattaagttcccccgt

SEQ ID NO: 76316 - protein, 257 aa, Arabidopsis thaliana [sequence omitted]

SEQ ID NO: 76317 - protein, 156 aa, Arabidopsis thaliana; identical to SEQ ID NO: 41714
  peptide (1)..(156): Ceres Seq. ID no. 7107558

SEQ ID NO: 76318 - DNA, 1308 bp, Arabidopsis thaliana
  misc_feature (1)..(1308): Ceres Seq. ID no. 7107559
  misc_feature (1)..(1308): Ortholog of  Ceres SEQ ID NO 13597446 as cited in SEQ ID NO 64098
  misc_feature (1)..(1308): Ortholog of  Ceres SEQ ID NO 15226246 as cited in SEQ ID NO 68314
gaattcgcggccgccaagacccaaccatcggagggagggggcgagatgatgggattgagttccttggtctttaccgagtttcacagcctcggcttctctgaccttatagtttttgttgcgccactctggattgctgtggctgccggtgttttggttggttgggtttggaggcccaagtgggcttatctcgattctaaactcttgtccaattcacctaaattcctcaatcttcagcttcccacttccatcctcaaaacttcttctcaccacgttaaccccagcctttcttccaaagagaaaactgggtttgtaacggacgatgattttaggcatctatggaagttggttgaggtcaaagatggcggtccttgttggattcaaatgatggaccgatcaaccccaaccttctcatatcaagcttggaggcgagatcctgagaatgggcctccccagtaccgtagcagaactgtgtttgaggatgccactcccgagatggtcagggacttcttttgggatgatgarttccgttccaagtgggatgatatgcttttgtattcttctactctcgagcgttgcaaggacacgggcactatgggttgtgcaatgggtgcgaaagttccccttctttgtagcgacagggagtatattataggccgtcgtatatgggatgctggccgagtcttttactgcattactaagggagtacaatacccgtctgtacctagacaaaacaagccaaggcgagtcgacttgtactattcaagctggtgtatccgtgcagttgaatcaaaaagaggcgatggtgagatgacatcatgtgaggtactactatttcaccatgaagatatgggaataccgtgggagattgcaaagctkggggtgagacagggttatgtgggggtggcagtcaagaagattgagcccaggccttacgtgcatatcagagggctaaagcagcgggagccaggtttatccccgagtgccataatggctcacatcaacaccaaagtgagtgcagaggagttcatgatgagaaggggttcgatagcagaggttacaggagacaagccgacggggaaaaacataccaaagatactagtggtaggaggggcgattgcacttgcatgtacattggacaaagggctgttgacaaaggcggtgatattcggagtagccagaagatttgcaagaatgggaaaaaggatgtaggagagagtgtacatgtaagtagacagagaacgaatgagggaatgagagaggtgaaaagactatctctttagtcattgtcttgctggcggccgcgaattc

SEQ ID NO: 76319 - protein, 402 aa, Arabidopsis thaliana
  peptide (1)..(402): Ceres Seq. ID no. 7107560
  misc_feature (174)..(174): Xaa is any aa, unknown or other
  misc_feature (292)..(292): Xaa is any aa, unknown or other
EFAAAKTQPSEGGGEMMGLSSLVFTEFHSLGFSDLIVFVAPLWIAVAAGVLVGWVWRPKWAYLDSKLLSNSPKFLNLQLPTSILKTSSHHVNPSLSSKEKTGFVTDDDFRHLWKLVEVKDGGPCWIQMMDRSTPTFSYQAWRRDPENGPPQYRSRTVFEDATPEMVRDFFWDDXFRSKWDDMLLYSSTLERCKDTGTMGCAMGAKVPLLCSDREYIIGRRIWDAGRVFYCITKGVQYPSVPRQNKPRRVDLYYSSWCIRAVESKRGDGEMTSCEVLLFHHEDMGIPWEIAKXGVRQGYVGVAVKKIEPRPYVHIRGLKQREPGLSPSAIMAHINTKVSAEEFMMRRGSIAEVTGDKPTGKNIPKILVVGGAIALACTLDKGLLTKAVIFGVARRFARMGKRM

SEQ ID NO: 76320 - protein, 387 aa, Arabidopsis thaliana
  peptide (1)..(387): Ceres Seq. ID no. 7107561
  misc_feature (159)..(159): Xaa is any aa, unknown or other
  misc_feature (277)..(277): Xaa is any aa, unknown or other
MMGLSSLVFTEFHSLGFSDLIVFVAPLWIAVAAGVLVGWVWRPKWAYLDSKLLSNSPKFLNLQLPTSILKTSSHHVNPSLSSKEKTGFVTDDDFRHLWKLVEVKDGGPCWIQMMDRSTPTFSYQAWRRDPENGPPQYRSRTVFEDATPEMVRDFFWDDXFRSKWDDMLLYSSTLERCKDTGTMGCAMGAKVPLLCSDREYIIGRRIWDAGRVFYCITKGVQYPSVPRQNKPRRVDLYYSSWCIRAVESKRGDGEMTSCEVLLFHHEDMGIPWEIAKXGVRQGYVGVAVKKIEPRPYVHIRGLKQREPGLSPSAIMAHINTKVSAEEFMMRRGSIAEVTGDKPTGKNIPKILVVGGAIALACTLDKGLLTKAVIFGVARRFARMGKRM

SEQ ID NO: 76321 - protein, 386 aa, Arabidopsis thaliana
  peptide (1)..(386): Ceres Seq. ID no. 7107562
  misc_feature (158)..(158): Xaa is any aa, unknown or other
  misc_feature (276)..(276): Xaa is any aa, unknown or other
MGLSSLVFTEFHSLGFSDLIVFVAPLWIAVAAGVLVGWVWRPKWAYLDSKLLSNSPKFLNLQLPTSILKTSSHHVNPSLSSKEKTGFVTDDDFRHLWKLVEVKDGGPCWIQMMDRSTPTFSYQAWRRDPENGPPQYRSRTVFEDATPEMVRDFFWDDXFRSKWDDMLLYSSTLERCKDTGTMGCAMGAKVPLLCSDREYIIGRRIWDAGRVFYCITKGVQYPSVPRQNKPRRVDLYYSSWCIRAVESKRGDGEMTSCEVLLFHHEDMGIPWEIAKXGVRQGYVGVAVKKIEPRPYVHIRGLKQREPGLSPSAIMAHINTKVSAEEFMMRRGSIAEVTGDKPTGKNIPKILVVGGAIALACTLDKGLLTKAVIFGVARRFARMGKRM

SEQ ID NO: 76322 - DNA, 1592 bp, Arabidopsis thaliana
  misc_feature (1)..(1592): Ceres Seq. ID no. 7107575
  misc_feature (1)..(1592): Ortholog of  Ceres SEQ ID NO 15170239 as cited in SEQ ID NO 54977
  misc_feature (1)..(1592): Ortholog of  Ceres SEQ ID NO 12615622 as cited in SEQ ID NO 62802
  misc_feature (1)..(1592): Ortholog of  Ceres SEQ ID NO 13596203 as cited in SEQ ID NO 68499
gtggatctgcgataatgaatcgtttctagtcagatttggttattggttcattgtaatttgtttacgtagatgagaaacccaaatcgacggaggagaataagagttctaagccggaatcagcttctggttcggcccacctctgaaggttccagatcgatagtgaattcgtgtttaaaaaaaaaagattatctgtatttcaaatttcatgagcgtttgccaccacaacattgtcttttcggggttttagtcatacttaatggcttccaattcggagaaaaatcctcttctttcagatgagaaacccaaatcgacggaggagaataagagttctaagccggaatcagcttctgggagttcaacttcatcagctatgcctggcttgaatttcaatgcttttgatttctctaatatggctagtattctcaacgatcctagcatcagagaaatggctgagcaaatagctaaagatcctgcctttaaccaattggctgagcagcttcagagatctattcctaacgctggccaggaaggtggtttccctaactttgatcctcaacagtatgtcaatacaatgcaacaggttatgcataaccctgagtttaagacaatggccgagaaacttggtaccgccttagttcaggatccacaaatgtctccttttttggatgctttctcgaatcctgaaacagcagaacactttactgagcgtatggcgcggatgaaagaagatccagagttgaaacctatactagatgagattgatgctggtggtccttctgccatgatgaagtactggaatgatccagaagtgctgaaaaagctgggtgaagcaatgggtatgcctgttgctggcttaccagaccagactgtttcagctgaacctgaggtagcagaagaaggtgaagaagaagagtctattgttcaccaaactgccagtcttggtgatgttgagggtttgaaagctgccttggcatctggtggtaacaaagatgaagaagattctgaaggaaggacagcattgcattttgcttgtggatacggcgagttgaaatgtgctcaagttcttatcgatgctggagcaagtgttaatgcggttgacaaaaacaagaacacacctctgcattatgctgctggttacgggaggaaagagagtgtaagccttctcctggagaatggtgctgcagtcactctgcaaaacctagacgagaagacgccaattgatgtagcgaagctcaacagccagctggaggtggtgaagctgcttgagaaggatgctttcctttgagctctgctggttaaaggaaagctctaagctcatattgtctttgaggcatttgtcttgtgtgtgtcctgaaccagtttcacaggctttttgtgtacactttttattagttcctctcttcttctaaatttgtctcttatgttgttttaaaagtcaataaagaaagaaatagcaatcaatgatttaatttatgattatattctttatttcgtcgacctctacagaatgattcaatttggaagaatcattctggtttggaggatatgtaagaaaaactacttgatctccaagttattccattcttctgttg

SEQ ID NO: 76323 - protein, 342 aa, Arabidopsis thaliana
  peptide (1)..(342): Ceres Seq. ID no. 7107576
MASNSEKNPLLSDEKPKSTEENKSSKPESASGSSTSSAMPGLNFNAFDFSNMASILNDPSIREMAEQIAKDPAFNQLAEQLQRSIPNAGQEGGFPNFDPQQYVNTMQQVMHNPEFKTMAEKLGTALVQDPQMSPFLDAFSNPETAEHFTERMARMKEDPELKPILDEIDAGGPSAMMKYWNDPEVLKKLGEAMGMPVAGLPDQTVSAEPEVAEEGEEEESIVHQTASLGDVEGLKAALASGGNKDEEDSEGRTALHFACGYGELKCAQVLIDAGASVNAVDKNKNTPLHYAAGYGRKESVSLLLENGAAVTLQNLDEKTPIDVAKLNSQLEVVKLLEKDAFL

SEQ ID NO: 76324 - protein, 304 aa, Arabidopsis thaliana
  peptide (1)..(304): Ceres Seq. ID no. 7107577
MPGLNFNAFDFSNMASILNDPSIREMAEQIAKDPAFNQLAEQLQRSIPNAGQEGGFPNFDPQQYVNTMQQVMHNPEFKTMAEKLGTALVQDPQMSPFLDAFSNPETAEHFTERMARMKEDPELKPILDEIDAGGPSAMMKYWNDPEVLKKLGEAMGMPVAGLPDQTVSAEPEVAEEGEEEESIVHQTASLGDVEGLKAALASGGNKDEEDSEGRTALHFACGYGELKCAQVLIDAGASVNAVDKNKNTPLHYAAGYGRKESVSLLLENGAAVTLQNLDEKTPIDVAKLNSQLEVVKLLEKDAFL

SEQ ID NO: 76325 - protein, 291 aa, Arabidopsis thaliana
  peptide (1)..(291): Ceres Seq. ID no. 7107578
MASILNDPSIREMAEQIAKDPAFNQLAEQLQRSIPNAGQEGGFPNFDPQQYVNTMQQVMHNPEFKTMAEKLGTALVQDPQMSPFLDAFSNPETAEHFTERMARMKEDPELKPILDEIDAGGPSAMMKYWNDPEVLKKLGEAMGMPVAGLPDQTVSAEPEVAEEGEEEESIVHQTASLGDVEGLKAALASGGNKDEEDSEGRTALHFACGYGELKCAQVLIDAGASVNAVDKNKNTPLHYAAGYGRKESVSLLLENGAAVTLQNLDEKTPIDVAKLNSQLEVVKLLEKDAFL

SEQ ID NO: 76326 - DNA, 2267 bp, Arabidopsis thaliana
  misc_feature (1)..(2267): Ceres Seq. ID no. 7107579
  misc_feature (1)..(2267): Ortholog of  Ceres SEQ ID NO 13596198 as cited in SEQ ID NO 68488
ctcactatagggctcgagcggccgcccgggcaggtaagtctcacctttcaattcaaaaccccttccatttttgtgattaatatgcctacttggtggggaagaaagtcctgcaagaacaaggacgataatcacagaggaatcatctccacagatagagatatcaagagctctgctgttgttgatcctcctctcactcctactcgtggtggtacacctcgttgcagtcgtgaattcgctggagcttcttctgctttctctggttttgactctgattctaccgagaagaaaggtcaccctcttcctcgtcctttgctctctcctgtttcgatccatcatcaagatcatgtaagcggatccacttctggatctacatctgtttctagcgttagctcatctggatcagctgatgatcagagtcaacttgttgcttctaggggtcgtggtgatgtgaaattcaatgtagcagcagcaccacgtagtcctgagagagtttctccaaaggcagctactattactactaggcccacgtctccacggcatcagcgtttgtctggagttgtgagcttagagtcttctacagggaggaatgatgatggaaggtcctcctctgagtgtcatcctttgcctcgaccacctacttctcctacaagcccttctgctgtgcatggttccaggattggaggaggctacgagacctctccttcggggttttccacgtggaaaaaagggaaatttcttgggagtggcacctttggtcaagtctatcttggtttcaacagtgagaaagggaaaatgtgtgctattaaagaggtcaaggtaatttctgacgatcaaacatcaaaagaatgtctgaagcaactaaatcaggagataaatttgcttaaccagctttgtcatccgaatattgtccagtattacggaagtgaactgagtgaagaaaccttgtccgtctacttggagtacgtgtcaggtggttcaatccataaactacttaaggattatggttctttcactgaacccgttatccaaaactacacgcggcagattcttgctgggcttgcctatttacatggacgaaatacagtacatagggacatcaaaggagcaaatatattagtggatccgaatggtgaaatcaagttggcagactttgggatggccaaacatgtaacagccttttctactatgctttcttttaaagggagtccttactggatggcacccgaggttgtgatgagccaaaatggctacactcatgcagtcgatatctggagtttgggttgtactattctggaaatggcaacatcaaagccaccttggagccagtttgaaggggttgctgcgattttcaaaatcggaaacagtaaagacaccccggaaatacctgatcacctttcaaatgatgcaaagaattttataaggctttgtctgcaacgaaatccgacagtacgtcctacagcttctcagcttctagaacacccttttctacgtaacacaacaagagtggctagtactagtttgcccaaagacttccccccacgttcctatgatggaaacttctcactgcagcctacaagggaaccctatccagggagactgagccatgataattatgcaaaacagccattgtctagaactataaagagcccgagcagagaaaacgtaagacctatcacatccttaccagtatctccatgttcaagccctttacgccaacttgggccagcatacaaaagttgtttcctgtcacctcctcacccgtcttacgcatttcctgggcaagacagtgggtacaacctagcagagtttgctgcaagccctttcaggatgaagaaagacgcaatgatggaaccatctagtttcaggactcaaacaccgaattcaccattgagatcaagactggtgtagaaatggagcaaagattgagagactgaaagccacatactataaacaaggcccaatgaccatgtataaaacagtgtctacccctagttttggccttctccttctcaacacccagggaaatatgaagttatgagaccttagttgtgtgtgtgtggagcatctcctagaagtggagatttttggaacaagaaggagaaatttggggggaaaacagaaagatgtaaagagaaacatgaaaatgaatacaaagttagtgtgagaagtatagatagtaagttgtgttgtcacacaaagataatattcaaccatttgttttcaacctacagtgtgaatatacttttcagaaagtaaattagttactc

SEQ ID NO: 76327 - protein, 635 aa, Arabidopsis thaliana
  peptide (1)..(635): Ceres Seq. ID no. 7107580
LTIGLERPPGQVSLTFQFKTPSIFVINMPTWWGRKSCKNKDDNHRGIISTDRDIKSSAVVDPPLTPTRGGTPRCSREFAGASSAFSGFDSDSTEKKGHPLPRPLLSPVSIHHQDHVSGSTSGSTSVSSVSSSGSADDQSQLVASRGRGDVKFNVAAAPRSPERVSPKAATITTRPTSPRHQRLSGVVSLESSTGRNDDGRSSSECHPLPRPPTSPTSPSAVHGSRIGGGYETSPSGFSTWKKGKFLGSGTFGQVYLGFNSEKGKMCAIKEVKVISDDQTSKECLKQLNQEINLLNQLCHPNIVQYYGSELSEETLSVYLEYVSGGSIHKLLKDYGSFTEPVIQNYTRQILAGLAYLHGRNTVHRDIKGANILVDPNGEIKLADFGMAKHVTAFSTMLSFKGSPYWMAPEVVMSQNGYTHAVDIWSLGCTILEMATSKPPWSQFEGVAAIFKIGNSKDTPEIPDHLSNDAKNFIRLCLQRNPTVRPTASQLLEHPFLRNTTRVASTSLPKDFPPRSYDGNFSLQPTREPYPGRLSHDNYAKQPLSRTIKSPSRENVRPITSLPVSPCSSPLRQLGPAYKSCFLSPPHPSYAFPGQDSGYNLAEFAASPFRMKKDAMMEPSSFRTQTPNSPLRSRLV

SEQ ID NO: 76328 - protein, 608 aa, Arabidopsis thaliana
  peptide (1)..(608): Ceres Seq. ID no. 7107581
MPTWWGRKSCKNKDDNHRGIISTDRDIKSSAVVDPPLTPTRGGTPRCSREFAGASSAFSGFDSDSTEKKGHPLPRPLLSPVSIHHQDHVSGSTSGSTSVSSVSSSGSADDQSQLVASRGRGDVKFNVAAAPRSPERVSPKAATITTRPTSPRHQRLSGVVSLESSTGRNDDGRSSSECHPLPRPPTSPTSPSAVHGSRIGGGYETSPSGFSTWKKGKFLGSGTFGQVYLGFNSEKGKMCAIKEVKVISDDQTSKECLKQLNQEINLLNQLCHPNIVQYYGSELSEETLSVYLEYVSGGSIHKLLKDYGSFTEPVIQNYTRQILAGLAYLHGRNTVHRDIKGANILVDPNGEIKLADFGMAKHVTAFSTMLSFKGSPYWMAPEVVMSQNGYTHAVDIWSLGCTILEMATSKPPWSQFEGVAAIFKIGNSKDTPEIPDHLSNDAKNFIRLCLQRNPTVRPTASQLLEHPFLRNTTRVASTSLPKDFPPRSYDGNFSLQPTREPYPGRLSHDNYAKQPLSRTIKSPSRENVRPITSLPVSPCSSPLRQLGPAYKSCFLSPPHPSYAFPGQDSGYNLAEFAASPFRMKKDAMMEPSSFRTQTPNSPLRSRLV

SEQ ID NO: 76329 - protein, 371 aa, Arabidopsis thaliana
  peptide (1)..(371): Ceres Seq. ID no. 7107582
MCAIKEVKVISDDQTSKECLKQLNQEINLLNQLCHPNIVQYYGSELSEETLSVYLEYVSGGSIHKLLKDYGSFTEPVIQNYTRQILAGLAYLHGRNTVHRDIKGANILVDPNGEIKLADFGMAKHVTAFSTMLSFKGSPYWMAPEVVMSQNGYTHAVDIWSLGCTILEMATSKPPWSQFEGVAAIFKIGNSKDTPEIPDHLSNDAKNFIRLCLQRNPTVRPTASQLLEHPFLRNTTRVASTSLPKDFPPRSYDGNFSLQPTREPYPGRLSHDNYAKQPLSRTIKSPSRENVRPITSLPVSPCSSPLRQLGPAYKSCFLSPPHPSYAFPGQDSGYNLAEFAASPFRMKKDAMMEPSSFRTQTPNSPLRSRLV

SEQ ID NO: 76330 - DNA, 939 bp, Arabidopsis thaliana
  misc_feature (1)..(939): Ceres Seq. ID no. 7107587
  misc_feature (1)..(939): Ortholog of  Ceres SEQ ID NO 12610267 as cited in SEQ ID NO 51993
  misc_feature (1)..(939): Ortholog of  Ceres SEQ ID NO 13495070 as cited in SEQ ID NO 53216
  misc_feature (1)..(939): Ortholog of  Ceres SEQ ID NO 13661333 as cited in SEQ ID NO 61620
  misc_feature (1)..(939): Ortholog of  Ceres SEQ ID NO 13596812 as cited in SEQ ID NO 62283
  misc_feature (1)..(939): Ortholog of  Ceres SEQ ID NO 13623021 as cited in SEQ ID NO 0
  misc_feature (1)..(939): Ortholog of  Ceres SEQ ID NO 14309080 as cited in SEQ ID NO 0
ccacgcgtccggtctgaagaaagcagaatcaaatccatgtctttcagaggacttagcaggccaaatgcaatatctggaatgggtgttgcagatgagagcaaaaccacatttctagagcttcaaaggaaaaaaactcatcgctatgtggtcttcaagattgatgaatccaaaaaagaagttgttgttgagaaaactggaaatcctacagagagctacgatgatttcttagcttcacttcctgataatgactgcagatacgctgtttatgactttgatttcgttacttctgagaattgtcaaaagagcaaaatcttcttctttgcttggtctccttcgacctctggaattcgagccaaggtgctttactcgacttctaaagaccagttaagtagggagcttcaagggattcactatgagattcaagctactgatcctactgaggttgatcttgaagtgttacgcgaacgagcgaactgagagcaagcaaggttgctatgtctattcaaaacttatggtaatgtaatgaataattcgtattctctgtggattgatttgtgtaaacacagtttcatgttctatgtcaaactgtataacctctggtgtttcagattgcacaacctaaagcttaggtaaactgaatatggtttaagatcgtaaaaggttgatatattagtaatgttaagagggagaagaaacttctctttagtagataacgagaatgttgatgagcatgatgagagagttcttaaactagtctagcaaattctgtataagctcttgttgtagccatcttgaattcgaatctaatccttgcgaacaatataaaaagtggtagtgtgtaaagtttccctcatcatttgtggtttctttttctcactttcttcggtgtagtaaaatttaagttgtatgtataataattctatcatatacctgctttct

SEQ ID NO: 76331 - protein, 158 aa, Arabidopsis thaliana
  peptide (1)..(158): Ceres Seq. ID no. 7107588
PRVRSEESRIKSMSFRGLSRPNAISGMGVADESKTTFLELQRKKTHRYVVFKIDESKKEVVVEKTGNPTESYDDFLASLPDNDCRYAVYDFDFVTSENCQKSKIFFFAWSPSTSGIRAKVLYSTSKDQLSRELQGIHYEIQATDPTEVDLEVLRERAN

SEQ ID NO: 76332 - protein, 146 aa, Arabidopsis thaliana; identical to SEQ ID NO: 28358
  peptide (1)..(146): Ceres Seq. ID no. 7107589

SEQ ID NO: 76333 - protein, 132 aa, Arabidopsis thaliana; identical to SEQ ID NO: 28359
  peptide (1)..(132): Ceres Seq. ID no. 7107590

SEQ ID NO: 76334 - DNA, 943 bp, Arabidopsis thaliana
  misc_feature (1)..(943): Ceres Seq. ID no. 7107599
  misc_feature (1)..(943): Ortholog of  Ceres SEQ ID NO 15175425 as cited in SEQ ID NO 0
gtcgacccacgcgtccgtgaggatgagtagtaaaaattaggaagactctagtctgggagagactttcagcagctatttctttgtcttctttctctttaaagaacctcactctctctctctttagtcaaaaatccccaattcgtgaacaaattagggtttttgaagtttgaagaaggagagaaagatgagtgcttcaaggtttatcaagtgtgtcactgtcggcgacggtgctgttggaaagacttgtcttctcatctcctacactagcaacactttccccacggattatgtgccaactgtgttcgataatttcagtgccaatgtgattgttgatggcaacactatcaacttgggattgtgggatactgcagggcaagaggactacaatagactaagacctttgagctatcgcggtgcagatgtcttcttacttgcattctcacttgtcagcaaagctagctatgaaaatgtttctaaaaagtgggttcctgaactgagacattatgctcctggtgttcccatcatcctcgttggaacaaagcttgatcttcgagatgataagcaattctttgccgagcaccctggtgctgtgcctatctctaccgctcagggtgaagaactaaagaagctgattggggcgcctgcttatatcgaatgcagtgcaaaaactcaacagaatgtgaaagcagtgtttgatgcggctatcaaggtcgttctccagccaccaaaaaacaagaagaagaagaagagaaaatctcagaaaggttgttctatactctgattcaacaagaagaaaggaatcaacaggagaattagagctataagtatttgttttctcctttttcataacttgtttacccaaggaatcaaaaatctgttgtttgtagtctgaaaatgacaaaagttgaagaactagtaacaagtatttgtattccttgtttgc

SEQ ID NO: 76335 - protein, 198 aa, Arabidopsis thaliana; identical to SEQ ID NO: 30837
  peptide (1)..(198): Ceres Seq. ID no. 7107600

SEQ ID NO: 76336 - DNA, 928 bp, Arabidopsis thaliana
  misc_feature (1)..(928): Ceres Seq. ID no. 7107601
  misc_feature (1)..(928): Ortholog of  Ceres SEQ ID NO 13599287 as cited in SEQ ID NO 338
agtgtgagtaatttaggacgaacataaactcgtctccggtaaccaaaaatggtttccatgactacttcatcttcttcgtacggaacattctctacagtcttcaacagttctagacctaattcctcagcaacctttctcgtcccttccttgaaattctccaccggaatatcgaatttcgcgaatctgagtaatgggttttctctaaaatctccaattaatcctgggtttctcttcaagtctcgtcctttcactgtccaagctagagctgctgcagaaaaaaccgttcacgatttcaccgttaaggacattgatgggaaggatgttgctttgaacaaattcaaggggaaagttatgttgattgtcaatgttgcttcaagatgtggtttgacatcatcaaattactcagagctttcacatctgtacgagaaatacaaaactcaaggatttgagattctagcttttccctgcaatcagtttggtttccaagagcccgggtcaaactccgagatcaaacaattcgcttgcacccggtttaaagcagagttccctatatttgataaggttgacgtgaatggaccaagcacagcgccgatctacgagttcttgaaatcaaacgcaggaggattcttgggtggtctcattaaatggaactttgagaagttcttgattgataaaaagggaaaggtcgttgagaggtaccctcccaccacatcccctttccaaatcgagaaagacatccagaagttgcttgccgagcttaaaaacttttgctcatgagtgagcatatagagactgatggttaaagtaaccgtaaattgtgacataaagtttccggttattgcttgtataccttcttacattctaagttgtactaatcgcttaataatttgcgtataatggtaatgttatatctaaattactcacactg

SEQ ID NO: 76337 - protein, 242 aa, Arabidopsis thaliana
  peptide (1)..(242): Ceres Seq. ID no. 7107602
MVSMTTSSSSYGTFSTVFNSSRPNSSATFLVPSLKFSTGISNFANLSNGFSLKSPINPGFLFKSRPFTVQARAAAEKTVHDFTVKDIDGKDVALNKFKGKVMLIVNVASRCGLTSSNYSELSHLYEKYKTQGFEILAFPCNQFGFQEPGSNSEIKQFACTRFKAEFPIFDKVDVNGPSTAPIYEFLKSNAGGFLGGLIKWNFEKFLIDKKGKVVERYPPTTSPFQIEKDIQKLLAELKNFCS

SEQ ID NO: 76338 - protein, 239 aa, Arabidopsis thaliana
  peptide (1)..(239): Ceres Seq. ID no. 7107603
MTTSSSSYGTFSTVFNSSRPNSSATFLVPSLKFSTGISNFANLSNGFSLKSPINPGFLFKSRPFTVQARAAAEKTVHDFTVKDIDGKDVALNKFKGKVMLIVNVASRCGLTSSNYSELSHLYEKYKTQGFEILAFPCNQFGFQEPGSNSEIKQFACTRFKAEFPIFDKVDVNGPSTAPIYEFLKSNAGGFLGGLIKWNFEKFLIDKKGKVVERYPPTTSPFQIEKDIQKLLAELKNFCS

SEQ ID NO: 76339 - protein, 141 aa, Arabidopsis thaliana
  peptide (1)..(141): Ceres Seq. ID no. 7107604
MLIVNVASRCGLTSSNYSELSHLYEKYKTQGFEILAFPCNQFGFQEPGSNSEIKQFACTRFKAEFPIFDKVDVNGPSTAPIYEFLKSNAGGFLGGLIKWNFEKFLIDKKGKVVERYPPTTSPFQIEKDIQKLLAELKNFCS

SEQ ID NO: 76340 - DNA, 1029 bp, Arabidopsis thaliana
  misc_feature (1)..(1029): Ceres Seq. ID no. 7107633
  misc_feature (1)..(1029): Ortholog of  Ceres SEQ ID NO 14314390 as cited in SEQ ID NO 57717
agtgtgagtaatttaggaagattcgagtctctcggaaatggcatcacacgaccaccctcatcatcatcacgatcatgagcatgaccacgagaaatcagacggcggagaagggaaggcgtcgtgggtggggaaggacgggaaggtgtaccatagccacgatggactcgcacctcactcacacgaacccatctactctcctggctacttcagtcgccgagctcctccgcttcacgaccgtaacttctctgagagagcttttaccgtcggtattggcggtcccgttggcactgggaaaacggcattgatgcttgctctttgtagattcttgagggacaaatatagtcttgctgctgtgacaaatgatatattcacgaaagaggatggtgagtttctggtgaagaatggggctcctcctgaggaaaggattagagctgttgaaacaggtggatgtccacacgctgctatccgtgaagatatcagtatcaatttgggtcctcttgaggagttatctaacttattcaaggctgatttgcttctttgtgaatccggtggagataatttagctgctaatttcagtagagaactagctgactatatcatctacatcatcgatgtatcggctggtgataaaataccccgtaaaggcggccctggaatcactcaagctgatcttctggtgataaacaagactgaccttgcagcagctgttggggctgacttatcggtcatggaaagggattcactacgcatgcgtgatggagggccatttgtctttgctcaggtgaagcatgggcttggagtcgaggaaatcgtgaaccatgtcatgcactcatgggaacatgcgaccgggaagaagcgccagtgatgatggggttcttaagacccaaaatggataagatatgaaactgaatggaactctttcaatacttatcttgaactcaatttatgcgcaaaagtctatgtaatctgtttgttgtactcaagacataagagaaataaaaggtttgagcatgagactcattacattct

SEQ ID NO: 76341 - protein, 275 aa, Arabidopsis thaliana
  peptide (1)..(275): Ceres Seq. ID no. 7107634
MASHDHPHHHHDHEHDHEKSDGGEGKASWVGKDGKVYHSHDGLAPHSHEPIYSPGYFSRRAPPLHDRNFSERAFTVGIGGPVGTGKTALMLALCRFLRDKYSLAAVTNDIFTKEDGEFLVKNGAPPEERIRAVETGGCPHAAIREDISINLGPLEELSNLFKADLLLCESGGDNLAANFSRELADYIIYIIDVSAGDKIPRKGGPGITQADLLVINKTDLAAAVGADLSVMERDSLRMRDGGPFVFAQVKHGLGVEEIVNHVMHSWEHATGKKRQ

SEQ ID NO: 76342 - protein, 186 aa, Arabidopsis thaliana
  peptide (1)..(186): Ceres Seq. ID no. 7107635
MLALCRFLRDKYSLAAVTNDIFTKEDGEFLVKNGAPPEERIRAVETGGCPHAAIREDISINLGPLEELSNLFKADLLLCESGGDNLAANFSRELADYIIYIIDVSAGDKIPRKGGPGITQADLLVINKTDLAAAVGADLSVMERDSLRMRDGGPFVFAQVKHGLGVEEIVNHVMHSWEHATGKKRQ

SEQ ID NO: 76343 - DNA, 738 bp, Arabidopsis thaliana
  misc_feature (1)..(738): Ceres Seq. ID no. 7107636
  misc_feature (1)..(738): Ortholog of  Ceres SEQ ID NO 13495070 as cited in SEQ ID NO 53216
  misc_feature (1)..(738): Ortholog of  Ceres SEQ ID NO 12598241 as cited in SEQ ID NO 61025
  misc_feature (1)..(738): Ortholog of  Ceres SEQ ID NO 13661333 as cited in SEQ ID NO 61620
  misc_feature (1)..(738): Ortholog of  Ceres SEQ ID NO 15173749 as cited in SEQ ID NO 61775
  misc_feature (1)..(738): Ortholog of  Ceres SEQ ID NO 13596812 as cited in SEQ ID NO 62283
  misc_feature (1)..(738): Ortholog of  Ceres SEQ ID NO 13623021 as cited in SEQ ID NO 0
ccacgcgtccgaacacacaagactccattattctcctgcttcttcgtctcttcaattattttctctgagactagctttgattcaaccatggctaatgcagcatcaggaatggcagtccatgatgactgcaagctgaaatttatggaattgaagacgaaaaggacacaccgtttcatcatttacaagattgaggagctgcagaaacaagtgattgttgagaaaatcggtgaaccgggtcaaacccatgaggaccttgctgcaagtcttccagctgatgaatgccgctatgccattttcgattttgattttgtcagttctgagggtgtcccaaggagcaggatttttttcgtggcatggtctccggacacagcaagagtgagaagcaagatgatctatgcgagctccaaggacaggttcaagagagaactagacggaattcaggtcgagcttcaggcaaccgatccaaccgagatggatcttgatgttttcaaaagccgagccaattgatgaaagaaatcccctgaaaatttcggttgaatcaaactttttcggactattacctcagtgatgctttttcctaaagtttcgtgacggtaccaacctgaacagcttcattttatcagtttggtctttgtctttgtctttggtctcctttttgggtccttatagtgttgtcttaaaacttaaggaatctggcttgtgctctttaccattgtggaagaaatcgaaccctttatt

SEQ ID NO: 76344 - protein, 168 aa, Arabidopsis thaliana
  peptide (1)..(168): Ceres Seq. ID no. 7107637
PRVRTHKTPLFSCFFVSSIIFSETSFDSTMANAASGMAVHDDCKLKFMELKTKRTHRFIIYKIEELQKQVIVEKIGEPGQTHEDLAASLPADECRYAIFDFDFVSSEGVPRSRIFFVAWSPDTARVRSKMIYASSKDRFKRELDGIQVELQATDPTEMDLDVFKSRAN

SEQ ID NO: 76345 - protein, 139 aa, Arabidopsis thaliana; identical to SEQ ID NO: 34902
  peptide (1)..(139): Ceres Seq. ID no. 7107638

SEQ ID NO: 76346 - protein, 132 aa, Arabidopsis thaliana; identical to SEQ ID NO: 34903
  peptide (1)..(132): Ceres Seq. ID no. 7107639

SEQ ID NO: 76347 - DNA, 2208 bp, Arabidopsis thaliana
  misc_feature (1)..(2208): Ceres Seq. ID no. 7107644
  misc_feature (1)..(2208): Ortholog of  Ceres SEQ ID NO 15226186 as cited in SEQ ID NO 0
agagagagagagagagagagagagagagaggatctacctatagaggtggaaactgcagaatcagctccgaaaaacctcgagttctatattgatgaagaagactgtcatttgattccagttgaattctataaaccgagtgaagaagttcgagagatttccgacattaacggagattttatcctcgatttcggcgttgagcatgatttcacggcggcggcggagacggaggaaatctccgactttgcttcgccgggtgaatcgaaaccggaggatgcagagacgaatctagttgcttcggaaatggaaaacgacgacgaagaaacagacgcagaggtttctataggtacagagattcctgatcatgagcaaatcggagatattccttctcaccagctcattcctcaccacgatgacgatgatcatgaggaggaaacgttggagttcaaaacagtaacgattgaaaccaagatgccagtcttaaacatcaacgaagagcggattttagaagctcaaggctcgatggaaagctcgcatagtagtctacataacgctatgtttcacttagagcaaagagtatctgttgatggtattgaatgtcctgaaggagtactcactgttgataagttgaagtttgagttacaagaagagagaaaagcacttcacgcgttatacgaggagctggaggtagagaggaatgcgtctgctgttgctgccagtgaaacaatggcgatgatcaataggttgcatgaggagaaagctgcgatgcagatggaagcgttgcagtatcagagaatgatggaggagcaagctgagtttgatcaagaagctttgcagttgttgaatgagcttatggtgaatagagagaaggagaatgctgagcttgagaaggagctagaggtgtatagaaagagaatggaggagtatgaagctaaagagaaaatggggatgttgaggaggagattgagagattcctctgttgattcgtatagaaataatggcgattctgatgagaatagcaatggagagttacagtttaagaacgtgaaggggttacggattggaaatatagagagaatgagatggagaatacgccggtggatgttgtacttcgtcttgatgagtgtttagatgattatgatggagagaggctttcgattcttgggagattgaagtttcttgaagagaaactcacagatcttaataacgaagaggacgacgaggaggaggctaaaacgtttgagagtaatggtagcatcaatggaaatgagcatattcatggcaaagaaacaaacgggaagcacagagttatcaagtcaaagagattacttcccctgtttgatgcggtcgatggagagatggaaaacgggttaagtaacggaaaccatcacgaaaacgggtttgatgattcggagaagggtgagaatgtgacgatagaagaagaagtggatgagctttacgagaggttagaagctctagaggcagatagagagttcttaagacattgtgttggttcattgaaaaaaggagacaaaggtgtacatctcctccatgagattctgcaacatcttcgtgatctaaggaatatcgatcttactcgcgtcagagaaaacggagacatgagtttatgagtttgattttgagttttgggtttgagtccactctttgcatagtgacacaaagaacaagaaaaatcatacaggtatggaagtgacatgttgcttgagaggcaaggaacaacgacaaggtttcagatgaagaagaaaacgttctcagaataaaagtattttaagtatatactctgaggaaaagtgtcagatcagaatgttcgtctttcttcgttcattttcattattataagttttgttttttatattgaagatttatttagagagagggaagtgtcagtataatttcacttttatattttatatttgggagttgtctttatgagtggtggtaatagaaaaaggtagaatgatgagtgtatgtgtgtgtagtgtagtgtagttgagtactagtacttagtaaggtgagctattggtataaaaaaatgccaaaggcaagctgtcaaatttcttggatgtttgtggcagagctggaatgatttcagcaaagatgccaacaccaatgtacatatgcctttttggactttttagaacatttagaaaatttctgggcgactttagaattattgcttttaggtggggt

SEQ ID NO: 76348 - protein, 375 aa, Arabidopsis thaliana
  peptide (1)..(375): Ceres Seq. ID no. 7107645
REREREREREDLPIEVETAESAPKNLEFYIDEEDCHLIPVEFYKPSEEVREISDINGDFILDFGVEHDFTAAAETEEISDFASPGESKPEDAETNLVASEMENDDEETDAEVSIGTEIPDHEQIGDIPSHQLIPHHDDDDHEEETLEFKTVTIETKMPVLNINEERILEAQGSMESSHSSLHNAMFHLEQRVSVDGIECPEGVLTVDKLKFELQEERKALHALYEELEVERNASAVAASETMAMINRLHEEKAAMQMEALQYQRMMEEQAEFDQEALQLLNELMVNREKENAELEKELEVYRKRMEEYEAKEKMGMLRRRLRDSSVDSYRNNGDSDENSNGELQFKNVKGLRIGNIERMRWRIRRWMLYFVLMSV

SEQ ID NO: 76349 - protein, 275 aa, Arabidopsis thaliana
  peptide (1)..(275): Ceres Seq. ID no. 7107646
MENDDEETDAEVSIGTEIPDHEQIGDIPSHQLIPHHDDDDHEEETLEFKTVTIETKMPVLNINEERILEAQGSMESSHSSLHNAMFHLEQRVSVDGIECPEGVLTVDKLKFELQEERKALHALYEELEVERNASAVAASETMAMINRLHEEKAAMQMEALQYQRMMEEQAEFDQEALQLLNELMVNREKENAELEKELEVYRKRMEEYEAKEKMGMLRRRLRDSSVDSYRNNGDSDENSNGELQFKNVKGLRIGNIERMRWRIRRWMLYFVLMSV

SEQ ID NO: 76350 - protein, 219 aa, Arabidopsis thaliana
  peptide (1)..(219): Ceres Seq. ID no. 7107647
MPVLNINEERILEAQGSMESSHSSLHNAMFHLEQRVSVDGIECPEGVLTVDKLKFELQEERKALHALYEELEVERNASAVAASETMAMINRLHEEKAAMQMEALQYQRMMEEQAEFDQEALQLLNELMVNREKENAELEKELEVYRKRMEEYEAKEKMGMLRRRLRDSSVDSYRNNGDSDENSNGELQFKNVKGLRIGNIERMRWRIRRWMLYFVLMSV

SEQ ID NO: 76351 - DNA, 1276 bp, Arabidopsis thaliana
  misc_feature (1)..(1276): Ceres Seq. ID no. 7107680
  misc_feature (1)..(1276): Ortholog of  Ceres SEQ ID NO 15176919 as cited in SEQ ID NO 54698
  misc_feature (1)..(1276): Ortholog of  Ceres SEQ ID NO 14302702 as cited in SEQ ID NO 57154
  misc_feature (1)..(1276): Ortholog of  Ceres SEQ ID NO 15179344 as cited in SEQ ID NO 0
gaattcccgggtcgacccacgcgtccggatgatgttgcaacagcatcagccttctttctctctccttacttcttctctgtctgacttcaatggcgctaagctccatttacaagtccagtacaagaggaaggttcatcagccaaaaggagcactctatgtttcagcgtcgagcgaaaagaagattctgataatgggtggtactcgattcattggtctgttcttgtccaggatccttgtcaaagagggacatcaggttacattgttcacaaggggtaaatctcctattgccaaacaattgcccggtgaatctgaccaagactttgctgatttctcttctaagattcttcacttgaaaggagacagaaaggactatgactttgtgaagtcaagtctttcagcagaaggcttcgatgttgtttatgatatcaacgggagggaggccgaagaagttgagcccatactagaagcactacccaaactagagcagtacatctactgttcttcagctggtgtttatctgaaatctgatatcttgccacattgtgaggaggatgcagttgatccgaagagcaggcacaaggggaagctggagactgagagcttactgcaatcaaaaggtgtaaactggacttctatacgtcctgtctacatctacggtccattgaattacaaccccgtcgaagaatggtttttccaccgtctaaaggcaggtcgcccaatcccggttccaaactctgggatacagatctcacaactcggtcacgttaaggacttggcaacagcctttctcaacgtgcttggtaacgagaaagccagcagagagatattcaacatctcgggggagaaatatgttacctttgatgggttagcaaaagcttgcgcaaaggccggtgggtttccggagccagagattgttcattacaacccgaaagagttcgactttgggaagaagaaggcattccctttccgtgatcagcatttctttgcatcggtggagaaagcaaagcatgtcctcggatggaaaccggagttcgacttagtggagggtctcactgactcatacaaccttgatttcggtcgcggaacattccggaaagaagcggatttcaccactgacgacatgattctgagcaagaaacttgttcttcaataatcgaaatcctaagagttgctcattcttggcttgtatgattctgatcacccggttctcttaaagttctgaactttattgtcatctcacgtatgttatggtccggattttgttcgacttttctct

SEQ ID NO: 76352 - protein, 383 aa, Arabidopsis thaliana
  peptide (1)..(383): Ceres Seq. ID no. 7107681
NSRVDPRVRMMLQQHQPSFSLLTSSLSDFNGAKLHLQVQYKRKVHQPKGALYVSASSEKKILIMGGTRFIGLFLSRILVKEGHQVTLFTRGKSPIAKQLPGESDQDFADFSSKILHLKGDRKDYDFVKSSLSAEGFDVVYDINGREAEEVEPILEALPKLEQYIYCSSAGVYLKSDILPHCEEDAVDPKSRHKGKLETESLLQSKGVNWTSIRPVYIYGPLNYNPVEEWFFHRLKAGRPIPVPNSGIQISQLGHVKDLATAFLNVLGNEKASREIFNISGEKYVTFDGLAKACAKAGGFPEPEIVHYNPKEFDFGKKKAFPFRDQHFFASVEKAKHVLGWKPEFDLVEGLTDSYNLDFGRGTFRKEADFTTDDMILSKKLVLQ

SEQ ID NO: 76353 - protein, 374 aa, Arabidopsis thaliana
  peptide (1)..(374): Ceres Seq. ID no. 7107682
MMLQQHQPSFSLLTSSLSDFNGAKLHLQVQYKRKVHQPKGALYVSASSEKKILIMGGTRFIGLFLSRILVKEGHQVTLFTRGKSPIAKQLPGESDQDFADFSSKILHLKGDRKDYDFVKSSLSAEGFDVVYDINGREAEEVEPILEALPKLEQYIYCSSAGVYLKSDILPHCEEDAVDPKSRHKGKLETESLLQSKGVNWTSIRPVYIYGPLNYNPVEEWFFHRLKAGRPIPVPNSGIQISQLGHVKDLATAFLNVLGNEKASREIFNISGEKYVTFDGLAKACAKAGGFPEPEIVHYNPKEFDFGKKKAFPFRDQHFFASVEKAKHVLGWKPEFDLVEGLTDSYNLDFGRGTFRKEADFTTDDMILSKKLVLQ

SEQ ID NO: 76354 - protein, 373 aa, Arabidopsis thaliana
  peptide (1)..(373): Ceres Seq. ID no. 7107683
MLQQHQPSFSLLTSSLSDFNGAKLHLQVQYKRKVHQPKGALYVSASSEKKILIMGGTRFIGLFLSRILVKEGHQVTLFTRGKSPIAKQLPGESDQDFADFSSKILHLKGDRKDYDFVKSSLSAEGFDVVYDINGREAEEVEPILEALPKLEQYIYCSSAGVYLKSDILPHCEEDAVDPKSRHKGKLETESLLQSKGVNWTSIRPVYIYGPLNYNPVEEWFFHRLKAGRPIPVPNSGIQISQLGHVKDLATAFLNVLGNEKASREIFNISGEKYVTFDGLAKACAKAGGFPEPEIVHYNPKEFDFGKKKAFPFRDQHFFASVEKAKHVLGWKPEFDLVEGLTDSYNLDFGRGTFRKEADFTTDDMILSKKLVLQ

SEQ ID NO: 76355 - DNA, 1227 bp, Arabidopsis thaliana
  misc_feature (1)..(1227): Ceres Seq. ID no. 7107684
  misc_feature (1)..(1227): Ortholog of  Ceres SEQ ID NO 15178083 as cited in SEQ ID NO 56185
  misc_feature (1)..(1227): Ortholog of  Ceres SEQ ID NO 15225046 as cited in SEQ ID NO 57061
  misc_feature (1)..(1227): Ortholog of  Ceres SEQ ID NO 15173586 as cited in SEQ ID NO 61901
  misc_feature (1)..(1227): Ortholog of  Ceres SEQ ID NO 15179881 as cited in SEQ ID NO 66861
ttttcaaaataaaaattgaaaaaaccaaaaagacacactcataaaagatttattttagagaacaaaaaaatcagaaatataaaaaactgtcttaaggaagagaaaggaacaaaagaaaacagatgtgagctcttcttcttcgtcttcttctctctattttattctcatcctctcctcacagttactataagctcgtctatggccagagacggtggtgtttcttgtttacgaaggtcggagatgatgagcgtcggtggtatcggaggaattgaatctgcgccgttggatttagatgaagttcatgtcttagccgttgatgacagtctcgttgatcgtattgtcatcgagagattgcttcgtattacttcctgcaaagttacggcggtagatagtggatggcgtgctctggaatttctagggttagataatgagaaagcttctgctgaattcgatagattgaaagttgatttgatcatcactgattactgtatgcctggaatgactggttatgagcttctcaagaagattaaggaatcgtccaatttcagagaagttccggttgtaatcatgtcgtcggagaatgtattgaccagaatcgacagatgccttgaggaaggtgctcaagatttcttattgaaaccggtgaaactcgccgacgtgaaacgtctgagaagtcatttaactaaagacgttaaactttccaacggaaacaaacggaagcttccggaagattctagttccgttaactcttcgcttcctccaccgtcacctccgttgactatctcgcctgaatcgtcgccgccgttgactgtttcgactgaatcgtcggattcgtctccgccgttatctccggtggagatcttttccacctcgccactttcatctccgatagacgatgaagatgatgacgtgttgacgtcgtcgtcggaggaatcgccgattcgacggcagaagatgaggagtcccggattagattagtggaactattctgggatgccgtgtaatattatctatctccgttaacttcgtttttacctctgacggtgtttttaattgcacgttgacttgacgccgtcaaattttatagatgtccctttaatctctcgcgcctccacgtgggccttttttccttttccttaaagcttttcgaatatcttttaattattttaatttctgcacaaagttacgtttttaactaaaggatccgcggccgctctagaactagtg

SEQ ID NO: 76356 - protein, 259 aa, Arabidopsis thaliana; identical to SEQ ID NO: 46156
  peptide (1)..(259): Ceres Seq. ID no. 7107685

SEQ ID NO: 76357 - protein, 245 aa, Arabidopsis thaliana; identical to SEQ ID NO: 46157
  peptide (1)..(245): Ceres Seq. ID no. 7107686

SEQ ID NO: 76358 - protein, 244 aa, Arabidopsis thaliana
  peptide (1)..(244): Ceres Seq. ID no. 7107687
MSVGGIGGIESAPLDLDEVHVLAVDDSLVDRIVIERLLRITSCKVTAVDSGWRALEFLGLDNEKASAEFDRLKVDLIITDYCMPGMTGYELLKKIKESSNFREVPVVIMSSENVLTRIDRCLEEGAQDFLLKPVKLADVKRLRSHLTKDVKLSNGNKRKLPEDSSSVNSSLPPPSPPLTISPESSPPLTVSTESSDSSPPLSPVEIFSTSPLSSPIDDEDDDVLTSSSEESPIRRQKMRSPGLD

SEQ ID NO: 76359 - DNA, 937 bp, Arabidopsis thaliana
  misc_feature (1)..(937): Ceres Seq. ID no. 7107688
  misc_feature (1)..(937): Ortholog of  Ceres SEQ ID NO 13639221 as cited in SEQ ID NO 56429
  misc_feature (1)..(937): Ortholog of  Ceres SEQ ID NO 13624608 as cited in SEQ ID NO 0
gtcgacccacgcgtccgactctctctctaatctatctatccgagaatggccaagatgggcttgaaacccgacccggctactactaaccagacccacaataatgccaaggagattcgttacagaggcgttaggaagcgtccttggggccgttatgccgccgagatccgagatccgggcaagaaaacccgcgtctggcttggcactttcgatacggctgaagaggcggcgcgtgcttacgatacggcggcgcgtgattttcgtggtgctaaggctaagaccaatttcccaacttttctcgagctgagtgaccagaaggtccctaccggtttcgcgcgtagccctagccagagcagcacgctcgactgtgcttctcctccgacgttagttgtgccttcagcgacggctgggaatgttcccccgcagctcgagcttagtctcggcggaggaggcggcggctcgtgttatcagatcccgatgtcgcgtcctgtctactttttggacctgatggggatcggtaacgtaggtcgtggtcagcctcctcctgtgacatcggcgtttagatcgccggtggtgcatgttgcgacgaagatggcttgtggtgcccaaagcgactctgattcgtcatcggtcgttgatttcgaaggtgggatggagaagagatctcagactgttagatctagatcttaatttgcctcctccatcggaacaggcctgagcttttaacggtgtcgtttcaattcgaagcgcatgcgtttcttcttctttttgagctgtgaaaattcgttttctcatagtttttcctctctctctctctcagtctaaatttattaccagtttttagaaagaaaaaacagattaaatctgagagagaaaaatataattttagctgacatggatcgttatgtacatattattacataaccggagatctgaactg

SEQ ID NO: 76360 - protein, 213 aa, Arabidopsis thaliana
  peptide (1)..(213): Ceres Seq. ID no. 7107689
MAKMGLKPDPATTNQTHNNAKEIRYRGVRKRPWGRYAAEIRDPGKKTRVWLGTFDTAEEAARAYDTAARDFRGAKAKTNFPTFLELSDQKVPTGFARSPSQSSTLDCASPPTLVVPSATAGNVPPQLELSLGGGGGGSCYQIPMSRPVYFLDLMGIGNVGRGQPPPVTSAFRSPVVHVATKMACGAQSDSDSSSVVDFEGGMEKRSQTVRSRS

SEQ ID NO: 76361 - protein, 210 aa, Arabidopsis thaliana
  peptide (1)..(210): Ceres Seq. ID no. 7107690
MGLKPDPATTNQTHNNAKEIRYRGVRKRPWGRYAAEIRDPGKKTRVWLGTFDTAEEAARAYDTAARDFRGAKAKTNFPTFLELSDQKVPTGFARSPSQSSTLDCASPPTLVVPSATAGNVPPQLELSLGGGGGGSCYQIPMSRPVYFLDLMGIGNVGRGQPPPVTSAFRSPVVHVATKMACGAQSDSDSSSVVDFEGGMEKRSQTVRSRS

SEQ ID NO: 76362 - DNA, 835 bp, Arabidopsis thaliana
  misc_feature (1)..(835): Ceres Seq. ID no. 7107698
  misc_feature (1)..(835): Ortholog of  Ceres SEQ ID NO 15175519 as cited in SEQ ID NO 1110
  misc_feature (1)..(835): Ortholog of  Ceres SEQ ID NO 13637980 as cited in SEQ ID NO 58973
  misc_feature (1)..(835): Ortholog of  Ceres SEQ ID NO 12624081 as cited in SEQ ID NO 61729
  misc_feature (1)..(835): Ortholog of  Ceres SEQ ID NO 13599435 as cited in SEQ ID NO 0
ccacgcgtccgctcatttcctccaaacgtcaaacatagcagcagccatggctgccaccaacacaatcctcgcattctcatctccttctcgtcttctcattcctccttcctccaatccttcaactctccgttcctctttcagcggcgtctctctcaacaacaacaatctccaccgtctccaatctgtttccttcgccgttaaagctccgtcgaaagcgttgacagttgtttccgcggcgaagaaggctgttgcagtgcttaaaggtacttctgatgtcgaaggagttgttactttgacccaagatgactcaggtcctacaactgtgaatgttcgtatcactggtctcactccagggcctcatggatttcatctccatgagtttggtgatacaactaatggatgtatctcaacaggaccacatttcaaccctaacaacatgacacacggagctccagaagatgagtgccgtcatgcgggtgacctgggaaacataaatgccaatgccgatggcgtggcagaaacaacaatagtggacaatcagattcctctgactggtcctaattctgttgttggaagagcctttgtggttcacgagcttaaggatgacctcggaaagggtggccatgarcttagtctgaccactggaaacgcaggcgggagattggcatgtggtgtgattggcttgacgccgctctaagtcagarggctaagcaagtactcttatgtctactgtgttgatcttgtctgtttgaacagatgtaagaatcttagcaaataatgtttggcttaataaactttgatgtttatgttcattgcatcaatttttctctttttg

SEQ ID NO: 76363 - protein, 231 aa, Arabidopsis thaliana
  peptide (1)..(231): Ceres Seq. ID no. 7107699
  misc_feature (209)..(209): Xaa is any aa, unknown or other
HASAHFLQTSNIAAAMAATNTILAFSSPSRLLIPPSSNPSTLRSSFSGVSLNNNNLHRLQSVSFAVKAPSKALTVVSAAKKAVAVLKGTSDVEGVVTLTQDDSGPTTVNVRITGLTPGPHGFHLHEFGDTTNGCISTGPHFNPNNMTHGAPEDECRHAGDLGNINANADGVAETTIVDNQIPLTGPNSVVGRAFVVHELKDDLGKGGHXLSLTTGNAGGRLACGVIGLTPL

SEQ ID NO: 76364 - protein, 216 aa, Arabidopsis thaliana
  peptide (1)..(216): Ceres Seq. ID no. 7107700
  misc_feature (194)..(194): Xaa is any aa, unknown or other
MAATNTILAFSSPSRLLIPPSSNPSTLRSSFSGVSLNNNNLHRLQSVSFAVKAPSKALTVVSAAKKAVAVLKGTSDVEGVVTLTQDDSGPTTVNVRITGLTPGPHGFHLHEFGDTTNGCISTGPHFNPNNMTHGAPEDECRHAGDLGNINANADGVAETTIVDNQIPLTGPNSVVGRAFVVHELKDDLGKGGHXLSLTTGNAGGRLACGVIGLTPL

SEQ ID NO: 76365 - DNA, 1275 bp, Arabidopsis thaliana
  misc_feature (1)..(1275): Ceres Seq. ID no. 7107701
  misc_feature (1)..(1275): Ortholog of  Ceres SEQ ID NO 12614942 as cited in SEQ ID NO 68635
ctacgtcaggggaaaaacaaaatggctgccatagcttctactctctctctttcttcaaccaaacctcagagacttttcgattcttccttccatggctcagccatctccgcagctcctatctccatcggtctcaaaccacgatctttctccgttcgcgccacaaccgctggttacgacttgaacgctttcacgttcgacccgatcaaggaatcgatcgtgtcacgtgagatgacgagaaggtacatgacggatatgatcacttatgctgagactgatgtcgtcgtcgttggtgctggatctgctggtttatctgctgcttatgagatcagtaagaaccctaatgttcaagttgccattattgagcaatctgttagtcctggtggtggtgcttggctcggtggtcagcttttctccgccatgattgttcgcaaaccagctcacttgttccttgacgagattggtgtggcttacgatgagcaagacacctacgttgtggttaagcacgcggctctgttcacatcaaccatcatgagcaagcttttggctcgtcctaatgtgaagctcttcaacgctgtggctgctgaggatttgattgtgaaaggaaacagagttggtggtgtggtgactaactgggctcttgtggctcagaaccaccacacacaatcgtgtatggaccctaatgttatggaagcgaagattgtggttagctcttgtggtcatgatggtccttttggagctactggtgttaagaggttgaagagtattgggatgattgatcatgttcctgggatgaaagctttggacatgaacactgctgaggacgctattgtgaggttgaccagagaggttgttcctggtatgattgttaccggtatggaagttgctgagatcgatggtgcaccgagaatgggaccaacttttggtgctatgatgatatcgggacaaaaggcgggacaacttgctcttaaggctttggggctaccgaatgctattgacggaactctcgttggaaacctaagcccggagctggtcttagccgcagcagattcagctgaaaccgtagatgcttaaaatcaaaaggttttaacgttaagaaaagtttcccttgatcttcggatgttgaaggagtgcaataaaaggagtttaggtgtttaatatgtcttgaacttttctggtgtctttgtttctctcttctgaacttctgtgtaaaatatcgtatccgttcattcgtaatgcgtatgttctcgttaaaaaaaaaccctgacgtagctcgag

SEQ ID NO: 76366 - protein, 356 aa, Arabidopsis thaliana
  peptide (1)..(356): Ceres Seq. ID no. 7107702
LRQGKNKMAAIASTLSLSSTKPQRLFDSSFHGSAISAAPISIGLKPRSFSVRATTAGYDLNAFTFDPIKESIVSREMTRRYMTDMITYAETDVVVVGAGSAGLSAAYEISKNPNVQVAIIEQSVSPGGGAWLGGQLFSAMIVRKPAHLFLDEIGVAYDEQDTYVVVKHAALFTSTIMSKLLARPNVKLFNAVAAEDLIVKGNRVGGVVTNWALVAQNHHTQSCMDPNVMEAKIVVSSCGHDGPFGATGVKRLKSIGMIDHVPGMKALDMNTAEDAIVRLTREVVPGMIVTGMEVAEIDGAPRMGPTFGAMMISGQKAGQLALKALGLPNAIDGTLVGNLSPELVLAAADSAETVDA

SEQ ID NO: 76367 - protein, 349 aa, Arabidopsis thaliana
  peptide (1)..(349): Ceres Seq. ID no. 7107703
MAAIASTLSLSSTKPQRLFDSSFHGSAISAAPISIGLKPRSFSVRATTAGYDLNAFTFDPIKESIVSREMTRRYMTDMITYAETDVVVVGAGSAGLSAAYEISKNPNVQVAIIEQSVSPGGGAWLGGQLFSAMIVRKPAHLFLDEIGVAYDEQDTYVVVKHAALFTSTIMSKLLARPNVKLFNAVAAEDLIVKGNRVGGVVTNWALVAQNHHTQSCMDPNVMEAKIVVSSCGHDGPFGATGVKRLKSIGMIDHVPGMKALDMNTAEDAIVRLTREVVPGMIVTGMEVAEIDGAPRMGPTFGAMMISGQKAGQLALKALGLPNAIDGTLVGNLSPELVLAAADSAETVDA

SEQ ID NO: 76368 - protein, 280 aa, Arabidopsis thaliana
  peptide (1)..(280): Ceres Seq. ID no. 7107704
MTRRYMTDMITYAETDVVVVGAGSAGLSAAYEISKNPNVQVAIIEQSVSPGGGAWLGGQLFSAMIVRKPAHLFLDEIGVAYDEQDTYVVVKHAALFTSTIMSKLLARPNVKLFNAVAAEDLIVKGNRVGGVVTNWALVAQNHHTQSCMDPNVMEAKIVVSSCGHDGPFGATGVKRLKSIGMIDHVPGMKALDMNTAEDAIVRLTREVVPGMIVTGMEVAEIDGAPRMGPTFGAMMISGQKAGQLALKALGLPNAIDGTLVGNLSPELVLAAADSAETVDA

SEQ ID NO: 76369 - DNA, 907 bp, Arabidopsis thaliana
  misc_feature (1)..(907): Ceres Seq. ID no. 7107745
  misc_feature (1)..(907): Ortholog of  Ceres SEQ ID NO 13597542 as cited in SEQ ID NO 64986
cagtgtgagtaatttaggttgaccagaaaaacacacagagaaaggagaaaaacatggaggagttggcgcatccgtacgttccgagagatctgaacctacccggatacgtaccaatctcaatgtcaatgtcctccatcgtctctatctacctcggttcttccctccttgttgtctccctcgtctggcttctcttcgggaggaagaaagctaaacttgataagttgcttatgtgttggtggacattcactggtctcactcatgttattctcgagggctatttcgttttctcccctgagtttttcaaggacaacacttctgcttatcttgctgaagtttggaaagaatatagcaaaggtgattcgagatacgtaggtagagattctgcagttgtatctgttgaagggatcactgctgttatcgttggcccagcttctctcctagctatttatgccattgctaaggagaagtcgtatagctacgtgcttcagcttgcgatttcggtttgccagctctacggatgtttggtttatttcattactgctatcttggaaggagacaactttgccacaaactctttctactattactcctactacatcggggctaactgttggtgggtcttgataccttcactcatttctttccgttgctggaaaaagatttgtgcagctgctgccattgccaacaacaacgtcgagacaaagacgaagaagaaaacccgttgaagcaaggatcaaactctcttttatctcttcaggttactgctgctatagcaaatgaacatgagtctccttttgcggataatttatccattttaaaaactttagctatgttgtctgtctctcttacagcaataaacttgtgaggataatttatccatttttcatatgatatttgcgcttttgtt

SEQ ID NO: 76370 - protein, 223 aa, Arabidopsis thaliana
  peptide (1)..(223): Ceres Seq. ID no. 7107746
MEELAHPYVPRDLNLPGYVPISMSMSSIVSIYLGSSLLVVSLVWLLFGRKKAKLDKLLMCWWTFTGLTHVILEGYFVFSPEFFKDNTSAYLAEVWKEYSKGDSRYVGRDSAVVSVEGITAVIVGPASLLAIYAIAKEKSYSYVLQLAISVCQLYGCLVYFITAILEGDNFATNSFYYYSYYIGANCWWVLIPSLISFRCWKKICAAAAIANNNVETKTKKKTR

SEQ ID NO: 76371 - protein, 201 aa, Arabidopsis thaliana; identical to SEQ ID NO: 26204
  peptide (1)..(201): Ceres Seq. ID no. 7107747

SEQ ID NO: 76372 - protein, 199 aa, Arabidopsis thaliana; identical to SEQ ID NO: 26205
  peptide (1)..(199): Ceres Seq. ID no. 7107748

SEQ ID NO: 76373 - DNA, 1003 bp, Arabidopsis thaliana
  misc_feature (1)..(1003): Ceres Seq. ID no. 7107770
  misc_feature (1)..(1003): Ortholog of  Ceres SEQ ID NO 13595569 as cited in SEQ ID NO 56778
  misc_feature (1)..(1003): Ortholog of  Ceres SEQ ID NO 12611159 as cited in SEQ ID NO 59821
ccacgcgtccgcccacgcgtccgagtaaacataaaagtatgggaaggtcaccgtgctgtgagaaagctcacacaaacaaaggagcatggacgaaagaagaggacgagaggctcgtcgcctacattaaagctcatggagaaggctgctggagatctctccccaaagccgccggacttcttcgctgtggcaagagctgccgtctccggtggatcaactatctccggcctgaccttaagcgtggaaacttcaccgaggaagaagacgaactcatcatcaagctccatagccttcttggcaacaaatggtcgcttattgccgggagattaccgggaagaacagataacgagataaagaactattggaacacgcatatacgaagaaagcttataaacagagggattgatccaacgagtcatagaccaatccaagaatcatcagcttctcaagattctaaacctatacaactagaaccagttacgagtaataccattaatatctcattcacttctgctccaaaggtcgaaacgttccatgaaagtataagctttccgggaaaatcagagaaaatctcaatgcttacgttcaaagaagaaaaagatgagtgcccagttcaagaaaagttcccagatttgaatcttgagctcagaatcagtcttcctgatgatgttgatcgtcttcaagggcatggaaagtcaacaacgccacgttgtttcaagtgcagcttagggatgataaacggcatggagtgcagatgcggaagaatgagatgcgatgtagtcggaggtagcagcaaggggagtgacatgagcaatggatttgattttttagggttggcaaagaaagagaccacttctcttttgggctttcgaagcttggagatgaaataatattgtcaaattttaggcgtaactgtacaaaacttttgcctagataatttgaaagtatatcttcaacttgtatgagaaatttaactggtgaattataatatatagaatttgttttt

SEQ ID NO: 76374 - protein, 294 aa, Arabidopsis thaliana
  peptide (1)..(294): Ceres Seq. ID no. 7107771
TRPPTRPSKHKSMGRSPCCEKAHTNKGAWTKEEDERLVAYIKAHGEGCWRSLPKAAGLLRCGKSCRLRWINYLRPDLKRGNFTEEEDELIIKLHSLLGNKWSLIAGRLPGRTDNEIKNYWNTHIRRKLINRGIDPTSHRPIQESSASQDSKPIQLEPVTSNTINISFTSAPKVETFHESISFPGKSEKISMLTFKEEKDECPVQEKFPDLNLELRISLPDDVDRLQGHGKSTTPRCFKCSLGMINGMECRCGRMRCDVVGGSSKGSDMSNGFDFLGLAKKETTSLLGFRSLEMK

SEQ ID NO: 76375 - protein, 282 aa, Arabidopsis thaliana
  peptide (1)..(282): Ceres Seq. ID no. 7107772
MGRSPCCEKAHTNKGAWTKEEDERLVAYIKAHGEGCWRSLPKAAGLLRCGKSCRLRWINYLRPDLKRGNFTEEEDELIIKLHSLLGNKWSLIAGRLPGRTDNEIKNYWNTHIRRKLINRGIDPTSHRPIQESSASQDSKPIQLEPVTSNTINISFTSAPKVETFHESISFPGKSEKISMLTFKEEKDECPVQEKFPDLNLELRISLPDDVDRLQGHGKSTTPRCFKCSLGMINGMECRCGRMRCDVVGGSSKGSDMSNGFDFLGLAKKETTSLLGFRSLEMK

SEQ ID NO: 76376 - DNA, 2208 bp, Arabidopsis thaliana
  misc_feature (1)..(2208): Ceres Seq. ID no. 7107781
  misc_feature (1)..(2208): Ortholog of  Ceres SEQ ID NO 14313674 as cited in SEQ ID NO 59602
tgagtaatttagagaaaacaatcagcgatgatgaatccccaaagaaacaaattcgtaaggtttaatggaaatgatgatgagttttcgaccaaaactaatagaccatcagtatcttcagttatgaaaaccgttagacgaagcttcgaaaaggggtcagagaaaatcagaacctttaagcggcccttaagcgttcattcaaataagaataaagaaaataataagaagaagaagatactaagagtgatgaatccgaacgattcatatcttcaaagctggaacaagattttcttgcttctctctgttgtggctttagcctttgatcctctgtttttctatatcccctatgtgaagcccgagcgattttgtcttaatctagacaagaaactccagacaatcgcttgcgttttccgcactttcatcgacgctttctatgtggttcacatgctgtttcagtttcataccggtttcatcactccttcttctagtggtttcggcagaggagagcttaatgagaaacataaagatatcgctttaagatacctcggctcatactttctaatcgatcttctttcgattctccctattcctcaggtagttgttctagctattgttccaaggatgagacgacccgcgtcgctagtagcaaaagagctactgaaatgggtaatcttttgccaatatgttccgaggatagcgagaatctatccgcttttcaaggaagtaacaagaacttctggtttggtaactgaaactgcttgggctggtgctgctttaaacctattcctctacatgttagctagccacgtttttgggtctttttggtacttgatttcgatagaaaggaaagatagatgttggcgtgaggcgtgtgctaacatacaagattgcagtcatgaaaaactgtactgttcaccaacaggggaagacaataggttatttttaaacggttcttgtccgttgatcgatcccgaagaaatcacaaactcgacggttttcaactttggtatattcgctgatgcattgcagtctggagttgtggagtctagagatttccctaagaagtttttctactgtttctggtggggtctccgcaatcttagtgctttgggccaaaacttgaagacgagttcctttgaaggagagatcatttttgcaatagtcatttgtatttctggactagtcttgtttgctctcctcattggaaatatgcagaaatatttgcaatcaactactgtaagagttgaggaaatgagagtgaaaaggagagatgcagagcaatggatgtctcatcggatgttgccagacgatctgagaaaacgtatccgtaaatacgaacagtataaatggcaagaaaccaaaggagttgaggaagaagctcttctctctagtcttccaaaagatctcagaaaggacattaaacgccatctttgtctcaagttgctcaaaaaggtgccttggttccaagctatggatgatcggttactagatgctctatgtgctcgtctcaaaacggttctttatacagagaaaagttacattgtgcgtgaaggtgaagcagtggaggatatgttgtttataatgagaggaaatttaatcagcaccactacttatggtggcaaaactggtttcttcaattctgttgacttagttgctggtgatttctgtggagatcttctcacttgggcattagatcctctcagttcccagttccctatctctagtagaaccgttcaagcgttgacagaagtcgaaggctttgttctctcagctgatgatctcaagtttgtcgctactcagtatcgtcgcctccatagcaagcaactccgacacatgttcaggttttattcagtgcaatggcagacatgggcagcatgttttatacaagcagcatggaagagacattgtagaaggaagctctcaaaggctttacgtcaagaagaaggcggaaaactacataacactcttcagaacgatgattcaggaggcaataaacttaacttaggtgctgcgattaatgcgtcgaggtttgcttctcatgctctgaggaatctaagagcaaatgcagcagcccgaaattctagattcccacacatgttaactttgttgcctcagaaaccagccgatcctgagtttcctatggatgaaacctagttgtgtatataggccctgttcgtttgcctgtcgctggcgactgaaaccagcgacagc

SEQ ID NO: 76377 - protein, 707 aa, Arabidopsis thaliana
  peptide (1)..(707): Ceres Seq. ID no. 7107782
MMNPQRNKFVRFNGNDDEFSTKTNRPSVSSVMKTVRRSFEKGSEKIRTFKRPLSVHSNKNKENNKKKKILRVMNPNDSYLQSWNKIFLLLSVVALAFDPLFFYIPYVKPERFCLNLDKKLQTIACVFRTFIDAFYVVHMLFQFHTGFITPSSSGFGRGELNEKHKDIALRYLGSYFLIDLLSILPIPQVVVLAIVPRMRRPASLVAKELLKWVIFCQYVPRIARIYPLFKEVTRTSGLVTETAWAGAALNLFLYMLASHVFGSFWYLISIERKDRCWREACANIQDCSHEKLYCSPTGEDNRLFLNGSCPLIDPEEITNSTVFNFGIFADALQSGVVESRDFPKKFFYCFWWGLRNLSALGQNLKTSSFEGEIIFAIVICISGLVLFALLIGNMQKYLQSTTVRVEEMRVKRRDAEQWMSHRMLPDDLRKRIRKYEQYKWQETKGVEEEALLSSLPKDLRKDIKRHLCLKLLKKVPWFQAMDDRLLDALCARLKTVLYTEKSYIVREGEAVEDMLFIMRGNLISTTTYGGKTGFFNSVDLVAGDFCGDLLTWALDPLSSQFPISSRTVQALTEVEGFVLSADDLKFVATQYRRLHSKQLRHMFRFYSVQWQTWAACFIQAAWKRHCRRKLSKALRQEEGGKLHNTLQNDDSGGNKLNLGAAINASRFASHALRNLRANAAARNSRFPHMLTLLPQKPADPEFPMDET

SEQ ID NO: 76378 - protein, 706 aa, Arabidopsis thaliana
  peptide (1)..(706): Ceres Seq. ID no. 7107783
MNPQRNKFVRFNGNDDEFSTKTNRPSVSSVMKTVRRSFEKGSEKIRTFKRPLSVHSNKNKENNKKKKILRVMNPNDSYLQSWNKIFLLLSVVALAFDPLFFYIPYVKPERFCLNLDKKLQTIACVFRTFIDAFYVVHMLFQFHTGFITPSSSGFGRGELNEKHKDIALRYLGSYFLIDLLSILPIPQVVVLAIVPRMRRPASLVAKELLKWVIFCQYVPRIARIYPLFKEVTRTSGLVTETAWAGAALNLFLYMLASHVFGSFWYLISIERKDRCWREACANIQDCSHEKLYCSPTGEDNRLFLNGSCPLIDPEEITNSTVFNFGIFADALQSGVVESRDFPKKFFYCFWWGLRNLSALGQNLKTSSFEGEIIFAIVICISGLVLFALLIGNMQKYLQSTTVRVEEMRVKRRDAEQWMSHRMLPDDLRKRIRKYEQYKWQETKGVEEEALLSSLPKDLRKDIKRHLCLKLLKKVPWFQAMDDRLLDALCARLKTVLYTEKSYIVREGEAVEDMLFIMRGNLISTTTYGGKTGFFNSVDLVAGDFCGDLLTWALDPLSSQFPISSRTVQALTEVEGFVLSADDLKFVATQYRRLHSKQLRHMFRFYSVQWQTWAACFIQAAWKRHCRRKLSKALRQEEGGKLHNTLQNDDSGGNKLNLGAAINASRFASHALRNLRANAAARNSRFPHMLTLLPQKPADPEFPMDET

SEQ ID NO: 76379 - protein, 676 aa, Arabidopsis thaliana
  peptide (1)..(676): Ceres Seq. ID no. 7107784
MKTVRRSFEKGSEKIRTFKRPLSVHSNKNKENNKKKKILRVMNPNDSYLQSWNKIFLLLSVVALAFDPLFFYIPYVKPERFCLNLDKKLQTIACVFRTFIDAFYVVHMLFQFHTGFITPSSSGFGRGELNEKHKDIALRYLGSYFLIDLLSILPIPQVVVLAIVPRMRRPASLVAKELLKWVIFCQYVPRIARIYPLFKEVTRTSGLVTETAWAGAALNLFLYMLASHVFGSFWYLISIERKDRCWREACANIQDCSHEKLYCSPTGEDNRLFLNGSCPLIDPEEITNSTVFNFGIFADALQSGVVESRDFPKKFFYCFWWGLRNLSALGQNLKTSSFEGEIIFAIVICISGLVLFALLIGNMQKYLQSTTVRVEEMRVKRRDAEQWMSHRMLPDDLRKRIRKYEQYKWQETKGVEEEALLSSLPKDLRKDIKRHLCLKLLKKVPWFQAMDDRLLDALCARLKTVLYTEKSYIVREGEAVEDMLFIMRGNLISTTTYGGKTGFFNSVDLVAGDFCGDLLTWALDPLSSQFPISSRTVQALTEVEGFVLSADDLKFVATQYRRLHSKQLRHMFRFYSVQWQTWAACFIQAAWKRHCRRKLSKALRQEEGGKLHNTLQNDDSGGNKLNLGAAINASRFASHALRNLRANAAARNSRFPHMLTLLPQKPADPEFPMDET

SEQ ID NO: 76380 - DNA, 2111 bp, Arabidopsis thaliana
  misc_feature (1)..(2111): Ceres Seq. ID no. 7107785
  misc_feature (1)..(2111): Ortholog of  Ceres SEQ ID NO 15168488 as cited in SEQ ID NO 59179
aaaagcttagcaaaattcttctgaatgaataatcggcgattatgtctttgaaaaacgatgcgagtagtagccacgacggtggaagcaacagagaaagcgtaatcgatgatcatggccgccgtaaaagcacttgcggctactgtaaatccccagctcggtccagtatctctcacggtttatcagcacagactcttaccgtttatgactaccaagctcttattgaccgaggctggagaagatctggtacttatctttacaaacatgagatggataaaacgtgttgccctccttatacgatacgtttgaaagcaagtgattttgttcctactaaagagcagcagcgagtttctagaagactagaaaggttcttggatggcaaactagatgtgcagcccagggaacaaagaggtgcttcttcctctggtgatgtttcagatacaaggagaaaaacacttggagctgctaaaagtgaagagaataagaaagttgaagcagttatggatgatttgtctaaaaatattgaccaagctgtgcaattatgcatacggagtggggaattcccgtctaatatgcagataccaaaagcttcagtgaagaaggttttctgtgctagaagaaagaaactagctgaaggaacagaacaaatcttatacaccagcaacattgcttttccaatagcagctgcaataaaacgcatccagacatctgagaaagaggggataaatagtgcagaaggaaatagattatcacctgaaactatttctgagatgttgttgagtgcaatgcataaggtgggggaaactcctgatgtgtctatcaaagtctgtaagggccatatcaatttcctttcatctgccaaagattctttttctgatagagatgttgtacctaatggtaacatctcgagaggagccaattctttagatggaagtgaaacccttcacgctaagaaggattcagaaaaccatcaggcaagaaagcgaaagctggagatacatttgaaaaggtctagttttgatcctgaagaacatgagttatacaaacggtatcagctgaaagtgcacaatgataagccagggcacgttgtagaaagttcatacagaaggtttttggtcgactctcctttaatagatgttcaaccttcaggtgatgaaaaggttccgccttgtggcttcggctctttccaccaacaatatagaattgatggccgcctaattgccgtcggggttgtagacattcttcctaaatgtttgtcaagtgtatacttattctgggatccagactatgcattcttatcgctcggaaaatattctgccattcaagaaattaattgggttatagagaaccaagctcgctgcccttctcttcagtattactatcttggttattatatacattcctgcagcaagatgagatataaagcagcctatcgtccatctgagcttctatgtcctctccgtttccagtgggttccatttgaagtagcaaggccgatgcttgataaaaagccatatgtcatattgtccgatattgctatttcacataatcaatgttctttactagctggtgcttctgaaactctcgtggaaccagcagcaagtgaacatgaagacatggaacaaggggagacgaatgataactttatgggctgcagtgatgaggatgaagatgaggatgatgatgatgatgatgatgatgaggaaatgtatgagactgaatcagaggactctcatattgagtcagaccctggatccaaagataacgacattaacaacatccttatcggtctttatggatcccaatatagatacaaggaaatgcggcagatcataactcccgtaggcaggaagcaactggaaccgatgttacaaagctaccgcaaggttgtgggcgctgagctttcagagagaatggtgtatgaaatcaactgaagcttcaacaataccaagctccattgagctttggtaccattagtcattagataaaactcaaaattgtttgtattcatgtttcagttgttgtatatctatgactatgagacttgtacatggtgtctttctttaagtttgtattttctgattacctttatattgaaaaaatttctgtccaag

SEQ ID NO: 76381 - protein, 629 aa, Arabidopsis thaliana
  peptide (1)..(629): Ceres Seq. ID no. 7107786
MSLKNDASSSHDGGSNRESVIDDHGRRKSTCGYCKSPARSSISHGLSAQTLTVYDYQALIDRGWRRSGTYLYKHEMDKTCCPPYTIRLKASDFVPTKEQQRVSRRLERFLDGKLDVQPREQRGASSSGDVSDTRRKTLGAAKSEENKKVEAVMDDLSKNIDQAVQLCIRSGEFPSNMQIPKASVKKVFCARRKKLAEGTEQILYTSNIAFPIAAAIKRIQTSEKEGINSAEGNRLSPETISEMLLSAMHKVGETPDVSIKVCKGHINFLSSAKDSFSDRDVVPNGNISRGANSLDGSETLHAKKDSENHQARKRKLEIHLKRSSFDPEEHELYKRYQLKVHNDKPGHVVESSYRRFLVDSPLIDVQPSGDEKVPPCGFGSFHQQYRIDGRLIAVGVVDILPKCLSSVYLFWDPDYAFLSLGKYSAIQEINWVIENQARCPSLQYYYLGYYIHSCSKMRYKAAYRPSELLCPLRFQWVPFEVARPMLDKKPYVILSDIAISHNQCSLLAGASETLVEPAASEHEDMEQGETNDNFMGCSDEDEDEDDDDDDDDEEMYETESEDSHIESDPGSKDNDINNILIGLYGSQYRYKEMRQIITPVGRKQLEPMLQSYRKVVGAELSERMVYEIN

SEQ ID NO: 76382 - protein, 554 aa, Arabidopsis thaliana
  peptide (1)..(554): Ceres Seq. ID no. 7107787
MDKTCCPPYTIRLKASDFVPTKEQQRVSRRLERFLDGKLDVQPREQRGASSSGDVSDTRRKTLGAAKSEENKKVEAVMDDLSKNIDQAVQLCIRSGEFPSNMQIPKASVKKVFCARRKKLAEGTEQILYTSNIAFPIAAAIKRIQTSEKEGINSAEGNRLSPETISEMLLSAMHKVGETPDVSIKVCKGHINFLSSAKDSFSDRDVVPNGNISRGANSLDGSETLHAKKDSENHQARKRKLEIHLKRSSFDPEEHELYKRYQLKVHNDKPGHVVESSYRRFLVDSPLIDVQPSGDEKVPPCGFGSFHQQYRIDGRLIAVGVVDILPKCLSSVYLFWDPDYAFLSLGKYSAIQEINWVIENQARCPSLQYYYLGYYIHSCSKMRYKAAYRPSELLCPLRFQWVPFEVARPMLDKKPYVILSDIAISHNQCSLLAGASETLVEPAASEHEDMEQGETNDNFMGCSDEDEDEDDDDDDDDEEMYETESEDSHIESDPGSKDNDINNILIGLYGSQYRYKEMRQIITPVGRKQLEPMLQSYRKVVGAELSERMVYEIN

SEQ ID NO: 76383 - protein, 477 aa, Arabidopsis thaliana
  peptide (1)..(477): Ceres Seq. ID no. 7107788
MDDLSKNIDQAVQLCIRSGEFPSNMQIPKASVKKVFCARRKKLAEGTEQILYTSNIAFPIAAAIKRIQTSEKEGINSAEGNRLSPETISEMLLSAMHKVGETPDVSIKVCKGHINFLSSAKDSFSDRDVVPNGNISRGANSLDGSETLHAKKDSENHQARKRKLEIHLKRSSFDPEEHELYKRYQLKVHNDKPGHVVESSYRRFLVDSPLIDVQPSGDEKVPPCGFGSFHQQYRIDGRLIAVGVVDILPKCLSSVYLFWDPDYAFLSLGKYSAIQEINWVIENQARCPSLQYYYLGYYIHSCSKMRYKAAYRPSELLCPLRFQWVPFEVARPMLDKKPYVILSDIAISHNQCSLLAGASETLVEPAASEHEDMEQGETNDNFMGCSDEDEDEDDDDDDDDEEMYETESEDSHIESDPGSKDNDINNILIGLYGSQYRYKEMRQIITPVGRKQLEPMLQSYRKVVGAELSERMVYEIN

SEQ ID NO: 76384 - DNA, 702 bp, Arabidopsis thaliana
  misc_feature (1)..(702): Ceres Seq. ID no. 7107797
  misc_feature (1)..(702): Ortholog of  Ceres SEQ ID NO 13599287 as cited in SEQ ID NO 338
cccacgcgtccgcagaaagagaccaacgacactgcaaatggcggatgaatctccaaagtctatctacgacttcaccgtcaaggatatcggaggtaacgatgtgagtttggaccaatacaaaggcaaaactcttttggttgtaaacgttgcttccaaatgtggtctgacggatgcgaactacaaggaactgaatgttctgtacgagaaatacaaggagcaagggttggagatattagcattcccgtgtaatcagttcttaggacaagaaccaggaaacaatgaagagattcaacaaactgtctgcaccaggttcaaagctgaattccccatctttgacaaggtggatgtgaacggtaagaacacggcaccattatacaagtacttgaaagcagagaaaggaggtttgctcattgatgctatcaaatggaacttcaccaaattcttggtttctcctgatggcaaggtcttacagagatattctcccagaacctctcctcttcaattcgagaaggacattcaaactgcgttgggacaggcctcttcttaatcaccagaagaagaagtttcaagaactttcgtttggtccaaattatgatcttagaatcatcaacattgcaaacttattttcttggaattctatcattcttgttttaaataattgatgtattggacgtcttttcatgggaggatatataatatatt

SEQ ID NO: 76385 - protein, 181 aa, Arabidopsis thaliana
  peptide (1)..(181): Ceres Seq. ID no. 7107798
PRVRRKRPTTLQMADESPKSIYDFTVKDIGGNDVSLDQYKGKTLLVVNVASKCGLTDANYKELNVLYEKYKEQGLEILAFPCNQFLGQEPGNNEEIQQTVCTRFKAEFPIFDKVDVNGKNTAPLYKYLKAEKGGLLIDAIKWNFTKFLVSPDGKVLQRYSPRTSPLQFEKDIQTALGQASS

SEQ ID NO: 76386 - protein, 169 aa, Arabidopsis thaliana; identical to SEQ ID NO: 35932
  peptide (1)..(169): Ceres Seq. ID no. 7107799

SEQ ID NO: 76387 - DNA, 1331 bp, Arabidopsis thaliana
  misc_feature (1)..(1331): Ceres Seq. ID no. 7107808
  misc_feature (1)..(1331): Ortholog of  Ceres SEQ ID NO 13597888 as cited in SEQ ID NO 64299
ccacgcgtccgcaaataatccctgacttcgtcacgtttctttgtatctccaacgtccaataaatgaaagcaactctagcagcaccctcttctctcacaagcctcccttatcgaaccaactcttctttcggctcaaagtcatcgcttctctttcggtctccatcctcctcctcctcagtctctatgacgacaacgcgtggaaacgtggctgtggcggctgctgctacatccactgaggcgctaagaaaaggaatagcggagttctacaatgaaacttcgggtttgtgggaagagatttggggagatcatatgcatcatggcttttatgaccctgattcttctgttcaactttctgattctggtcacaaggaagctcagatccgtatgattgaagagtctctccgtttcgccggtgttactgatgaagaggaggagaaaaagataaagaaagtagtggatgttgggtgtgggattggaggaagctcaagatatcttgcctctaaatttggagctgaatgcattggcattactctcagccctgttcaggccaagagagccaatgatctcgcggctgctcaatcactctctcataaggcttccttccaagttgcggatgcgttggatcagccattcgaagatggaaaattcgatctagtgtggtcgatggagagtggtgagcatatgcctgacaaggccaagtttgtaaaagagttggtacgtgtggcggctccaggaggtaggataataatagtgacatggtgccatagaaatctatctgcgggggaggaagctttgcagccgtgggagcaaaacatcttggacaaaatctgtaagacgttctatctcccggcttggtgctccaccgatgattatgtcaacttgcttcaatcccattctctccaggatattaagtgtgcggattggtcagagaacgtagctcctttctggcctgcggttatacggactgcattaacatggaagggccttgtgtctctgcttcgtagtggtatgaaaagtattaaaggagcattgacaatgccattgatgattgaaggttacaagaaaggtgtcattaagtttggtatcatcacttgccagaagccactctaagtctaaagctatactaggagattcaataagactataagagtagtgtctcatgtgaaagcatgaaattccttaaaaacgtcaatgttaagcctatgcttcgttatttgttttagataagtatcatttcactcttgtctaaggtagtttctataaacaataaataccatgaattagctcatgttatctggtaaattctcggaagtgattgtcatggattaactc

SEQ ID NO: 76388 - protein, 348 aa, Arabidopsis thaliana
  peptide (1)..(348): Ceres Seq. ID no. 7107809
MKATLAAPSSLTSLPYRTNSSFGSKSSLLFRSPSSSSSVSMTTTRGNVAVAAAATSTEALRKGIAEFYNETSGLWEEIWGDHMHHGFYDPDSSVQLSDSGHKEAQIRMIEESLRFAGVTDEEEEKKIKKVVDVGCGIGGSSRYLASKFGAECIGITLSPVQAKRANDLAAAQSLSHKASFQVADALDQPFEDGKFDLVWSMESGEHMPDKAKFVKELVRVAAPGGRIIIVTWCHRNLSAGEEALQPWEQNILDKICKTFYLPAWCSTDDYVNLLQSHSLQDIKCADWSENVAPFWPAVIRTALTWKGLVSLLRSGMKSIKGALTMPLMIEGYKKGVIKFGIITCQKPL

SEQ ID NO: 76389 - protein, 308 aa, Arabidopsis thaliana
  peptide (1)..(308): Ceres Seq. ID no. 7107810
MTTTRGNVAVAAAATSTEALRKGIAEFYNETSGLWEEIWGDHMHHGFYDPDSSVQLSDSGHKEAQIRMIEESLRFAGVTDEEEEKKIKKVVDVGCGIGGSSRYLASKFGAECIGITLSPVQAKRANDLAAAQSLSHKASFQVADALDQPFEDGKFDLVWSMESGEHMPDKAKFVKELVRVAAPGGRIIIVTWCHRNLSAGEEALQPWEQNILDKICKTFYLPAWCSTDDYVNLLQSHSLQDIKCADWSENVAPFWPAVIRTALTWKGLVSLLRSGMKSIKGALTMPLMIEGYKKGVIKFGIITCQKPL

SEQ ID NO: 76390 - protein, 266 aa, Arabidopsis thaliana
  peptide (1)..(266): Ceres Seq. ID no. 7107811
MHHGFYDPDSSVQLSDSGHKEAQIRMIEESLRFAGVTDEEEEKKIKKVVDVGCGIGGSSRYLASKFGAECIGITLSPVQAKRANDLAAAQSLSHKASFQVADALDQPFEDGKFDLVWSMESGEHMPDKAKFVKELVRVAAPGGRIIIVTWCHRNLSAGEEALQPWEQNILDKICKTFYLPAWCSTDDYVNLLQSHSLQDIKCADWSENVAPFWPAVIRTALTWKGLVSLLRSGMKSIKGALTMPLMIEGYKKGVIKFGIITCQKPL

SEQ ID NO: 76391 - DNA, 1079 bp, Arabidopsis thaliana
  misc_feature (1)..(1079): Ceres Seq. ID no. 7107822
  misc_feature (1)..(1079): Ortholog of  Ceres SEQ ID NO 14301765 as cited in SEQ ID NO 61955
  misc_feature (1)..(1079): Ortholog of  Ceres SEQ ID NO 12618205 as cited in SEQ ID NO 65153
  misc_feature (1)..(1079): Ortholog of  Ceres SEQ ID NO 12620986 as cited in SEQ ID NO 66720
gggtcgacccacgcgtccgggtaaagaaaaaatggcgcaacaatcgttgatctacagtttcgtagctcgcggcacggtgatcctcgttgagttcactgatttcaaaggtaatttcacctcaatcgctgctcagtgcctccagaagcttccgtcttcgaacaacaagttcacctacaactgcgacggtcataccttcaattaccttgtcgaagatggattcacctattgtgttgttgcggttgattctgctgggaggcaaattcccatgtcctttttggaaagagtaaaagaagattttaacaagcgatatggtggtggaaaggctgcaactgctcaagcaaacagcttgaataaggagtttggctctaaactgaaagagcatatgcagtattgcatggatcatcctgatgagattagcaagcttgctaaggtgaaggcgcaagtgtcagaagttaagggtgtaatgatggaaaacattgagaaggttcttgaccgtggtgagaaaattgagcttttggtggacaaaaccgaaaatcttcgctcacaggcacaagatttcagaacaacaggaacgcagatgagaagaaagatgtggcttcagaacatgaagataaaactcatagtgctcgccatcattatcgcactgattctcatcatcgtgctctcagtttgccatgggtttaagtgttaagcccagaaaattcaaaacttctgagatctttctcactcggtacatcgtagtgccttctcttttattgttcgatcttcaatctaatgtttctgcttgaattggttttgtatagatagacatatatgtatgctactcatttgctatattgcttgcatctgatgacattgatcccttgcgaaccagtcagtacttgacaagagatccgaaactattaaatgattttgttgactgaagattgcattgtggtggtgatgataaaaatttgagattgtattgacgattatacggcgtgatgtgtgttggttactttaaatttagataagagtagtgccctctctatatcgttactagggatggtagtacatatatatacgtacgtcatattccg

SEQ ID NO: 76392 - protein, 229 aa, Arabidopsis thaliana
  peptide (1)..(229): Ceres Seq. ID no. 7107823
GRPTRPGKEKMAQQSLIYSFVARGTVILVEFTDFKGNFTSIAAQCLQKLPSSNNKFTYNCDGHTFNYLVEDGFTYCVVAVDSAGRQIPMSFLERVKEDFNKRYGGGKAATAQANSLNKEFGSKLKEHMQYCMDHPDEISKLAKVKAQVSEVKGVMMENIEKVLDRGEKIELLVDKTENLRSQAQDFRTTGTQMRRKMWLQNMKIKLIVLAIIIALILIIVLSVCHGFKC

SEQ ID NO: 76393 - protein, 219 aa, Arabidopsis thaliana; identical to SEQ ID NO: 23487
  peptide (1)..(219): Ceres Seq. ID no. 7107824

SEQ ID NO: 76394 - protein, 141 aa, Arabidopsis thaliana; identical to SEQ ID NO: 23488
  peptide (1)..(141): Ceres Seq. ID no. 7107825

SEQ ID NO: 76395 - DNA, 1863 bp, Arabidopsis thaliana
  misc_feature (1)..(1863): Ceres Seq. ID no. 7107826
  misc_feature (1)..(1863): Ortholog of  Ceres SEQ ID NO 14302343 as cited in SEQ ID NO 67343
cgcccattttcacagatcaacgataaaccaaatcaaagcagctcctgggaacggttcgattcgagcagagagagagggagagagggagagagggagagagagttatggtttatgagtctctctgtgaacatggggacgaatgatctcgacatcgaagaagggactctggagatcggcatggagtatagaactgtttctggtgttgctggaccattggtcattcttgacaaagtgaagggtccaaagtaccaggagattgttaatattcgcttaggagatggatcaacgagacgtggtcaggttttggaagttgatggcgagaaagcagttgtgcaggtttttgaaggaacatctggaattgacaacaagtttacaaccgtgcaattcacaggagaggttttgaaaacacctgtatcattggacatgcttgggcgcatatttaacggttcaggaaagccgattgataatggccctcctattctgccagaagcataccttgatatttcaggaagttcaatcaaccccagtgaaagaacctatcctgaagagatgatacagacaggcatatcgaccatcgatgtcatgaattccattgctcgtggacagaagattccacttttctctgctgctggtcttccacataatgaaatagctgctcagatttgtcgtcaggctggtctagtcaagcgtttggaaaagactgttgatctacttgaggatcatggagaggacaattttgcaattgtgtttgcagctatgggtgtgaacatggagacagctcagttcttcaagcgagattttgaagaaaatggatcaatggagagagttactcttttcctgaacctggccaatgacccaaccattgagagaatcatcactcctcgaattgccctcacaacagctgaatatctggcttatgaatgtgggaaacacgtccttgtgatattgacggatatgagttcttatgctgatgctcttcgtgaggtttccgctgcccgagaagaggttcccggaagacgtggatatccaggttatatgtacactgatcttgcaactatttatgaacgtgctgggcgtatagaaggaagaaaaggttccatcacccaaattccaatcctcactatgcccaatgacgatatcactcatccaactccggatcttactggttacattactgaaggtcagatatatatcgataggcaacttcacaacagacagatatatccacccatcaacgtgcttccatccctttctcgtttaatgaagagtgctatcggcgagggcatgactcgtaaagaccattctgatgtgtcgaaccagctgtatgcaaattatgcaatcgggaaagatgttcaagcgatgaaagctgttgttggagaagaagcactttcttcagaggatttgctttatctagagtttttggataagtttgagaggaagtttgtgatgcaaggagcttatgatacacgcaacatcttccagtcgctggacttagcttggacattgctccgtatcttcccacgggagcttcttcatcgtatccctgcaaagacacttgaccaattctacagccgcgactcaaccagttaaaatgaggtaatggaggttatcttatcgaaactcttttgagagaaaagtgtgaatttttgtgatgtgtattatttggtgcttattataaagaggaaaaacaaagaaaagctatatattctgtgtctccctatctggtgatattttttttggttctgcattgtgttccaaagtggaaataaaaatcgataaacgatgtcgtattgtagtactttccttttctttgtatgaatttgttaagattggtttataaatgggattataataagtatcttt

SEQ ID NO: 76396 - protein, 529 aa, Arabidopsis thaliana
  peptide (1)..(529): Ceres Seq. ID no. 7107827
RPFSQINDKPNQSSSWERFDSSRERGREGERERELWFMSLSVNMGTNDLDIEEGTLEIGMEYRTVSGVAGPLVILDKVKGPKYQEIVNIRLGDGSTRRGQVLEVDGEKAVVQVFEGTSGIDNKFTTVQFTGEVLKTPVSLDMLGRIFNGSGKPIDNGPPILPEAYLDISGSSINPSERTYPEEMIQTGISTIDVMNSIARGQKIPLFSAAGLPHNEIAAQICRQAGLVKRLEKTVDLLEDHGEDNFAIVFAAMGVNMETAQFFKRDFEENGSMERVTLFLNLANDPTIERIITPRIALTTAEYLAYECGKHVLVILTDMSSYADALREVSAAREEVPGRRGYPGYMYTDLATIYERAGRIEGRKGSITQIPILTMPNDDITHPTPDLTGYITEGQIYIDRQLHNRQIYPPINVLPSLSRLMKSAIGEGMTRKDHSDVSNQLYANYAIGKDVQAMKAVVGEEALSSEDLLYLEFLDKFERKFVMQGAYDTRNIFQSLDLAWTLLRIFPRELLHRIPAKTLDQFYSRDSTS

SEQ ID NO: 76397 - protein, 492 aa, Arabidopsis thaliana
  peptide (1)..(492): Ceres Seq. ID no. 7107828
MSLSVNMGTNDLDIEEGTLEIGMEYRTVSGVAGPLVILDKVKGPKYQEIVNIRLGDGSTRRGQVLEVDGEKAVVQVFEGTSGIDNKFTTVQFTGEVLKTPVSLDMLGRIFNGSGKPIDNGPPILPEAYLDISGSSINPSERTYPEEMIQTGISTIDVMNSIARGQKIPLFSAAGLPHNEIAAQICRQAGLVKRLEKTVDLLEDHGEDNFAIVFAAMGVNMETAQFFKRDFEENGSMERVTLFLNLANDPTIERIITPRIALTTAEYLAYECGKHVLVILTDMSSYADALREVSAAREEVPGRRGYPGYMYTDLATIYERAGRIEGRKGSITQIPILTMPNDDITHPTPDLTGYITEGQIYIDRQLHNRQIYPPINVLPSLSRLMKSAIGEGMTRKDHSDVSNQLYANYAIGKDVQAMKAVVGEEALSSEDLLYLEFLDKFERKFVMQGAYDTRNIFQSLDLAWTLLRIFPRELLHRIPAKTLDQFYSRDSTS

SEQ ID NO: 76398 - protein, 486 aa, Arabidopsis thaliana; identical to SEQ ID NO: 46000
  peptide (1)..(486): Ceres Seq. ID no. 7107829

SEQ ID NO: 76399 - DNA, 1382 bp, Arabidopsis thaliana
  misc_feature (1)..(1382): Ceres Seq. ID no. 7107850
  misc_feature (1)..(1382): Ortholog of  Ceres SEQ ID NO 14301830 as cited in SEQ ID NO 62310
  misc_feature (1)..(1382): Ortholog of  Ceres SEQ ID NO 15179524 as cited in SEQ ID NO 0
gacccacgcgtccggtaaaccatggttgagccggcgaatactgttggtcttccggtgaacccgactccgttgctgaaagatgagctcgatatcgtgattccgactatcagaaacctcgatttcctcgagatgtggaggccttttcttcagccttaccatctgatcatcgtccaggacggagatccatcgaagaagatccatgtccctgaaggttacgactacgagctctacaacaggaacgacattaaccgaatcctcggacctaaggcttcttgtatctcgtttaaggattctgcttgtcgatgctttgggtacatggtgtctaagaagaagtatatcttcaccattgatgacgattgcttcgttgccaaggatccatcaggcaaagcagtgaacgctcttgagcaacacatcaagaaccttctctgcccatcgtctccctttttcttcaacaccttgtatgatccttaccgtgaaggtgctgatttcgtccgtggataccctttcagtctccgtgaaggtgtttccactgctgtttcccatggtctttggctcaacatccctgactacgatgccccgacccaactcgtgaagcctaaggagaggaacaccaggtatgtggatgctgtcatgaccaacccaaagggaacacttttcccaatgtgtggtatgaacttggcttttgaccgtgatttgattggcccggctatgtactttgttctcatgggtgatggtcagcctattggtcgttacgacgatatgtgggctggttggtgcatcaaggtgatctgtgaccacttgagcttgggagtgaagaccggtttaccgtatatctaccacagcaaagcgagcaacccttttgttaacctgaagaaggaatacaagggaatcttctggcaggaggagatcattccgttcttccagaacgcaaagctatcgaaagaagcagtaactgttcagcaatgctacattgagctctcaaagatggtcaaggagaagttgagctccttagacccgtactttgacaagcttgcagatgccatggttacatggattgaagcttgggatgagcttaacccaccagcagccagtggcaaaagcttgagagcagtatgagccaaaaagaaaaagccaccaaagttttggttatttttagctcaaattatcgttacttttaaatttctgattttacgaacctttcttgctttttttacacatttgagtagttttcatcatcagtactttctcattgtccggttatggtttttgcatttggtttaaatatcaccggtttatttataaacagtggtggattagtagtactattttctgagtttttttctttgtttcattaataaaaaggccttttcataggtgtttgc

SEQ ID NO: 76400 - protein, 364 aa, Arabidopsis thaliana
  peptide (1)..(364): Ceres Seq. ID no. 7107851
MVEPANTVGLPVNPTPLLKDELDIVIPTIRNLDFLEMWRPFLQPYHLIIVQDGDPSKKIHVPEGYDYELYNRNDINRILGPKASCISFKDSACRCFGYMVSKKKYIFTIDDDCFVAKDPSGKAVNALEQHIKNLLCPSSPFFFNTLYDPYREGADFVRGYPFSLREGVSTAVSHGLWLNIPDYDAPTQLVKPKERNTRYVDAVMTNPKGTLFPMCGMNLAFDRDLIGPAMYFVLMGDGQPIGRYDDMWAGWCIKVICDHLSLGVKTGLPYIYHSKASNPFVNLKKEYKGIFWQEEIIPFFQNAKLSKEAVTVQQCYIELSKMVKEKLSSLDPYFDKLADAMVTWIEAWDELNPPAASGKSLRAV

SEQ ID NO: 76401 - protein, 328 aa, Arabidopsis thaliana
  peptide (1)..(328): Ceres Seq. ID no. 7107852
MWRPFLQPYHLIIVQDGDPSKKIHVPEGYDYELYNRNDINRILGPKASCISFKDSACRCFGYMVSKKKYIFTIDDDCFVAKDPSGKAVNALEQHIKNLLCPSSPFFFNTLYDPYREGADFVRGYPFSLREGVSTAVSHGLWLNIPDYDAPTQLVKPKERNTRYVDAVMTNPKGTLFPMCGMNLAFDRDLIGPAMYFVLMGDGQPIGRYDDMWAGWCIKVICDHLSLGVKTGLPYIYHSKASNPFVNLKKEYKGIFWQEEIIPFFQNAKLSKEAVTVQQCYIELSKMVKEKLSSLDPYFDKLADAMVTWIEAWDELNPPAASGKSLRAV

SEQ ID NO: 76402 - protein, 266 aa, Arabidopsis thaliana
  peptide (1)..(266): Ceres Seq. ID no. 7107853
MVSKKKYIFTIDDDCFVAKDPSGKAVNALEQHIKNLLCPSSPFFFNTLYDPYREGADFVRGYPFSLREGVSTAVSHGLWLNIPDYDAPTQLVKPKERNTRYVDAVMTNPKGTLFPMCGMNLAFDRDLIGPAMYFVLMGDGQPIGRYDDMWAGWCIKVICDHLSLGVKTGLPYIYHSKASNPFVNLKKEYKGIFWQEEIIPFFQNAKLSKEAVTVQQCYIELSKMVKEKLSSLDPYFDKLADAMVTWIEAWDELNPPAASGKSLRAV

SEQ ID NO: 76403 - DNA, 1375 bp, Arabidopsis thaliana
  misc_feature (1)..(1375): Ceres Seq. ID no. 7107862
  misc_feature (1)..(1375): Ortholog of  Ceres SEQ ID NO 14301830 as cited in SEQ ID NO 62310
  misc_feature (1)..(1375): Ortholog of  Ceres SEQ ID NO 15179524 as cited in SEQ ID NO 0
gacccacgcgtccgctcaaatctccacaatcttttctctccaaattctcttctctctgaatcaatccaatcatggttgagccggcgaacaccgttggaattccggtgaaccacatcccattgttgaaggatgagctcgatatcgtgatccccacgatccgtaacctcgatttcctggagatgtggaggcctttttttcagccttaccatctgattatcgtccaagatggagatccatcgaagaccattgctgtccctgaagggttcgattacgaactctacaacaggaacgacatcaaccgtatccttggtcctaaagcttcctgcatttccttcaaggactctgcttgtcgttgcttcggctacatggtctccaagaagaagtacatcttcactattgatgacgattgcttcgttgctaaggatccatctggaaaagctgtgaacgctcttgagcaacacatcaagaaccttctctgcccatcaactccatttttcttcaacaccttgtacgacccataccgtgaaggtgctgacttcgtccgtggataccctttcagtctccgtgagggtgtttccaccgctgtttcccacggtctgtggctcaacatccctgattacgatgcccctacccaacttgtgaagcctaaggaaaggaacacaaggtatgtggatgctgtcatgaccatcccaaaggggactcttttccctatgtgtggtatgaacttggcctatgaccgtgagctcattggtccggctatgtactttggtctcatgggtgatggtcagcctattggtcgctacgacgatatgtgggctggatggtgtatcaaggtgatctgtgaccatttgggattgggagtgaagacaggtttgccctacatttaccacagcaaagccagcaacccgtttgtgaacttgaagaaggagtacaagggaatcttctggcaggaggatatcattcctttcttccagagcccaaagctcacgaaagaagctgtgacagttcaacaatgctacatggagctgtccaagttggtgaaggagaagctaagccccattgatccttactttgacaagcttgcagatgctatggtcacttggattgaagcttgggatgagcttaacccacccactaaagcttgagcagcaaaaaaaccaccaccgcagttttggttattagctcaacatatcatctatcttctccgttttgtttttgttttgtcttttctcaaattttccggcgattcttcagttcgtttttaagttgccggagtttatttaaatagtgaatggtgtagttctatttatgaccgagacaatctctcttttgaggtttttcgtttttgtttcaataataaaaaatcatatccctt

SEQ ID NO: 76404 - protein, 357 aa, Arabidopsis thaliana
  peptide (1)..(357): Ceres Seq. ID no. 7107863
MVEPANTVGIPVNHIPLLKDELDIVIPTIRNLDFLEMWRPFFQPYHLIIVQDGDPSKTIAVPEGFDYELYNRNDINRILGPKASCISFKDSACRCFGYMVSKKKYIFTIDDDCFVAKDPSGKAVNALEQHIKNLLCPSTPFFFNTLYDPYREGADFVRGYPFSLREGVSTAVSHGLWLNIPDYDAPTQLVKPKERNTRYVDAVMTIPKGTLFPMCGMNLAYDRELIGPAMYFGLMGDGQPIGRYDDMWAGWCIKVICDHLGLGVKTGLPYIYHSKASNPFVNLKKEYKGIFWQEDIIPFFQSPKLTKEAVTVQQCYMELSKLVKEKLSPIDPYFDKLADAMVTWIEAWDELNPPTKA

SEQ ID NO: 76405 - protein, 321 aa, Arabidopsis thaliana
  peptide (1)..(321): Ceres Seq. ID no. 7107864
MWRPFFQPYHLIIVQDGDPSKTIAVPEGFDYELYNRNDINRILGPKASCISFKDSACRCFGYMVSKKKYIFTIDDDCFVAKDPSGKAVNALEQHIKNLLCPSTPFFFNTLYDPYREGADFVRGYPFSLREGVSTAVSHGLWLNIPDYDAPTQLVKPKERNTRYVDAVMTIPKGTLFPMCGMNLAYDRELIGPAMYFGLMGDGQPIGRYDDMWAGWCIKVICDHLGLGVKTGLPYIYHSKASNPFVNLKKEYKGIFWQEDIIPFFQSPKLTKEAVTVQQCYMELSKLVKEKLSPIDPYFDKLADAMVTWIEAWDELNPPTKA

SEQ ID NO: 76406 - protein, 259 aa, Arabidopsis thaliana
  peptide (1)..(259): Ceres Seq. ID no. 7107865
MVSKKKYIFTIDDDCFVAKDPSGKAVNALEQHIKNLLCPSTPFFFNTLYDPYREGADFVRGYPFSLREGVSTAVSHGLWLNIPDYDAPTQLVKPKERNTRYVDAVMTIPKGTLFPMCGMNLAYDRELIGPAMYFGLMGDGQPIGRYDDMWAGWCIKVICDHLGLGVKTGLPYIYHSKASNPFVNLKKEYKGIFWQEDIIPFFQSPKLTKEAVTVQQCYMELSKLVKEKLSPIDPYFDKLADAMVTWIEAWDELNPPTKA

SEQ ID NO: 76407 - DNA, 880 bp, Arabidopsis thaliana
  misc_feature (1)..(880): Ceres Seq. ID no. 7107876
  misc_feature (1)..(880): Ortholog of  Ceres SEQ ID NO 14302008 as cited in SEQ ID NO 56021
gacccacgcgtccggttagcccagaaaggtcttaaccttatactcgttgctcgtaacccagacaagctcaaagatgtctctgattccatcagatctaagtatagtcaaactcagatcttgaccgttgtgatggatttctctggagatattgatgaaggtgtgaaacggattaaggagagtattgaaggattagatgttgggattttgattaataatgctggcatgtcttatccttatgctaagtattttcatgaggttgatgaagagttgatcaataacttgattaagatcaatgttgaaggaactactaaagttactcaagctgtgttgcctaatatgcttaagaggaagaaaggtgctattattaatatgggttctggtgctgctgctcttattccttcttatcctttttactctgtttatgctggtgctaaaacgtacgtggatcagttcacaaagtgtctacatgttgagtataagaagagtgggattgatgttcaatgccaggttcccttgtatgttgcaacaaagatgacaaaaataagaagagcatccttcttagttgcatcaccagagggttacgcaaaggcagcactgcgttttgtaggctatgaagcacaatgcacaccgtactggcctcacgctctcatgggtgcagttgtctctgcattgcccgaaagcgtttttgaatcatttaacatcaagagatgcctccagatccggaagaagggtctccaaaaagactccatgaagaaagaatgaatcttccaggtttaagttactaccaagaatttccttcttctgaagttgttggtttcttgaaaagcttctgttctgaatcttttgtaagacttgtactctttagttttctaagtttttt

SEQ ID NO: 76408 - protein, 253 aa, Arabidopsis thaliana
  peptide (1)..(253): Ceres Seq. ID no. 7107877
DPRVRLAQKGLNLILVARNPDKLKDVSDSIRSKYSQTQILTVVMDFSGDIDEGVKRIKESIEGLDVGILINNAGMSYPYAKYFHEVDEELINNLIKINVEGTTKVTQAVLPNMLKRKKGAIINMGSGAAALIPSYPFYSVYAGAKTYVDQFTKCLHVEYKKSGIDVQCQVPLYVATKMTKIRRASFLVASPEGYAKAALRFVGYEAQCTPYWPHALMGAVVSALPESVFESFNIKRCLQIRKKGLQKDSMKKE

SEQ ID NO: 76409 - protein, 210 aa, Arabidopsis thaliana
  peptide (1)..(210): Ceres Seq. ID no. 7107878
MDFSGDIDEGVKRIKESIEGLDVGILINNAGMSYPYAKYFHEVDEELINNLIKINVEGTTKVTQAVLPNMLKRKKGAIINMGSGAAALIPSYPFYSVYAGAKTYVDQFTKCLHVEYKKSGIDVQCQVPLYVATKMTKIRRASFLVASPEGYAKAALRFVGYEAQCTPYWPHALMGAVVSALPESVFESFNIKRCLQIRKKGLQKDSMKKE

SEQ ID NO: 76410 - protein, 179 aa, Arabidopsis thaliana
  peptide (1)..(179): Ceres Seq. ID no. 7107879
MSYPYAKYFHEVDEELINNLIKINVEGTTKVTQAVLPNMLKRKKGAIINMGSGAAALIPSYPFYSVYAGAKTYVDQFTKCLHVEYKKSGIDVQCQVPLYVATKMTKIRRASFLVASPEGYAKAALRFVGYEAQCTPYWPHALMGAVVSALPESVFESFNIKRCLQIRKKGLQKDSMKKE

SEQ ID NO: 76411 - DNA, 1844 bp, Arabidopsis thaliana
  misc_feature (1)..(1844): Ceres Seq. ID no. 7107883
  misc_feature (1)..(1844): Ortholog of  Ceres SEQ ID NO 15177304 as cited in SEQ ID NO 52668
cagtgtgagtaatttagcaaagcttttcaaaaaccagagaaaatgttcatcgagagcttcaaagttgagagcccaaatgtcaaatacacagagaatgagatcaattcggtgtacgattacgaaacaacagaggtcgtccatgagaatcgtaacggtacatatcagtgggtcgtgaagccaaagactgtcaaatacgatttcaaaacagacactcgtgtccccaaattaggggttatgcttgttggttggggaggaaacaatggatcaacactaaccgctggtgtcattgctaacaaagaaggaatatcgtgggcgactaaagacaaagtgcaacaagctaattactttggttcacttactcaagcttcttcgattcgtgttggatcttacaatggtgaagagatctacgctcctttcaagagtcttcttccaatggtgaatccagatgatgttgtgtttggtggttgggatataagtgacatgaatttagcggacgctatggctagagctagagttcttgacattgatctgcagaaacaacttagaccttacatggagaacatgatcccgcttcctggtatctatgatcctgatttcattgctgcgaatcaaggttcacgtgctaatagcgtgatcaaaggtaccaagaaggaacaagttgatcacatcatcaaggacatgagggagtttaaggagaagaacaaagtggataagttggttgtgttatggactgcaaacacagagcgttatagcaatgtgattgtaggacttaatgatacgacggagaatctattggcttctgttgaaaaggatgagtctgagatctcgccgtctacgttgtatgctattgcttgtgttcttgaagggatccctttcatcaatgggagtcctcagaatactttggtccccggtcttatcgagttggctatatcgaataattgtttgatcggtggagatgatttcaagagtggtcagactaagatgaaatccgtttgggttgatttccttgttggagctggcattaagcctacttctattgtgagctataatcatttgggaaacaacgacgggatgaacctctcagcgccacagactttccgctctaaggagatttcaaagagcaatgttgtagatgacatggtagctagtaatggcatcctctttgagcctggtgaacaccctgaccatgtcgttgtcatcaagtatgtaccatatgttgcggatagtaaaagagcaatggatgagtacacgtctgagatattcatgggagggaggaacacaattgtgttgcataacacttgtgaggactctctcttggctgcaccaattatcttggatcttgtccttctcgctgaactcagcaccagaatccagtttaaagctgaaggagaggggaagtttcactctttccacccggtagctaccatactcagttacctcacaaaggcacctcttgtaccgcccggaacagcggtggttaacgctctgtcgaagcagcggccaatgctggaaaacattcttagggcatgtgttgggcttgcgccagagaacaacatgatcatggagtacaagtgaaggatgaggaagaagaagtaaaggtacctaataagaccttaggatatgaagaacactgctccattgtttcattaatatatatcattttgtatgtatattatatgaatgtgtgtgtgagagataatatggataagcttagggttattttgtgtgatatggatctggtcggtttatttggtgagaaaattagccaaggttttggatcacatgtgtaaaagattaagtaattatgcttgtgtctccttgtaatataaccaaacttatgatct

SEQ ID NO: 76412 - protein, 510 aa, Arabidopsis thaliana
  peptide (1)..(510): Ceres Seq. ID no. 7107884
MFIESFKVESPNVKYTENEINSVYDYETTEVVHENRNGTYQWVVKPKTVKYDFKTDTRVPKLGVMLVGWGGNNGSTLTAGVIANKEGISWATKDKVQQANYFGSLTQASSIRVGSYNGEEIYAPFKSLLPMVNPDDVVFGGWDISDMNLADAMARARVLDIDLQKQLRPYMENMIPLPGIYDPDFIAANQGSRANSVIKGTKKEQVDHIIKDMREFKEKNKVDKLVVLWTANTERYSNVIVGLNDTTENLLASVEKDESEISPSTLYAIACVLEGIPFINGSPQNTLVPGLIELAISNNCLIGGDDFKSGQTKMKSVWVDFLVGAGIKPTSIVSYNHLGNNDGMNLSAPQTFRSKEISKSNVVDDMVASNGILFEPGEHPDHVVVIKYVPYVADSKRAMDEYTSEIFMGGRNTIVLHNTCEDSLLAAPIILDLVLLAELSTRIQFKAEGEGKFHSFHPVATILSYLTKAPLVPPGTAVVNALSKQRPMLENILRACVGLAPENNMIMEYK

SEQ ID NO: 76413 - protein, 446 aa, Arabidopsis thaliana
  peptide (1)..(446): Ceres Seq. ID no. 7107885
MLVGWGGNNGSTLTAGVIANKEGISWATKDKVQQANYFGSLTQASSIRVGSYNGEEIYAPFKSLLPMVNPDDVVFGGWDISDMNLADAMARARVLDIDLQKQLRPYMENMIPLPGIYDPDFIAANQGSRANSVIKGTKKEQVDHIIKDMREFKEKNKVDKLVVLWTANTERYSNVIVGLNDTTENLLASVEKDESEISPSTLYAIACVLEGIPFINGSPQNTLVPGLIELAISNNCLIGGDDFKSGQTKMKSVWVDFLVGAGIKPTSIVSYNHLGNNDGMNLSAPQTFRSKEISKSNVVDDMVASNGILFEPGEHPDHVVVIKYVPYVADSKRAMDEYTSEIFMGGRNTIVLHNTCEDSLLAAPIILDLVLLAELSTRIQFKAEGEGKFHSFHPVATILSYLTKAPLVPPGTAVVNALSKQRPMLENILRACVGLAPENNMIMEYK

SEQ ID NO: 76414 - protein, 380 aa, Arabidopsis thaliana
  peptide (1)..(380): Ceres Seq. ID no. 7107886
MVNPDDVVFGGWDISDMNLADAMARARVLDIDLQKQLRPYMENMIPLPGIYDPDFIAANQGSRANSVIKGTKKEQVDHIIKDMREFKEKNKVDKLVVLWTANTERYSNVIVGLNDTTENLLASVEKDESEISPSTLYAIACVLEGIPFINGSPQNTLVPGLIELAISNNCLIGGDDFKSGQTKMKSVWVDFLVGAGIKPTSIVSYNHLGNNDGMNLSAPQTFRSKEISKSNVVDDMVASNGILFEPGEHPDHVVVIKYVPYVADSKRAMDEYTSEIFMGGRNTIVLHNTCEDSLLAAPIILDLVLLAELSTRIQFKAEGEGKFHSFHPVATILSYLTKAPLVPPGTAVVNALSKQRPMLENILRACVGLAPENNMIMEYK

SEQ ID NO: 76415 - DNA, 1951 bp, Arabidopsis thaliana
  misc_feature (1)..(1951): Ceres Seq. ID no. 7107891
  misc_feature (1)..(1951): Ortholog of  Ceres SEQ ID NO 14313147 as cited in SEQ ID NO 54166
  misc_feature (1)..(1951): Ortholog of  Ceres SEQ ID NO 13598882 as cited in SEQ ID NO 0
caaaattcaaaaacctcacatttcacttctctcttctcgcttcttctagatctcaccggtttatctagctccggtttgattcatctccggttatggggagagaatgaggagttaccgttttagtgattatctacacatgtctgtttcattctctaacgatatggatttgttttgtggagaagactccggtgtgttttccggtgagtcaacggttgatttctcgtcttccgaggttgattcatggcctggtgattctatcgcttgttttatcgaagacgagcgtcacttcgttcctggacatgattatctctctagatttcaaactcgatctctcgatgcttccgctagagaagattccgtcgcatggattctcaaggtacaagcgtattataactttcagcctttaacggcgtacctcgccgttaactatatggatcggtttctttacgctcgtcgattaccggaaacgagtggttggccaatgcaacttttagcagtggcatgcttgtctttagctgcaaagatggaggaaattctcgttccttctctttttgattttcaggttgcaggagtgaagtatttatttgaagcaaaaactataaaaagaatggaacttcttgttctaagtgtgttagattggagactaagatcggttacaccgtttgatttcattagcttctttgcttacaagatcgatccttcgggtacctttctcgggttctttatctcccatgctacagagattatactctccaacataaaagaagcgagctttcttgagtactggccatcgagtatagctgcagccgcgattctctgtgtagcgaacgagttaccttctctatcctctgttgtcaatccccacgagagccctgagacttggtgtgacggattgagcaaagagaagatagtgagatgctatagactgatgaaagcgatggccatcgagaataaccggttaaatacaccaaaagtgatagcaaagcttcgagtgagtgtaagggcatcatcgacgttaacaaggccaagtgatgaatcctcttctccttgtaaaaggagaaaattaagtggctattcatgggtaggtgatgaaacatctacctctaattaaaatttggggagtgaaagtagaggaccaaggaaacaaaacctagaagaaaaaaaaccctcttctgtttaagtagagtatattttttaacaagtacatagtaataagggagtgatgaagaaaagtaaaagtgtttattggctgagttaaagtaattaagagttttccaaccaaggggaaggaataagagttttggttacaattacttttatggaaagggtaaaaattgggttttggggttggttggttggttgggagagacgaagctcacattaatggctttgcagattcccaagaaagcaaaatgagtaagtgagtgtaacacacacgtgttagagaaaagatatgatcatgtgagtgtgtgtgtgtgagagagagagagaagagtatttgcattagagtcctcatcacacaggtactgatggataagacaggggagcgtctgcaaaagatttgtgagtggagatttttctgagctctttgtcttaatggatcgcagcagttcatgggacccttcctcagcttcatcatcaaacaaaaaaaaaatcaagttgcgaagtatatataatttgttttttgtttggatttttaagatttttgattccttgtgtgtgacttcacgtgacggaggcgtgtgtctcacgtgtttgttttctcttcaaatcttttattttggcgggaaatttttgtgtttttgatttctatacgtattcgtggactccaaatgagttttgtcacggtgcgttttagtaacgtatgcatgcgtgtaaggtgtcacgtatgtgtatatatatgattttttttttggattcttgaaaggttaaattttatatataaaacgtt

SEQ ID NO: 76416 - protein, 335 aa, Arabidopsis thaliana
  peptide (1)..(335): Ceres Seq. ID no. 7107892
MRSYRFSDYLHMSVSFSNDMDLFCGEDSGVFSGESTVDFSSSEVDSWPGDSIACFIEDERHFVPGHDYLSRFQTRSLDASAREDSVAWILKVQAYYNFQPLTAYLAVNYMDRFLYARRLPETSGWPMQLLAVACLSLAAKMEEILVPSLFDFQVAGVKYLFEAKTIKRMELLVLSVLDWRLRSVTPFDFISFFAYKIDPSGTFLGFFISHATEIILSNIKEASFLEYWPSSIAAAAILCVANELPSLSSVVNPHESPETWCDGLSKEKIVRCYRLMKAMAIENNRLNTPKVIAKLRVSVRASSTLTRPSDESSSPCKRRKLSGYSWVGDETSTSN

SEQ ID NO: 76417 - protein, 324 aa, Arabidopsis thaliana
  peptide (1)..(324): Ceres Seq. ID no. 7107893
MSVSFSNDMDLFCGEDSGVFSGESTVDFSSSEVDSWPGDSIACFIEDERHFVPGHDYLSRFQTRSLDASAREDSVAWILKVQAYYNFQPLTAYLAVNYMDRFLYARRLPETSGWPMQLLAVACLSLAAKMEEILVPSLFDFQVAGVKYLFEAKTIKRMELLVLSVLDWRLRSVTPFDFISFFAYKIDPSGTFLGFFISHATEIILSNIKEASFLEYWPSSIAAAAILCVANELPSLSSVVNPHESPETWCDGLSKEKIVRCYRLMKAMAIENNRLNTPKVIAKLRVSVRASSTLTRPSDESSSPCKRRKLSGYSWVGDETSTSN

SEQ ID NO: 76418 - protein, 316 aa, Arabidopsis thaliana
  peptide (1)..(316): Ceres Seq. ID no. 7107894
MDLFCGEDSGVFSGESTVDFSSSEVDSWPGDSIACFIEDERHFVPGHDYLSRFQTRSLDASAREDSVAWILKVQAYYNFQPLTAYLAVNYMDRFLYARRLPETSGWPMQLLAVACLSLAAKMEEILVPSLFDFQVAGVKYLFEAKTIKRMELLVLSVLDWRLRSVTPFDFISFFAYKIDPSGTFLGFFISHATEIILSNIKEASFLEYWPSSIAAAAILCVANELPSLSSVVNPHESPETWCDGLSKEKIVRCYRLMKAMAIENNRLNTPKVIAKLRVSVRASSTLTRPSDESSSPCKRRKLSGYSWVGDETSTSN

SEQ ID NO: 76419 - DNA, 618 bp, Arabidopsis thaliana
  misc_feature (1)..(618): Ceres Seq. ID no. 7107926
  misc_feature (1)..(618): Ortholog of  Ceres SEQ ID NO 12635643 as cited in SEQ ID NO 340
  misc_feature (1)..(618): Ortholog of  Ceres SEQ ID NO 13661877 as cited in SEQ ID NO 61689
acgatgatgagctctgcatccgccatgaaagctgttggatttttgcttctgcttaccattctaacattagcttatgcgaagaagtcaggtgatgtgacagagttgcagattggtgttaagtacaagcctcagaaatgtgatctccaggctcacaaaggggataagatcaaggttcactatcggggaaagttaactgatggaactgtctttgattcaagttttgagagaggtgaccctattgagtttgagcttggaactggtcaagtcatcccaggatgggaccagggtttattgggagcttgtgtaggtgagaagagaaagttgaaaatcccatccaagcttggttatggtgataacggctcaccaccaaaaatcccgggtggggcgacactgatattcgacaccgagcttgttgctgtgaacggagaaccatccagcgaagcgaaatcaaagaatgagctttgattacaccataattgtttttcatttaaaaggaaaccttgagtagtcatcgatgttggcatttgaatcttaaacagcctagaatcatttactttgctagtcttaaacagcctagaatcatttactttgctagttgaagacaataattatattttg

SEQ ID NO: 76420 - protein, 154 aa, Arabidopsis thaliana
  peptide (1)..(154): Ceres Seq. ID no. 7107927
TMMSSASAMKAVGFLLLLTILTLAYAKKSGDVTELQIGVKYKPQKCDLQAHKGDKIKVHYRGKLTDGTVFDSSFERGDPIEFELGTGQVIPGWDQGLLGACVGEKRKLKIPSKLGYGDNGSPPKIPGGATLIFDTELVAVNGEPSSEAKSKNEL

SEQ ID NO: 76421 - protein, 153 aa, Arabidopsis thaliana; identical to SEQ ID NO: 25440
  peptide (1)..(153): Ceres Seq. ID no. 7107928

SEQ ID NO: 76422 - protein, 152 aa, Arabidopsis thaliana; identical to SEQ ID NO: 25441
  peptide (1)..(152): Ceres Seq. ID no. 7107929

SEQ ID NO: 76423 - DNA, 1262 bp, Arabidopsis thaliana
  misc_feature (1)..(1262): Ceres Seq. ID no. 7107930
  misc_feature (1)..(1262): Ortholog of  Ceres SEQ ID NO 14306617 as cited in SEQ ID NO 53026
ctcgagctacgtcaggggtctctttctgtttgtttgttttcttgtttccttctctctctctctttctttctttgtcttcctttcccaggttgtttttttttgctctctctgccttcttgactttcaaaagactctttctttcttttggattgattttggattctagggctctctttcttttagtgggtttttgttgttgttgttgtggtctctctgatgattactgaacttgagatggggaaaggtgagagtgagcttgagcttggtctagggctgagtcttggcggtggaacggcggccaagattggtaaatcaggtggtggtggcgcgtggggagagcgtggaaggcttttgacggctaaggattttccttctgttggttctaaacgtgctgctgattctgcttctcatgctggttcatctcctcctcgttcaagtcaagttgttggatggcctcctatagggtcacacaggatgaacagtttggttaataaccaagctacaaagtcagcaagagaagaagaagaagctggtaagaagaaagtgaaagatgatgaacctaaagatgtgacaaagaaagtgaatgggaaagtacaagttggatttattaaggtgaacatggatggagttgctataggaagaaaagtggatttgaatgctcattcttcttacgagaatttggcgcaaacattggaagatatgttctttcgcactaatccgggtactgtcgggttaaccagtcagttcactaaaccgttgaggcttttagatggatcgtctgagtttgtacttacttatgaagataaggaaggagattggatgcttgttggtgatgttccatggagaatgttcatcaactcggtgaaaaggctacgtgtgatgaaaacctctgaagctaatggactcgctgcacgaaatcaagaaccaaacgagagacagcgaaagcagccggtttagatctcttttcgacgttacggtgttacaggttttatattttggggttttgcaagtctgagatacttctgaagcaagcataagctagattgatcttatatccagtttgtgtattttcttggttcttataatggtttttactggttttctttagtttttttttttgctgtcttttaattttcggttgcgatttcactatatactatggatggaagagaatgctctttatatcttttactacactgtaaatatttgaagcttatctaatatcgtttttaagggttaaaaaaccctgacgtagcctcgag

SEQ ID NO: 76424 - protein, 246 aa, Arabidopsis thaliana; identical to SEQ ID NO: 29294
  peptide (1)..(246): Ceres Seq. ID no. 7107931

SEQ ID NO: 76425 - protein, 240 aa, Arabidopsis thaliana; identical to SEQ ID NO: 29295
  peptide (1)..(240): Ceres Seq. ID no. 7107932

SEQ ID NO: 76426 - protein, 160 aa, Arabidopsis thaliana; identical to SEQ ID NO: 29296
  peptide (1)..(160): Ceres Seq. ID no. 7107933

SEQ ID NO: 76427 - DNA, 1215 bp, Arabidopsis thaliana
  misc_feature (1)..(1215): Ceres Seq. ID no. 7107938
  misc_feature (1)..(1215): Ortholog of  Ceres SEQ ID NO 15168537 as cited in SEQ ID NO 57100
  misc_feature (1)..(1215): Ortholog of  Ceres SEQ ID NO 15178681 as cited in SEQ ID NO 63192
  misc_feature (1)..(1215): Ortholog of  Ceres SEQ ID NO 13579918 as cited in SEQ ID NO 64644
  misc_feature (1)..(1215): Ortholog of  Ceres SEQ ID NO 13654122 as cited in SEQ ID NO 68192
cagtgtgagtaatttagcaagaacataaatatcttaaactcatgtctgaatgtggatgtttttcggcaacaactatgttgagaatttgtgtagtattgataatatgtttgcatatgtgttgtgcctcgagtgattgtacaagtcacgatgatcctgtgtctcaagacgaagcagagaaagcgacgaagctaaagcttggttcgatagctttacttcttgtagccggaggagtcggcgtgagtctaccgttgatcgggaaaaggattccggcgttacaaccggaaaatgatatcttcttcatggtgaaagcttttgctgcaggagtgatcctctgcacaggtttcgttcatatcttaccagacgcgttcgagagattgagctctccatgtcttgaggacactacagctgggaagttcccgtttgctggttttgtagcgatgctgtcggcgatggggactcttatgatcgacacattcgcgacagggtattacaagaggcaacattttagcaataaccatgggagcaagcaagtgaacgtagtagtagatgaagaagagcatgcgggtcatgttcacattcacacgcacgctagtcacggacacacacatggttcgaccgagttgatcagaagacgtatagtgtcgcaggtgcttgagattgggatagttgtgcattcggttattatagggatatcacttggagcttcacagagcatagacaccataaagccactcatggctgcactatctttccatcagttctttgaaggtcttggcctcggtggatgcatctccctggcggatatgaagtcgaaatcgacagtgctaatggcgacatttttctcggtgacggcgccacttgggataggaatagggttggggatgtcaagtggtttaggctacaggaaagagagcaaagaggcaataatggtggaaggaatgttgaatgctgcatctgctgggatactcatatacatgtcacttgttgatcttcttgctactgattttatgaatccaagattgcaatccaatctctggcttcacttggctgcttatctctctctcgtcctaggcgcaggttccatgtctctcctcgccatctgggcctgattcttgatctgaaactaacaaacaaacaaaccaaatgccgctcttttttctcaaatctgtaatggtgtttctaatctcagaatcaatactattctatcttgaacac

SEQ ID NO: 76428 - protein, 355 aa, Arabidopsis thaliana; identical to SEQ ID NO: 36342
  peptide (1)..(355): Ceres Seq. ID no. 7107939

SEQ ID NO: 76429 - protein, 344 aa, Arabidopsis thaliana; identical to SEQ ID NO: 36343
  peptide (1)..(344): Ceres Seq. ID no. 7107940

SEQ ID NO: 76430 - protein, 331 aa, Arabidopsis thaliana; identical to SEQ ID NO: 36344
  peptide (1)..(331): Ceres Seq. ID no. 7107941

SEQ ID NO: 76431 - DNA, 803 bp, Arabidopsis thaliana
  misc_feature (1)..(803): Ceres Seq. ID no. 7107948
  misc_feature (1)..(803): Ortholog of  Ceres SEQ ID NO 13599287 as cited in SEQ ID NO 338
  misc_feature (1)..(803): Ortholog of  Ceres SEQ ID NO 15172934 as cited in SEQ ID NO 51783
  misc_feature (1)..(803): Ortholog of  Ceres SEQ ID NO 14314817 as cited in SEQ ID NO 52571
  misc_feature (1)..(803): Ortholog of  Ceres SEQ ID NO 15174056 as cited in SEQ ID NO 0
cgcccgggcaggtaaacgattcgattctgcgaaaccacttttcaattctcatcggattatttctcttccaatttctacaacgggagctaaactatctagatcggagcattcaatggctgcttcttccgaacccaaatctctttacgatttcaccgtcaaggatgctaagggaaacgatgttgatctaagcatctacaaagggaaggttcttttgattgtgaacgttgcttctcaatgtggcttgactaattcgaattatactgagcttgcgcagctgtatgagaagtacaaaggccatggtttcgagattcttgcgtttccgtgtaaccagtttgggaatcaagagcctggtactaatgaagagattgttcagtttgcttgtactcgtttcaaggctgagtacccgattttcgacaaggttgatgttaacggtgacaaagctgccccagtctacaagtttctgaaatcaagcaaaggcgggctctttggagacggcattaagtggaacttcgcaaagttcttggttgacaaagatggaaatgttgtcgatcgtttcgcaccaactacctcacctctcagcattgagaaggatgtgaagaagttgttgggagttactgcttaagcaaggcaagattgcataattagacaaataaaagctcattagtattgtattaccaatactgtgtagtaagctgagttcgtgagtgtgtgcctttgggaccgcgtacaattataatccgttttttagcggccaaactatgtaataatcgtagatctaaatatcagattttccgttaccttac

SEQ ID NO: 76432 - protein, 206 aa, Arabidopsis thaliana
  peptide (1)..(206): Ceres Seq. ID no. 7107949
ARAGKRFDSAKPLFNSHRIISLPISTTGAKLSRSEHSMAASSEPKSLYDFTVKDAKGNDVDLSIYKGKVLLIVNVASQCGLTNSNYTELAQLYEKYKGHGFEILAFPCNQFGNQEPGTNEEIVQFACTRFKAEYPIFDKVDVNGDKAAPVYKFLKSSKGGLFGDGIKWNFAKFLVDKDGNVVDRFAPTTSPLSIEKDVKKLLGVTA

SEQ ID NO: 76433 - protein, 169 aa, Arabidopsis thaliana; identical to SEQ ID NO: 28163
  peptide (1)..(169): Ceres Seq. ID no. 7107950

SEQ ID NO: 76434 - DNA, 1409 bp, Arabidopsis thaliana
  misc_feature (1)..(1409): Ceres Seq. ID no. 7107951
  misc_feature (1)..(1409): Ortholog of  Ceres SEQ ID NO 12562215 as cited in SEQ ID NO 20489
  misc_feature (1)..(1409): Ortholog of  Ceres SEQ ID NO 13595548 as cited in SEQ ID NO 51024
  misc_feature (1)..(1409): Ortholog of  Ceres SEQ ID NO 13582350 as cited in SEQ ID NO 56734
  misc_feature (1)..(1409): Ortholog of  Ceres SEQ ID NO 12476493 as cited in SEQ ID NO 58163
  misc_feature (1)..(1409): Ortholog of  Ceres SEQ ID NO 14313459 as cited in SEQ ID NO 62395
  misc_feature (1)..(1409): Ortholog of  Ceres SEQ ID NO 13597295 as cited in SEQ ID NO 63743
  misc_feature (1)..(1409): Ortholog of  Ceres SEQ ID NO 12617090 as cited in SEQ ID NO 64005
  misc_feature (1)..(1409): Ortholog of  Ceres SEQ ID NO 13597439 as cited in SEQ ID NO 64081
  misc_feature (1)..(1409): Ortholog of  Ceres SEQ ID NO 13597233 as cited in SEQ ID NO 64370
  misc_feature (1)..(1409): Ortholog of  Ceres SEQ ID NO 13599438 as cited in SEQ ID NO 0
  misc_feature (1)..(1409): Ortholog of  Ceres SEQ ID NO 13623850 as cited in SEQ ID NO 0
  misc_feature (1)..(1409): Ortholog of  Ceres SEQ ID NO 14309162 as cited in SEQ ID NO 0
gcggccgcgcaaccctctctcattttacaagtctcacatcaaagcaattaacaaatacacaacttgtaacttcaaatagattattcaaagaagagagagagaaagaaagatggagaagaacatgaagtttccagtagtagacttgtccaagctcaatggggaagagagagaccaaaccatggctctaatcaatgaagcttgtgagaattggggcttctttgagatagtgaaccatggattaccacatgacttaatggacaagatcgagaagatgacaaaggaccattacaagacatgccaagaacaaaagttcaatgacatgctcaagtccaaaggtttggataatcttgagacagaagtcgaagatgtcgattgggaaagcactttctacgttcgtcacctccctcaatccaatctcaatgacatttcagatgtgtctgatgaatacaggacggccatgaaagactttggtaagagactggagaatcttgctgaggatttgttggatctactgtgtgagaatctagggttagagaaagggtatttgaagaaagtgtttcatggaacaaaaggcccaacctttgggacaaaggtgagcaattatccaccatgtcctaaaccagagatgatcaaaggtcttagggcccacactgatgcaggaggcatcatcttgttgtttcaagacgacaaggtcagtggtctccagcttcttaaagatggtgactggattgatgttcctcctctcaaccactctattgtcatcaatcttggtgaccaacttgaggtgataaccaacgggaagtataagagtgtgctgcaccgtgtggtgactcaacaagaaggaaacaggatgtcggttgcatcgttttacaacccgggaagcgatgcggacatctcaccagctacttcgcttgtggagaaagattccgagtacccgagtttcgtctttgatgactacatgaagctttatgcaggggtcaagtttcagcccaaggagccacggttcgcagcaatgaagaatgcttctgcagttacagaactgaatcctacagcagccgtagagactttctaaaaatggatttgagattcaagtgaagcagagaaagaaagatgagtttgtgttgtgtgttatggcaataagttaaaacttgtattagtgttgattaattttgtcaattggtgtgttttaaagtgtgggagataatactagtataaactaaaaagccttacatcattctaaaatatcatcactcaagtggcttcgtatttgggatcagcagttacgtagtgataagcaattaccaatgcgaagatgaagatgccaagaaagttggcaataaaccccaagtcctgatcatcgatcatcgttttatcgggacggaatcggtgggaaaggataaggcggccgc

SEQ ID NO: 76435 - protein, 320 aa, Arabidopsis thaliana
  peptide (1)..(320): Ceres Seq. ID no. 7107952
MEKNMKFPVVDLSKLNGEERDQTMALINEACENWGFFEIVNHGLPHDLMDKIEKMTKDHYKTCQEQKFNDMLKSKGLDNLETEVEDVDWESTFYVRHLPQSNLNDISDVSDEYRTAMKDFGKRLENLAEDLLDLLCENLGLEKGYLKKVFHGTKGPTFGTKVSNYPPCPKPEMIKGLRAHTDAGGIILLFQDDKVSGLQLLKDGDWIDVPPLNHSIVINLGDQLEVITNGKYKSVLHRVVTQQEGNRMSVASFYNPGSDADISPATSLVEKDSEYPSFVFDDYMKLYAGVKFQPKEPRFAAMKNASAVTELNPTAAVETF

SEQ ID NO: 76436 - protein, 316 aa, Arabidopsis thaliana
  peptide (1)..(316): Ceres Seq. ID no. 7107953
MKFPVVDLSKLNGEERDQTMALINEACENWGFFEIVNHGLPHDLMDKIEKMTKDHYKTCQEQKFNDMLKSKGLDNLETEVEDVDWESTFYVRHLPQSNLNDISDVSDEYRTAMKDFGKRLENLAEDLLDLLCENLGLEKGYLKKVFHGTKGPTFGTKVSNYPPCPKPEMIKGLRAHTDAGGIILLFQDDKVSGLQLLKDGDWIDVPPLNHSIVINLGDQLEVITNGKYKSVLHRVVTQQEGNRMSVASFYNPGSDADISPATSLVEKDSEYPSFVFDDYMKLYAGVKFQPKEPRFAAMKNASAVTELNPTAAVETF

SEQ ID NO: 76437 - protein, 297 aa, Arabidopsis thaliana
  peptide (1)..(297): Ceres Seq. ID no. 7107954
MALINEACENWGFFEIVNHGLPHDLMDKIEKMTKDHYKTCQEQKFNDMLKSKGLDNLETEVEDVDWESTFYVRHLPQSNLNDISDVSDEYRTAMKDFGKRLENLAEDLLDLLCENLGLEKGYLKKVFHGTKGPTFGTKVSNYPPCPKPEMIKGLRAHTDAGGIILLFQDDKVSGLQLLKDGDWIDVPPLNHSIVINLGDQLEVITNGKYKSVLHRVVTQQEGNRMSVASFYNPGSDADISPATSLVEKDSEYPSFVFDDYMKLYAGVKFQPKEPRFAAMKNASAVTELNPTAAVETF

SEQ ID NO: 76438 - DNA, 1512 bp, Arabidopsis thaliana
  misc_feature (1)..(1512): Ceres Seq. ID no. 7107997
  misc_feature (1)..(1512): Ortholog of  Ceres SEQ ID NO 13662745 as cited in SEQ ID NO 66320
  misc_feature (1)..(1512): Ortholog of  Ceres SEQ ID NO 13660029 as cited in SEQ ID NO 67353
tcgacccacgcgtccgtcttcttcttatttcttctataccgtcgtcgaaaagctttaccaaaatctcacgcccccgacgattcatcgggatttgagtttgcactaaacccacaatggtttcctatcgtgctaccacagagacgatttccctggctttagaagccaacagctcggaggctattacgatactgtaccaggttttggaagacccttcttcatctcctgaggctatacggatcaaggagcaagcgattacaaacctttgtgatcgattgactgaagagaagagaggtgaggatctccggaaactgttgaccaagttgaggcctttcttttccttaatccccaaggcgaaaactgcgaaaatcgtcagaagaatcattgatgctgtggcaaagattcctggaacaactgatctccagatcactctctgcaaagagatggtcgaatggacccgcgctgagaagcgtactttcctcaggcagcgagtagaggctaggcttgcagctcttttgatggagaacaaggagtatgttgaagctttggcgctgttgagtactttggtaaaagaggttaggagattagatgataagctccttctggtcgacatagacttgctggagagcaaacttcacttctcattgagaaacttacccaaggcaaaagctgcactcactgcagctaggacagctgctaacgctatatatgtcccaccagctcaacaaggcacgatagatctgcagagtgggattcttcacgctgaagagaaggactacaaaaccggatacagttacttctttgaagcctttgaatccttcaacgctctcggagatccaagagccgttttcagtctgaagtacatgttactgtgcaagatcatggttagccaagctgatgatgttgcagggaataatctcctcaaaggctggactacagtcggccctgacctggatgccatgaaagcagtcgctgatgctcactcgaagaggtccttgaagttgtttgagaacgcactccgtgactacaaagcacagcttgaagatgacccaattgtccacaggcatctctcttctctctatgacacgcttctggagcaaaatctgtgtcgtttgatcgagcccttctcaagagttgagatagctcacattgctgagctcattggattgccgctcgaccatgtggaaaagaagctatctcagatgatactcgacaagaaatttgcaggtaccttggatcaaggagctggatgcctcatcatcttcgaagacccaaaggcagatgctatctactcggctaccctcgaaaccattgcaaacatggggaaggtcgtcgacagcctttatgttccggtctgccaaaatcatgttcctgaaaaatgaatctcattctatcgttctttctttctggttttagatatcgtttggactcaaagaaactgatgtttctcaatggagaaagtaaacttgtctgaattgttcacattactcgttttgcttatgatcttattatgtc

SEQ ID NO: 76439 - protein, 421 aa, Arabidopsis thaliana
  peptide (1)..(421): Ceres Seq. ID no. 7107998
MVSYRATTETISLALEANSSEAITILYQVLEDPSSSPEAIRIKEQAITNLCDRLTEEKRGEDLRKLLTKLRPFFSLIPKAKTAKIVRRIIDAVAKIPGTTDLQITLCKEMVEWTRAEKRTFLRQRVEARLAALLMENKEYVEALALLSTLVKEVRRLDDKLLLVDIDLLESKLHFSLRNLPKAKAALTAARTAANAIYVPPAQQGTIDLQSGILHAEEKDYKTGYSYFFEAFESFNALGDPRAVFSLKYMLLCKIMVSQADDVAGNNLLKGWTTVGPDLDAMKAVADAHSKRSLKLFENALRDYKAQLEDDPIVHRHLSSLYDTLLEQNLCRLIEPFSRVEIAHIAELIGLPLDHVEKKLSQMILDKKFAGTLDQGAGCLIIFEDPKADAIYSATLETIANMGKVVDSLYVPVCQNHVPEK

SEQ ID NO: 76440 - protein, 312 aa, Arabidopsis thaliana
  peptide (1)..(312): Ceres Seq. ID no. 7107999
MVEWTRAEKRTFLRQRVEARLAALLMENKEYVEALALLSTLVKEVRRLDDKLLLVDIDLLESKLHFSLRNLPKAKAALTAARTAANAIYVPPAQQGTIDLQSGILHAEEKDYKTGYSYFFEAFESFNALGDPRAVFSLKYMLLCKIMVSQADDVAGNNLLKGWTTVGPDLDAMKAVADAHSKRSLKLFENALRDYKAQLEDDPIVHRHLSSLYDTLLEQNLCRLIEPFSRVEIAHIAELIGLPLDHVEKKLSQMILDKKFAGTLDQGAGCLIIFEDPKADAIYSATLETIANMGKVVDSLYVPVCQNHVPEK

SEQ ID NO: 76441 - protein, 287 aa, Arabidopsis thaliana
  peptide (1)..(287): Ceres Seq. ID no. 7108000
MENKEYVEALALLSTLVKEVRRLDDKLLLVDIDLLESKLHFSLRNLPKAKAALTAARTAANAIYVPPAQQGTIDLQSGILHAEEKDYKTGYSYFFEAFESFNALGDPRAVFSLKYMLLCKIMVSQADDVAGNNLLKGWTTVGPDLDAMKAVADAHSKRSLKLFENALRDYKAQLEDDPIVHRHLSSLYDTLLEQNLCRLIEPFSRVEIAHIAELIGLPLDHVEKKLSQMILDKKFAGTLDQGAGCLIIFEDPKADAIYSATLETIANMGKVVDSLYVPVCQNHVPEK

SEQ ID NO: 76442 - DNA, 903 bp, Arabidopsis thaliana
  misc_feature (1)..(903): Ceres Seq. ID no. 7108005
  misc_feature (1)..(903): Ortholog of  Ceres SEQ ID NO 13598160 as cited in SEQ ID NO 61317
  misc_feature (1)..(903): Ortholog of  Ceres SEQ ID NO 13579986 as cited in SEQ ID NO 64562
  misc_feature (1)..(903): Ortholog of  Ceres SEQ ID NO 12614253 as cited in SEQ ID NO 68518
gtgtgagtaatttaggccgcttcttcttcttcttcttccactgtcgttctctctgtaaatcgcttcttcaatcatctctgtggatttgtctctattcataacttggtgaagaagatgttgacggaagaggagctcaaaagattgtacagaatccagaagacgttgatgcagatgttaagggatcgtggatattttatcgcggattctgaacttacgatgactaaacaacagtttattaggaaacatggtgataacatgaaaagagaggatcttgttactcttaaggctaagcgaaatgataatagtgatcagctctatatattcttccctgatgaggcgaaagttggtgtgaagacgatgaaaatgtacacgaacaggatgaaatcagagaatgtgttcagagctattttggttgtgcaacagaacttgaccccgtttgctcgaacttgcattagtgagatctcttctaagtttcatctggaagttttccaggaggcggaaatgctagtgaacattaaagaacatgttcttgttcctgagcatcaagttcttaccactgaagagaagaaaactttactggagagatacacagtgaaggagacacagcttccaaggatccaagtgactgatccaatcgcaagatactttggactaaaacgtgggcaagtcgtgaagatcattcgtccgagtgaaacggctggtcgttatgttacctatcgttatgttgtataagccaaagcaaaaggcttttgtggattgtaatgcgaattgaacgctgagagttgtgaaacataagagtaatgcttttgtactaaaccaaactgatgactgtgttttatttttgtttgtccgataggagaaattaaagcttgaaacaacttatttgctaaattactcacactg

SEQ ID NO: 76443 - protein, 205 aa, Arabidopsis thaliana; identical to SEQ ID NO: 29287
  peptide (1)..(205): Ceres Seq. ID no. 7108006

SEQ ID NO: 76444 - protein, 188 aa, Arabidopsis thaliana; identical to SEQ ID NO: 29288
  peptide (1)..(188): Ceres Seq. ID no. 7108007

SEQ ID NO: 76445 - protein, 186 aa, Arabidopsis thaliana; identical to SEQ ID NO: 35158
  peptide (1)..(186): Ceres Seq. ID no. 7108008

SEQ ID NO: 76446 - DNA, 2668 bp, Arabidopsis thaliana
  misc_feature (1)..(2668): Ceres Seq. ID no. 7108009
  misc_feature (1)..(2668): Ortholog of  Ceres SEQ ID NO 13590691 as cited in SEQ ID NO 66290
gcttgattaattcggcacgaggtcttctcttctccacgaacttaattttttcaaaaccctagcaactttgattcattcaaaatccgatccaacgatgactattgaagaagtttccggtgagactcctccgtctacgcctccttcttcttctacgccttctccgtcttcctccaccaccaacgccgcgccgttgggatcctctgtgattccgattgtaaacaagctacaagacatattcgctcagctcggaagccagtctacgatcgcgcttcctcaggttgttgttgttggaagccaaagcagtggcaagtctagcgtccttgaagcactcgtcggccgtgactttctccctcgtggtaatgatatctgcacacgtcgtcctcttgttctccagctcctccagactaaaagccgcgctaatggcggatccgatgatgagtggggggagtttcgtcaccttcctgaaactcgtttctatgatttctctgagattcgtcgagaaattgaggctgagacgaatagattagttggagagaacaaaggtgtagcagatacacagattcgtcttaaaatttcttcacctaatgtattgaacatcacgcttgtggatctgcctggtattaccaaggtgccagttggtgaccagccatccgacattgaagcacgtataagaacgatgatcttgtcttacatcaagcaagatacttgcttgatattggctgttacccctgctaataccgatctagcaaactctgatgcccttcaaattgctagcattgtagatcctgatggtcacagaacgataggtgtaatcacaaagttggatattatggacaaaggtactgatgctcgaaaactccttcttggaaatgttgttcctcttcgacttggatacgtgggagttgtaaatcgttgccaggaggatattttgctaaaccgcacagtcaaggaagcacttctcgcagaggagaagttcttccggagtcacccggtttaccatggtcttgccgatcgtttgggtgttcctcagctagcaaagaagttaaatcagatccttgttcaacatatcaaggtcttgcttccggatctgaagtcgcggataagtaatgctttggttgctacagcaaaagagcatcagagctatggtgaattaacagaatcaagggctgggcaaggagctcttctcctcaactttctctccaaatactgtgaagcatactcttcattgctggaagggaaaagtgaagaaatgtctacgtcagagctctctggaggagcaagaattcactatattttccagtcaatctttgttaagagtttggaggaggttgatccatgcgaggacttgacagatgatgatattcggactgcaattcagaatgcaactggtccaagatctgcattatttgttccagatgttccatttgaagttcttgttaggaggcagatatctcgtttgttagatcctagccttcagtgtgcccggttcatttttgaagagctaataaagattagccatagatgtatgatgaatgagttacaacgatttccagtcctacgaaagcgcatggatgagttatcggggagggatttcctgcgagaaggtcttgaaccctcagaaacaatgatcggggatatcattgatatggagatggattacataaacacttcacatccaaattttattggtggaaccaaggccgtggaagctgcaatgcatcaagtgaagtcttcgaggattccccatcctgtggcacgaccaaaggacactgtggagcctgatagaacatcttcttccacgagtcaagtgaaatctagatcgtttctcggcaggcaagctaatggagttgttactgatcagggagttgtatctgcagatgctgaaaaagctcaacctgctgcaaatgcgaatgatacaaggtggggtatcccttcaattttccgagggggtgatactagagcagttactaaagatagcttattaaacaaaccattcagcgaagctgttgaagatatgtctcacaacttatccatgatctatctaaaggagcccccagctgtcttgaggccaaccgaaacccattcagaacaggaagcagttgagattcagataacaaagctgttactaagatcatactatgacattgtaaggaagaatattgaggattcggtaccaaaagcaatcatgcatttcctggtaaaccacacaaaacgtgagctgcataacgtcttcatcaagaagctttacagggagaacttgtttgaagaaatgttgcaagagccagatgagatagcagttaagaggaaacgcacacaagagactctccacgttcttcagcaagcttacaggacactagatgagttgccactggaagcagattcggtgtcagcaggaatgtcaaaacatcaggagttactgacatcttcaaagtattcgacaagcagctcatactcggcatctccaagtacgacaagaagatcgagaagagcaggagatcaacaccaaaatggatacggattctaacaggatccaaatatcttgcatatctctcgactgtgataacgcatttcattcatttaatggctctttcaggttttggtattaaattatgtgttggtcatatgaagaatttatataggaaaccagtacacagtgtgggttttggtc

SEQ ID NO: 76447 - protein, 809 aa, Arabidopsis thaliana
  peptide (1)..(809): Ceres Seq. ID no. 7108010
MTIEEVSGETPPSTPPSSSTPSPSSSTTNAAPLGSSVIPIVNKLQDIFAQLGSQSTIALPQVVVVGSQSSGKSSVLEALVGRDFLPRGNDICTRRPLVLQLLQTKSRANGGSDDEWGEFRHLPETRFYDFSEIRREIEAETNRLVGENKGVADTQIRLKISSPNVLNITLVDLPGITKVPVGDQPSDIEARIRTMILSYIKQDTCLILAVTPANTDLANSDALQIASIVDPDGHRTIGVITKLDIMDKGTDARKLLLGNVVPLRLGYVGVVNRCQEDILLNRTVKEALLAEEKFFRSHPVYHGLADRLGVPQLAKKLNQILVQHIKVLLPDLKSRISNALVATAKEHQSYGELTESRAGQGALLLNFLSKYCEAYSSLLEGKSEEMSTSELSGGARIHYIFQSIFVKSLEEVDPCEDLTDDDIRTAIQNATGPRSALFVPDVPFEVLVRRQISRLLDPSLQCARFIFEELIKISHRCMMNELQRFPVLRKRMDELSGRDFLREGLEPSETMIGDIIDMEMDYINTSHPNFIGGTKAVEAAMHQVKSSRIPHPVARPKDTVEPDRTSSSTSQVKSRSFLGRQANGVVTDQGVVSADAEKAQPAANANDTRWGIPSIFRGGDTRAVTKDSLLNKPFSEAVEDMSHNLSMIYLKEPPAVLRPTETHSEQEAVEIQITKLLLRSYYDIVRKNIEDSVPKAIMHFLVNHTKRELHNVFIKKLYRENLFEEMLQEPDEIAVKRKRTQETLHVLQQAYRTLDELPLEADSVSAGMSKHQELLTSSKYSTSSSYSASPSTTRRSRRAGDQHQNGYGF

SEQ ID NO: 76448 - protein, 615 aa, Arabidopsis thaliana
  peptide (1)..(615): Ceres Seq. ID no. 7108011
MILSYIKQDTCLILAVTPANTDLANSDALQIASIVDPDGHRTIGVITKLDIMDKGTDARKLLLGNVVPLRLGYVGVVNRCQEDILLNRTVKEALLAEEKFFRSHPVYHGLADRLGVPQLAKKLNQILVQHIKVLLPDLKSRISNALVATAKEHQSYGELTESRAGQGALLLNFLSKYCEAYSSLLEGKSEEMSTSELSGGARIHYIFQSIFVKSLEEVDPCEDLTDDDIRTAIQNATGPRSALFVPDVPFEVLVRRQISRLLDPSLQCARFIFEELIKISHRCMMNELQRFPVLRKRMDELSGRDFLREGLEPSETMIGDIIDMEMDYINTSHPNFIGGTKAVEAAMHQVKSSRIPHPVARPKDTVEPDRTSSSTSQVKSRSFLGRQANGVVTDQGVVSADAEKAQPAANANDTRWGIPSIFRGGDTRAVTKDSLLNKPFSEAVEDMSHNLSMIYLKEPPAVLRPTETHSEQEAVEIQITKLLLRSYYDIVRKNIEDSVPKAIMHFLVNHTKRELHNVFIKKLYRENLFEEMLQEPDEIAVKRKRTQETLHVLQQAYRTLDELPLEADSVSAGMSKHQELLTSSKYSTSSSYSASPSTTRRSRRAGDQHQNGYGF

SEQ ID NO: 76449 - protein, 564 aa, Arabidopsis thaliana
  peptide (1)..(564): Ceres Seq. ID no. 7108012
MDKGTDARKLLLGNVVPLRLGYVGVVNRCQEDILLNRTVKEALLAEEKFFRSHPVYHGLADRLGVPQLAKKLNQILVQHIKVLLPDLKSRISNALVATAKEHQSYGELTESRAGQGALLLNFLSKYCEAYSSLLEGKSEEMSTSELSGGARIHYIFQSIFVKSLEEVDPCEDLTDDDIRTAIQNATGPRSALFVPDVPFEVLVRRQISRLLDPSLQCARFIFEELIKISHRCMMNELQRFPVLRKRMDELSGRDFLREGLEPSETMIGDIIDMEMDYINTSHPNFIGGTKAVEAAMHQVKSSRIPHPVARPKDTVEPDRTSSSTSQVKSRSFLGRQANGVVTDQGVVSADAEKAQPAANANDTRWGIPSIFRGGDTRAVTKDSLLNKPFSEAVEDMSHNLSMIYLKEPPAVLRPTETHSEQEAVEIQITKLLLRSYYDIVRKNIEDSVPKAIMHFLVNHTKRELHNVFIKKLYRENLFEEMLQEPDEIAVKRKRTQETLHVLQQAYRTLDELPLEADSVSAGMSKHQELLTSSKYSTSSSYSASPSTTRRSRRAGDQHQNGYGF

SEQ ID NO: 76450 - DNA, 727 bp, Arabidopsis thaliana
  misc_feature (1)..(727): Ceres Seq. ID no. 7108024
  misc_feature (1)..(727): Ortholog of  Ceres SEQ ID NO 13582188 as cited in SEQ ID NO 55950
  misc_feature (1)..(727): Ortholog of  Ceres SEQ ID NO 12611286 as cited in SEQ ID NO 56182
  misc_feature (1)..(727): Ortholog of  Ceres SEQ ID NO 15173288 as cited in SEQ ID NO 58150
  misc_feature (1)..(727): Ortholog of  Ceres SEQ ID NO 13663461 as cited in SEQ ID NO 66601
gaattcggcacgaggcttctggagatctcttctgggaatcgagcttcactgttaaagattttccttcaatcggctaaaaatgatacatttcgtgttactagtcagtcgacaagggaaagtaaggctcaccaagtggtattcgccgtatacgcagaaggaaagatctaaggtcatacgtgaactcagcggagtgattctgaaccgaggtcccaagctctgcaattttattgaatggagaggatacaaggttgtctacaaaagatatgcaagcttgtacttctgcatgtgcattgatgaggcggataacgcgttagaggtactggagataattcatcactacgtcgagattcttgaccgttactttggcagtgtgtgtgaactcgatttgatttttaacttccacaaggcgtattatatactggacgagctgttgatcgccggagaacttcaagagtcaagcaagaaaacagttgcaaggataatatcagcccaggatcaattggtggaagttgcgaaagaggaggcgagttccataagtaatataattgctcaggctaccaagtagtccttctctgaacttctcttatgcagctgaaacaatcgtaaatgagttaatattttccttcaactctgagaaattctcttctgaatcacactttgtttgtcatgccatgtcatgtgattgtttgattgattagaagaaagaagcattcatcgttttgggttt

SEQ ID NO: 76451 - protein, 161 aa, Arabidopsis thaliana
  peptide (1)..(161): Ceres Seq. ID no. 7108025
MIHFVLLVSRQGKVRLTKWYSPYTQKERSKVIRELSGVILNRGPKLCNFIEWRGYKVVYKRYASLYFCMCIDEADNALEVLEIIHHYVEILDRYFGSVCELDLIFNFHKAYYILDELLIAGELQESSKKTVARIISAQDQLVEVAKEEASSISNIIAQATK

SEQ ID NO: 76452 - protein, 93 aa, Arabidopsis thaliana
  peptide (1)..(93): Ceres Seq. ID no. 7108026
MCIDEADNALEVLEIIHHYVEILDRYFGSVCELDLIFNFHKAYYILDELLIAGELQESSKKTVARIISAQDQLVEVAKEEASSISNIIAQATK

SEQ ID NO: 76453 - DNA, 1311 bp, Arabidopsis thaliana
  misc_feature (1)..(1311): Ceres Seq. ID no. 7108027
  misc_feature (1)..(1311): Ortholog of  Ceres SEQ ID NO 13594341 as cited in SEQ ID NO 57917
  misc_feature (1)..(1311): Ortholog of  Ceres SEQ ID NO 13656441 as cited in SEQ ID NO 65703
gaattcgcggccgcgtcgacaaactgtaaacccccacacagttattggccgtcggattcaatggaaggattagctatcagagcatctcgaccgtcggttttctgttctattccaggtctcggcggcgattcccaccgaaaacctccaagtgacggtttcctcaagctgcctgcgtcgtctattccggcggacagccgaaaattagtagcgaattctacttcctttcatccaatctcagccgttaacgtctctgctcaagcttccctcaccgctgattttcccgccctttcagaaactatactgaaagagggaagaaataacggaaaagagaaagcagagaacatcgtgtggcacgagagttcgatatgcagatgcgacagacaacaacttcttcaacaaaagggttgtgtcgtttggatcactggtctcagtggttcagggaaaagcactgttgcttgtgcactaagtaaagcattgtttgaaagaggcaaacttacttacacactcgacggcgacaatgtccgtcacggccttaaccgtgacctcactttcaaagcagagcaccgcaccgaaaacattagaagaattggtgaggtggctaagttgtttgctgacgtcggagtcatttgtatagcaagtttgatttctccgtaccggagagacagagacgcgtgccggtccttgttacctgacggcgatttcgtcgaggtcttcatggacgttcctcttcatgtgtgcgagtcgagagatccaaaggggttgtacaagcttgcacgtgcaggcaaaatcaaaggcttcactggaatcgacgacccttacgaggcaccagtgaattgcgaggtagtgctgaaacacacaggagacgacgagtcgtgttcgccacgtcagatggctgagaacatcatctcttacctgcaaaacaaaggttatcttgagggctaagtcaaagtcggaaaaatcaacccaatttgtcgattctatatatggctaaaggattgttctccctgattcggtcagaagcttgagacctggaaacgatgtcgtctcgcttcgtcacactatcatttgttcttgaattgtgttgaagtcaaaagccaaagggaatatatctatatttgttctaatcatcatttagttagtttataaagagtttttgctccaatgatatcgactgtgttgtataatgtgaattaataaagtggatttcgttgaaaaaaaaaaaaaaaaaaaaaaagtcgacgcggccgcgaattccagatctatgaatcgtagatactgaaaancccgcaagttcacttcaactgtgaattc

SEQ ID NO: 76454 - protein, 313 aa, Arabidopsis thaliana
  peptide (1)..(313): Ceres Seq. ID no. 7108028
EFAAASTNCKPPHSYWPSDSMEGLAIRASRPSVFCSIPGLGGDSHRKPPSDGFLKLPASSIPADSRKLVANSTSFHPISAVNVSAQASLTADFPALSETILKEGRNNGKEKAENIVWHESSICRCDRQQLLQQKGCVVWITGLSGSGKSTVACALSKALFERGKLTYTLDGDNVRHGLNRDLTFKAEHRTENIRRIGEVAKLFADVGVICIASLISPYRRDRDACRSLLPDGDFVEVFMDVPLHVCESRDPKGLYKLARAGKIKGFTGIDDPYEAPVNCEVVLKHTGDDESCSPRQMAENIISYLQNKGYLEG

SEQ ID NO: 76455 - protein, 293 aa, Arabidopsis thaliana; identical to SEQ ID NO: 40764
  peptide (1)..(293): Ceres Seq. ID no. 7108029

SEQ ID NO: 76456 - DNA, 939 bp, Arabidopsis thaliana
  misc_feature (1)..(939): Ceres Seq. ID no. 7108030
  misc_feature (1)..(939): Ortholog of  Ceres SEQ ID NO 15174082 as cited in SEQ ID NO 61896
  misc_feature (1)..(939): Ortholog of  Ceres SEQ ID NO 13655598 as cited in SEQ ID NO 64077
  misc_feature (1)..(939): Ortholog of  Ceres SEQ ID NO 15179351 as cited in SEQ ID NO 0
  misc_feature (1)..(939): Ortholog of  Ceres SEQ ID NO 15180408 as cited in SEQ ID NO 0
cttcttcatctacaacaatggctggagttgcctttggttcctttgatgattcattcagcttggcttctctaagagcttacctcgctgagttcatctccactttactctttgttttcgctggtgttggctctgccattgcctacgcaaagctgacgtcggacgctgctcttgatacaccgggactagtggccatcgcggtttgtcatggttttgctctcttcgtggccgttgcaatcggagccaacatctccggtggccatgtgaacccagccgtcacttttggtcttgctgtcggtggtcaaatcacagtcatcaccggagttttctactggatcgctcagcttctcggctccaccgccgcttgtttcctccttaaatacgtcaccggtggattggcggttccaacccacagcgttgcggctggactaggatcgatagaaggagtagtgatggagatcatcatcaccttcgctttggtctacactgtctacgccaccgccgctgatcccaagaagggttctctcggaaccatcgctcctctcgccattggtcttatcgttggtgccaacatcctcgccgccggtccattctccggtggatccatgaacccagcacgttcctttggaccagctgttgctgccggagacttctctggtcactgggtctactgggttggaccactcatcggtggtggacttgccggacttatctacggaaatgtcttcatgggttcttccgaacatgttcctcttgcttctgctgatttctaaggaaacaagtgatgattcttgattcatgtttctgtgtttggttactttgcctcgatctttcttgttttgtttggagtttggtccggtttcgttgtaatttttatccaatttgtatgaatattatttaatggatggctgttttggttataaactaaattactcacactgg

SEQ ID NO: 76457 - protein, 255 aa, Arabidopsis thaliana
  peptide (1)..(255): Ceres Seq. ID no. 7108031
SSSTTMAGVAFGSFDDSFSLASLRAYLAEFISTLLFVFAGVGSAIAYAKLTSDAALDTPGLVAIAVCHGFALFVAVAIGANISGGHVNPAVTFGLAVGGQITVITGVFYWIAQLLGSTAACFLLKYVTGGLAVPTHSVAAGLGSIEGVVMEIIITFALVYTVYATAADPKKGSLGTIAPLAIGLIVGANILAAGPFSGGSMNPARSFGPAVAAGDFSGHWVYWVGPLIGGGLAGLIYGNVFMGSSEHVPLASADF

SEQ ID NO: 76458 - protein, 250 aa, Arabidopsis thaliana; identical to SEQ ID NO: 30966
  peptide (1)..(250): Ceres Seq. ID no. 7108032

SEQ ID NO: 76459 - DNA, 740 bp, Arabidopsis thaliana
  misc_feature (1)..(740): Ceres Seq. ID no. 7108041
  misc_feature (1)..(740): Ortholog of  Ceres SEQ ID NO 15172961 as cited in SEQ ID NO 51757
  misc_feature (1)..(740): Ortholog of  Ceres SEQ ID NO 15173213 as cited in SEQ ID NO 57923
  misc_feature (1)..(740): Ortholog of  Ceres SEQ ID NO 13660855 as cited in SEQ ID NO 67670
cagtgtgagtaatttaggagcgagaaaaaatggcaaccatgtctgctcttcagagctcttttacttctctttctctatctcccagctcttccttcctcggccagcgtttaatttccccgatttccctctccgtcacttctccggtcaagcccgctgagaacccatgtcttgttcttgcaaagctcaagcgttgggaacgaaaagaatgcaaaccaaacagtcttccgattctccacaaaatgcatgtcaagtttggagatacagtcaaagtaatatctggacgcgacaagggtaaaatcggagaggttactaagattttcactcacaacagtaccattgtgatcaaagatgtgaacctcaaaacaaaacacatgaagagccgagaagagggagagcctggtcaaattgtcaagatagaagcacctatccacagctcaaatgtgatgttgtattcaaaagaaaaagacatattaagccgggtgggtcacaaggtacttgaagatggacagaaggtaagatatctgatcaaaacaggggaactcatcgacaccattgagaagtggaagctacttaaggaggctaaggataaggaaaccacccaagttgcagttacctccgcatcttagcgtctcatttctttcttcttcagtgcacttttgatataatagacctatgcattggatggatgtattgaatcccttttaaggtaaattataatatttctgctaaactactcacac

SEQ ID NO: 76460 - protein, 198 aa, Arabidopsis thaliana
  peptide (1)..(198): Ceres Seq. ID no. 7108042
MATMSALQSSFTSLSLSPSSSFLGQRLISPISLSVTSPVKPAENPCLVLAKLKRWERKECKPNSLPILHKMHVKFGDTVKVISGRDKGKIGEVTKIFTHNSTIVIKDVNLKTKHMKSREEGEPGQIVKIEAPIHSSNVMLYSKEKDILSRVGHKVLEDGQKVRYLIKTGELIDTIEKWKLLKEAKDKETTQVAVTSAS

SEQ ID NO: 76461 - protein, 195 aa, Arabidopsis thaliana
  peptide (1)..(195): Ceres Seq. ID no. 7108043
MSALQSSFTSLSLSPSSSFLGQRLISPISLSVTSPVKPAENPCLVLAKLKRWERKECKPNSLPILHKMHVKFGDTVKVISGRDKGKIGEVTKIFTHNSTIVIKDVNLKTKHMKSREEGEPGQIVKIEAPIHSSNVMLYSKEKDILSRVGHKVLEDGQKVRYLIKTGELIDTIEKWKLLKEAKDKETTQVAVTSAS

SEQ ID NO: 76462 - protein, 128 aa, Arabidopsis thaliana
  peptide (1)..(128): Ceres Seq. ID no. 7108044
MHVKFGDTVKVISGRDKGKIGEVTKIFTHNSTIVIKDVNLKTKHMKSREEGEPGQIVKIEAPIHSSNVMLYSKEKDILSRVGHKVLEDGQKVRYLIKTGELIDTIEKWKLLKEAKDKETTQVAVTSAS

SEQ ID NO: 76463 - DNA, 843 bp, Arabidopsis thaliana
  misc_feature (1)..(843): Ceres Seq. ID no. 7108088
  misc_feature (1)..(843): Ortholog of  Ceres SEQ ID NO 13574576 as cited in SEQ ID NO 47
  misc_feature (1)..(843): Ortholog of  Ceres SEQ ID NO 13638673 as cited in SEQ ID NO 51830
  misc_feature (1)..(843): Ortholog of  Ceres SEQ ID NO 13638785 as cited in SEQ ID NO 51967
agagtcaagggatgcagcaatggcgtctgttgcttcttcaactactctcatctcttctccctcttctagggtttttccagcaaagtcttcactttcctctccatctgtttctttccttcgaaccctttcttctccttccgcatctgcttctctccgctccggatttgctcgacgctcttccctcagctccacttctcgtcggagctttgctgtcaaagcccaggccgatgatcttccactggttggaaacaaggcgcctgattttaaggcagaggctgtgtttgatcaagagttcatcaaggttaagctctctgattacaatgggaagaagtatgtgattctctttttctacccattggactttactttcgtctgcccaacagagattactgccttcagtgaccggcattcagaatttgagaagttgaacaccgaagtattaggtgtttctgtcgatagtgtgttctctcaccttgcatgggtccaaacagacaggaaatctggagggcttggtgatctgaactatccccttatttcagatgtcactaaatcaatctcaaagtcgttcggagtgctcatccatgatcagggaatagcactgagaggacttttcataatcgacaaggaaggagtgatccaacattccaccatcaacaatcttggtattggccgaagcgttgatgagacaatgagaaccctccaggcattacagtacacaggaaacccggatgaagtctgcccagcaggatggaagtcgggtgagaagtcaatgaaacccgacccaaaactcagcaaagagtacttctcagctatttagagcacactactatgcatatgcctggt

SEQ ID NO: 76464 - protein, 271 aa, Arabidopsis thaliana
  peptide (1)..(271): Ceres Seq. ID no. 7108089
ESRDAAMASVASSTTLISSPSSRVFPAKSSLSSPSVSFLRTLSSPSASASLRSGFARRSSLSSTSRRSFAVKAQADDLPLVGNKAPDFKAEAVFDQEFIKVKLSDYNGKKYVILFFYPLDFTFVCPTEITAFSDRHSEFEKLNTEVLGVSVDSVFSHLAWVQTDRKSGGLGDLNYPLISDVTKSISKSFGVLIHDQGIALRGLFIIDKEGVIQHSTINNLGIGRSVDETMRTLQALQYTGNPDEVCPAGWKSGEKSMKPDPKLSKEYFSAI

SEQ ID NO: 76465 - protein, 265 aa, Arabidopsis thaliana
  peptide (1)..(265): Ceres Seq. ID no. 7108090
MASVASSTTLISSPSSRVFPAKSSLSSPSVSFLRTLSSPSASASLRSGFARRSSLSSTSRRSFAVKAQADDLPLVGNKAPDFKAEAVFDQEFIKVKLSDYNGKKYVILFFYPLDFTFVCPTEITAFSDRHSEFEKLNTEVLGVSVDSVFSHLAWVQTDRKSGGLGDLNYPLISDVTKSISKSFGVLIHDQGIALRGLFIIDKEGVIQHSTINNLGIGRSVDETMRTLQALQYTGNPDEVCPAGWKSGEKSMKPDPKLSKEYFSAI

SEQ ID NO: 76466 - DNA, 734 bp, Arabidopsis thaliana
  misc_feature (1)..(734): Ceres Seq. ID no. 7108095
  misc_feature (1)..(734): Ortholog of  Ceres SEQ ID NO 14306355 as cited in SEQ ID NO 1268
  misc_feature (1)..(734): Ortholog of  Ceres SEQ ID NO 15176737 as cited in SEQ ID NO 53678
  misc_feature (1)..(734): Ortholog of  Ceres SEQ ID NO 14314070 as cited in SEQ ID NO 56946
  misc_feature (1)..(734): Ortholog of  Ceres SEQ ID NO 13624427 as cited in SEQ ID NO 0
  misc_feature (1)..(734): Ortholog of  Ceres SEQ ID NO 14305939 as cited in SEQ ID NO 0
aggagctggtgctggtggagggtttggcggtggtgctggaggaggtcacggtggtggcgccggcgctggaggaggattaggcggtggtgctggaggaggatttggcggtggtgctggaggaggtggcggtgcaggaggaggatttggcggtggtgctggtggaggccacggtggaggtgctggtggaggatttggtggtggtgcaggaggtggaggaggtcacggtggaggtgctggtggaggatttggcggtggtgtaggaggtggaggaggccacggtggaggtgccgggggaggatttggcggtggtgcaggaggtggaggaggccacggtggaggtgccgggggaggatttggcggtggtgcaggaggtggaggaggccaaggtggaggtgctgggggaggttttggcggtggtgccggtgggggatttggcggtggtgcaggaggaggtgctggtggaggatttggcggtggtgcaggaggtggaggaggccatggtggtggtgccggtggtggagctggagggggctttggcggtggtgcaggaggtggaggaggccatggtggtggagctggtggaggttttggcggcggtgcaggaggaggaggaggccatggtggtcgtttttaaatatagctttatagggtaacttgcttgtgtctcaagccagattaaaaaggaagatatttgctggagaatcttattatgaatggaataaatgatatttagg

SEQ ID NO: 76467 - protein, 215 aa, Arabidopsis thaliana
  peptide (1)..(215): Ceres Seq. ID no. 7108096
RSWCWWRVWRWCWRRSRWWRRRWRRIRRWCWRRIWRWCWRRWRCRRRIWRWCWWRPRWRCWWRIWWWCRRWRRSRWRCWWRIWRWCRRWRRPRWRCRGRIWRWCRRWRRPRWRCRGRIWRWCRRWRRPRWRCWGRFWRWCRWGIWRWCRRRCWWRIWRWCRRWRRPWWWCRWWSWRGLWRWCRRWRRPWWWSWWRFWRRCRRRRRPWWSFLNIAL

SEQ ID NO: 76468 - protein, 210 aa, Arabidopsis thaliana
  peptide (1)..(210): Ceres Seq. ID no. 7108097
GAGAGGGFGGGAGGGHGGGAGAGGGLGGGAGGGFGGGAGGGGGAGGGFGGGAGGGHGGGAGGGFGGGAGGGGGHGGGAGGGFGGGVGGGGGHGGGAGGGFGGGAGGGGGHGGGAGGGFGGGAGGGGGQGGGAGGGFGGGAGGGFGGGAGGGAGGGFGGGAGGGGGHGGGAGGGAGGGFGGGAGGGGGHGGGAGGGFGGGAGGGGGHGGRF

SEQ ID NO: 76469 - DNA, 1222 bp, Arabidopsis thaliana
  misc_feature (1)..(1222): Ceres Seq. ID no. 7108117
  misc_feature (1)..(1222): Ortholog of  Ceres SEQ ID NO 13594298 as cited in SEQ ID NO 57803
  misc_feature (1)..(1222): Ortholog of  Ceres SEQ ID NO 13503476 as cited in SEQ ID NO 61978
  misc_feature (1)..(1222): Ortholog of  Ceres SEQ ID NO 12578438 as cited in SEQ ID NO 62201
  misc_feature (1)..(1222): Ortholog of  Ceres SEQ ID NO 12617675 as cited in SEQ ID NO 64656
attcatttcatacatatttgtctctcttaaatgtgtttatttccccttttgtagtaaccactcagaaggttttccttcactcaaaatggctttgtctcttatctttctagctctcgtagtgttgtgccctagtagtggtcatagccaacgttctccttcaccgggatactacccgagttcccgggtaccgacttcaccttttgatcgtgaattccgtactttatggggctctcaacaccaacgtagagagcaagacgttgtcactctttggctcgacaaatccactgggagtgggttcaagtctcttcgtccataccggtcgggctactttggtgcttccattaagctccaaccaggcttcacggctggagtggatacatccctctatctctcaaacaaccaagagcatcctggggaccacgatgaggtcgatatcgagtttctagggacaacgccagggaagccttattcccttcaaacaaatgtattcgttaggggaagtggcgaccgaaatgtcattggaagagaaatgaaatttaccttgtggtttgaccctactcaagattttcaccattacgcaattttgtggaaccctaaccaaattgtattctttgtagacgatgtaccgatacgtacatataatagaaagaatgaagctatattccccacaagaccgatgtgggtttacggatcgatatgggatgcatcggactgggccacagaaaatggaaggatcaaagctgactaccgataccaaccatttgtggctaagtacaagaactttaagctagcgggatgcacagcggatagctctagctcatgcagaccgccatcgcctgcacccatgcgcaaccgtgggttgacccggcagcagatggcggcattgacatgggcacagaggaacttcttggtctataactattgccatgacccgaaaagagaccatacccaaacaccagaatgttaaaacaaacaaacaaaacaaccaaagaaaggttataataattttattttgcattacccaacatacatgaataatgggaggtcttgtgacgggtccacactggaaactaaattgaagcagttgagcgtccggtcctctatgatttgagattaaaaagaaaaggttttgtttttcaaaactttgtaatgtttccatttggtatctttcttataattgtaatattgtgtgatcacatatattaatatctggtattgtatt

SEQ ID NO: 76470 - protein, 321 aa, Arabidopsis thaliana
  peptide (1)..(321): Ceres Seq. ID no. 7108118
FISYIFVSLKCVYFPFCSNHSEGFPSLKMALSLIFLALVVLCPSSGHSQRSPSPGYYPSSRVPTSPFDREFRTLWGSQHQRREQDVVTLWLDKSTGSGFKSLRPYRSGYFGASIKLQPGFTAGVDTSLYLSNNQEHPGDHDEVDIEFLGTTPGKPYSLQTNVFVRGSGDRNVIGREMKFTLWFDPTQDFHHYAILWNPNQIVFFVDDVPIRTYNRKNEAIFPTRPMWVYGSIWDASDWATENGRIKADYRYQPFVAKYKNFKLAGCTADSSSSCRPPSPAPMRNRGLTRQQMAALTWAQRNFLVYNYCHDPKRDHTQTPEC

SEQ ID NO: 76471 - protein, 293 aa, Arabidopsis thaliana
  peptide (1)..(293): Ceres Seq. ID no. 7108119
MALSLIFLALVVLCPSSGHSQRSPSPGYYPSSRVPTSPFDREFRTLWGSQHQRREQDVVTLWLDKSTGSGFKSLRPYRSGYFGASIKLQPGFTAGVDTSLYLSNNQEHPGDHDEVDIEFLGTTPGKPYSLQTNVFVRGSGDRNVIGREMKFTLWFDPTQDFHHYAILWNPNQIVFFVDDVPIRTYNRKNEAIFPTRPMWVYGSIWDASDWATENGRIKADYRYQPFVAKYKNFKLAGCTADSSSSCRPPSPAPMRNRGLTRQQMAALTWAQRNFLVYNYCHDPKRDHTQTPEC

SEQ ID NO: 76472 - DNA, 1680 bp, Arabidopsis thaliana
  misc_feature (1)..(1680): Ceres Seq. ID no. 7108120
  misc_feature (1)..(1680): Ortholog of  Ceres SEQ ID NO 15168908 as cited in SEQ ID NO 20765
ggaattcggctcgatctcccgtgaagctctcgaatctctggttttgagttttggagaatggtgtttttccgcagcgtatcggcctttactaggctgaggtctcgcgtccagggccaacaatcttcactcagcaattctgtcagatggattcagatgcagagctctaccgacctggacctgaagtcgcagctgcaagagttaattccggaacacaaggaccgtctgaagaaactgaagtcagaacatgggaaggtccaactgggaaacatcactgttgatatggttattggtggaatgagagggatgactggattgctttgggaaacctcattgcttgacccggaagaggtattcgctttaggggattgtcgacttcctgagtgccagaaagccctattacctactgcccagtctggaggcttgaaccattaccggaggtcttttgtggcttctcttaactggaaaggtaccttagcaaagagcaagttgaagcactgtcgaaagacttggaaccgtgctgctgtgtcagattatgtgtacaatgccatcgatgctctgccttccacagctcatccaatgactcaatttgctagcggtgttatggccctccaggtgcaaagtgagtttcaaaaggcatatgagaatggaattcataagtcaaagttctgggagccaacatatgaggattgcctcaacctgattgctcgtgttcctgttgtagctgcatatgtttatcgaaggatgtataagaatggtgattccattccctcagataaatctttggattatggtgcaaatttttcccacatgttgggatttgatgatgaaaggttgaaagagctcatgaggcttacatcaccatccacagtgatgcatgaaggtggaaatgttagtgctcacactggtcacctggttggtagtgcactttcagacccatatctgtcatttgcagctgcattaaatggtttagctgggccactccatggtttggctaatcaggaagttttgctttggatcaaatcagtcgtagaggaatgtggagaagatatatcaaaagaacagttgaaagaatatgtttggaaaacattaaacagtggcaaggttattccgggatatggtcacggtgttctgcgcaatactgatccaagatatgtatgccaaagagaatttgccttgaagcatcatcctgacgaccctcttttccagtgttgcaagcttatgaagttggcctcctgtctcactgagcttgaaagtgaagaaccctggccaaatgttgatgctcacagtggggtcttgctgaaccactatggtctaaccgaagcaaggtactacaccgtgctctttggtgtttcaaggagtcttggcatctgctctcagcttatatgggaccgagagctcttgcttgcacttgagaggccaaagagtgttaccatggactggcttgaagcccattgtaagaaagcttcatctgcttaactcaccaccgagtcctgagttgtgccactctctgtgtttcaacaaaagtcattctcttccacactggatagttttttttgtttttaccttctattgacagaagaaagcatttgttcatgtagaaattgttcctgagaaacacatgcttggtgcaaatttgcatttccgggaaactcgtgataataataaataaacagttgtatt

SEQ ID NO: 76473 - protein, 472 aa, Arabidopsis thaliana
  peptide (1)..(472): Ceres Seq. ID no. 7108121
MVFFRSVSAFTRLRSRVQGQQSSLSNSVRWIQMQSSTDLDLKSQLQELIPEHKDRLKKLKSEHGKVQLGNITVDMVIGGMRGMTGLLWETSLLDPEEVFALGDCRLPECQKALLPTAQSGGLNHYRRSFVASLNWKGTLAKSKLKHCRKTWNRAAVSDYVYNAIDALPSTAHPMTQFASGVMALQVQSEFQKAYENGIHKSKFWEPTYEDCLNLIARVPVVAAYVYRRMYKNGDSIPSDKSLDYGANFSHMLGFDDERLKELMRLTSPSTVMHEGGNVSAHTGHLVGSALSDPYLSFAAALNGLAGPLHGLANQEVLLWIKSVVEECGEDISKEQLKEYVWKTLNSGKVIPGYGHGVLRNTDPRYVCQREFALKHHPDDPLFQCCKLMKLASCLTELESEEPWPNVDAHSGVLLNHYGLTEARYYTVLFGVSRSLGICSQLIWDRELLLALERPKSVTMDWLEAHCKKASSA

SEQ ID NO: 76474 - protein, 440 aa, Arabidopsis thaliana
  peptide (1)..(440): Ceres Seq. ID no. 7108122
MQSSTDLDLKSQLQELIPEHKDRLKKLKSEHGKVQLGNITVDMVIGGMRGMTGLLWETSLLDPEEVFALGDCRLPECQKALLPTAQSGGLNHYRRSFVASLNWKGTLAKSKLKHCRKTWNRAAVSDYVYNAIDALPSTAHPMTQFASGVMALQVQSEFQKAYENGIHKSKFWEPTYEDCLNLIARVPVVAAYVYRRMYKNGDSIPSDKSLDYGANFSHMLGFDDERLKELMRLTSPSTVMHEGGNVSAHTGHLVGSALSDPYLSFAAALNGLAGPLHGLANQEVLLWIKSVVEECGEDISKEQLKEYVWKTLNSGKVIPGYGHGVLRNTDPRYVCQREFALKHHPDDPLFQCCKLMKLASCLTELESEEPWPNVDAHSGVLLNHYGLTEARYYTVLFGVSRSLGICSQLIWDRELLLALERPKSVTMDWLEAHCKKASSA

SEQ ID NO: 76475 - protein, 398 aa, Arabidopsis thaliana
  peptide (1)..(398): Ceres Seq. ID no. 7108123
MVIGGMRGMTGLLWETSLLDPEEVFALGDCRLPECQKALLPTAQSGGLNHYRRSFVASLNWKGTLAKSKLKHCRKTWNRAAVSDYVYNAIDALPSTAHPMTQFASGVMALQVQSEFQKAYENGIHKSKFWEPTYEDCLNLIARVPVVAAYVYRRMYKNGDSIPSDKSLDYGANFSHMLGFDDERLKELMRLTSPSTVMHEGGNVSAHTGHLVGSALSDPYLSFAAALNGLAGPLHGLANQEVLLWIKSVVEECGEDISKEQLKEYVWKTLNSGKVIPGYGHGVLRNTDPRYVCQREFALKHHPDDPLFQCCKLMKLASCLTELESEEPWPNVDAHSGVLLNHYGLTEARYYTVLFGVSRSLGICSQLIWDRELLLALERPKSVTMDWLEAHCKKASSA

SEQ ID NO: 76476 - DNA, 1056 bp, Arabidopsis thaliana
  misc_feature (1)..(1056): Ceres Seq. ID no. 7108134
  misc_feature (1)..(1056): Ortholog of  Ceres SEQ ID NO 15175048 as cited in SEQ ID NO 59975
  misc_feature (1)..(1056): Ortholog of  Ceres SEQ ID NO 13597333 as cited in SEQ ID NO 63974
  misc_feature (1)..(1056): Ortholog of  Ceres SEQ ID NO 13599307 as cited in SEQ ID NO 0
  misc_feature (1)..(1056): Ortholog of  Ceres SEQ ID NO 15179517 as cited in SEQ ID NO 0
gagtaatttagcatctatccacgcctgaacccgaaaaactctgaaagctgagctctggtaatggcgggtttagcaatttcacctcctctcggtctttccttctcttctcgaactcgaaaccctaaacccacttcctttctatctcacaatcaaaggaatcctataagacgtatagtttctgctctacagagtccatatggagattctctgaaagctggactttctagtaatgtttctggatccccaataaagattgacaacaaggctccaagatttggagtgatagaggcgaaaaagggaaaccccccagtaatgccttcagtgatgacccctggaggacctttagacctctcttctgtgttattccgtaaccgcataatcttcatcgggcaaccaattaacgcacaggttgctcagcgagtcatatctcagcttgtaacccttgcatctattgatgataaatccgacatcctgatgtacttgaattgtcccggtggcagtacttactccgtcctaacaatttatgactgtatgtcttggataaagcctaaagttggaacagtggcgtttggagtagctgcaagccaaggagcattttttcttgctggaggtgaaaaaggaatgcgttatgcaatgccaaatactcgtgtcatgatacatcaaccacaaactggatgcggaggacatgtagaggacgtgaggagacaggtcaatgaagccatcgaagcccgacaaaaaattgacaggatgtatgcagctttcactggacaacctctggagaaagtgcagcaatacactgaaagagatcgtttcttatcagcatctgaggcgtttgagttcgggctcattgatggtctattggaaacagaatactgaagcagcatacaggacaatgcacaacaacagctcattgcaatgttcaaagcttccattttcatttgaatatgaacggttgtaactgatatttgtgcataaatcagtttggttttcttggttttattgtctactaaacagaatgagaaaactaaactgtttatttttttactgaaaaatctg

SEQ ID NO: 76477 - protein, 271 aa, Arabidopsis thaliana
  peptide (1)..(271): Ceres Seq. ID no. 7108135
MAGLAISPPLGLSFSSRTRNPKPTSFLSHNQRNPIRRIVSALQSPYGDSLKAGLSSNVSGSPIKIDNKAPRFGVIEAKKGNPPVMPSVMTPGGPLDLSSVLFRNRIIFIGQPINAQVAQRVISQLVTLASIDDKSDILMYLNCPGGSTYSVLTIYDCMSWIKPKVGTVAFGVAASQGAFFLAGGEKGMRYAMPNTRVMIHQPQTGCGGHVEDVRRQVNEAIEARQKIDRMYAAFTGQPLEKVQQYTERDRFLSASEAFEFGLIDGLLETEY

SEQ ID NO: 76478 - protein, 187 aa, Arabidopsis thaliana
  peptide (1)..(187): Ceres Seq. ID no. 7108136
MPSVMTPGGPLDLSSVLFRNRIIFIGQPINAQVAQRVISQLVTLASIDDKSDILMYLNCPGGSTYSVLTIYDCMSWIKPKVGTVAFGVAASQGAFFLAGGEKGMRYAMPNTRVMIHQPQTGCGGHVEDVRRQVNEAIEARQKIDRMYAAFTGQPLEKVQQYTERDRFLSASEAFEFGLIDGLLETEY

SEQ ID NO: 76479 - protein, 183 aa, Arabidopsis thaliana
  peptide (1)..(183): Ceres Seq. ID no. 7108137
MTPGGPLDLSSVLFRNRIIFIGQPINAQVAQRVISQLVTLASIDDKSDILMYLNCPGGSTYSVLTIYDCMSWIKPKVGTVAFGVAASQGAFFLAGGEKGMRYAMPNTRVMIHQPQTGCGGHVEDVRRQVNEAIEARQKIDRMYAAFTGQPLEKVQQYTERDRFLSASEAFEFGLIDGLLETEY

SEQ ID NO: 76480 - DNA, 1068 bp, Arabidopsis thaliana
  misc_feature (1)..(1068): Ceres Seq. ID no. 7108138
  misc_feature (1)..(1068): Ortholog of  Ceres SEQ ID NO 15176230 as cited in SEQ ID NO 58796
  misc_feature (1)..(1068): Ortholog of  Ceres SEQ ID NO 14308156 as cited in SEQ ID NO 59006
  misc_feature (1)..(1068): Ortholog of  Ceres SEQ ID NO 13596321 as cited in SEQ ID NO 67976
ccacgcgtccgtggttctctgagattagtcctatgtggccaggagaagcacattctctcaaggtagagaagattctattccaagggaaatcagattaccaggatgttattgttttccagtctgcaacatatggaaaggttttggttttggatggagtgattcaactcactgagagagatgaatgtgcgtatcaagaaatgatcactcatcttcctttgtgctctatctccaaccccaaaaaggtactggtgattggaggaggagatggaggagtcctgagggaagtggcacgtcatagttctgttgagcagattgacatttgtgaaatagataaaatggtggttgatgtggctaagcagtatttccctaatgtagcagttggatacgaggatcctcgtgtcaacctcatcattggcgatggtgttgctttcttgaagaacgctgctgaaggaacctatgatgcagttattgttgattcatctgatccaatcggtccagcaaaagagctatttgagaaacctttctttgagtcagtgaatagagctcttcgtcctggtggagttgtgtgcacacaagctgaaagcttgtggcttcacatggatatcattgaagacattgtttctaattgccgtgacatctttaaaggatctgttaactacgcttggaccagtgttccaacttacccgagtggagtcattggattcatgctttgttcatctgaaggaccacaagtcgatttcaagaagccagtgagtctaatcgatactgatgaaagctctatcaaatcacactgtcccttgaagtattacaacgctgagattcactcagctgctttctgcttgccctcttttgctaagaaggtgattgattcgaaagccaactagaaaagagaagagaaatcatttgctttagagaaacttcatgtggaagtgataatatgatgatacaatgatcctttggaaaaaaataaagaagttttaatttttagaatgtaatgttctttcacctgcaatgttatgtgactgcactgagctatcaatctctttttataagcattacacatatttc

SEQ ID NO: 76481 - protein, 293 aa, Arabidopsis thaliana
  peptide (1)..(293): Ceres Seq. ID no. 7108139
TRPWFSEISPMWPGEAHSLKVEKILFQGKSDYQDVIVFQSATYGKVLVLDGVIQLTERDECAYQEMITHLPLCSISNPKKVLVIGGGDGGVLREVARHSSVEQIDICEIDKMVVDVAKQYFPNVAVGYEDPRVNLIIGDGVAFLKNAAEGTYDAVIVDSSDPIGPAKELFEKPFFESVNRALRPGGVVCTQAESLWLHMDIIEDIVSNCRDIFKGSVNYAWTSVPTYPSGVIGFMLCSSEGPQVDFKKPVSLIDTDESSIKSHCPLKYYNAEIHSAAFCLPSFAKKVIDSKAN

SEQ ID NO: 76482 - protein, 283 aa, Arabidopsis thaliana
  peptide (1)..(283): Ceres Seq. ID no. 7108140
MWPGEAHSLKVEKILFQGKSDYQDVIVFQSATYGKVLVLDGVIQLTERDECAYQEMITHLPLCSISNPKKVLVIGGGDGGVLREVARHSSVEQIDICEIDKMVVDVAKQYFPNVAVGYEDPRVNLIIGDGVAFLKNAAEGTYDAVIVDSSDPIGPAKELFEKPFFESVNRALRPGGVVCTQAESLWLHMDIIEDIVSNCRDIFKGSVNYAWTSVPTYPSGVIGFMLCSSEGPQVDFKKPVSLIDTDESSIKSHCPLKYYNAEIHSAAFCLPSFAKKVIDSKAN

SEQ ID NO: 76483 - protein, 228 aa, Arabidopsis thaliana
  peptide (1)..(228): Ceres Seq. ID no. 7108141
MITHLPLCSISNPKKVLVIGGGDGGVLREVARHSSVEQIDICEIDKMVVDVAKQYFPNVAVGYEDPRVNLIIGDGVAFLKNAAEGTYDAVIVDSSDPIGPAKELFEKPFFESVNRALRPGGVVCTQAESLWLHMDIIEDIVSNCRDIFKGSVNYAWTSVPTYPSGVIGFMLCSSEGPQVDFKKPVSLIDTDESSIKSHCPLKYYNAEIHSAAFCLPSFAKKVIDSKAN

SEQ ID NO: 76484 - DNA, 1691 bp, Arabidopsis thaliana
  misc_feature (1)..(1691): Ceres Seq. ID no. 7108142
  misc_feature (1)..(1691): Ortholog of  Ceres SEQ ID NO 15174599 as cited in SEQ ID NO 53646
  misc_feature (1)..(1691): Ortholog of  Ceres SEQ ID NO 15174646 as cited in SEQ ID NO 54499
ccacgcgtccgttttatccaaaaaaaaaaaaaagtcttgtgtttctcttaggttggttgagaatcatttcatttcaatggaatccaattgtgttcaatttctcggtaacaagaccattctcatcacaggagctcctggttttcttgccaaggttttggtagagaaaatactaaggttgcaaccaaatgtgaagaagatataccttctgttgagagctcccgacgaaaaatcagccatgcaacgcctacgtagtgaggttatggagatcgacctttttaaagtgttgaggaacaatctaggagaagacaatttgaatgccttgatgcgggaaaaaattgtgccggttccaggtgatatatcgatcgataatttgggattgaaagacactgatctcatacaacgtatgtggagtgagattgatatcataatcaacatagcagccacaacaaatttcgatgaaagatatgatattggtcttggcatcaacacatttggagccctgaatgttctcaacttcgccaaaaagtgtgttaaaggacaattgcttctccatgtctcaaccgcgtatataagcggtgaacaacctggattgttactagagaaaccattcaagatgggggagactctcagcggggatcgggaactagacatcaatatagaacatgatctaatgaaacaaaaattgaaagagcttcaagattgttctgatgaagagatctcgcaaacaatgaaagattttggaatggcaagggcaaagcttcatggatggccaaatacatatgtattcaccaaagcaatgggagagatgctaatgggaaaatacagagaaaatttgccacttgttatcatacgtccaacaatgattactagtactattgccgaaccattccccggttggattgaagggttgaaaacattagacagtgtgattgttgcatatggtaaaggaaggcttaaatgttttcttgcggattcaaactcagtctttgaccttataccggcagacatggtagtaaatgcgatggttgcagccgcgacagctcattcgggagacaccgggattcaggcaatatatcatgttggttcgtcttgtaagaatccagtcacgtttggacaacttcacgatttcacggctcgttacttcgctaaacgtcctttgattggtcggaatggctcgccaatcatagtggtcaaaggaaccattctgtccactatggctcaattcagcctctacatgacccttcgttacaagcttcctctacagatacttcgattgatcaatatagtttatccatggagtcacggagataactacagtgacctaagccgcaaaatcaagctagctatgcgactagttgagctttaccagccttacttactcttcaagggcatatttgatgatttaaataccgaaagactgcgaatgaaaagaaaggagaatatcaaagagttagatggatcgttcgagttcgatcccaagtccattgattgggacaattatatcacaaacacccacattcctggcctcatcacccatgtgcttaaacaataaattatgctggtaatatgtttggaactattgtgaatctcgtgtgtaatattattaaagaatacgattatatcattctaatcttgtaatttacagtttgtgttggcgtgtaatatcaaaataaataaaaaaaacttattcc

SEQ ID NO: 76485 - protein, 516 aa, Arabidopsis thaliana
  peptide (1)..(516): Ceres Seq. ID no. 7108143
HASVLSKKKKKSCVSLRLVENHFISMESNCVQFLGNKTILITGAPGFLAKVLVEKILRLQPNVKKIYLLLRAPDEKSAMQRLRSEVMEIDLFKVLRNNLGEDNLNALMREKIVPVPGDISIDNLGLKDTDLIQRMWSEIDIIINIAATTNFDERYDIGLGINTFGALNVLNFAKKCVKGQLLLHVSTAYISGEQPGLLLEKPFKMGETLSGDRELDINIEHDLMKQKLKELQDCSDEEISQTMKDFGMARAKLHGWPNTYVFTKAMGEMLMGKYRENLPLVIIRPTMITSTIAEPFPGWIEGLKTLDSVIVAYGKGRLKCFLADSNSVFDLIPADMVVNAMVAAATAHSGDTGIQAIYHVGSSCKNPVTFGQLHDFTARYFAKRPLIGRNGSPIIVVKGTILSTMAQFSLYMTLRYKLPLQILRLINIVYPWSHGDNYSDLSRKIKLAMRLVELYQPYLLFKGIFDDLNTERLRMKRKENIKELDGSFEFDPKSIDWDNYITNTHIPGLITHVLKQ

SEQ ID NO: 76486 - protein, 491 aa, Arabidopsis thaliana
  peptide (1)..(491): Ceres Seq. ID no. 7108144
MESNCVQFLGNKTILITGAPGFLAKVLVEKILRLQPNVKKIYLLLRAPDEKSAMQRLRSEVMEIDLFKVLRNNLGEDNLNALMREKIVPVPGDISIDNLGLKDTDLIQRMWSEIDIIINIAATTNFDERYDIGLGINTFGALNVLNFAKKCVKGQLLLHVSTAYISGEQPGLLLEKPFKMGETLSGDRELDINIEHDLMKQKLKELQDCSDEEISQTMKDFGMARAKLHGWPNTYVFTKAMGEMLMGKYRENLPLVIIRPTMITSTIAEPFPGWIEGLKTLDSVIVAYGKGRLKCFLADSNSVFDLIPADMVVNAMVAAATAHSGDTGIQAIYHVGSSCKNPVTFGQLHDFTARYFAKRPLIGRNGSPIIVVKGTILSTMAQFSLYMTLRYKLPLQILRLINIVYPWSHGDNYSDLSRKIKLAMRLVELYQPYLLFKGIFDDLNTERLRMKRKENIKELDGSFEFDPKSIDWDNYITNTHIPGLITHVLKQ

SEQ ID NO: 76487 - protein, 438 aa, Arabidopsis thaliana
  peptide (1)..(438): Ceres Seq. ID no. 7108145
MQRLRSEVMEIDLFKVLRNNLGEDNLNALMREKIVPVPGDISIDNLGLKDTDLIQRMWSEIDIIINIAATTNFDERYDIGLGINTFGALNVLNFAKKCVKGQLLLHVSTAYISGEQPGLLLEKPFKMGETLSGDRELDINIEHDLMKQKLKELQDCSDEEISQTMKDFGMARAKLHGWPNTYVFTKAMGEMLMGKYRENLPLVIIRPTMITSTIAEPFPGWIEGLKTLDSVIVAYGKGRLKCFLADSNSVFDLIPADMVVNAMVAAATAHSGDTGIQAIYHVGSSCKNPVTFGQLHDFTARYFAKRPLIGRNGSPIIVVKGTILSTMAQFSLYMTLRYKLPLQILRLINIVYPWSHGDNYSDLSRKIKLAMRLVELYQPYLLFKGIFDDLNTERLRMKRKENIKELDGSFEFDPKSIDWDNYITNTHIPGLITHVLKQ

SEQ ID NO: 76488 - DNA, 898 bp, Arabidopsis thaliana
  misc_feature (1)..(898): Ceres Seq. ID no. 7108169
  misc_feature (1)..(898): Ortholog of  Ceres SEQ ID NO 13599287 as cited in SEQ ID NO 338
  misc_feature (1)..(898): Ortholog of  Ceres SEQ ID NO 15172934 as cited in SEQ ID NO 51783
  misc_feature (1)..(898): Ortholog of  Ceres SEQ ID NO 14314817 as cited in SEQ ID NO 52571
  misc_feature (1)..(898): Ortholog of  Ceres SEQ ID NO 15174056 as cited in SEQ ID NO 0
cttttgcaaatgcttcgctcctcaattcgacttctctatataagaagaaccagtcctctgcttcgaagtttatcatcatcatcatcatcatcatcatcatcatcatcaaaacgattcgattctgcgaaaccacttttcaattctcatcggattatttctcttccaatttctacaacgggagctaaactatctagatcggagcattcaatggctgcttcttccgaacccaaatctctttacgatttcaccgtcaaggatgctaagggaaacgatgttgatctaagcatctacaaagggaaggttcttttgattgtgaacgttgcttctcaatgtggcttgactaattcgaattatactgagcttgcgcagctgtatgagaagtacaaaggccatggtttcgagattcttgcatttccgtgtaaccagtttgggaatcaagagcctggtactaatgaagagattgttcagtttgcttgtactcgtttcaaggctgagtacccgattttcgacaaggttgatgttaacggtgacaaagctgccccagtctacaagtttctgaaatcaagcaaaggcgggctctttggagacggcattaagtggaacttcgcaaagtttttggttgacaaagatggaaatgttgtcgatcgtttcgcaccaactacctcacctctcagcattgaaaaggatgtgaagaagttgttgggagttactgcttaagcaaggcaagattgcataattagacaaataaaagctcattagtattgtattaccaatactgtgtagtaagctgagttcgcgagtgtgtgtgccattgggaccgcgtacaattataatccgttttttagcggccaaactatgtaataatcgtagatctaaatatcagatttcccgttacctt

SEQ ID NO: 76489 - protein, 238 aa, Arabidopsis thaliana
  peptide (1)..(238): Ceres Seq. ID no. 7108170
LLQMLRSSIRLLYIRRTSPLLRSLSSSSSSSSSSSSKRFDSAKPLFNSHRIISLPISTTGAKLSRSEHSMAASSEPKSLYDFTVKDAKGNDVDLSIYKGKVLLIVNVASQCGLTNSNYTELAQLYEKYKGHGFEILAFPCNQFGNQEPGTNEEIVQFACTRFKAEYPIFDKVDVNGDKAAPVYKFLKSSKGGLFGDGIKWNFAKFLVDKDGNVVDRFAPTTSPLSIEKDVKKLLGVTA

SEQ ID NO: 76490 - protein, 235 aa, Arabidopsis thaliana
  peptide (1)..(235): Ceres Seq. ID no. 7108171
MLRSSIRLLYIRRTSPLLRSLSSSSSSSSSSSSKRFDSAKPLFNSHRIISLPISTTGAKLSRSEHSMAASSEPKSLYDFTVKDAKGNDVDLSIYKGKVLLIVNVASQCGLTNSNYTELAQLYEKYKGHGFEILAFPCNQFGNQEPGTNEEIVQFACTRFKAEYPIFDKVDVNGDKAAPVYKFLKSSKGGLFGDGIKWNFAKFLVDKDGNVVDRFAPTTSPLSIEKDVKKLLGVTA

SEQ ID NO: 76491 - protein, 169 aa, Arabidopsis thaliana; identical to SEQ ID NO: 28163
  peptide (1)..(169): Ceres Seq. ID no. 7108172

SEQ ID NO: 76492 - DNA, 1405 bp, Arabidopsis thaliana
  misc_feature (1)..(1405): Ceres Seq. ID no. 7108177
  misc_feature (1)..(1405): Ortholog of  Ceres SEQ ID NO 12618559 as cited in SEQ ID NO 64385
ccacgcgtccgacacttccatataattaaaatcgagatctcgaataatgcgaatctgaaggatctttacgaattccataatcttcagatcgaaaggtttctatcgattcgttggtcaagaggagattgtgcgtgtgattcgtgagcatgggctgttcgttttcaggattgaacgcactttacgacgccgtcaacggtggaggtgacgtatggatcaatgagaatcgattcaggatcgtgaggcagctcggcgaaggaggtttcgcattcgtctttttggtcaaggaaattgtcgccgacgcttcctccgccgcatccggtggtggtctagctaagaaagtcaaggatccggctcatctctccgctgacggaacttatgctatgaagaaagttttgattcagaacaaggagcaattggaattggtgcgtgaggagatccgtgtttcttcattgttcaatcaccctaatttgcttccactccttgatcatgccattatttctgttaaggacggccaagagggagcttggaaacacgaggccttcttgctgtttcctgttcacttggatgggaccttgctggataatttcactttgatgaaggctaaaaaagaaactttctcaacaactgatgttttgcacatattccgtcagctttgtgatggacttaaacacatgcactctctggagccaccatatgctcacaacgatgtcaaacctggcaacgtccttttaacacgtagaaaaggacagcctcctcttgcgatattgatggactttggaagtgctcgcccatcacggaagcaaatccgttcccgtcaagaggccttacagttacaggaatggacatctgagcattgctcagcaccgtttcgagctcccgagctctgggattgcccaagccatgctgatattgatgagagaacagatatctggtcactaggctgcacattatatgcaataatgtatggtgtgtctccattcgagtatgcgcttggagaatctggtggaagtcttcagcttgcaatcgtgaacgctcagatcaaatggccaaacactggaccaaaagcttcttaccctgaagctcttcaccagttcgtaacttggatgctgcaaccacaagctgctgttcgaccgcgcatagacgatatcatcatccatgtcgacaaattgatcgctaaattcaccaaatgattcccgaattatgttggttttcaaaaaaaggtgaaaggaaagaaaagaagactctttatacattgctttgtctctttttttttctaatatccttagctgttttcaaaaatcccatattagatacatatatttaatagtattacattgctcttcgtaatgtattttgaactttttaggattcggggttttctttttgactatggaagttgtgaacc

SEQ ID NO: 76493 - protein, 347 aa, Arabidopsis thaliana; identical to SEQ ID NO: 27076
  peptide (1)..(347): Ceres Seq. ID no. 7108178

SEQ ID NO: 76494 - protein, 269 aa, Arabidopsis thaliana; identical to SEQ ID NO: 27077
  peptide (1)..(269): Ceres Seq. ID no. 7108179

SEQ ID NO: 76495 - protein, 198 aa, Arabidopsis thaliana; identical to SEQ ID NO: 27078
  peptide (1)..(198): Ceres Seq. ID no. 7108180

SEQ ID NO: 76496 - DNA, 1251 bp, Arabidopsis thaliana
  misc_feature (1)..(1251): Ceres Seq. ID no. 7108181
  misc_feature (1)..(1251): Ortholog of  Ceres SEQ ID NO 15225196 as cited in SEQ ID NO 63947
gtcgacccacgcgtccgagaagcggaggcgatttttctagggtttttgctcggaatcgatttcacgatgggaacgagcagcgatccgattcaagatggttccgatgagcagcagaagcgatcagaaatctatacatacgaagcgccatggcacatctacgcaatgaattggagcgttcgtcgcgataagaagtatcgtctcgccatcactagcctcctcgagcaatacccgaaccgtgtcgagattgtgcagctcgatgaatccaatggtgagatccgttccgatcctaacctctcctttgagcatccttatccaccaacgaagaccattttcatacctgacaaggaatgccaaagacctgatcttctcgctacttcaagtgatttccttcgtttatggagaatcgctgatgatcattcccgtgttgagctcaaatcttgtctcaatagcaataagaacagtgagttttgtggtcctcttacttcttttgattggaatgaagctgagccacgtcgaattggaacatctagtactgatacgacttgtactatctgggacattgagcgtgaagctgttgatactcagcttattgctcatgataaggaagtttttgatattgcttggggtggtgttggtgtttttgcatctgtttcagctgatggctccgttagggtgtttgatcttcgtgataaggaacattcgacgattatctatgagagctccgagcctgatactcctttagtgcgtcttggttgggacaaacaggatcctaggtacatggctactattatcatggacagtgctaaagttgtggtgcttgacattcgttttccggctcttcctgtggttgagcttcaacgacatcaagctagtgtcaatgccattgcttgggctcctcatagctcttgtcacatttgtactgctggagatgattctcaagctttgatttgggatatttcatccatgggacagcatgttgaaggtggtcttgaccctattctagcttacactgctggtgctgagattgagcagcttcagtggtcctcttctcagcctgattgggtcgcaattgctttctctactaagctgcaaattctcagggtttgatcttttcaaagaatttctcatctcttgtcagattagattttactcattttctatcgtattaggggtctcgttacccttgttactatcctcaagatgtaaagactgttctcaatcgaattaatgaatctgtttgatcttgttgct

SEQ ID NO: 76497 - protein, 368 aa, Arabidopsis thaliana
  peptide (1)..(368): Ceres Seq. ID no. 7108182
VDPRVREAEAIFLGFLLGIDFTMGTSSDPIQDGSDEQQKRSEIYTYEAPWHIYAMNWSVRRDKKYRLAITSLLEQYPNRVEIVQLDESNGEIRSDPNLSFEHPYPPTKTIFIPDKECQRPDLLATSSDFLRLWRIADDHSRVELKSCLNSNKNSEFCGPLTSFDWNEAEPRRIGTSSTDTTCTIWDIEREAVDTQLIAHDKEVFDIAWGGVGVFASVSADGSVRVFDLRDKEHSTIIYESSEPDTPLVRLGWDKQDPRYMATIIMDSAKVVVLDIRFPALPVVELQRHQASVNAIAWAPHSSCHICTAGDDSQALIWDISSMGQHVEGGLDPILAYTAGAEIEQLQWSSSQPDWVAIAFSTKLQILRV

SEQ ID NO: 76498 - protein, 346 aa, Arabidopsis thaliana
  peptide (1)..(346): Ceres Seq. ID no. 7108183
MGTSSDPIQDGSDEQQKRSEIYTYEAPWHIYAMNWSVRRDKKYRLAITSLLEQYPNRVEIVQLDESNGEIRSDPNLSFEHPYPPTKTIFIPDKECQRPDLLATSSDFLRLWRIADDHSRVELKSCLNSNKNSEFCGPLTSFDWNEAEPRRIGTSSTDTTCTIWDIEREAVDTQLIAHDKEVFDIAWGGVGVFASVSADGSVRVFDLRDKEHSTIIYESSEPDTPLVRLGWDKQDPRYMATIIMDSAKVVVLDIRFPALPVVELQRHQASVNAIAWAPHSSCHICTAGDDSQALIWDISSMGQHVEGGLDPILAYTAGAEIEQLQWSSSQPDWVAIAFSTKLQILRV

SEQ ID NO: 76499 - protein, 314 aa, Arabidopsis thaliana
  peptide (1)..(314): Ceres Seq. ID no. 7108184
MNWSVRRDKKYRLAITSLLEQYPNRVEIVQLDESNGEIRSDPNLSFEHPYPPTKTIFIPDKECQRPDLLATSSDFLRLWRIADDHSRVELKSCLNSNKNSEFCGPLTSFDWNEAEPRRIGTSSTDTTCTIWDIEREAVDTQLIAHDKEVFDIAWGGVGVFASVSADGSVRVFDLRDKEHSTIIYESSEPDTPLVRLGWDKQDPRYMATIIMDSAKVVVLDIRFPALPVVELQRHQASVNAIAWAPHSSCHICTAGDDSQALIWDISSMGQHVEGGLDPILAYTAGAEIEQLQWSSSQPDWVAIAFSTKLQILRV

SEQ ID NO: 76500 - DNA, 1678 bp, Arabidopsis thaliana
  misc_feature (1)..(1678): Ceres Seq. ID no. 7108195
  misc_feature (1)..(1678): Ortholog of  Ceres SEQ ID NO 13597407 as cited in SEQ ID NO 64106
gatccgggatgggaaagaagcaggaggagactttttggaatggagagacaaaagagcatggaaaaagggttactcaggaagagcttaagcatacgtgagagaaagttccctaacgaagacgctttcttagaatccggtttatcgaggaagtctccgcgagaggtcaagaaacctcaaaacgacgatggtgaatgtcgtgttaccgcctctgttttcctcagcacctttgttgccgtatcaggctccttctgtaccggttgtggcgttggtttttcatcgggtgcacaagcagggattaccaaagatttatctctctccgttgcagaatactcaatgttcgggtcgatcttgacattaggaggcttgatcggtgcagtattcagcggtaaagtcgctgatgtcttgggaagaaaacggacgatgttgttttgcgaattcttctgtatcacaggctggctttgtgtagcattggctcagaatgcaatgtggctggactgtggaagattgttacttggaatcggcgttggtatatttagctacgtgattccggtgtatatagccgaaattgcacctaaacatgtccgaggatcgtttgtgttcgccaatcagttgatgcaaaattgcggaatttcactcttcttcatcattggcaattttattccatggagactactaacagtagtcggattggtgccatgtgtgttccacgtcttttgtttatttttcatccccgaatctccaagatggctggcgaagttaggtcgtgataaagaatgccgatcttcgttgcaacgccttaggggatctgacgtcgatatttctcgtgaagcaaacacaattcgagataccattgacatgacagaaaacggtggtgaaactaagatgtctgaattgtttcagagacgatacgcatatccgttaattatcggagttggtttaatgtttttgcaacaattgtgtgggagctccggtgttacctattatgctagtagcctcttcaacaaaggaggatttccaagtgctattggcacatccgtaatagccacaattatggttccaaaagcaatgctggcaacagtcctagtcgataaaatggggaggagaacgctcctaatggcttcttgttctgcaatgggtttgagtgctttgctcttaagtgtttcttacggtttccagtcgtttggcattcttccagaactcactcccatcttcacttgcatcggcgtcttgggtcacattgtgtcatttgccatgggaatgggaggactaccatggattataatggctgagatatttccgatgaatgtgaaagtgtcagctgggaccttagttactgtaaccaattggttatttggttggattatcacatacactttcaattttatgctagaatggaatgcatcaggaatgttcctcatcttctcaatggtctccgccagttcgatcgtatttatatactttttggtacctgagacaaaaggccgatcacttgaagaaatacaagcactgctcaacaactctgtgcaataatatcatttttctttttctttttgggtaaatgatcatatatataagtcgattgttgttatttggtgtgagtttgaatgtgatccgtgtgcgtatcaaattttggatgggaaatttgaaacagtaaaaatttgtatattcctcgtttggg

SEQ ID NO: 76501 - protein, 509 aa, Arabidopsis thaliana
  peptide (1)..(509): Ceres Seq. ID no. 7108196
DPGWERSRRRLFGMERQKSMEKGLLRKSLSIRERKFPNEDAFLESGLSRKSPREVKKPQNDDGECRVTASVFLSTFVAVSGSFCTGCGVGFSSGAQAGITKDLSLSVAEYSMFGSILTLGGLIGAVFSGKVADVLGRKRTMLFCEFFCITGWLCVALAQNAMWLDCGRLLLGIGVGIFSYVIPVYIAEIAPKHVRGSFVFANQLMQNCGISLFFIIGNFIPWRLLTVVGLVPCVFHVFCLFFIPESPRWLAKLGRDKECRSSLQRLRGSDVDISREANTIRDTIDMTENGGETKMSELFQRRYAYPLIIGVGLMFLQQLCGSSGVTYYASSLFNKGGFPSAIGTSVIATIMVPKAMLATVLVDKMGRRTLLMASCSAMGLSALLLSVSYGFQSFGILPELTPIFTCIGVLGHIVSFAMGMGGLPWIIMAEIFPMNVKVSAGTLVTVTNWLFGWIITYTFNFMLEWNASGMFLIFSMVSASSIVFIYFLVPETKGRSLEEIQALLNNSVQ

SEQ ID NO: 76502 - protein, 496 aa, Arabidopsis thaliana; identical to SEQ ID NO: 50382
  peptide (1)..(496): Ceres Seq. ID no. 7108197

SEQ ID NO: 76503 - protein, 490 aa, Arabidopsis thaliana; identical to SEQ ID NO: 50383
  peptide (1)..(490): Ceres Seq. ID no. 7108198

SEQ ID NO: 76504 - DNA, 1647 bp, Arabidopsis thaliana
  misc_feature (1)..(1647): Ceres Seq. ID no. 7108211
  misc_feature (1)..(1647): Ortholog of  Ceres SEQ ID NO 15177858 as cited in SEQ ID NO 51624
  misc_feature (1)..(1647): Ortholog of  Ceres SEQ ID NO 15171249 as cited in SEQ ID NO 52276
  misc_feature (1)..(1647): Ortholog of  Ceres SEQ ID NO 13594189 as cited in SEQ ID NO 58890
tcgacccacgcgtccgcttcgtcgtcgtcttcttcctttgctccgtcgtcgagatctcgtcgatcctcaaatctcaaatctcctgtaaccagatcgtctaattatccgatctgcgtttcgaatctcagatcgaagatgccggtggctgcttccgccatctattttctgaatctccgtggcgatgtactcataaatcgcacctaccgagatgacgtcgggggaaacatggtggatgcatttcgtacgcatataatgcagacgaaagagttagggaattgtcctgtgcgtcagattggtggctgctcctttgtttatatgcgaatcagcaatgtctacattgtcattgttgtcagtagcaatgctaacgttgcttgtggattcaaattcgttgttgaggctgttgctttgttcaaatcatactttggtggagcttttgatgaagacgctattagaaataactttgttctgatttatgaattgttggacgagattatggactttggctatccacaaaatctctcccctgaaattttgaaactttatatcactcaggaaggtgtacggtcaccattttcatcgaagccaaaggacaagcctgttccaaatgcaacattacaagttacgggtgctgttggttggagaagagagggccttgcttataaaaagaatgaggtgtttctggatattgtggaaagtgtaaaccttctgatgtcctctaaaggcaacgttcttcggtgtgatgtgaccgggaaagttttaatgaaatgtttcctttcgggaatgcctgatttgaagttggggttgaatgataaaattggtcttgagaaggaatcagaaatgaaatctcgcccagctaagagtggtaaaaccattgagcttgatgatgtcacatttcaccagtgtgtgaacctgaccagattcaactccgagaagactgttagttttgtaccaccggatggagagtttgaactgatgaagtatcgaataacagagggtgtaaatctgccattccgcgtgttaccaacaatcaaagaacttggtcgtacacgcatggaagtaaatgtcaaggtcaaaagtgtgtttggtgctaaaatgtttgcccttggggtcgtcgttaaaattccagtgccaaaacaaacagccaagaccaatttccaagtgacaactggtcgcgctaaatacaatccatcaatcgattgcttggtttggaagataagaaaattcccagggcaaacagagtccacgctaagtgcagaaattgagttgatctcaacaatgggagagaagaaatcttggacaagaccaccaatccaaatggaatttcaggtgccaatgttcacagcatctggtctgcgagttcgttttctcaaggtttgggagaagagcggttacaacacggttgagtgggttcgatacataacgaaagcgggatcttacgagatcagatgctgaacataaaacacagttcaggttcagtgacatcagacttaaaaagtttcatggcttctagtttttgttccttatgcaaaacaaacacaaaagagttaaatatgttttataccttgttttatgtttgtttgtcgattagagatatctgtgttaatatgatttcttatgtcttaatttggtattgaattctgtttttct

SEQ ID NO: 76505 - protein, 483 aa, Arabidopsis thaliana
  peptide (1)..(483): Ceres Seq. ID no. 7108212
STHASASSSSSSFAPSSRSRRSSNLKSPVTRSSNYPICVSNLRSKMPVAASAIYFLNLRGDVLINRTYRDDVGGNMVDAFRTHIMQTKELGNCPVRQIGGCSFVYMRISNVYIVIVVSSNANVACGFKFVVEAVALFKSYFGGAFDEDAIRNNFVLIYELLDEIMDFGYPQNLSPEILKLYITQEGVRSPFSSKPKDKPVPNATLQVTGAVGWRREGLAYKKNEVFLDIVESVNLLMSSKGNVLRCDVTGKVLMKCFLSGMPDLKLGLNDKIGLEKESEMKSRPAKSGKTIELDDVTFHQCVNLTRFNSEKTVSFVPPDGEFELMKYRITEGVNLPFRVLPTIKELGRTRMEVNVKVKSVFGAKMFALGVVVKIPVPKQTAKTNFQVTTGRAKYNPSIDCLVWKIRKFPGQTESTLSAEIELISTMGEKKSWTRPPIQMEFQVPMFTASGLRVRFLKVWEKSGYNTVEWVRYITKAGSYEIRC

SEQ ID NO: 76506 - protein, 438 aa, Arabidopsis thaliana
  peptide (1)..(438): Ceres Seq. ID no. 7108213
MPVAASAIYFLNLRGDVLINRTYRDDVGGNMVDAFRTHIMQTKELGNCPVRQIGGCSFVYMRISNVYIVIVVSSNANVACGFKFVVEAVALFKSYFGGAFDEDAIRNNFVLIYELLDEIMDFGYPQNLSPEILKLYITQEGVRSPFSSKPKDKPVPNATLQVTGAVGWRREGLAYKKNEVFLDIVESVNLLMSSKGNVLRCDVTGKVLMKCFLSGMPDLKLGLNDKIGLEKESEMKSRPAKSGKTIELDDVTFHQCVNLTRFNSEKTVSFVPPDGEFELMKYRITEGVNLPFRVLPTIKELGRTRMEVNVKVKSVFGAKMFALGVVVKIPVPKQTAKTNFQVTTGRAKYNPSIDCLVWKIRKFPGQTESTLSAEIELISTMGEKKSWTRPPIQMEFQVPMFTASGLRVRFLKVWEKSGYNTVEWVRYITKAGSYEIRC

SEQ ID NO: 76507 - protein, 408 aa, Arabidopsis thaliana
  peptide (1)..(408): Ceres Seq. ID no. 7108214
MVDAFRTHIMQTKELGNCPVRQIGGCSFVYMRISNVYIVIVVSSNANVACGFKFVVEAVALFKSYFGGAFDEDAIRNNFVLIYELLDEIMDFGYPQNLSPEILKLYITQEGVRSPFSSKPKDKPVPNATLQVTGAVGWRREGLAYKKNEVFLDIVESVNLLMSSKGNVLRCDVTGKVLMKCFLSGMPDLKLGLNDKIGLEKESEMKSRPAKSGKTIELDDVTFHQCVNLTRFNSEKTVSFVPPDGEFELMKYRITEGVNLPFRVLPTIKELGRTRMEVNVKVKSVFGAKMFALGVVVKIPVPKQTAKTNFQVTTGRAKYNPSIDCLVWKIRKFPGQTESTLSAEIELISTMGEKKSWTRPPIQMEFQVPMFTASGLRVRFLKVWEKSGYNTVEWVRYITKAGSYEIRC

SEQ ID NO: 76508 - DNA, 1075 bp, Arabidopsis thaliana
  misc_feature (1)..(1075): Ceres Seq. ID no. 7108279
  misc_feature (1)..(1075): Ortholog of  Ceres SEQ ID NO 13664220 as cited in SEQ ID NO 61151
  misc_feature (1)..(1075): Ortholog of  Ceres SEQ ID NO 13597477 as cited in SEQ ID NO 65160
gaattcggcacgagggtatgacgtcgttttgctccatgatttctcttcttcttcttctctctctttcatcgccggttttctccgatgacgcttctttccagaaacttccggtgccggaaactaggtcaggtcccgaagctttcgcttttgattccaccggtaaagggttctataccggtgtctccggtggtaaaatcctcaagtacctccccgagacgggttatgttgactttgcccagatcactgaatcctcgaactcttcatggtgcgatggtactattggaacggctttagccggacgctgtggtcgaccagcaggaatagcattcaacgagaaaacaggtgatctttacgtcgccgatgctccgttgggtcttcacgttatttctcccgccggtggtttggctacgaagatcaccgacagtgttgacggaaagcctttcaagtttcttgacggtcttgacgttgatcccactactggtgtcgtctacttcacttccttcagctcacgcttctccccaatccaagtgttgattgcattggggttaaaggacgcgaccggaaagctctacaaatacgacccatcgaccaaagtcgtgactgtactgatggaagggctaagtggttcagccgggtgtgcagtgagctcagatggttcgtttgtgctggttagtcagttcacaaaaagtaacatcaagaggtattggatcaagggacccaaagctggttcttctgaagacttcaccaactcagtctcaaaccctgacaatatcaaaagaattggctctactggaaacttttgggtcgcttcagtggtgaacaagatcatcgtacctacgaacccatcagcagtcaaagttaactctaatggtgaagttcttcaaaccattcctctcaaagataaatttggagacactttgctcagcgaagtcaacgaattcgagggcaatttatatataggaactctcaccggaccatttgctggaattcttaagatcgaaaagggttcttgtcctgccacttagatctcttatttgaatgcagccgatgtgttacaatcatatatatattattt

SEQ ID NO: 76509 - protein, 340 aa, Arabidopsis thaliana
  peptide (1)..(340): Ceres Seq. ID no. 7108280
IRHEGMTSFCSMISLLLLLSLSSPVFSDDASFQKLPVPETRSGPEAFAFDSTGKGFYTGVSGGKILKYLPETGYVDFAQITESSNSSWCDGTIGTALAGRCGRPAGIAFNEKTGDLYVADAPLGLHVISPAGGLATKITDSVDGKPFKFLDGLDVDPTTGVVYFTSFSSRFSPIQVLIALGLKDATGKLYKYDPSTKVVTVLMEGLSGSAGCAVSSDGSFVLVSQFTKSNIKRYWIKGPKAGSSEDFTNSVSNPDNIKRIGSTGNFWVASVVNKIIVPTNPSAVKVNSNGEVLQTIPLKDKFGDTLLSEVNEFEGNLYIGTLTGPFAGILKIEKGSCPAT

SEQ ID NO: 76510 - protein, 335 aa, Arabidopsis thaliana
  peptide (1)..(335): Ceres Seq. ID no. 7108281
MTSFCSMISLLLLLSLSSPVFSDDASFQKLPVPETRSGPEAFAFDSTGKGFYTGVSGGKILKYLPETGYVDFAQITESSNSSWCDGTIGTALAGRCGRPAGIAFNEKTGDLYVADAPLGLHVISPAGGLATKITDSVDGKPFKFLDGLDVDPTTGVVYFTSFSSRFSPIQVLIALGLKDATGKLYKYDPSTKVVTVLMEGLSGSAGCAVSSDGSFVLVSQFTKSNIKRYWIKGPKAGSSEDFTNSVSNPDNIKRIGSTGNFWVASVVNKIIVPTNPSAVKVNSNGEVLQTIPLKDKFGDTLLSEVNEFEGNLYIGTLTGPFAGILKIEKGSCPAT

SEQ ID NO: 76511 - protein, 329 aa, Arabidopsis thaliana
  peptide (1)..(329): Ceres Seq. ID no. 7108282
MISLLLLLSLSSPVFSDDASFQKLPVPETRSGPEAFAFDSTGKGFYTGVSGGKILKYLPETGYVDFAQITESSNSSWCDGTIGTALAGRCGRPAGIAFNEKTGDLYVADAPLGLHVISPAGGLATKITDSVDGKPFKFLDGLDVDPTTGVVYFTSFSSRFSPIQVLIALGLKDATGKLYKYDPSTKVVTVLMEGLSGSAGCAVSSDGSFVLVSQFTKSNIKRYWIKGPKAGSSEDFTNSVSNPDNIKRIGSTGNFWVASVVNKIIVPTNPSAVKVNSNGEVLQTIPLKDKFGDTLLSEVNEFEGNLYIGTLTGPFAGILKIEKGSCPAT

SEQ ID NO: 76512 - DNA, 1762 bp, Arabidopsis thaliana
  misc_feature (1)..(1762): Ceres Seq. ID no. 7108294
  misc_feature (1)..(1762): Ortholog of  Ceres SEQ ID NO 14308221 as cited in SEQ ID NO 60363
caaaactctcactccaaaactctcaattttgccttcctttgatcgaatactacaatggcgtctgtatctgcaattggagttctcaaggtacctcctgcttcgacttccaattccaccggaaaagccacggaggcggttcccacgaggactctttctttctcctcctctgttacttcatccgacgacaagatttcactcaaatccaccgtctcccgtctttgtaaatctgttgttcgcaggaatccgatcatcgtctctcccaaagccgtctcagattctcaaaactctcaaacttgtctcgatcctgatgctagcagcagtgttttggggataatcttaggaggtggagctggaactcgtctttatccacttacgaagaagagagcgaaaccagctgtgcctcttggtgctaactataggcttattgatattcctgtgagcaactgtttgaatagcaacatatccaagatctatgttcttactcagttcaattccgcgtctttgaatcgtcatctttcacgagcttatgctagtaacatgggaggttataagaatgaaggattcgttgaagttctcgctgctcaacagagtcctgaaaaccccaactggttccaggggacagctgatgccgtcacggattacttgtggttgttcgaggagcataatgtcttggagtatctcattcttgctggggatcatttgtatagaatggactatgagaagtttattcaagcacatagggagactgatgctgatatcacagtagctgcattaccaatggacgagcaacgagccactgcttttgggctgatgaagattgatgaggaaggacgtattattgaattttctgaaaaaccaaaaggggagcacctaaaggccatgaaggttgacacaacaattctaggtcttgatgatcagagagccaaggagatgcctttcattgctagtatgggtatttatgttgtaagcagagatgtaatgctagacttactacggaatcagtttcctggagctaatgactttggaagtgaagtcattcccggtgccacttcccttggactgagggtgcaagcttacctatatgatggttactgggaagacattggtactatagaggcattttataacgctaatcttggaatcaccaagaaaccagttcctgattttagtttctatgaccgttctgctccgatctacacacagccgcgttatttaccaccgtctaagatgcttgatgctgatgttactgacagtgtcatcggagagggctgtgttatcaagaactgcaaaattcatcactctgtggttggactccgttcctgcatatcagaaggtgctattattgaagattcgttattaatgggagctgattattacgagactgctacggaaaagagcctcttagccgcgaaaggaagtgtacccataggtattgggaaaaactcgcacatcaaaagggccatcatcgacaaaaactcacgtataggtgacaatgtcaagatcataaacagcgacaacgtgcaagaggcagcgagagagactgatggatatttcataaagagcggaattgtaacggttatcaaagacgccttaatcccaaccggcactgtcatctgaagtacacataattctcctttctttatttcttcatctttctaatgccctatcaataagttttctttatggctttttaagccccaataaatctactactagttgtaatgctgcttacgaaagagattacgaaatcatgttttcactt

SEQ ID NO: 76513 - protein, 520 aa, Arabidopsis thaliana
  peptide (1)..(520): Ceres Seq. ID no. 7108295
MASVSAIGVLKVPPASTSNSTGKATEAVPTRTLSFSSSVTSSDDKISLKSTVSRLCKSVVRRNPIIVSPKAVSDSQNSQTCLDPDASSSVLGIILGGGAGTRLYPLTKKRAKPAVPLGANYRLIDIPVSNCLNSNISKIYVLTQFNSASLNRHLSRAYASNMGGYKNEGFVEVLAAQQSPENPNWFQGTADAVTDYLWLFEEHNVLEYLILAGDHLYRMDYEKFIQAHRETDADITVAALPMDEQRATAFGLMKIDEEGRIIEFSEKPKGEHLKAMKVDTTILGLDDQRAKEMPFIASMGIYVVSRDVMLDLLRNQFPGANDFGSEVIPGATSLGLRVQAYLYDGYWEDIGTIEAFYNANLGITKKPVPDFSFYDRSAPIYTQPRYLPPSKMLDADVTDSVIGEGCVIKNCKIHHSVVGLRSCISEGAIIEDSLLMGADYYETATEKSLLAAKGSVPIGIGKNSHIKRAIIDKNSRIGDNVKIINSDNVQEAARETDGYFIKSGIVTVIKDALIPTGTVI

SEQ ID NO: 76514 - protein, 359 aa, Arabidopsis thaliana
  peptide (1)..(359): Ceres Seq. ID no. 7108296
MGGYKNEGFVEVLAAQQSPENPNWFQGTADAVTDYLWLFEEHNVLEYLILAGDHLYRMDYEKFIQAHRETDADITVAALPMDEQRATAFGLMKIDEEGRIIEFSEKPKGEHLKAMKVDTTILGLDDQRAKEMPFIASMGIYVVSRDVMLDLLRNQFPGANDFGSEVIPGATSLGLRVQAYLYDGYWEDIGTIEAFYNANLGITKKPVPDFSFYDRSAPIYTQPRYLPPSKMLDADVTDSVIGEGCVIKNCKIHHSVVGLRSCISEGAIIEDSLLMGADYYETATEKSLLAAKGSVPIGIGKNSHIKRAIIDKNSRIGDNVKIINSDNVQEAARETDGYFIKSGIVTVIKDALIPTGTVI

SEQ ID NO: 76515 - protein, 302 aa, Arabidopsis thaliana
  peptide (1)..(302): Ceres Seq. ID no. 7108297
MDYEKFIQAHRETDADITVAALPMDEQRATAFGLMKIDEEGRIIEFSEKPKGEHLKAMKVDTTILGLDDQRAKEMPFIASMGIYVVSRDVMLDLLRNQFPGANDFGSEVIPGATSLGLRVQAYLYDGYWEDIGTIEAFYNANLGITKKPVPDFSFYDRSAPIYTQPRYLPPSKMLDADVTDSVIGEGCVIKNCKIHHSVVGLRSCISEGAIIEDSLLMGADYYETATEKSLLAAKGSVPIGIGKNSHIKRAIIDKNSRIGDNVKIINSDNVQEAARETDGYFIKSGIVTVIKDALIPTGTVI

SEQ ID NO: 76516 - DNA, 1249 bp, Arabidopsis thaliana
  misc_feature (1)..(1249): Ceres Seq. ID no. 7108298
  misc_feature (1)..(1249): Ortholog of  Ceres SEQ ID NO 13495070 as cited in SEQ ID NO 53216
  misc_feature (1)..(1249): Ortholog of  Ceres SEQ ID NO 15176717 as cited in SEQ ID NO 0
  misc_feature (1)..(1249): Ortholog of  Ceres SEQ ID NO 15179618 as cited in SEQ ID NO 0
ctttctccctgtgaaaaaatggactcggtggctctctactgcaccgctggtctcattgccggcgccgtctactggttcatatgcgtcctaggtccagcagaacgaaaaggcaaacgagcctctgatctctccggcggctcaatctccgcagaaaaagtcaaagacaactataaccaatactggtctttcttccgcaaaccaaaagagatcgaatcagccgagaaagtacctgacttcgtcgacacgttctacaatcttgtcactgatacctacgagtggggatggggacaatctttccatttctctcctcatgtccctggaaaatccgacaaagacgccacaagaatccacgaagaaatggccgtcgatctcatcaaagtgaaaccgggacaaaagattcttgacgctggttgcggcgtgggtgggccgatgagagccatcgcggcccattccaaggcccaagtcactggaatcactatcaacgagtaccaagtgcaacgagccaagcttcacaacaagaaagctggacttgattctctctgcaacgtcgtttgtggtaactttttaaagatgccgttcgatgaaaacacgtttgacggagcttactcgatcgaagctacgtgtcacgctcctaagctcgaagaagtatactcggagatcttcagagtgatgaaaccaggatctttgttcgtgtcctacgaatgggtcaccactgaaaaatacagagacgatgacgaagaacacaaggacgtgattcaagggatcgagagaggagacgcacttcctggactaagaagctacgctgatatagccgtgacggcgaagaaagttgggtttgaggtagtgaaggagaaagatttggctaaaccaccgtctaaaccgtggtggaaccggttaaagatgggaaggattgcttattggagaaaccatgttgtggttgtgattctttctgctattggggttgctcctaaaggaactgttgatgttcataagatgttgtttaagactgctgattatttgaccagaggtggtgagactggaatcttctctccgatgcatatgattctctgtagaaaaccagagaaagcttctgaatgaatgattgagaatacttcttccttgttctcgttttcttcttctttctttctaagttcatgtttttccccttaagaatctctttgtccgtcgtattaatgttatcactttgttgtttattgtatttttttttttcaatttgctaaattactcc

SEQ ID NO: 76517 - protein, 365 aa, Arabidopsis thaliana
  peptide (1)..(365): Ceres Seq. ID no. 7108299
LSPCEKMDSVALYCTAGLIAGAVYWFICVLGPAERKGKRASDLSGGSISAEKVKDNYNQYWSFFRKPKEIESAEKVPDFVDTFYNLVTDTYEWGWGQSFHFSPHVPGKSDKDATRIHEEMAVDLIKVKPGQKILDAGCGVGGPMRAIAAHSKAQVTGITINEYQVQRAKLHNKKAGLDSLCNVVCGNFLKMPFDENTFDGAYSIEATCHAPKLEEVYSEIFRVMKPGSLFVSYEWVTTEKYRDDDEEHKDVIQGIERGDALPGLRSYADIAVTAKKVGFEVVKEKDLAKPPSKPWWNRLKMGRIAYWRNHVVVVILSAIGVAPKGTVDVHKMLFKTADYLTRGGETGIFSPMHMILCRKPEKASE

SEQ ID NO: 76518 - protein, 359 aa, Arabidopsis thaliana
  peptide (1)..(359): Ceres Seq. ID no. 7108300
MDSVALYCTAGLIAGAVYWFICVLGPAERKGKRASDLSGGSISAEKVKDNYNQYWSFFRKPKEIESAEKVPDFVDTFYNLVTDTYEWGWGQSFHFSPHVPGKSDKDATRIHEEMAVDLIKVKPGQKILDAGCGVGGPMRAIAAHSKAQVTGITINEYQVQRAKLHNKKAGLDSLCNVVCGNFLKMPFDENTFDGAYSIEATCHAPKLEEVYSEIFRVMKPGSLFVSYEWVTTEKYRDDDEEHKDVIQGIERGDALPGLRSYADIAVTAKKVGFEVVKEKDLAKPPSKPWWNRLKMGRIAYWRNHVVVVILSAIGVAPKGTVDVHKMLFKTADYLTRGGETGIFSPMHMILCRKPEKASE

SEQ ID NO: 76519 - protein, 246 aa, Arabidopsis thaliana; identical to SEQ ID NO: 38170
  peptide (1)..(246): Ceres Seq. ID no. 7108301

SEQ ID NO: 76520 - DNA, 1145 bp, Arabidopsis thaliana
  misc_feature (1)..(1145): Ceres Seq. ID no. 7108302
  misc_feature (1)..(1145): Ortholog of  Ceres SEQ ID NO 13595668 as cited in SEQ ID NO 56792
cagtgtgagtaatttagcattactactgttgacttgttcaataaaggtaaagtaagatcaatccggcgcaatcttctttcgttttccggcaccgatctcggtggatctccgattcacatggcggcggataatgcttatctgatgcagtttgttgacgaaacctctttttacaaccgaatcgttctgagtcatcttttgccggcgaatctatgggaacccttacctcattttctccagacatggctccgaaattacctcgccggaaccctactatacatcatctccggtttcctctggtgcttctacatctattaccgtaaaatcaacgtttaccttcccaaagatgcaattcctacaataaaggctatgcgtttgcaaatgtttgtggcaatgaaggctatgccatggtacactcttcttccaactgtctccgagagtatgattgaacgtggttggaccaaatgttttgctagcataggcgaattcggttggattctgtattttgtttacatcgccatctatcttgttttcgttgagtttggtatttattggatgcacagagagcttcatgacattaagcctctctataagtatctccatgccacccatcatatctacaacaagcagaatacactctctccatttgccgggcttgcatttcacccagtagacgggatacttcaggctgtaccgcatgtgatagcgctgtttatagtgccaattcatttcacaactcatataggtcttttgttcatggaagcgatatgggcggcgaacatccatgactgcatccatggcaacatctggccagtaatgggtgcaggataccatacgatacaccacacgacatacaagcataactatggtcattataccatatggatggattggatgtttggctctcttagggatcctctcttagaagaagatgacaacaaagacagcttcaagaaagcagagtgaggatgcccacttgggggttgttcttctgtgttgtcttgtgttgttgttgtccaaagtttcagcctttcttgttctttttcttcttcttcttattcatgtgtctctctcaacctttccaattatattgttacaaacatttgctgtctagtttaaaacatgtaaatgtttgatgatctttcccc

SEQ ID NO: 76521 - protein, 281 aa, Arabidopsis thaliana
  peptide (1)..(281): Ceres Seq. ID no. 7108303
MAADNAYLMQFVDETSFYNRIVLSHLLPANLWEPLPHFLQTWLRNYLAGTLLYIISGFLWCFYIYYRKINVYLPKDAIPTIKAMRLQMFVAMKAMPWYTLLPTVSESMIERGWTKCFASIGEFGWILYFVYIAIYLVFVEFGIYWMHRELHDIKPLYKYLHATHHIYNKQNTLSPFAGLAFHPVDGILQAVPHVIALFIVPIHFTTHIGLLFMEAIWAANIHDCIHGNIWPVMGAGYHTIHHTTYKHNYGHYTIWMDWMFGSLRDPLLEEDDNKDSFKKAE

SEQ ID NO: 76522 - protein, 273 aa, Arabidopsis thaliana
  peptide (1)..(273): Ceres Seq. ID no. 7108304
MQFVDETSFYNRIVLSHLLPANLWEPLPHFLQTWLRNYLAGTLLYIISGFLWCFYIYYRKINVYLPKDAIPTIKAMRLQMFVAMKAMPWYTLLPTVSESMIERGWTKCFASIGEFGWILYFVYIAIYLVFVEFGIYWMHRELHDIKPLYKYLHATHHIYNKQNTLSPFAGLAFHPVDGILQAVPHVIALFIVPIHFTTHIGLLFMEAIWAANIHDCIHGNIWPVMGAGYHTIHHTTYKHNYGHYTIWMDWMFGSLRDPLLEEDDNKDSFKKAE

SEQ ID NO: 76523 - protein, 198 aa, Arabidopsis thaliana
  peptide (1)..(198): Ceres Seq. ID no. 7108305
MRLQMFVAMKAMPWYTLLPTVSESMIERGWTKCFASIGEFGWILYFVYIAIYLVFVEFGIYWMHRELHDIKPLYKYLHATHHIYNKQNTLSPFAGLAFHPVDGILQAVPHVIALFIVPIHFTTHIGLLFMEAIWAANIHDCIHGNIWPVMGAGYHTIHHTTYKHNYGHYTIWMDWMFGSLRDPLLEEDDNKDSFKKAE

SEQ ID NO: 76524 - DNA, 597 bp, Arabidopsis thaliana
  misc_feature (1)..(597): Ceres Seq. ID no. 7108322
  misc_feature (1)..(597): Ortholog of  Ceres SEQ ID NO 14306303 as cited in SEQ ID NO 56884
ccagtgtgagtaatttagcattgaaaaaaatggcggacgagagcagagtcccatcatcggtgtcggtaacagtcgcccacgaccttcttctagccggccaccgctatctagacgtcaggactccagaagagttcagccagggacatgtccctgtggggtcgatcaacgtgccttacatgaatcgaggagcatcagggatgtcaaagaaccccgacttcctggaacaagtctcctcccatttcggacaatccgataacatcattgttggctgccagagcggtggtagatctatcaaagccaccaccgatcttctccatgcaggtttcacgggagtcaaagatatcgtcggtggctatagtgcctgggccaagaatggcttcctacaaaagcttgatgactcaccattcaccaaacatctttccttatctcttcgtctccttcttcttcaataatgcatcctttctgcatgtaatcatcaataaatgaccctcctttctctttgtctgatgtgatagcttggagggaggggttcatcgcgatctttttaaaatatataaaaatacgagtgtgtgttgattcgttttttttttttttttt

SEQ ID NO: 76525 - protein, 149 aa, Arabidopsis thaliana
  peptide (1)..(149): Ceres Seq. ID no. 7108323
SVSNLALKKMADESRVPSSVSVTVAHDLLLAGHRYLDVRTPEEFSQGHVPVGSINVPYMNRGASGMSKNPDFLEQVSSHFGQSDNIIVGCQSGGRSIKATTDLLHAGFTGVKDIVGGYSAWAKNGFLQKLDDSPFTKHLSLSLRLLLLQ

SEQ ID NO: 76526 - protein, 140 aa, Arabidopsis thaliana
  peptide (1)..(140): Ceres Seq. ID no. 7108324
MADESRVPSSVSVTVAHDLLLAGHRYLDVRTPEEFSQGHVPVGSINVPYMNRGASGMSKNPDFLEQVSSHFGQSDNIIVGCQSGGRSIKATTDLLHAGFTGVKDIVGGYSAWAKNGFLQKLDDSPFTKHLSLSLRLLLLQ

SEQ ID NO: 76527 - protein, 91 aa, Arabidopsis thaliana
  peptide (1)..(91): Ceres Seq. ID no. 7108325
MNRGASGMSKNPDFLEQVSSHFGQSDNIIVGCQSGGRSIKATTDLLHAGFTGVKDIVGGYSAWAKNGFLQKLDDSPFTKHLSLSLRLLLLQ

SEQ ID NO: 76528 - DNA, 795 bp, Arabidopsis thaliana
  misc_feature (1)..(795): Ceres Seq. ID no. 7108326
  misc_feature (1)..(795): Ortholog of  Ceres SEQ ID NO 14306814 as cited in SEQ ID NO 56370
  misc_feature (1)..(795): Ortholog of  Ceres SEQ ID NO 13662830 as cited in SEQ ID NO 61566
  misc_feature (1)..(795): Ortholog of  Ceres SEQ ID NO 14309275 as cited in SEQ ID NO 0
ccacgcgtccggtttcaacggagactcactagtcgatcccgatcctttcttctacccgcccgaaatccgtcgaaacttctcttctttaccattgatttgcctcgtctcagctcaattctcttccgttgctgcttcgtttagttgttgcttcgcttcagtactctggtggtgggagagatgaatcacggccaacaatctggtgaggcaaagcatgaagatgatgctgctcttacagagttccttgcttctctgatggattatactcctactattcctgatgatttagtggagcactacttggctaagagtggatttcagtgccccgacgtacgattgataaggctagttgctgtggctacacaaaagtttgttgcagatgttgccagtgacgcccttcagcattgcaaggctagaccagcaccagttgtgaaagacaaaaaacagcaaaaggataagcgtttggtattgacaatggaagatctttcaaaagctttgcgtgagtatggtgtgaacgtgaagcatccagaatattttgctgatagcccttcgactggaatggaccctgcaacaagggacgaatagaaaccaggaattcctcaaaatctttgcctagtaaggacggtcatgtgactcagatccctgattctctgttgtgtttcagttaaaaacaaaactcacttgtcttgctagtcctcaattactacattacatgtatattcgtttgttgtttgttctctggtgatttttggggttctacatcacttatccaccattcttgcaagtctccaagtcgtg

SEQ ID NO: 76529 - protein, 134 aa, Arabidopsis thaliana; identical to SEQ ID NO: 36011
  peptide (1)..(134): Ceres Seq. ID no. 7108327

SEQ ID NO: 76530 - protein, 109 aa, Arabidopsis thaliana; identical to SEQ ID NO: 36012
  peptide (1)..(109): Ceres Seq. ID no. 7108328

SEQ ID NO: 76531 - DNA, 2220 bp, Arabidopsis thaliana
  misc_feature (1)..(2220): Ceres Seq. ID no. 7108333
  misc_feature (1)..(2220): Ortholog of  Ceres SEQ ID NO 15170536 as cited in SEQ ID NO 52791
  misc_feature (1)..(2220): Ortholog of  Ceres SEQ ID NO 12465083 as cited in SEQ ID NO 68239
  misc_feature (1)..(2220): Ortholog of  Ceres SEQ ID NO 14309653 as cited in SEQ ID NO 0
ggaagctctctgttcaaatcaaaagagagatcgtacgcaaaagtttccgatatggctcgctcgtttggagcaaacagcactgttgtgcttgcgatcatcttcttcggatgtttatttgcgttttccactgcaaaagaagaggctacgaagttaggatcagttattgggatagatcttggtaccacttactcttgtgttggtgtttacaagaatggtcatgttgaaattattgccaatgaccaaggaaaccgtattacaccttcatgggttggttttactgactctgaaaggctcattggtgaggctgctaagaatcaagcagctgttaatccagagaggactgtcttcgacgttaagagattgatcgggcgaaaatttgaggacaaggaggttcaaaaggacaggaaacttgtaccttaccagattgtgaacaaggatggtaagccatacattcaagtcaagatcaaggatggtgagactaaggttttcagtcctgaggagatcagtgccatgattctgactaagatgaaggagacagccgaagcctaccttggaaagaaaatcaaggacgctgttgtcactgttccagcttacttcaatgatgctcaaaggcaagctaccaaggatgccggtgttattgctgggctcaatgttgctagaatcatcaacgaacctactgctgctgctattgcctacggtcttgataagaagggtggtgagaagaacatccttgtatttgaccttggtggtggtacttttgatgtcagtgtcttgaccattgataacggagtgtttgaggttctctccacaaatggtgacactcacttgggaggtgaggactttgaccacaggatcatggagtacttcatcaagttaattaagaagaagcaccagaaggacatcagcaaggacaacaaggctcttggtaagctccgaagggaatgtgagagggcaaagagagctctaagcagtcagcaccaagtccgtgtagagattgagtcactctttgatggtgttgatttatctgagccactcaccagagctcgtttcgaggagcttaacaatgatttgttcaggaagaccatgggacctgtgaagaaggccatggatgatgccggtctacagaagagccagatcgatgagattgtccttgttggtggaagcaccaggatcccaaaggttcagcaactgttgaaggacttctttgaaggtaaagagccaaacaagggtgtgaaccccgacgaggctgttgcctatggtgctgctgttcagggtggtattttgagcggagaaggcggtgatgagaccaaagatatccttcttcttgatgttgcgccactcactttaggtatcgagactgtaggaggagtgatgacaaagttgatcccaagaaacacggttattccaaccaagaaatctcaggttttcacaacgtaccaagaccagcagaccaccgtctccattcaggtctttgaaggtgaaagaagtctcaccaaggactgcagcctactcgggaaattcgacctcactggagtcccaccggccccaagaggaacccctcaaatcgaggtcacatttgaagtggacgccaacggtattcttaatgtgaaagcagaggacaaggcgagtggtaaatcagagaagattacaatcacaaacgagaagggtcgtctgagccaagaagagattgaccggatggtgaaggaggcagaggagtttgcagaggaagacaagaaggtgaaggagaagatcgacgccaggaatgccctggagacatacgtgtacaacatgaagaaccaagtgagcgacaaggacaagcttgcagacaaattggaaggagatgagaaggagaagatagaagcagcgacgaaagaggccttggagtggctcgacgagaaccaaaactcagagaaagaagagtacgacgagaagctcaaggaggtagaggcagtgtgtaacccaatcatcacagcagtttaccagagatcaggcggagcaccaggtgcaggaggagaatcatcgactgaggaggaagatgagtctcacgatgagctctagatgtcttctgttattgttaatttattaaaccatagagacaagttttgaggatgaaacgtcgtttttgttttttgtatttggtttcctttttcttatggatttttaggaaaggggagagattaagtagcgtcccttctttagtctccctggaccctgacgtag

SEQ ID NO: 76532 - protein, 685 aa, Arabidopsis thaliana
  peptide (1)..(685): Ceres Seq. ID no. 7108334
GSSLFKSKERSYAKVSDMARSFGANSTVVLAIIFFGCLFAFSTAKEEATKLGSVIGIDLGTTYSCVGVYKNGHVEIIANDQGNRITPSWVGFTDSERLIGEAAKNQAAVNPERTVFDVKRLIGRKFEDKEVQKDRKLVPYQIVNKDGKPYIQVKIKDGETKVFSPEEISAMILTKMKETAEAYLGKKIKDAVVTVPAYFNDAQRQATKDAGVIAGLNVARIINEPTAAAIAYGLDKKGGEKNILVFDLGGGTFDVSVLTIDNGVFEVLSTNGDTHLGGEDFDHRIMEYFIKLIKKKHQKDISKDNKALGKLRRECERAKRALSSQHQVRVEIESLFDGVDLSEPLTRARFEELNNDLFRKTMGPVKKAMDDAGLQKSQIDEIVLVGGSTRIPKVQQLLKDFFEGKEPNKGVNPDEAVAYGAAVQGGILSGEGGDETKDILLLDVAPLTLGIETVGGVMTKLIPRNTVIPTKKSQVFTTYQDQQTTVSIQVFEGERSLTKDCSLLGKFDLTGVPPAPRGTPQIEVTFEVDANGILNVKAEDKASGKSEKITITNEKGRLSQEEIDRMVKEAEEFAEEDKKVKEKIDARNALETYVYNMKNQVSDKDKLADKLEGDEKEKIEAATKEALEWLDENQNSEKEEYDEKLKEVEAVCNPIITAVYQRSGGAPGAGGESSTEEEDESHDEL

SEQ ID NO: 76533 - protein, 668 aa, Arabidopsis thaliana
  peptide (1)..(668): Ceres Seq. ID no. 7108335
MARSFGANSTVVLAIIFFGCLFAFSTAKEEATKLGSVIGIDLGTTYSCVGVYKNGHVEIIANDQGNRITPSWVGFTDSERLIGEAAKNQAAVNPERTVFDVKRLIGRKFEDKEVQKDRKLVPYQIVNKDGKPYIQVKIKDGETKVFSPEEISAMILTKMKETAEAYLGKKIKDAVVTVPAYFNDAQRQATKDAGVIAGLNVARIINEPTAAAIAYGLDKKGGEKNILVFDLGGGTFDVSVLTIDNGVFEVLSTNGDTHLGGEDFDHRIMEYFIKLIKKKHQKDISKDNKALGKLRRECERAKRALSSQHQVRVEIESLFDGVDLSEPLTRARFEELNNDLFRKTMGPVKKAMDDAGLQKSQIDEIVLVGGSTRIPKVQQLLKDFFEGKEPNKGVNPDEAVAYGAAVQGGILSGEGGDETKDILLLDVAPLTLGIETVGGVMTKLIPRNTVIPTKKSQVFTTYQDQQTTVSIQVFEGERSLTKDCSLLGKFDLTGVPPAPRGTPQIEVTFEVDANGILNVKAEDKASGKSEKITITNEKGRLSQEEIDRMVKEAEEFAEEDKKVKEKIDARNALETYVYNMKNQVSDKDKLADKLEGDEKEKIEAATKEALEWLDENQNSEKEEYDEKLKEVEAVCNPIITAVYQRSGGAPGAGGESSTEEEDESHDEL

SEQ ID NO: 76534 - protein, 515 aa, Arabidopsis thaliana
  peptide (1)..(515): Ceres Seq. ID no. 7108336
MILTKMKETAEAYLGKKIKDAVVTVPAYFNDAQRQATKDAGVIAGLNVARIINEPTAAAIAYGLDKKGGEKNILVFDLGGGTFDVSVLTIDNGVFEVLSTNGDTHLGGEDFDHRIMEYFIKLIKKKHQKDISKDNKALGKLRRECERAKRALSSQHQVRVEIESLFDGVDLSEPLTRARFEELNNDLFRKTMGPVKKAMDDAGLQKSQIDEIVLVGGSTRIPKVQQLLKDFFEGKEPNKGVNPDEAVAYGAAVQGGILSGEGGDETKDILLLDVAPLTLGIETVGGVMTKLIPRNTVIPTKKSQVFTTYQDQQTTVSIQVFEGERSLTKDCSLLGKFDLTGVPPAPRGTPQIEVTFEVDANGILNVKAEDKASGKSEKITITNEKGRLSQEEIDRMVKEAEEFAEEDKKVKEKIDARNALETYVYNMKNQVSDKDKLADKLEGDEKEKIEAATKEALEWLDENQNSEKEEYDEKLKEVEAVCNPIITAVYQRSGGAPGAGGESSTEEEDESHDEL

SEQ ID NO: 76535 - DNA, 1457 bp, Arabidopsis thaliana
  misc_feature (1)..(1457): Ceres Seq. ID no. 7108337
  misc_feature (1)..(1457): Ortholog of  Ceres SEQ ID NO 13581804 as cited in SEQ ID NO 51424
  misc_feature (1)..(1457): Ortholog of  Ceres SEQ ID NO 14310890 as cited in SEQ ID NO 54290
  misc_feature (1)..(1457): Ortholog of  Ceres SEQ ID NO 13663874 as cited in SEQ ID NO 67003
ctaaatgtactgaaaagaaacaccagtttaattaattatactttcctcacatataactatcaaccaagtacaaaacttttgtcaattctcaaaatcaactttcaccacataattatctaacatgtgtatgttccaaaaccagtttaaatgaattacttttcagaaaatacatgtatattaactctatctaataaagaagaaacacatacttatctcatagattccattcataaaactatgctttagtgagtaagaaaaccagtaatcaaacacaaattgacaagacactatatggatgtaaaaagtggggaaaatatggtgataaatagtagagaaaattaaaaagaaaaaataatattcctttataaatgtatatacccatctcttcaccagcacaaccttaccttccattttccattttctgcaacttctccaaatctcatactttccagaaaatcattttcccaagaaaaataaaactttcccctttgttcttctccccccaacagcaatcacggcgtaccaatcggagctaggaggagattcctctcccttgaggaaatctgggagaggaaagatcgaaatcaaacggatcgagaacacaacgaatcgtcaagtcactttttgcaaacgtagaaatggtttgctcaagaaagcttacgagctctctgttctctgtgatgctgaagtcgcactcatcgttttctctagccgtggtcgtctctatgagtactctaacaacagtgtaaaaggtactattgagaggtacaagaaggcaatatcggacaattctaacaccggatcggtggcagaaattaatgcacagtattatcaacaagaatcagccaaattgcgtcaacaaattatcagcatacaaaactccaacaggcaattgatgggtgagacgatagggtcaatgtctcccaaagagctcaggaacttggaaggcagattagagagaagtattacccgaatccgatccaagaagaatgagctcttattttctgaaatcgactacatgcagaaaagagaagttgatttgcataacgataaccagattcttcgtgcaaagatagctgaaaatgagaggaacaatccgagtataagtctaatgccaggaggatctaactacgagcagcttatgccaccacctcaaacgcaatctcaaccgtttgattcacggaattatttccaagtcgcggcattgcaacctaacaatcaccattactcatccgccggtcgccaagaccaaaccgctctccagttagtgtaatattggctgaaggaaatggcctggagtgaataaaaaccagaattgggttgagcaagcaatataaagctaatgcatgttatatatatatttatcccatgaatgttgtatcagtgaattcttatgcttnatgttgatgtgaaattaatatcttaaagacatgtcattaatgtgcttaatttgcttc

SEQ ID NO: 76536 - protein, 125 aa, Arabidopsis thaliana; identical to SEQ ID NO: 49348
  peptide (1)..(125): Ceres Seq. ID no. 7108338

SEQ ID NO: 76537 - protein, 118 aa, Arabidopsis thaliana; identical to SEQ ID NO: 49349
  peptide (1)..(118): Ceres Seq. ID no. 7108339

SEQ ID NO: 76538 - protein, 84 aa, Arabidopsis thaliana; identical to SEQ ID NO: 49350
  peptide (1)..(84): Ceres Seq. ID no. 7108340

SEQ ID NO: 76539 - DNA, 1789 bp, Arabidopsis thaliana
  misc_feature (1)..(1789): Ceres Seq. ID no. 7108345
  misc_feature (1)..(1789): Ortholog of  Ceres SEQ ID NO 13600220 as cited in SEQ ID NO 0
aattcccgggtcgacccacgcgtccgagaattacaaacaaaaatggttttgcaaaagcttcctctcattgggctgcttttgctcctgaccatcgtcgcctctccagcaaatgcagatggacctgtttgcccgccgtcgaacaaactaagccgggcaagtttccctgaaggttttttatttggcacggctactgcggcataccaggtaccaaggttcgatttaatgaaacttgttcgtggaccagccttatgggacatctactgtagaagatatccagagaggtgcaataacgataacggcgatgtggccgttgatttcttccatcgttataaggaagatatccaactaatgaagaatctaaacacagacgcctttagaatgtctatcgcatggccaagaatatttcctcatgggagaaaggagaaaggagtgagtcaagctggtgtgcaattctaccacgacctcatcgacgagctcataaaaaatggtataactccattcgttactgtttttcactgggacactccacaagatttagaagatgaatatggcggctttttaagcgaaaggattgtgaaggatttccgagagtatgcagattttgttttccaagaatacggtggaaaagtgaaacattggatcactttcaatgagccatgggttttctcgcacgctggctatgacgtaggcaaaaaggcacctggtcgttcctcttcttacgtcaatgctaaatgccaagacggacgatcaggatacgaggcttaccttgtcactcacaatctccttatctctcacgcagaagcagttgaagcttaccggaaatgcgaaaagtgtaaaggtgggaagatcggaattgcacatagtcctgcttggttcgaagcacatgaccttgctgattcacaagacggtgcgtccatcgaccgtgcacttgactttattttgggatggcatctagacacaactacatttggagattatccacagatcatgaaagacattgttggacatagattgcctaaatttacaactgagcagaaagcaaaactgaaagcttctaccgatttcgttgggctcaactactatacttcagtgttttcaaaccatttggagaaacctgatccttcaaaaccaagatggatgcaagattctcttattacatgggagtctaagaatgcgcaaaattacgccattggtagcaagcctttgaccgctgcattgaacgtttactcgagaggttttagaagtcttttgaagtacattaaggacaaatacgcaaatccggaaattatgatcatggaaaacggatatggagaagaactaggggcctcagattctgttgctgttggtaccgctgatcataacaggaaatattatcttcagaggcatcttttgagtatgcaagaagctgtttgcatcgacaaagtgaatgttacaggatactttgtatggtcattgttggataacttcgagtggcaagatggttacaaaaacagatttggactctactacgttgatttcaaaaataacctcacacgttacgagaaagaatccggcaagtattacaaggatttcctcagtcaaggtgttcgtccatccgcgctcaagaaggatgagctttaagctatttctgtttcaatgtgtttttcctatgttttactttgtgagtgaccaagattcatgaggtcttggttctaataaaaagagtttatttttcttctcatttttcattgtctacatgatttgccagatctataaggctctggttataataaaatgatcctttgtgcct

SEQ ID NO: 76540 - protein, 539 aa, Arabidopsis thaliana
  peptide (1)..(539): Ceres Seq. ID no. 7108346
NSRVDPRVRELQTKMVLQKLPLIGLLLLLTIVASPANADGPVCPPSNKLSRASFPEGFLFGTATAAYQVPRFDLMKLVRGPALWDIYCRRYPERCNNDNGDVAVDFFHRYKEDIQLMKNLNTDAFRMSIAWPRIFPHGRKEKGVSQAGVQFYHDLIDELIKNGITPFVTVFHWDTPQDLEDEYGGFLSERIVKDFREYADFVFQEYGGKVKHWITFNEPWVFSHAGYDVGKKAPGRSSSYVNAKCQDGRSGYEAYLVTHNLLISHAEAVEAYRKCEKCKGGKIGIAHSPAWFEAHDLADSQDGASIDRALDFILGWHLDTTTFGDYPQIMKDIVGHRLPKFTTEQKAKLKASTDFVGLNYYTSVFSNHLEKPDPSKPRWMQDSLITWESKNAQNYAIGSKPLTAALNVYSRGFRSLLKYIKDKYANPEIMIMENGYGEELGASDSVAVGTADHNRKYYLQRHLLSMQEAVCIDKVNVTGYFVWSLLDNFEWQDGYKNRFGLYYVDFKNNLTRYEKESGKYYKDFLSQGVRPSALKKDEL

SEQ ID NO: 76541 - protein, 525 aa, Arabidopsis thaliana
  peptide (1)..(525): Ceres Seq. ID no. 7108347
MVLQKLPLIGLLLLLTIVASPANADGPVCPPSNKLSRASFPEGFLFGTATAAYQVPRFDLMKLVRGPALWDIYCRRYPERCNNDNGDVAVDFFHRYKEDIQLMKNLNTDAFRMSIAWPRIFPHGRKEKGVSQAGVQFYHDLIDELIKNGITPFVTVFHWDTPQDLEDEYGGFLSERIVKDFREYADFVFQEYGGKVKHWITFNEPWVFSHAGYDVGKKAPGRSSSYVNAKCQDGRSGYEAYLVTHNLLISHAEAVEAYRKCEKCKGGKIGIAHSPAWFEAHDLADSQDGASIDRALDFILGWHLDTTTFGDYPQIMKDIVGHRLPKFTTEQKAKLKASTDFVGLNYYTSVFSNHLEKPDPSKPRWMQDSLITWESKNAQNYAIGSKPLTAALNVYSRGFRSLLKYIKDKYANPEIMIMENGYGEELGASDSVAVGTADHNRKYYLQRHLLSMQEAVCIDKVNVTGYFVWSLLDNFEWQDGYKNRFGLYYVDFKNNLTRYEKESGKYYKDFLSQGVRPSALKKDEL

SEQ ID NO: 76542 - protein, 465 aa, Arabidopsis thaliana
  peptide (1)..(465): Ceres Seq. ID no. 7108348
MKLVRGPALWDIYCRRYPERCNNDNGDVAVDFFHRYKEDIQLMKNLNTDAFRMSIAWPRIFPHGRKEKGVSQAGVQFYHDLIDELIKNGITPFVTVFHWDTPQDLEDEYGGFLSERIVKDFREYADFVFQEYGGKVKHWITFNEPWVFSHAGYDVGKKAPGRSSSYVNAKCQDGRSGYEAYLVTHNLLISHAEAVEAYRKCEKCKGGKIGIAHSPAWFEAHDLADSQDGASIDRALDFILGWHLDTTTFGDYPQIMKDIVGHRLPKFTTEQKAKLKASTDFVGLNYYTSVFSNHLEKPDPSKPRWMQDSLITWESKNAQNYAIGSKPLTAALNVYSRGFRSLLKYIKDKYANPEIMIMENGYGEELGASDSVAVGTADHNRKYYLQRHLLSMQEAVCIDKVNVTGYFVWSLLDNFEWQDGYKNRFGLYYVDFKNNLTRYEKESGKYYKDFLSQGVRPSALKKDEL

SEQ ID NO: 76543 - DNA, 793 bp, Arabidopsis thaliana
  misc_feature (1)..(793): Ceres Seq. ID no. 7108359
  misc_feature (1)..(793): Ortholog of  Ceres SEQ ID NO 12557915 as cited in SEQ ID NO 62
  misc_feature (1)..(793): Ortholog of  Ceres SEQ ID NO 13638917 as cited in SEQ ID NO 56018
  misc_feature (1)..(793): Ortholog of  Ceres SEQ ID NO 13663116 as cited in SEQ ID NO 60731
gagtaatttagctcaactgcgaggaatatggcgaccgatgatgtgaacgagcctctcccggcggcggcggaattaccggcgacagaggcggagaaacaaccacacaagctcgaaagaaagtggagtttctggttcgataaccaatcaaagaaaggcgccgcctggggagcttctcttcgtaaagcctatactttcgacaccgtcgaagatttttggggattgcacgagactatatttcagactagcaaattgacagcgaatgctgaaattcacttgttcaaagctggtgttgagccaaagtgggaagatccagagtgtgctaatggaggaaagtggacttgggttgttactgctaataggaaggaagctttagacaaaggctggcttgaaactttgatggctttgattggagagcaatttgatgaagcagatgagatttgtggtgtggttgctagtgtccgtccacagtcgaagcaagacaagctctccttgtggactaggacgaagtctaatgaagctgttctgatgggtattgggaagaagtggaaggagatacttgatgtcaccgacaagataactttcaataaccatgatgattccagaagaagccggttcactgtctgaagaaacgagtgtgaagccagaggaagatgcaatatggctttttttgtgatactgtttggtcggtttactcaaatagctgagacatttagggacattcactttgaggtgtaaactctacaaagttttctgtttcattaaaatgattttttgttataaattaagttgagtt

SEQ ID NO: 76544 - protein, 198 aa, Arabidopsis thaliana; identical to SEQ ID NO: 35560
  peptide (1)..(198): Ceres Seq. ID no. 7108360

SEQ ID NO: 76545 - DNA, 1302 bp, Arabidopsis thaliana
  misc_feature (1)..(1302): Ceres Seq. ID no. 7108365
  misc_feature (1)..(1302): Ortholog of  Ceres SEQ ID NO 12582601 as cited in SEQ ID NO 51064
  misc_feature (1)..(1302): Ortholog of  Ceres SEQ ID NO 13581092 as cited in SEQ ID NO 54771
  misc_feature (1)..(1302): Ortholog of  Ceres SEQ ID NO 13594298 as cited in SEQ ID NO 57803
  misc_feature (1)..(1302): Ortholog of  Ceres SEQ ID NO 13503476 as cited in SEQ ID NO 61978
  misc_feature (1)..(1302): Ortholog of  Ceres SEQ ID NO 12578438 as cited in SEQ ID NO 62201
  misc_feature (1)..(1302): Ortholog of  Ceres SEQ ID NO 12617675 as cited in SEQ ID NO 64656
atgaccacttcatcgactgcgttcaagaaaccgcttccttgtagcctctgcgctctaaaccatcctttgcgagtttcagggacatcttcagcgacatgctttaacaaaccatccctaaaaggagtctttaagccagtaactgggactttgttccttagcatctctctctctgctggagtccagtcagctgtcagatccaggatagcttggagactatcatcatcatataataaacccacccatgactgtttcttcatctccatgggctctcatggctctctttctaatggtttcttcaacaatggtaatggctattcctccacgcaaggccattgatgtaccatttggtcgtaactacgtcccaacttgggcttttgaccaccagaaacagttcaatggcggttccgaacttcagcttatcctcgacaaatacactggcacaggatttcaatcaaaggggtcatatttgtttggacattttagtatgcacataaagcttccagctggtgacacagccggagttgtcacagctttctatctatcatctaccaacaatgagcatgacgagatagactttgagttccttggaaacagaacaggacaaccagctatattacagacaaatgtattcacaggaggaaagggaaacagagaacaacgaatctatctctggtttgatccttctaaggcttatcacacttactcaatcctttggaacatgtaccagatcgtattctttgttgacaacataccaatccgaacgttcaagaatgctaaggatctaggagtacgtttcccattcaaccaaccaatgaagctttactcaagcctttggaacgcggatgattgggccacgagaggcggtttagagaagaccaattgggccaatgcacctttcgttgcatcttacaaaggattccacatagatggttgccaagcttctgtggaagccaagtactgtgccacacaaggccgcatgtggtgggatcagaaagagttccgtgaccttgacgctgaacaatggcgtcgtctcaaatgggttcgtatgaagtggaccatctacaactactgtaccgaccggactaggttcccggttatgccagctgaatgtaaaagggacagagacgcataagttactactcttgagggttttaatgaatttatgctatcattattatttgaattatgcttgttcaagagattgatatatgtattgtttgttggcccatgatgtttatgctatatttgggcctaaaattacatgttataattcatatatgtattgattagctatgtattttc

SEQ ID NO: 76546 - protein, 296 aa, Arabidopsis thaliana; identical to SEQ ID NO: 29752
  peptide (1)..(296): Ceres Seq. ID no. 7108366

SEQ ID NO: 76547 - protein, 286 aa, Arabidopsis thaliana; identical to SEQ ID NO: 29753
  peptide (1)..(286): Ceres Seq. ID no. 7108367

SEQ ID NO: 76548 - protein, 281 aa, Arabidopsis thaliana; identical to SEQ ID NO: 29754
  peptide (1)..(281): Ceres Seq. ID no. 7108368

SEQ ID NO: 76549 - DNA, 850 bp, Arabidopsis thaliana
  misc_feature (1)..(850): Ceres Seq. ID no. 7108373
  misc_feature (1)..(850): Ortholog of  Ceres SEQ ID NO 15173803 as cited in SEQ ID NO 61759
gaattcctcgagctacgtcagggatggcgtcttcttcagcgacgctctctctctgctctactttctctgctcattgcaatgtcaattctcgccgttctagcactatcctctgttctctctctaaaccttcgcttaatttggctaaacctctgactggatttctttctccttccactgcgtcgacgtctcgaaccgcattcaccgtcgctccgaaattcgcggaatcagtcgtcgaagctgaaccggagactaccgatatcgaagctgtggtggtttccgatgtttcggaggttactgaggaaaaagctaaacgagaagagattttcgctgttattatggttggtggacgccaatacatagtgtttccagggagatatctctacactcagaggctaaaagatgcaaatgttgatgaccagattgttctcaacaaagtgttgcttgttggaacaaagacacacacttacattggcaagccggttgtgaccaatgccactgtacatgctgttgtggaaagtcaaggtttgaatgataaagtggtagtcttcaagtacaagcctaagaagaagtaccgtagaaatatcggtcacagacagccgaatacgaggattaggattaccggaatcacagggtatgaagagtatccagcctcgcccaatgttgcagttggagaagtaaatctttgacacaaaatgtttcttgaatgttaaaatttttctgatcttctctatgtaattttgtaaggaccctggtcatttcatttctgctgagattccttttattaatatgtaccttttgccattctttgaaaaaaagctacgtcagggccctgacgtagctcgaggaattc

SEQ ID NO: 76550 - protein, 227 aa, Arabidopsis thaliana
  peptide (1)..(227): Ceres Seq. ID no. 7108374
IPRATSGMASSSATLSLCSTFSAHCNVNSRRSSTILCSLSKPSLNLAKPLTGFLSPSTASTSRTAFTVAPKFAESVVEAEPETTDIEAVVVSDVSEVTEEKAKREEIFAVIMVGGRQYIVFPGRYLYTQRLKDANVDDQIVLNKVLLVGTKTHTYIGKPVVTNATVHAVVESQGLNDKVVVFKYKPKKKYRRNIGHRQPNTRIRITGITGYEEYPASPNVAVGEVNL

SEQ ID NO: 76551 - protein, 220 aa, Arabidopsis thaliana; identical to SEQ ID NO: 26779
  peptide (1)..(220): Ceres Seq. ID no. 7108375

SEQ ID NO: 76552 - protein, 116 aa, Arabidopsis thaliana; identical to SEQ ID NO: 26780
  peptide (1)..(116): Ceres Seq. ID no. 7108376

SEQ ID NO: 76553 - DNA, 925 bp, Arabidopsis thaliana
  misc_feature (1)..(925): Ceres Seq. ID no. 7108377
  misc_feature (1)..(925): Ortholog of  Ceres SEQ ID NO 14313644 as cited in SEQ ID NO 54334
gagagagagagagagagagagagagggtttcttcgaggactttggcatactgcaggttgttggagctgtagtgcttaaaaaccctacctttatactgtttagagcagcagtccctccatgtcaggtctttgtggcgttatgcagagctcgagcttctgcttcgtcttctttattcaacagcgttattcgtcagcattcgcattctctacacctttccgctgatacacagaacaaatcattggtagcacaaatgaaagaagagatgctccacatggacatcaactcaatgataggaagttccatgccactaggtatgatgcgtatcggaacaatcatccacaacatcgagatgaacccagggcaaggcgcaaagatggtccgagctgcaggaaccaacgccaagatcctaaaggagcctgctaaagggaaatgcttgataaagcttccgtcaggggacaccaagtggatcaatgccaaatgtcgtgctacgattggcacagtgtcgaacccgtctcatggaacgaagaagctatataaagcaggacagagtaggtggttagggataaggcccaaagttagaggagtggcgatgaatccgtgtgatcatccacacggtggaggtgaaggaaaaagcaaaagtagtggaagcagaggaaggacatcggttagtccgtggggaaaaccgtgtaaaggcggttacaaatcagctagtgtcaagaagaagaagaagcgtttggcagaagcagcagccaaaatgtgatatgggtgaacaagtttcgattttcttcaacgtttctttcttttaaaaagcctccaatgttatttggttacgttattgaatctgttttttgagagttttttaggcttcatgaaactagaagatctttgatcagttgagaataaatatggttacgtgtttactttt

SEQ ID NO: 76554 - protein, 252 aa, Arabidopsis thaliana
  peptide (1)..(252): Ceres Seq. ID no. 7108378
REREREREGFFEDFGILQVVGAVVLKNPTFILFRAAVPPCQVFVALCRARASASSSLFNSVIRQHSHSLHLSADTQNKSLVAQMKEEMLHMDINSMIGSSMPLGMMRIGTIIHNIEMNPGQGAKMVRAAGTNAKILKEPAKGKCLIKLPSGDTKWINAKCRATIGTVSNPSHGTKKLYKAGQSRWLGIRPKVRGVAMNPCDHPHGGGEGKSKSSGSRGRTSVSPWGKPCKGGYKSASVKKKKKRLAEAAAKM

SEQ ID NO: 76555 - protein, 169 aa, Arabidopsis thaliana; identical to SEQ ID NO: 35520
  peptide (1)..(169): Ceres Seq. ID no. 7108379

SEQ ID NO: 76556 - protein, 165 aa, Arabidopsis thaliana; identical to SEQ ID NO: 35521
  peptide (1)..(165): Ceres Seq. ID no. 7108380

SEQ ID NO: 76557 - DNA, 1078 bp, Arabidopsis thaliana
  misc_feature (1)..(1078): Ceres Seq. ID no. 7108389
  misc_feature (1)..(1078): Ortholog of  Ceres SEQ ID NO 14311683 as cited in SEQ ID NO 51263
  misc_feature (1)..(1078): Ortholog of  Ceres SEQ ID NO 15177862 as cited in SEQ ID NO 56033
  misc_feature (1)..(1078): Ortholog of  Ceres SEQ ID NO 13661430 as cited in SEQ ID NO 61258
  misc_feature (1)..(1078): Ortholog of  Ceres SEQ ID NO 13590940 as cited in SEQ ID NO 68653
  misc_feature (1)..(1078): Ortholog of  Ceres SEQ ID NO 14301982 as cited in SEQ ID NO 0
  misc_feature (1)..(1078): Ortholog of  Ceres SEQ ID NO 15179001 as cited in SEQ ID NO 0
  misc_feature (1)..(1078): Ortholog of  Ceres SEQ ID NO 15180040 as cited in SEQ ID NO 0
cccagcaacgccaaacaccccggccaccccagccaccccaaacaccccagccacgccaaacaccccgaccacgccaacgaccccgaccacgccatcgaccccggccactccagccaccccagcaacgccaaacaccccaaaacccaccttaaaaaatccccctttgtctccttcgttgcccagactttggattgggctgaagaaggtggagaaggaagcgtcgctgttgaggagaccgagaacagtttagagtcacaagatgtgagcgaaggagatgagagcgaaggagatgcgagcgaaggagatgtgagcgaaggagatgagagcgaaggagatgtgagcgaaggagctgtgagcgaaagagctgagttcccggagccatcggaagaagccaagcttttcgtcggaaatttggcttatgatgttaatagccaagctttggctatgctctttgagcaagccggtactgttgaaatcgccgaggttatatacaatagggaaactgaccagagtcgtgggtttggatttgtgacaatgagttctgtggacgaagctgagacagctgtggagaagttcaaccgttatgatcttaacggacgtctactaactgtaaacaaggcagctccaagaggatcacgtccagaacgtgcgcctcgggtatatgaacctgcattcagagtatatgtagggaatctaccatgggatgtggacaatggccgtctagaacagcttttcagtgagcatggtaaagttgtggaagctagggtggtttacgaccgtgagacaggtcgttcacgtggattcgggtttgtcacaatgtctgacgtggatgaactcaacgaagccatctctgccctcgatggacagaacttggagggtagagcaatcagagtgaatgtagcggaagagcgtcctccaaggcgtggatattaaagctgagatctagctgtgccctctctctctccctatcttgcattttgtttagacgagattcttacactcttcaacgattgtttttggctgaactctgaatgtgaaagttaagctgcttctaaagtaatttgtatcgcttgttttt

SEQ ID NO: 76558 - protein, 310 aa, Arabidopsis thaliana
  peptide (1)..(310): Ceres Seq. ID no. 7108390
PSNAKHPGHPSHPKHPSHAKHPDHANDPDHAIDPGHSSHPSNAKHPKTHLKKSPFVSFVAQTLDWAEEGGEGSVAVEETENSLESQDVSEGDESEGDASEGDVSEGDESEGDVSEGAVSERAEFPEPSEEAKLFVGNLAYDVNSQALAMLFEQAGTVEIAEVIYNRETDQSRGFGFVTMSSVDEAETAVEKFNRYDLNGRLLTVNKAAPRGSRPERAPRVYEPAFRVYVGNLPWDVDNGRLEQLFSEHGKVVEARVVYDRETGRSRGFGFVTMSDVDELNEAISALDGQNLEGRAIRVNVAEERPPRRGY

SEQ ID NO: 76559 - protein, 162 aa, Arabidopsis thaliana
  peptide (1)..(162): Ceres Seq. ID no. 7108391
MLFEQAGTVEIAEVIYNRETDQSRGFGFVTMSSVDEAETAVEKFNRYDLNGRLLTVNKAAPRGSRPERAPRVYEPAFRVYVGNLPWDVDNGRLEQLFSEHGKVVEARVVYDRETGRSRGFGFVTMSDVDELNEAISALDGQNLEGRAIRVNVAEERPPRRGY

SEQ ID NO: 76560 - DNA, 1767 bp, Arabidopsis thaliana
  misc_feature (1)..(1767): Ceres Seq. ID no. 7108392
  misc_feature (1)..(1767): Ortholog of  Ceres SEQ ID NO 13594209 as cited in SEQ ID NO 59089
  misc_feature (1)..(1767): Ortholog of  Ceres SEQ ID NO 15169627 as cited in SEQ ID NO 64517
  misc_feature (1)..(1767): Ortholog of  Ceres SEQ ID NO 14307952 as cited in SEQ ID NO 66029
  misc_feature (1)..(1767): Ortholog of  Ceres SEQ ID NO 13502874 as cited in SEQ ID NO 66298
  misc_feature (1)..(1767): Ortholog of  Ceres SEQ ID NO 12614124 as cited in SEQ ID NO 68392
cacccacgcgtccggaaatgtacgaatagagagtgaagtgaacgacacataataaaaccaaagaatggagatatggttactcatattggcctctctctccggatctctccttttccatctcctcctccgccgccgtaactcctcctcccctccgttacctcctgaccctaacttcttacctttcctcggaaccctccagtggctccgggaaggcttaggtggcctcgaatcctatctccgctctgtccaccaccgtctaggccccatcgtcaccctccgcatcacttcccgccccgccatattcgttgccgatcgttccctaactcacgaggctctcgtcctgaacggcgggccgtctatgcggaccgtccaccacctgcctgtaattagcaagatagttgacgaacacaacatcagctccgggtcatacggagccacgtggcggcttctccgtcgaaacatcacctctgagattcttcacccctcgcgcgtgagatcttactcccacgctcgtcattgggttcttgagatcctctttgaacggttccgtaaccacggaggcgatgaaccgatcgtcctcatccaccatctccactatgcaatgtttgcgcttcttgtccttatgtgttttggagataagcttgatgagaagcaaatcaaacaagtggagttcattcagaggctccaactcctaagcttgtccagattcaacatcttcaacatctggcctaagttcaccaaactgattctacgaaagaggtggcaagaatttctccagattcggagacagcagcgggacattttgcttcccctgattcgtgcccggagaagatcattgaagagagaaaagagatcggaggaagaagacaagaaagactatgtgcaatcatatgttgatactctactcgatctagagcttccagaggaaaataggaagttgaacgaggaagatattatgaacttgtgctcggagtttctcacggccgggactgacacgacggccacggcgctgcaatggatcatggccaacctagtgaaatatccagaaatccaggagagattacacgaggagatcaagagcgtggttggaagaagcaaaggaggtggggaagaagatgtggagaagatgccgtatctaaaggcactggtgttagagggactccggagacaccctccaggacactttttactcccacacagtgtcacggaggacactgtgttaggaggatacaaagtaccgaagaacgggacgatcaacttcatggtggcggagatagggagggatccagtggagtgggaagaaccaatggcgtttaagccagagaggtttatgggagaagaagaagcggtggacctaaccggaagtagagggataaagatgatgccgttcggagcaggaagaaggatatgtccgggcataggtctagcaatgttgcatctggagtactacgtcgccaacatggtcagagagttccaatggaaagaggtggaaggtcatgaagttgacttgacggagaagcttgaattcactgtcgtcatgaagcatccgcttaaggctcttgctgttcctaggagatgtcactagtctacttcttcctcttttcttgggctttaatattcaaaatgtgtgaacttagtttggtggaattctcaataaactatgggataagtcataaaaaagagttattatgctgaccgtttgtactttgtattcaagtgtatgttggacaccttaaaataaaacagatatttatatagttcagattt

SEQ ID NO: 76561 - protein, 506 aa, Arabidopsis thaliana
  peptide (1)..(506): Ceres Seq. ID no. 7108393
MEIWLLILASLSGSLLFHLLLRRRNSSSPPLPPDPNFLPFLGTLQWLREGLGGLESYLRSVHHRLGPIVTLRITSRPAIFVADRSLTHEALVLNGGPSMRTVHHLPVISKIVDEHNISSGSYGATWRLLRRNITSEILHPSRVRSYSHARHWVLEILFERFRNHGGDEPIVLIHHLHYAMFALLVLMCFGDKLDEKQIKQVEFIQRLQLLSLSRFNIFNIWPKFTKLILRKRWQEFLQIRRQQRDILLPLIRARRRSLKREKRSEEEDKKDYVQSYVDTLLDLELPEENRKLNEEDIMNLCSEFLTAGTDTTATALQWIMANLVKYPEIQERLHEEIKSVVGRSKGGGEEDVEKMPYLKALVLEGLRRHPPGHFLLPHSVTEDTVLGGYKVPKNGTINFMVAEIGRDPVEWEEPMAFKPERFMGEEEAVDLTGSRGIKMMPFGAGRRICPGIGLAMLHLEYYVANMVREFQWKEVEGHEVDLTEKLEFTVVMKHPLKALAVPRRCH

SEQ ID NO: 76562 - protein, 408 aa, Arabidopsis thaliana
  peptide (1)..(408): Ceres Seq. ID no. 7108394
MRTVHHLPVISKIVDEHNISSGSYGATWRLLRRNITSEILHPSRVRSYSHARHWVLEILFERFRNHGGDEPIVLIHHLHYAMFALLVLMCFGDKLDEKQIKQVEFIQRLQLLSLSRFNIFNIWPKFTKLILRKRWQEFLQIRRQQRDILLPLIRARRRSLKREKRSEEEDKKDYVQSYVDTLLDLELPEENRKLNEEDIMNLCSEFLTAGTDTTATALQWIMANLVKYPEIQERLHEEIKSVVGRSKGGGEEDVEKMPYLKALVLEGLRRHPPGHFLLPHSVTEDTVLGGYKVPKNGTINFMVAEIGRDPVEWEEPMAFKPERFMGEEEAVDLTGSRGIKMMPFGAGRRICPGIGLAMLHLEYYVANMVREFQWKEVEGHEVDLTEKLEFTVVMKHPLKALAVPRRCH

SEQ ID NO: 76563 - protein, 327 aa, Arabidopsis thaliana
  peptide (1)..(327): Ceres Seq. ID no. 7108395
MFALLVLMCFGDKLDEKQIKQVEFIQRLQLLSLSRFNIFNIWPKFTKLILRKRWQEFLQIRRQQRDILLPLIRARRRSLKREKRSEEEDKKDYVQSYVDTLLDLELPEENRKLNEEDIMNLCSEFLTAGTDTTATALQWIMANLVKYPEIQERLHEEIKSVVGRSKGGGEEDVEKMPYLKALVLEGLRRHPPGHFLLPHSVTEDTVLGGYKVPKNGTINFMVAEIGRDPVEWEEPMAFKPERFMGEEEAVDLTGSRGIKMMPFGAGRRICPGIGLAMLHLEYYVANMVREFQWKEVEGHEVDLTEKLEFTVVMKHPLKALAVPRRCH

SEQ ID NO: 76564 - DNA, 950 bp, Arabidopsis thaliana
  misc_feature (1)..(950): Ceres Seq. ID no. 7108399
  misc_feature (1)..(950): Ortholog of  Ceres SEQ ID NO 15175425 as cited in SEQ ID NO 0
gtcgacccacgcgtccggagagactttcagcagctatttctttgtcttctttctctataaagaacctcactctctctctctttagtcaaaaatccccaattcgtgaacaaattagggtttttgaagtttgaagaaggagagaaagatgagtgcttcaaggtttatcaagtgtgtcactgtcggcgacggtgctgttggaaagacttgtcttctcatctcctacactagcaacactttccccacggattatgtgccaactgtgttcgataatttcagtgccaatgtgattgttgatggcaacactatcaacttgggattgtgggatactgcagggcaagaggactacaatagactaagacctttgagctatcgcggtgcagatgtcttcttacttgcattctcacttgtcagcaaagctagctatgaaaatgtttctaaaaagtgggttcctgaactgagacattatgctcctggtgttcccatcatcctcgttggaacaaagcttgatcttcgacatgataagcaattctttgccgagcaccctggtgctgtgcctatctctaccgctcagggtgaagaactaaagaagctgattggggcgcctgcttatatcgaatgcagtgcaaaaactcaacagaatgtgaaagcagtgtttgatgcggctatcaaggtcgttctccagccaccaaaaaacaagaagaagaagaagagaaaatctcagaaaggttgttctatactctgattcaacaagaagaaaggaatcaacaggagaattagagctataagtatttgttttctcctttttcataacttgtttacccaaggaatcaaaaatctgttgtttgtagtctgaaaatgacaaaagttgaagaactagtaacaagtatttgtattcttgtttgcattttgatctgtaaatataccacgaatccttgatttctctgtttcct

SEQ ID NO: 76565 - protein, 198 aa, Arabidopsis thaliana
  peptide (1)..(198): Ceres Seq. ID no. 7108400
MSASRFIKCVTVGDGAVGKTCLLISYTSNTFPTDYVPTVFDNFSANVIVDGNTINLGLWDTAGQEDYNRLRPLSYRGADVFLLAFSLVSKASYENVSKKWVPELRHYAPGVPIILVGTKLDLRHDKQFFAEHPGAVPISTAQGEELKKLIGAPAYIECSAKTQQNVKAVFDAAIKVVLQPPKNKKKKKRKSQKGCSIL

SEQ ID NO: 76566 - DNA, 1920 bp, Arabidopsis thaliana
  misc_feature (1)..(1920): Ceres Seq. ID no. 7108417
  misc_feature (1)..(1920): Ortholog of  Ceres SEQ ID NO 13599322 as cited in SEQ ID NO 0
gaattcgcggccgcgaaaaatcgctgtccaaatctccggtcatttctccgaggatctcttctatcaatccaacggttttgttttcatcttctcagatctcacagaacaatagtcaaagactgatgcagaagaagcgttagtacaaggtttttgttggaaagcaattgaatctgaattcatctttcattttcacgctttgatccaatttgagttctctcttccactgaatccctcatacgtaaaacctagggtttctaaattagggttctcctgaggtctgtttatagtgcgtaaagccatgtttaagaagatcatgaaaggggcaaatcgaaaagcctctaaagctgaggcgaatgattcgtctatgtatgggtttgatccaccaggtaggtcaggtcctggatccaatatgattgtaaatcacgcatctcgtggttcgcttgttccttcttctccaaattcaatggcggcggccaccacacaaccgcctcctatgtattcagtcgagcctcttcccttgttcagagacgtctctgtctccgagcgtcaatccttgttcttgaggaaactccagatttgttgttttcaatttgattttacggatacgttgaagaatgcgagagagaaggagattaagaggcaaacgttattggagctagttgattttatacagtctggagcagggaagctcactgaagtttgtcaagaagaaatggtaaagatgatttcggttaatatattccggtgtcttcctccggcttcacacgagaatacaggtcaagagcctgctgatcttgaggaagaggagccttatttggaaccatcttggcctcatttacagctaatttatgagttgctgctgagatacattgttccttctgacacagatacaaaagttgcaaaacggtatattgatcattcttttgtgttgaggttgcttgaattgtttgaaactgaagatcctagagaaagggagtacttgaaaacgattcttcataggatttatggcaagtttatggttcacaggccctttattaggaaagcaatgaaccatattttctataggtttatttatgagacagagagacatagtgggattggggagcttttggagattctcggtagtattattaatgggtttgccttgccaatgaaggaggagcacaagctctttttgattagggcgttgataccgctgcataagccaaaaccaatcgctatgtatcaccaacaattgtcttactgcatcgttcagtttgtggagaaagattataagcttgcggatacggtgatcaggggcttgttaaagttttggcctgtgacaaattgtacaaaagaggttctctttcttggtgaacttgaagaggttcttgaggcaacacaaactgttgagttccaacgctgtatggtccctctgttccaacagattgctcgatgcctcagtagctctaattttcaggttgcagaacgagctctgttcttgtggaacaacgagcatgtggtgggtctaatagctcagaaccgaggagtgatccttcccatcatatttgcatccctggagaaaaacatagagtctcattggaaccaagcggtacacggtctaagtgcgaatataaagagaatgttcatggagatggaccctgagctctttgaagaatgtcagcaacagtacgaagaaaaacaagccaaatctaaacaagtggaagagcaacgccaaaataggtggaggagattagatgaagcagtggaggaacgagaaagagaagatcctatgatcacttcttagaaaaaaatatatcaaatcatcaaagtaataatattctctctcacttcttctcattttctctaatcgttgcaaattattatattttatttatttattttgaggtctggaaaaaaaaaagtcgcggccgcgaattc

SEQ ID NO: 76567 - protein, 495 aa, Arabidopsis thaliana; identical to SEQ ID NO: 48486
  peptide (1)..(495): Ceres Seq. ID no. 7108418

SEQ ID NO: 76568 - protein, 490 aa, Arabidopsis thaliana; identical to SEQ ID NO: 48487
  peptide (1)..(490): Ceres Seq. ID no. 7108419

SEQ ID NO: 76569 - protein, 473 aa, Arabidopsis thaliana; identical to SEQ ID NO: 48488
  peptide (1)..(473): Ceres Seq. ID no. 7108420

SEQ ID NO: 76570 - DNA, 805 bp, Arabidopsis thaliana
  misc_feature (1)..(805): Ceres Seq. ID no. 7108449
  misc_feature (1)..(805): Ortholog of  Ceres SEQ ID NO 12557915 as cited in SEQ ID NO 62
  misc_feature (1)..(805): Ortholog of  Ceres SEQ ID NO 13638917 as cited in SEQ ID NO 56018
  misc_feature (1)..(805): Ortholog of  Ceres SEQ ID NO 13663116 as cited in SEQ ID NO 60731
gaattcggcacgagaccaaaagccgtctcagaagaaaacacaactgcgaagaatatggcgaccgatgatgtgaacgagcctctcccggcggcggcggaattaccggcgacagaggcggagaaacaaccacacaagctcgaaagaaagtggagtttctggttcgataaccaatcaaagaaaggcgccgcctggggagcttctcttcgtaaagcctatactttcgacaccgtcgaagatttttggggattgcacgagactatatttcagactagcaaattgacagcgaatgctgaaattcacttgttcaaagctggtgttgagccaaagtgggaagatccagagtgtgctaatggaggaaagtggacttgggttgttactgctaataggaaggaagctttagacaaaggctggcttgaaactttgatggctttgattggagagcaatttgatgaagcagatgagatttgtggtgtggttgctagtgtccgtccacagtcgaagcaagacaagctctccttgtggactaggacgaagtctaatgaagctgttctgatgggtattgggaagaagtggaaggagatacttgatgtcaccgacaagataactttcaataaccatgatgattcgagaagaagccgattcactgtttgaagaaacgagtgtgaaaccagaggaagatgcaatatggctttttttttgtgatactgtttggtcggtttactcaaatagctgagacatttagggacattcactttgaggtgtaaactctacaaagttttctgtttcattaaaatgattttttgtt

SEQ ID NO: 76571 - protein, 216 aa, Arabidopsis thaliana
  peptide (1)..(216): Ceres Seq. ID no. 7108450
EFGTRPKAVSEENTTAKNMATDDVNEPLPAAAELPATEAEKQPHKLERKWSFWFDNQSKKGAAWGASLRKAYTFDTVEDFWGLHETIFQTSKLTANAEIHLFKAGVEPKWEDPECANGGKWTWVVTANRKEALDKGWLETLMALIGEQFDEADEICGVVASVRPQSKQDKLSLWTRTKSNEAVLMGIGKKWKEILDVTDKITFNNHDDSRRSRFTV

SEQ ID NO: 76572 - protein, 198 aa, Arabidopsis thaliana; identical to SEQ ID NO: 35560
  peptide (1)..(198): Ceres Seq. ID no. 7108451

SEQ ID NO: 76573 - DNA, 1337 bp, Arabidopsis thaliana
  misc_feature (1)..(1337): Ceres Seq. ID no. 7108467
  misc_feature (1)..(1337): Ortholog of  Ceres SEQ ID NO 13638160 as cited in SEQ ID NO 58847
gtcgacccacgcgtccgaaacagaaaccgatcaaaggatgggtcttaatctgaatttgtctatctactctttaccaaaacccttatctcaatttctcgatgaagtgtcgaggatcaaagacaatcattccaaactgtctgaaatcgatggttatgtcggaaaattagaggaagaaaggaacaaaatcgatgtttttaaacgagaactccctttatgcatgctcttattgaacgaagcgattggggcgttgaaggatgaggctagaaaagggttatcactgatggcatctaatgggaaattcgatgatgttgaaagggcaaaaccggaaactgataagaagagctggatgagctctgcccagttatggatctcgaaccctaattcccaattccgatcgacaaatgaagaagaagaagatcggtgtgtgagtcagaacccatttcagacatgtaattaccctaatcaaggaggggtatttatgccgatttaaccgtcccccacctcctccaccaccagctcctctgtctctcatgactccaacatcagagatgatgatggattatagcagaattgagcagagtcatcatcatcatcaattcaataaaccttcttcacagagtcatcacattcagaagaaagagcagagaaggagatggtcacaggaacttcaccgtaaatttgttgatgctcttcataggcttggagggccacaagttgctacaccaaagcagattagagatttgatgaaagttgatggtttaaccaatgatgaagtcaagagccatttacaaaaatatagaatgcatatccgtaagcatccgctgcatccgacaaagactttgtcatcgtcggatcagccaggtgtgttagagagagaatcgcagagcttaataagtttgtcgaggtcggattcgccacaaatcccacttgttgcaagagggttgttcagtagtaatgttggtcatagctcagaggaagatgaggaggaggaggatgaagaggaggagaagtctgatggacgtagtagctgtagaaatgatgaaacaaagaagaagagacaagtgttggatcttgagctttgaaagtctgcatagtgaatgatataatctttaccaacttatgttatatatgctcaaaactttgagtttgttcgggagtttttgtagatgtaaacatgagagttgaaataaggaagaggattttgagcaaaaagtagggtttgtttttgcaagaggaaatagatagagaagagtggttcgaaatcctctgtgttttttttttttttttttttacttcataagtaagataaactcatatatcaaagattttgtttttat

SEQ ID NO: 76574 - protein, 183 aa, Arabidopsis thaliana
  peptide (1)..(183): Ceres Seq. ID no. 7108468
MTPTSEMMMDYSRIEQSHHHHQFNKPSSQSHHIQKKEQRRRWSQELHRKFVDALHRLGGPQVATPKQIRDLMKVDGLTNDEVKSHLQKYRMHIRKHPLHPTKTLSSSDQPGVLERESQSLISLSRSDSPQIPLVARGLFSSNVGHSSEEDEEEEDEEEEKSDGRSSCRNDETKKKRQVLDLEL

SEQ ID NO: 76575 - protein, 177 aa, Arabidopsis thaliana
  peptide (1)..(177): Ceres Seq. ID no. 7108469
MMMDYSRIEQSHHHHQFNKPSSQSHHIQKKEQRRRWSQELHRKFVDALHRLGGPQVATPKQIRDLMKVDGLTNDEVKSHLQKYRMHIRKHPLHPTKTLSSSDQPGVLERESQSLISLSRSDSPQIPLVARGLFSSNVGHSSEEDEEEEDEEEEKSDGRSSCRNDETKKKRQVLDLEL

SEQ ID NO: 76576 - protein, 176 aa, Arabidopsis thaliana
  peptide (1)..(176): Ceres Seq. ID no. 7108470
MMDYSRIEQSHHHHQFNKPSSQSHHIQKKEQRRRWSQELHRKFVDALHRLGGPQVATPKQIRDLMKVDGLTNDEVKSHLQKYRMHIRKHPLHPTKTLSSSDQPGVLERESQSLISLSRSDSPQIPLVARGLFSSNVGHSSEEDEEEEDEEEEKSDGRSSCRNDETKKKRQVLDLEL

SEQ ID NO: 76577 - DNA, 1694 bp, Arabidopsis thaliana
  misc_feature (1)..(1694): Ceres Seq. ID no. 7108475
  misc_feature (1)..(1694): Ortholog of  Ceres SEQ ID NO 14303850 as cited in SEQ ID NO 53464
  misc_feature (1)..(1694): Ortholog of  Ceres SEQ ID NO 15176262 as cited in SEQ ID NO 54751
  misc_feature (1)..(1694): Ortholog of  Ceres SEQ ID NO 13656177 as cited in SEQ ID NO 64997
gaattcctcgagctacgtcagggatttcgttcaatcttctctttatcgctccaccagatccaagttcgcgagatttcaagctctctaacaaagttcttcacttttactctcaaagctttcatctttcattcaactacttaagctccaagtatggcaggatccgcaccggaaggaacacaatttgatacgcgtcagtttgaccagaggctgaatgaagttctcgatggacaggatgagttcttcacctcatatgatgaggtccatgagagctttgatgccatgggtttgcaagagaatcttcttaggggtatctatgcttacggtttcgaaaagccttctgctattcagcaaagaggaattgtacctttttgcaagggtcttgatgtgatccagcaggcacagtctggtactggaaaaaccgccactttctgctctggtgtcttgcagcagcttgactatgcccttctccagtgccaggctctcgttttggctcccaccagagagcttgctcagcagattgagaaggtcatgcgtgcccttggtgactaccaaggtgtcaaggttcatgcctgtgttggtggaaccagtgtccgtgaggatcagcgcattctccaggctggtgttcatgttgtcgttggaactcccggtcgtgtttttgacatgcttagaagacaatctctccgccctgactgcatcaagatgtttgtccttgatgaagctgatgaaatgctctcccgtggtttcaaggatcagatctatgacatattccagcttctcccaccaaagattcaggttggagtgttctctgcgacaatgcctccggaagctttggagatcacaagaaaattcatgagcaaaccagtgagaatcttggtgaaacgtgatgagctcacacttgaaggtatcaagcaattctacgtgaacgtggagaaagaagactggaagcttgagactctctgcgatctctacgagactctagccatcactcagagtgtcatctttgtcaacactcgtcgcaaggtcgactggctcacagacaaaatgagaagccgtgaccacacagtctcagcaactcatggagacatggaccaaaacaccagagacatcatcatgagagagttcaggtctggctcgtctcgtgttctaatcacaaccgatctcttggctcgtggtatcgatgtgcagcaagtctctctagtcataaactttgacctcccaactcagccagagaattaccttcaccgtatcggaagaagtggaaggttcgggagaaagggtgtcgcgattaactttgtgactcttgatgatcagagaatgctgtttgatattcagaaattctacaatgtggttgttgaggagcttccctcaaacgtggctgatttgctgtgaagaagaagaagaagaagaagaagaaaggttgcttgtttcgcaaatttcttatttgatttttgacccgtctctctctctctgaatcatcgatacatctttttcattctctagtatccttcatcaactctatcgaacatatatatgtctcttctgaccatatttcttttttatcaaatgcaatatttatttctaaaaaaaaaaaaaaaaaaaaaaaaaaaaaaaaaaaaaaaaaaaaaaaaaaaaaaaaaaaaaaaaaaaaaaaaaaaaaaagctagctcagggccctgacgtagctcgaggaattc

SEQ ID NO: 76578 - protein, 412 aa, Arabidopsis thaliana; identical to SEQ ID NO: 26827
  peptide (1)..(412): Ceres Seq. ID no. 7108476

SEQ ID NO: 76579 - protein, 369 aa, Arabidopsis thaliana; identical to SEQ ID NO: 26828
  peptide (1)..(369): Ceres Seq. ID no. 7108477

SEQ ID NO: 76580 - protein, 286 aa, Arabidopsis thaliana; identical to SEQ ID NO: 26829
  peptide (1)..(286): Ceres Seq. ID no. 7108478

SEQ ID NO: 76581 - DNA, 1284 bp, Arabidopsis thaliana
  misc_feature (1)..(1284): Ceres Seq. ID no. 7108494
  misc_feature (1)..(1284): Ortholog of  Ceres SEQ ID NO 15171268 as cited in SEQ ID NO 51297
  misc_feature (1)..(1284): Ortholog of  Ceres SEQ ID NO 15170521 as cited in SEQ ID NO 55668
  misc_feature (1)..(1284): Ortholog of  Ceres SEQ ID NO 13598249 as cited in SEQ ID NO 62509
  misc_feature (1)..(1284): Ortholog of  Ceres SEQ ID NO 13598595 as cited in SEQ ID NO 64671
  misc_feature (1)..(1284): Ortholog of  Ceres SEQ ID NO 13654241 as cited in SEQ ID NO 68348
ccacgcgtccggaagaagcaaaaccctagagctcaaggtaatcgccgtcgatttctcaatctctcaccggcgattacatgccgatgaaagttgtacaatagctgctgtaagagagagatttatcaggtatttttagaatcatgtatagagacagaggaacggtgaattcgagacctgaagttgtggatcgtaaacggatcaacgacgctcttgaacgtccttctccttcaacctctcgtcaagttaacggcaaaggcaaaggaaccgttacggcggcgacgacgacggcgaacttgattgggaagcagcagtcgaataacatcaaccatagagattctcgttctgcttctctctcgaagaacaatacggtttctgatgatgaatcagacacagatagtgaagaatcagatgtgagtggttctgatggagaggacacttcatggatatcttggttttgtaatctaagaggaaacgagttcttttgtgaagttgatgatgattacattcaagatgacttcaacttgtgtggactcagcagtctagttccctactacgagtacgctcttgatttgattttggatgttgaatcttctcaaggagagatgtttacagaggaacagaatgaattgatcgagtcagcagctgagatgttgtatggactgattcatgctcgttacatattgactagcaaaggattggcagcaatgttagacaaatacaaaaactatgactttggaagatgtccaagagtttattgctgtggccaaccttgtcttccggttggtcaatcagacttaccgcgatctagcactgtgaagatatattgcccgaaatgcgaagacatttattacccacgatcaaagtatcaaggcaacattgatggagcttactttgggacaacgtttccacatctgttcctgatgacttatgggcatctcaagccagcgaaggcaacacaaaactatgttcaaagagtgtttgggttcaaattacacaaaccgtgaaggaagtttgacgacaaaacccaaggatcaagatcatggcgttggaatggaactgagaaagaagagacgtgtgtgaacagaaaccggaaaataaaacgtcactgtaatcacacgaatggtgaagagagcattcatgtctctatttgtcttcaggtacatacacattagaagaagcaaaagcatggttagaaagaaaaaaaacacgaaaatcttttaatgagtttgttaaacttgaacatgtatttttctaccttctgtaaacttttttattttgtttctc

SEQ ID NO: 76582 - protein, 287 aa, Arabidopsis thaliana
  peptide (1)..(287): Ceres Seq. ID no. 7108495
MYRDRGTVNSRPEVVDRKRINDALERPSPSTSRQVNGKGKGTVTAATTTANLIGKQQSNNINHRDSRSASLSKNNTVSDDESDTDSEESDVSGSDGEDTSWISWFCNLRGNEFFCEVDDDYIQDDFNLCGLSSLVPYYEYALDLILDVESSQGEMFTEEQNELIESAAEMLYGLIHARYILTSKGLAAMLDKYKNYDFGRCPRVYCCGQPCLPVGQSDLPRSSTVKIYCPKCEDIYYPRSKYQGNIDGAYFGTTFPHLFLMTYGHLKPAKATQNYVQRVFGFKLHKP

SEQ ID NO: 76583 - DNA, 1413 bp, Arabidopsis thaliana
  misc_feature (1)..(1413): Ceres Seq. ID no. 7108504
  misc_feature (1)..(1413): Ortholog of  Ceres SEQ ID NO 14314404 as cited in SEQ ID NO 57421
  misc_feature (1)..(1413): Ortholog of  Ceres SEQ ID NO 13493536 as cited in SEQ ID NO 58515
  misc_feature (1)..(1413): Ortholog of  Ceres SEQ ID NO 15225741 as cited in SEQ ID NO 59606
  misc_feature (1)..(1413): Ortholog of  Ceres SEQ ID NO 12618461 as cited in SEQ ID NO 64349
aattcggcacgagcctccgccgcagttattttcgaggagcgctttgatgatggctgggagaacagatgggttaaatctgagtggaagaaggatgataacactgctggggagtggaagcacactgcgggaaattggtctggtgacgctaacgataaaggtatccagaccagtgaagactacagattctacgccatttcagctgagttccctgaattcagtaacaaggacaagaccttagtcttccaattctcagtcaagcacgagcaaaagcttgactgcggtggtggctacatgaagctactaagtggtgatgttgaccaaaagaaatttggtggagacacaccatacagtatcatgtttggtcctgatatctgtggctacagcacaaagaaagtgcatgctatccttacctataatggagccaaccacctgatcaagaaagatgttccatgtgaaactgaccagctcacccatgtgtacacatttatcctccgcccagatgctacttacagcattctcatcgacaatgttgagaaacaaactggtagcctttactctgactgggatcttctcccacccaagaagatcaaggaccccagcgccaagaagcctgaggactgggacgaacaagaatacatttctgaccctgaagacaagaaaactgacggttacgatgatatccctaaggagatcccagacaccgactcaaagaagcctgaggactgggatgatgaagaagatggtgagtggactgccccaacaatccccaaccctgagtacatgggtgaatggaagcctaagcaaatcaagaaccccaactacaagggcaagtgggaggctccattgattgacaaccctgacttcaaggatgacccagagctctacgtcttccccaagctgaaatatgttggactcgaattgtggcaggtgaaatcaggatcattgttcgacaatgtcttgatctgcgatgacccagactatgccaagaagttggcagatgaaacatggggaaagctcaaggatgcggagaaagcagctttcgatgaggctgagaagaagaatgaggaagaggaatccaaggacgcacctgcggaatctgatgctgaagacgaaccagaggatgatgaaggaggagatgattccgattctgaatctaaggccgaggagaccaaatcagaagatagcgaggaaacctctgagaaagacgccaccgctcatgatgagctataggtgaaaggttgaagatttgaagaccaaagttttcagtctctttattgttttatcgttttcttttgaagtattttagcatctagtttgtcggagatagaaacaagttttagcaaaactaaaagggggatacaatgtctgtcagatgctcattttagactttaaaaaaccatgaagaagttttgc

SEQ ID NO: 76584 - protein, 409 aa, Arabidopsis thaliana
  peptide (1)..(409): Ceres Seq. ID no. 7108505
NSARASAAVIFEERFDDGWENRWVKSEWKKDDNTAGEWKHTAGNWSGDANDKGIQTSEDYRFYAISAEFPEFSNKDKTLVFQFSVKHEQKLDCGGGYMKLLSGDVDQKKFGGDTPYSIMFGPDICGYSTKKVHAILTYNGANHLIKKDVPCETDQLTHVYTFILRPDATYSILIDNVEKQTGSLYSDWDLLPPKKIKDPSAKKPEDWDEQEYISDPEDKKTDGYDDIPKEIPDTDSKKPEDWDDEEDGEWTAPTIPNPEYMGEWKPKQIKNPNYKGKWEAPLIDNPDFKDDPELYVFPKLKYVGLELWQVKSGSLFDNVLICDDPDYAKKLADETWGKLKDAEKAAFDEAEKKNEEEESKDAPAESDAEDEPEDDEGGDDSDSESKAEETKSEDSEETSEKDATAHDEL

SEQ ID NO: 76585 - protein, 312 aa, Arabidopsis thaliana
  peptide (1)..(312): Ceres Seq. ID no. 7108506
MKLLSGDVDQKKFGGDTPYSIMFGPDICGYSTKKVHAILTYNGANHLIKKDVPCETDQLTHVYTFILRPDATYSILIDNVEKQTGSLYSDWDLLPPKKIKDPSAKKPEDWDEQEYISDPEDKKTDGYDDIPKEIPDTDSKKPEDWDDEEDGEWTAPTIPNPEYMGEWKPKQIKNPNYKGKWEAPLIDNPDFKDDPELYVFPKLKYVGLELWQVKSGSLFDNVLICDDPDYAKKLADETWGKLKDAEKAAFDEAEKKNEEEESKDAPAESDAEDEPEDDEGGDDSDSESKAEETKSEDSEETSEKDATAHDEL

SEQ ID NO: 76586 - protein, 291 aa, Arabidopsis thaliana
  peptide (1)..(291): Ceres Seq. ID no. 7108507
MFGPDICGYSTKKVHAILTYNGANHLIKKDVPCETDQLTHVYTFILRPDATYSILIDNVEKQTGSLYSDWDLLPPKKIKDPSAKKPEDWDEQEYISDPEDKKTDGYDDIPKEIPDTDSKKPEDWDDEEDGEWTAPTIPNPEYMGEWKPKQIKNPNYKGKWEAPLIDNPDFKDDPELYVFPKLKYVGLELWQVKSGSLFDNVLICDDPDYAKKLADETWGKLKDAEKAAFDEAEKKNEEEESKDAPAESDAEDEPEDDEGGDDSDSESKAEETKSEDSEETSEKDATAHDEL

SEQ ID NO: 76587 - DNA, 1404 bp, Arabidopsis thaliana
  misc_feature (1)..(1404): Ceres Seq. ID no. 7108512
  misc_feature (1)..(1404): Ortholog of  Ceres SEQ ID NO 15177291 as cited in SEQ ID NO 52286
  misc_feature (1)..(1404): Ortholog of  Ceres SEQ ID NO 13595164 as cited in SEQ ID NO 56222
  misc_feature (1)..(1404): Ortholog of  Ceres SEQ ID NO 14315021 as cited in SEQ ID NO 57018
  misc_feature (1)..(1404): Ortholog of  Ceres SEQ ID NO 15177783 as cited in SEQ ID NO 58894
  misc_feature (1)..(1404): Ortholog of  Ceres SEQ ID NO 13591068 as cited in SEQ ID NO 69043
  misc_feature (1)..(1404): Ortholog of  Ceres SEQ ID NO 13623041 as cited in SEQ ID NO 0
aattccgggcaggtcggaaagtgaaggaagatacactgaagcaaaagagcaagtcatggcggcgacatcttcctctgcttttctccttaatccgttgacttctcgccaccgtcctttcaaatactcgccagagctctcttctctctccttatcctctcgaaaggctgctgctttcgatgtttcctcagctgctttcacgctcaagagacagagccggagtgatgttgtgtgcaaggctgtatctatcaagccagaagctggtgttgaagggctcaatatcgccgataacgccgctcagcttattgggaaaactccgatggtgtacttgaacaatgtagtcaagggctgtgttgcaagtgttgctgctaagcttgagatcatggaaccatgttgcagtgtcaaggataggattgggtacagtatgattactgatgctgaagagaaaggacttataacacctggaaagagtgttcttgtggaatctacgagtgggaacacagggattggccttgcattcattgctgcttcaaaaggctataaacttatcttgacgatgcctgcgtccatgagtttggaaaggcgggttcttttgagggcatttggagctgagcttgtgttaactgaacctgcaaaaggtatgactggagcaattcagaaggctgaagaaatcttgaaaaaaactcccaattcctacatgctccaacagtttgacaaccctgccaatcccaagattcattatgagacgactaatcctgagatttgggaagatacaagaggcaaaatcgatatattggttgcggggattggaactggtggaactatcactggtgttggtcgattcattaaagaaagaaaacctgaattgaaggttattggtgtcgaacccacggaaagtgctatactttctggtggaaaaaccggacctcacaagattcaaggaattggagctggatttgtacccaagaatttggatctggctattgtagatgaatacatagcgatttccagtgaggaagctattgaaacctcgaagcaactagctctccaggaaggcttgttggttggtatatcttctggagctgctgctgctgctgcaatccaggttgcaaagagacctgaaaatgccgggaaactcatagccgttgtgttcccgagcttcggggaacgttacctctcgacccagcttttccagtcgattcgagaagagtgcgagcaaatgcagcccgagctttgattttcttctgtaatttcgtgaccaacaaggaacctcttctttgatttattgctgattgtttttcttctaatagacgtttctgcagaaatctctacgtctactgtgtatatttacaaattcgcaacgcaatttggtgtttgttattaataaaggcataagaggttttggtc

SEQ ID NO: 76588 - protein, 410 aa, Arabidopsis thaliana
  peptide (1)..(410): Ceres Seq. ID no. 7108513
IPGRSESEGRYTEAKEQVMAATSSSAFLLNPLTSRHRPFKYSPELSSLSLSSRKAAAFDVSSAAFTLKRQSRSDVVCKAVSIKPEAGVEGLNIADNAAQLIGKTPMVYLNNVVKGCVASVAAKLEIMEPCCSVKDRIGYSMITDAEEKGLITPGKSVLVESTSGNTGIGLAFIAASKGYKLILTMPASMSLERRVLLRAFGAELVLTEPAKGMTGAIQKAEEILKKTPNSYMLQQFDNPANPKIHYETTNPEIWEDTRGKIDILVAGIGTGGTITGVGRFIKERKPELKVIGVEPTESAILSGGKTGPHKIQGIGAGFVPKNLDLAIVDEYIAISSEEAIETSKQLALQEGLLVGISSGAAAAAAIQVAKRPENAGKLIAVVFPSFGERYLSTQLFQSIREECEQMQPEL

SEQ ID NO: 76589 - protein, 392 aa, Arabidopsis thaliana
  peptide (1)..(392): Ceres Seq. ID no. 7108514
MAATSSSAFLLNPLTSRHRPFKYSPELSSLSLSSRKAAAFDVSSAAFTLKRQSRSDVVCKAVSIKPEAGVEGLNIADNAAQLIGKTPMVYLNNVVKGCVASVAAKLEIMEPCCSVKDRIGYSMITDAEEKGLITPGKSVLVESTSGNTGIGLAFIAASKGYKLILTMPASMSLERRVLLRAFGAELVLTEPAKGMTGAIQKAEEILKKTPNSYMLQQFDNPANPKIHYETTNPEIWEDTRGKIDILVAGIGTGGTITGVGRFIKERKPELKVIGVEPTESAILSGGKTGPHKIQGIGAGFVPKNLDLAIVDEYIAISSEEAIETSKQLALQEGLLVGISSGAAAAAAIQVAKRPENAGKLIAVVFPSFGERYLSTQLFQSIREECEQMQPEL

SEQ ID NO: 76590 - protein, 305 aa, Arabidopsis thaliana
  peptide (1)..(305): Ceres Seq. ID no. 7108515
MVYLNNVVKGCVASVAAKLEIMEPCCSVKDRIGYSMITDAEEKGLITPGKSVLVESTSGNTGIGLAFIAASKGYKLILTMPASMSLERRVLLRAFGAELVLTEPAKGMTGAIQKAEEILKKTPNSYMLQQFDNPANPKIHYETTNPEIWEDTRGKIDILVAGIGTGGTITGVGRFIKERKPELKVIGVEPTESAILSGGKTGPHKIQGIGAGFVPKNLDLAIVDEYIAISSEEAIETSKQLALQEGLLVGISSGAAAAAAIQVAKRPENAGKLIAVVFPSFGERYLSTQLFQSIREECEQMQPEL

SEQ ID NO: 76591 - DNA, 893 bp, Arabidopsis thaliana
  misc_feature (1)..(893): Ceres Seq. ID no. 7108525
  misc_feature (1)..(893): Ortholog of  Ceres SEQ ID NO 12608945 as cited in SEQ ID NO 51209
  misc_feature (1)..(893): Ortholog of  Ceres SEQ ID NO 12619999 as cited in SEQ ID NO 66123
  misc_feature (1)..(893): Ortholog of  Ceres SEQ ID NO 13656436 as cited in SEQ ID NO 69154
ccaatacataaacagaagtttctcgagcttcaaatactgtttcagatcaatcaatcaatcatggctagctctggaaacaagaacatcaacgccaaattggtattactaggagatgttggagctggaaaatcaagtcttgtgctacggtttgttaaagatcaatttgttgaatttcaggaatcaaccattggtgcagcctttttctctcaaacattggctgtgaatgatgcgactgtgaagtttgagatatgggatacagctggtcaggaacgataccacagtttggctccaatgtactacaggggtgcagctgctgctattattgtctttgacattactaatcaagcctcatttgagagggcgaagaaatgggttcaggaactgcaggcacaaggtaaccctaatatggtgatggctcttgctggaaacaaagctgatttattagacgcaaggaaggtgtctgcagaggaggcagagatttatgctcaagagaacagccttttcttcatggaaacctcagcgaagaccgcaacaaatgtcaaagacatattctacgaaatagcgaaaaggctgccgcgtgtacagccagctgaaaacccgacaggaatggttctcccaaacgggccaggggctacggcagtgagttcatcgtgttgtgcttagattcgtaccttaagagagatctcttttggttagtcacatagtagagaacatctggactttcatgtgtttgcttcttcttcgtctttgttactttactttgcttgcattgacaacaacaacagcgtatatcatgatgatacttctgcctttgtgaaatctgaagatatttgtatttggagagatttatatatatatatctcttttgtaattagaaaacataacttagtccg

SEQ ID NO: 76592 - protein, 220 aa, Arabidopsis thaliana
  peptide (1)..(220): Ceres Seq. ID no. 7108526
PIHKQKFLELQILFQINQSIMASSGNKNINAKLVLLGDVGAGKSSLVLRFVKDQFVEFQESTIGAAFFSQTLAVNDATVKFEIWDTAGQERYHSLAPMYYRGAAAAIIVFDITNQASFERAKKWVQELQAQGNPNMVMALAGNKADLLDARKVSAEEAEIYAQENSLFFMETSAKTATNVKDIFYEIAKRLPRVQPAENPTGMVLPNGPGATAVSSSCCA

SEQ ID NO: 76593 - protein, 200 aa, Arabidopsis thaliana; identical to SEQ ID NO: 24213
  peptide (1)..(200): Ceres Seq. ID no. 7108527

SEQ ID NO: 76594 - protein, 123 aa, Arabidopsis thaliana; identical to SEQ ID NO: 24214
  peptide (1)..(123): Ceres Seq. ID no. 7108528

SEQ ID NO: 76595 - DNA, 2668 bp, Arabidopsis thaliana
  misc_feature (1)..(2668): Ceres Seq. ID no. 7108556
  misc_feature (1)..(2668): Ortholog of  Ceres SEQ ID NO 13598926 as cited in SEQ ID NO 0
cgcgcccgcgtacgttttcctcatcttccatcgattaagaagaagaattcgtctcttcacagtttcaatgaagatctcaggagaagcaacgctgtctcattctctctgaggaaggactctcgttcttctgggaaggtttttgctcggaagccatcgtatgattctgattcgtcttccttagctaccactgcatctgagaagctccgtggccatcagagtgatagctcttcatctgcctctgatcaagtacaatctcgggatactgtctctgacgatactcaggtgctcggcaatgtagacgttcagaaaactgaagaagcccaggaaacagagacactagatcaaacttctgcactctcaacatctggaagcataagttataaagaagattttgcaaagatgtcacactctgtcgaccaagaagttgggcagaggaagattccacctcctggagatgggaagagaatatatgacattgatcctatgttgaacagtcatcgtaatcatcttgattaccgatatgggcagtacagaaaactgcgtgaagaaattgacaagaatgaaggtggtttggaggcattttctcgtggttatgaaatatttggcttcactcgaagcgccactggtatcacttaccgggaatgggcaccgggagctaaggcagcatcactgatcggagattttaataactggaatgcgaaatctgatgttatggctcggaacgactttggtgtgtgggaaatatttctgccaaataatgctgatggctcaccagcaattccccatggctcccgtgtgaagatccgcatggataccccatctggtattaaagactccattccagcttggatcaagtattctgtccagccacctggcgagatcccatataatggagtatattatgaccctcctgaggaggataaatatgcgttcaaacatcctcgtccaaagaaacccacatcgctgcgtatatatgaatcacatgttggaatgagtagtacggaaccaaagataaatacatatgccaactttagagatgatgtacttccccgtataaaaaagctaggctataatgctgtgcagataatggccattcaagagcatgcctactatgccagctttgggtatcatgtgacaaattttttcgcacctagcagccgctttggaacacctgatgaccttaaatctttgatagacaaagctcatgagctaggtctggttgttctgatggatattgtgcacagccatgcatcaaaaaacacactggatggcctggacatgtttgatggtactgatggtcaatatttccactctggatcgcgtggttatcattggatgtgggatactcgtcttttcaattacggaagctgggaagtgcttaggtatcttctttccaacgcgagatggtggctggaagaatacaagtttgatgggttcagatttgatggtgtgacttccatgatgtacactcatcatggactgcaggtcgaatttactgggaattacaatgagtactttggatattctactgatgttgacgctgtggtctatctaatgctggtgaacgatttgattcatgggctataccctgaggctattgttgtcggcgaagatgttagcgggatgccagctttttgcgttcctgtcgaagacggtggtgtgggttttgactaccgtctacacatggcagtggcagataaatggattgagcttcttaagaagagagacgaggactggcaggttggtgatataactttcacgcttaccaacaggaggtggggagaaaaatgtgtcgtctatgcagagagtcatgatcaagcccttgttggagacaaaacgatagctttctggctaatggataaggacatgtatgatttcatggccgttgatagacaggccactccgcgtgtagaccgtgggattgctttacacaaaatgatccgtctcattacgatgggattgggtggagaaggatacctcaatttcatgggaaacgaatttggacacccagaatggatcgacttcccaaggaccgaccagcaccttcctgatggcagagtcatcgctgggaataatggtagttatgataaatcccgacgtaggtttgatctgggagatgcagaatatcttagataccatggactacaagagtttgatcgagcaatgcaaaatctagaggagacgtatggtttcatgacttcagagcaccagtacatatcccccaaggatgaaggagacagagtcattgtattcgagagaggtaacttgctcttcgtcttcaacttccactggaccaacagttactctgactaccgtatcggttgctctgttcccggaaagtacaaaatcgttttggactctgataactctttatttggaggcttcaaccggctagatgactccgcggagtttttcacctctgatggaaggcacgacgataggccttgctccttcatggtgtatgcaccgtgcagaaccgctgtagtttacgctgcagtagatgatgatgatgatgatgaacgttcttctcttgtccccataggcctgttacccgaagatgtttaggagcaaagacagttgtccgagtttacctactgtaagcttctttgtactacaaaaatttactcgttgatcttcttctcctttagttttgcttgcagcggccgcg

SEQ ID NO: 76596 - protein, 854 aa, Arabidopsis thaliana
  peptide (1)..(854): Ceres Seq. ID no. 7108557
RARVRFPHLPSIKKKNSSLHSFNEDLRRSNAVSFSLRKDSRSSGKVFARKPSYDSDSSSLATTASEKLRGHQSDSSSSASDQVQSRDTVSDDTQVLGNVDVQKTEEAQETETLDQTSALSTSGSISYKEDFAKMSHSVDQEVGQRKIPPPGDGKRIYDIDPMLNSHRNHLDYRYGQYRKLREEIDKNEGGLEAFSRGYEIFGFTRSATGITYREWAPGAKAASLIGDFNNWNAKSDVMARNDFGVWEIFLPNNADGSPAIPHGSRVKIRMDTPSGIKDSIPAWIKYSVQPPGEIPYNGVYYDPPEEDKYAFKHPRPKKPTSLRIYESHVGMSSTEPKINTYANFRDDVLPRIKKLGYNAVQIMAIQEHAYYASFGYHVTNFFAPSSRFGTPDDLKSLIDKAHELGLVVLMDIVHSHASKNTLDGLDMFDGTDGQYFHSGSRGYHWMWDTRLFNYGSWEVLRYLLSNARWWLEEYKFDGFRFDGVTSMMYTHHGLQVEFTGNYNEYFGYSTDVDAVVYLMLVNDLIHGLYPEAIVVGEDVSGMPAFCVPVEDGGVGFDYRLHMAVADKWIELLKKRDEDWQVGDITFTLTNRRWGEKCVVYAESHDQALVGDKTIAFWLMDKDMYDFMAVDRQATPRVDRGIALHKMIRLITMGLGGEGYLNFMGNEFGHPEWIDFPRTDQHLPDGRVIAGNNGSYDKSRRRFDLGDAEYLRYHGLQEFDRAMQNLEETYGFMTSEHQYISPKDEGDRVIVFERGNLLFVFNFHWTNSYSDYRIGCSVPGKYKIVLDSDNSLFGGFNRLDDSAEFFTSDGRHDDRPCSFMVYAPCRTAVVYAAVDDDDDDERSSLVPIGLLPEDV

SEQ ID NO: 76597 - protein, 721 aa, Arabidopsis thaliana
  peptide (1)..(721): Ceres Seq. ID no. 7108558
MSHSVDQEVGQRKIPPPGDGKRIYDIDPMLNSHRNHLDYRYGQYRKLREEIDKNEGGLEAFSRGYEIFGFTRSATGITYREWAPGAKAASLIGDFNNWNAKSDVMARNDFGVWEIFLPNNADGSPAIPHGSRVKIRMDTPSGIKDSIPAWIKYSVQPPGEIPYNGVYYDPPEEDKYAFKHPRPKKPTSLRIYESHVGMSSTEPKINTYANFRDDVLPRIKKLGYNAVQIMAIQEHAYYASFGYHVTNFFAPSSRFGTPDDLKSLIDKAHELGLVVLMDIVHSHASKNTLDGLDMFDGTDGQYFHSGSRGYHWMWDTRLFNYGSWEVLRYLLSNARWWLEEYKFDGFRFDGVTSMMYTHHGLQVEFTGNYNEYFGYSTDVDAVVYLMLVNDLIHGLYPEAIVVGEDVSGMPAFCVPVEDGGVGFDYRLHMAVADKWIELLKKRDEDWQVGDITFTLTNRRWGEKCVVYAESHDQALVGDKTIAFWLMDKDMYDFMAVDRQATPRVDRGIALHKMIRLITMGLGGEGYLNFMGNEFGHPEWIDFPRTDQHLPDGRVIAGNNGSYDKSRRRFDLGDAEYLRYHGLQEFDRAMQNLEETYGFMTSEHQYISPKDEGDRVIVFERGNLLFVFNFHWTNSYSDYRIGCSVPGKYKIVLDSDNSLFGGFNRLDDSAEFFTSDGRHDDRPCSFMVYAPCRTAVVYAAVDDDDDDERSSLVPIGLLPEDV

SEQ ID NO: 76598 - protein, 693 aa, Arabidopsis thaliana
  peptide (1)..(693): Ceres Seq. ID no. 7108559
MLNSHRNHLDYRYGQYRKLREEIDKNEGGLEAFSRGYEIFGFTRSATGITYREWAPGAKAASLIGDFNNWNAKSDVMARNDFGVWEIFLPNNADGSPAIPHGSRVKIRMDTPSGIKDSIPAWIKYSVQPPGEIPYNGVYYDPPEEDKYAFKHPRPKKPTSLRIYESHVGMSSTEPKINTYANFRDDVLPRIKKLGYNAVQIMAIQEHAYYASFGYHVTNFFAPSSRFGTPDDLKSLIDKAHELGLVVLMDIVHSHASKNTLDGLDMFDGTDGQYFHSGSRGYHWMWDTRLFNYGSWEVLRYLLSNARWWLEEYKFDGFRFDGVTSMMYTHHGLQVEFTGNYNEYFGYSTDVDAVVYLMLVNDLIHGLYPEAIVVGEDVSGMPAFCVPVEDGGVGFDYRLHMAVADKWIELLKKRDEDWQVGDITFTLTNRRWGEKCVVYAESHDQALVGDKTIAFWLMDKDMYDFMAVDRQATPRVDRGIALHKMIRLITMGLGGEGYLNFMGNEFGHPEWIDFPRTDQHLPDGRVIAGNNGSYDKSRRRFDLGDAEYLRYHGLQEFDRAMQNLEETYGFMTSEHQYISPKDEGDRVIVFERGNLLFVFNFHWTNSYSDYRIGCSVPGKYKIVLDSDNSLFGGFNRLDDSAEFFTSDGRHDDRPCSFMVYAPCRTAVVYAAVDDDDDDERSSLVPIGLLPEDV

SEQ ID NO: 76599 - DNA, 1383 bp, Arabidopsis thaliana
  misc_feature (1)..(1383): Ceres Seq. ID no. 7108560
  misc_feature (1)..(1383): Ortholog of  Ceres SEQ ID NO 12556910 as cited in SEQ ID NO 39
  misc_feature (1)..(1383): Ortholog of  Ceres SEQ ID NO 14305967 as cited in SEQ ID NO 1343
ggtttttttttttttttttttggatccaagataatagtttcagatgcaacagatacaatgttgaaacagagacattgtataataataacacgatattacaggaaaacatacagagagaaagctggttttatttgaaaatgaatctattcgcttcctgcgatcttcttcttcaaggattcaatatcctcagccaattcctttctgcttgacttgaagagaaggtatctgtagacaaaccatccagtgtacccgagaccgacaagttccataactttcggaagcagaggaacagagttgatggcaccaacaacaatggaagataaccaaacagcaacaatggtctcctcctccatatataagtacagtagatttgttctcaagtaccatcccaacttttccttcaaatctgtgatgagttcgttggtatcaatggacgaggtctcttctgaagaagctcttgtcttcaacaattcaactttttgcaatccattccctgaaaacaagcttcaacggaacggtgaaagaggatcggccaaaggagcgaggaggaagataagggacggcggagcaacgggtggatacggcgggaacacgtggaaccatcacggccatagaggacgaagctgctactgatatcgccattgaagcacgccgagaacttcttcttcttcttctttgtctgcctacttcttctctctttctcatctaaaccaaaaaatggcagatcagctcaccgatgatcagatctctgagttcaaggaagcttttagccttttcgacaaagacggagatggttgcatcacaacgaaagagctaggaacagtgatgagatcattaggtcaaaatccaacagaagcagagttacaagatatgataaacgaagtagatgctgatggtaacggaaccatagacttccctgagtttctgaacctaatggctaggaagatgaaggacactgactctgaagaagagctcaaagaagctttcagggttttcgataaggaccagaacggtttcatctcggcagctgagttaagacatgtaatgacaaatcttggtgagaagttaactgatgaagaagttgatgagatgatcaaagaagctgatgttgatggagatggtcagatcaattatgaagagtttgtcaaagttatgatggcaaagtgaggaaactattctcatatcttttctctctttttctttctttctttttttgaattgaacaactctgattattgctttattctatgtttgactgttcattattatgcattcgtcccaaatttcatgttatgaactattttgtgactttgggttaaattatttgtttggaagtttttagtttattttatattatgtgaagtaccattgtaatggtcgttg

SEQ ID NO: 76600 - protein, 149 aa, Arabidopsis thaliana; identical to SEQ ID NO: 29417
  peptide (1)..(149): Ceres Seq. ID no. 7108561

SEQ ID NO: 76601 - protein, 113 aa, Arabidopsis thaliana; identical to SEQ ID NO: 29418
  peptide (1)..(113): Ceres Seq. ID no. 7108562

SEQ ID NO: 76602 - protein, 111 aa, Arabidopsis thaliana
  peptide (1)..(111): Ceres Seq. ID no. 7108563
MAPTTMEDNQTATMVSSSIYKYSRFVLKYHPNFSFKSVMSSLVSMDEVSSEEALVFNNSTFCNPFPENKLQRNGERGSAKGARRKIRDGGATGGYGGNTWNHHGHRGRSCY

SEQ ID NO: 76603 - DNA, 1421 bp, Arabidopsis thaliana
  misc_feature (1)..(1421): Ceres Seq. ID no. 7108564
  misc_feature (1)..(1421): Ortholog of  Ceres SEQ ID NO 14315346 as cited in SEQ ID NO 53970
  misc_feature (1)..(1421): Ortholog of  Ceres SEQ ID NO 13594128 as cited in SEQ ID NO 58608
  misc_feature (1)..(1421): Ortholog of  Ceres SEQ ID NO 14309682 as cited in SEQ ID NO 58908
  misc_feature (1)..(1421): Ortholog of  Ceres SEQ ID NO 15176122 as cited in SEQ ID NO 62462
  misc_feature (1)..(1421): Ortholog of  Ceres SEQ ID NO 12624849 as cited in SEQ ID NO 62773
ccacgcgtccgctctcagttcctacgcgaagttttcaacagattcgccggagaatcttcgaatcaacggcggagaaatggctctatcacgcctctcatcacgatccaacatcatcactcgtcccttctccgccgccttcagccgattaatctcaacggacacaactccgatcacaatcgagacttcgcttcctttcacagctcacttatgtgatccaccgtcacgctccgtcgaatcatcgagtcaagagcttctcgatttcttcagaaccatggcgttgatgcgacgtatggaaatcgcagccgattcgctttacaaagcgaacgtaatccgagggttttgtcatctctacgacggccaagaagctgtagctataggcatggaagctgcgattacaaagaaagacgcgattattactgcttatcgtgatcactgtattttcttaggtcgtggtggttcgcttcatgaggttttctcagagcttatgggaagacaagctggttgttctaaagggaaaggtggatctatgcacttctataagaaggaatcgtcgttttacggtggtcatgggattgttggtgctcaggttccattaggttgtggtattgcttttgctcagaagtataacaaggaagaggctgtcacatttgctttgtatggtgatggtgctgcgaatcagggacagttgtttgaagctttgaatatttctgctctttgggatttgcctgcaattttggtctgcgagaacaatcactatggaatgggaactgctgaatggagagccgctaagagtccatcttactacaagcgtggtgattatgttcctggactcaaggtagatggtatggatgcatttgctgtcaaacaagcttgcaaatttgctaagcagcatgcgttggagaaggggccaataattcttgagatggacacatacaggtaccacggtcactccatgtctgatcctgggagcacataccgtacccgagatgagatatctggtgtgaggcaggaacgggatccaattgagagaataaagaagctggtactatctcatgacctagcaaccgagaaagagcttaaggatatggagaaggaaattagaaaagaagtagatgacgccattgccaaagctaaggattgcccaatgccagagccttctgagctctttaccaatgtgtatgtgaagggatttggcaccgagtcatttggacctgacagaaaagaagtcaaagcttcccttccatgatcatggagctcttgttcgttaaactgccacgtgtcatgagaaagttggctgatagagaaatctatgaatatgaataaagatctgattgtatactctctctctccccccccttctgaactttaatctctctgtatctttgtttacaaacataaggagaaacaatgttattcttgtg

SEQ ID NO: 76604 - protein, 414 aa, Arabidopsis thaliana
  peptide (1)..(414): Ceres Seq. ID no. 7108565
HASALSSYAKFSTDSPENLRINGGEMALSRLSSRSNIITRPFSAAFSRLISTDTTPITIETSLPFTAHLCDPPSRSVESSSQELLDFFRTMALMRRMEIAADSLYKANVIRGFCHLYDGQEAVAIGMEAAITKKDAIITAYRDHCIFLGRGGSLHEVFSELMGRQAGCSKGKGGSMHFYKKESSFYGGHGIVGAQVPLGCGIAFAQKYNKEEAVTFALYGDGAANQGQLFEALNISALWDLPAILVCENNHYGMGTAEWRAAKSPSYYKRGDYVPGLKVDGMDAFAVKQACKFAKQHALEKGPIILEMDTYRYHGHSMSDPGSTYRTRDEISGVRQERDPIERIKKLVLSHDLATEKELKDMEKEIRKEVDDAIAKAKDCPMPEPSELFTNVYVKGFGTESFGPDRKEVKASLP

SEQ ID NO: 76605 - protein, 389 aa, Arabidopsis thaliana
  peptide (1)..(389): Ceres Seq. ID no. 7108566
MALSRLSSRSNIITRPFSAAFSRLISTDTTPITIETSLPFTAHLCDPPSRSVESSSQELLDFFRTMALMRRMEIAADSLYKANVIRGFCHLYDGQEAVAIGMEAAITKKDAIITAYRDHCIFLGRGGSLHEVFSELMGRQAGCSKGKGGSMHFYKKESSFYGGHGIVGAQVPLGCGIAFAQKYNKEEAVTFALYGDGAANQGQLFEALNISALWDLPAILVCENNHYGMGTAEWRAAKSPSYYKRGDYVPGLKVDGMDAFAVKQACKFAKQHALEKGPIILEMDTYRYHGHSMSDPGSTYRTRDEISGVRQERDPIERIKKLVLSHDLATEKELKDMEKEIRKEVDDAIAKAKDCPMPEPSELFTNVYVKGFGTESFGPDRKEVKASLP

SEQ ID NO: 76606 - protein, 324 aa, Arabidopsis thaliana
  peptide (1)..(324): Ceres Seq. ID no. 7108567
MALMRRMEIAADSLYKANVIRGFCHLYDGQEAVAIGMEAAITKKDAIITAYRDHCIFLGRGGSLHEVFSELMGRQAGCSKGKGGSMHFYKKESSFYGGHGIVGAQVPLGCGIAFAQKYNKEEAVTFALYGDGAANQGQLFEALNISALWDLPAILVCENNHYGMGTAEWRAAKSPSYYKRGDYVPGLKVDGMDAFAVKQACKFAKQHALEKGPIILEMDTYRYHGHSMSDPGSTYRTRDEISGVRQERDPIERIKKLVLSHDLATEKELKDMEKEIRKEVDDAIAKAKDCPMPEPSELFTNVYVKGFGTESFGPDRKEVKASLP

SEQ ID NO: 76607 - DNA, 1955 bp, Arabidopsis thaliana
  misc_feature (1)..(1955): Ceres Seq. ID no. 7108584
  misc_feature (1)..(1955): Ortholog of  Ceres SEQ ID NO 14303351 as cited in SEQ ID NO 54864
  misc_feature (1)..(1955): Ortholog of  Ceres SEQ ID NO 13597260 as cited in SEQ ID NO 63885
  misc_feature (1)..(1955): Ortholog of  Ceres SEQ ID NO 15180208 as cited in SEQ ID NO 0
agtgtgagtaatttagaaagagagagtgaagatacattatagaaagaagagaagcagaaaccaaaaaaagaaaccatgaagtctttttgtgataatgatgataataatcatagcaacacgactaatttgttagggttctcattgtcttcaaatatgatgaaaatgggaggtagaggaggtagagaagctatttactcatcttcaacttgttcagctgcaacttcttcttcttctgttccacctcaacttgttgttggtgacaacactagcaactttggtgtttgctatggatctaacccaaatggaggaatctattctcacatgtctgtgatgccactcagatctgatggttctctttgcttaatggaagctctcaacagatcttctcactcgaatcaccatcaagattcatctccaaaggtggaggatttctttgggacccatcacaacaacacaagtcacaaagaagccatggatcttagcttagatagtttattctacaacaccactcatgagcccaacacgactacaaactttcaagagttctttagcttccctcaaaccagaaaccatgaggaagaaactagaaattacgggaatgaccctagtttgacacatggagggtcttttaatgtaggggtatatggggaatttcaacagtcactgagcttatccatgagccctgggtcacaatctagctgcatcactggctctcaccaccaccaacaaaaccaaaaccaaaaccaccaaagccaaaaccaccagcagatctctgaagctcttgtggagacaagcgttgggtttgagacgacgacaatggcggctgcgaagaagaagaggggacaagaggatgttgtagttgttggtcagaaacagattgttcatagaaaatctatcgatacttttggacaacgaacttctcaataccgaggcgttacaagacatagatggactggtagatatgaagctcatctatgggacaatagtttcaagaaggaaggtcacagtagaaaaggaagacaagtttatctgggaggttatgatatggaggagaaagctgctcgagcatatgatcttgctgcactcaagtactggggtccctctactcacaccaatttctctgcggagaattatcagaaagagattgaagacatgaagaacatgactagacaagaatatgttgcacatttgagaaggaagagcagtggtttctctaggggtgcttccatctatagaggagtcacaagacatcaccagcatggaaggtggcaagcacggattggtagagtcgctggaaacaaagatctctaccttggaacttttggaacccaagaagaagctgcagaagcttacgatgtagcagcaattaagttccgtggcacaaatgctgtgactaactttgatatcacgaggtacgatgttgatcgtatcatgtctagtaacacactcttgtctggagagttagcgcgaaggaacaacaacagcattgtcgtcaggaatactgaagaccaaaccgctctaaatgctgttgtggaaggtggttccaacaaagaagtcagtactcccgagagactcttgagttttccggcgattttcgcgttgcctcaagttaatcaaaagatgttcggatcaaatatgggcggaaatatgagtccttggacatcaaaccctaatgctgagcttaagaccgtcgctcttactttgcctcagatgccggttttcgctgcttgggctgattcttgatcaacttcaatgactaactctggttttcttggtttagttgctaagtgttttggtttatctccggttttatccggtttgaactacaattcggtttagtttcgtcggtataaatagtatttgcttaggagcggtatatgtttcttttgagtagtattcatgtgaaacagaatgaatctctctataacatattattttaatgaatctcctttgct

SEQ ID NO: 76608 - protein, 555 aa, Arabidopsis thaliana
  peptide (1)..(555): Ceres Seq. ID no. 7108585
MKSFCDNDDNNHSNTTNLLGFSLSSNMMKMGGRGGREAIYSSSTCSAATSSSSVPPQLVVGDNTSNFGVCYGSNPNGGIYSHMSVMPLRSDGSLCLMEALNRSSHSNHHQDSSPKVEDFFGTHHNNTSHKEAMDLSLDSLFYNTTHEPNTTTNFQEFFSFPQTRNHEEETRNYGNDPSLTHGGSFNVGVYGEFQQSLSLSMSPGSQSSCITGSHHHQQNQNQNHQSQNHQQISEALVETSVGFETTTMAAAKKKRGQEDVVVVGQKQIVHRKSIDTFGQRTSQYRGVTRHRWTGRYEAHLWDNSFKKEGHSRKGRQVYLGGYDMEEKAARAYDLAALKYWGPSTHTNFSAENYQKEIEDMKNMTRQEYVAHLRRKSSGFSRGASIYRGVTRHHQHGRWQARIGRVAGNKDLYLGTFGTQEEAAEAYDVAAIKFRGTNAVTNFDITRYDVDRIMSSNTLLSGELARRNNNSIVVRNTEDQTALNAVVEGGSNKEVSTPERLLSFPAIFALPQVNQKMFGSNMGGNMSPWTSNPNAELKTVALTLPQMPVFAAWADS

SEQ ID NO: 76609 - protein, 529 aa, Arabidopsis thaliana
  peptide (1)..(529): Ceres Seq. ID no. 7108586
MMKMGGRGGREAIYSSSTCSAATSSSSVPPQLVVGDNTSNFGVCYGSNPNGGIYSHMSVMPLRSDGSLCLMEALNRSSHSNHHQDSSPKVEDFFGTHHNNTSHKEAMDLSLDSLFYNTTHEPNTTTNFQEFFSFPQTRNHEEETRNYGNDPSLTHGGSFNVGVYGEFQQSLSLSMSPGSQSSCITGSHHHQQNQNQNHQSQNHQQISEALVETSVGFETTTMAAAKKKRGQEDVVVVGQKQIVHRKSIDTFGQRTSQYRGVTRHRWTGRYEAHLWDNSFKKEGHSRKGRQVYLGGYDMEEKAARAYDLAALKYWGPSTHTNFSAENYQKEIEDMKNMTRQEYVAHLRRKSSGFSRGASIYRGVTRHHQHGRWQARIGRVAGNKDLYLGTFGTQEEAAEAYDVAAIKFRGTNAVTNFDITRYDVDRIMSSNTLLSGELARRNNNSIVVRNTEDQTALNAVVEGGSNKEVSTPERLLSFPAIFALPQVNQKMFGSNMGGNMSPWTSNPNAELKTVALTLPQMPVFAAWADS

SEQ ID NO: 76610 - protein, 528 aa, Arabidopsis thaliana
  peptide (1)..(528): Ceres Seq. ID no. 7108587
MKMGGRGGREAIYSSSTCSAATSSSSVPPQLVVGDNTSNFGVCYGSNPNGGIYSHMSVMPLRSDGSLCLMEALNRSSHSNHHQDSSPKVEDFFGTHHNNTSHKEAMDLSLDSLFYNTTHEPNTTTNFQEFFSFPQTRNHEEETRNYGNDPSLTHGGSFNVGVYGEFQQSLSLSMSPGSQSSCITGSHHHQQNQNQNHQSQNHQQISEALVETSVGFETTTMAAAKKKRGQEDVVVVGQKQIVHRKSIDTFGQRTSQYRGVTRHRWTGRYEAHLWDNSFKKEGHSRKGRQVYLGGYDMEEKAARAYDLAALKYWGPSTHTNFSAENYQKEIEDMKNMTRQEYVAHLRRKSSGFSRGASIYRGVTRHHQHGRWQARIGRVAGNKDLYLGTFGTQEEAAEAYDVAAIKFRGTNAVTNFDITRYDVDRIMSSNTLLSGELARRNNNSIVVRNTEDQTALNAVVEGGSNKEVSTPERLLSFPAIFALPQVNQKMFGSNMGGNMSPWTSNPNAELKTVALTLPQMPVFAAWADS

SEQ ID NO: 76611 - DNA, 913 bp, Arabidopsis thaliana
  misc_feature (1)..(913): Ceres Seq. ID no. 7108596
  misc_feature (1)..(913): Ortholog of  Ceres SEQ ID NO 12557497 as cited in SEQ ID NO 43
  misc_feature (1)..(913): Ortholog of  Ceres SEQ ID NO 15177850 as cited in SEQ ID NO 51765
  misc_feature (1)..(913): Ortholog of  Ceres SEQ ID NO 14303417 as cited in SEQ ID NO 54923
  misc_feature (1)..(913): Ortholog of  Ceres SEQ ID NO 15169084 as cited in SEQ ID NO 59115
  misc_feature (1)..(913): Ortholog of  Ceres SEQ ID NO 12635723 as cited in SEQ ID NO 0
cctgcgccggcgttccagccgagcgggcaagaaacaatgccaccaaacacctctcgtccacatctttctcctttggtggcaaacacaacgacagatagagagaaacgatggcgtcgaactcgcttatgagctgtggcatagccgccgtgtacccttcgcttctctcttcttccaagtctaaattcgtatccgccggagttccactcccaaacgccgggaatgttggtcgtatcagaatggctgctcactggatgcctggcgagccacgaccagcttaccttgacggttctgctcctggtgactttgggtttgacccacttggacttggagaagttccagcgaaccttgagagatacaaagagtcagagctcatccactgtagatgggctatgctcgctgttcctgggattttggtaccagaagcattaggatatggaaactgggttaaggctcaggaatgggcagcactaccagggggtcaagccacttacttgggaaacccagtcccgtggggtactttgcccacaatcttggccattgagttcttagccattgcatttgttgagcaccagagaagtatggagaaagaccctgagaagaagaagtacccgggaggcgcatttgaccctcttggatactcgaaggaccccaagaagctcgaggaattgaaagttaaagagatcaagaacgggcggcttgcgctgttggcgtttgtaggattctgtgtgcaacagtcggcttacccggggacaggaccattggagaacttggcaactcacttggcggatccatggcacaacaacattggcgatattgttatccctttcaactaatgaatgtaaaaatagaaatatgtgtaccttatgagctttatgtgtatcaaaaacactgtgtaatgaaagacagatttgtg

SEQ ID NO: 76612 - protein, 241 aa, Arabidopsis thaliana; identical to SEQ ID NO: 35134
  peptide (1)..(241): Ceres Seq. ID no. 7108597

SEQ ID NO: 76613 - protein, 235 aa, Arabidopsis thaliana; identical to SEQ ID NO: 35135
  peptide (1)..(235): Ceres Seq. ID no. 7108598

SEQ ID NO: 76614 - protein, 198 aa, Arabidopsis thaliana; identical to SEQ ID NO: 35136
  peptide (1)..(198): Ceres Seq. ID no. 7108599

SEQ ID NO: 76615 - DNA, 1153 bp, Arabidopsis thaliana
  misc_feature (1)..(1153): Ceres Seq. ID no. 7108604
  misc_feature (1)..(1153): Ortholog of  Ceres SEQ ID NO 14313302 as cited in SEQ ID NO 51621
gagaagttcatggaggttctgattccggtcgatgagatgacagaaggtggagaatattctccggcgatgatgtcagcagagccattcttgaccatgaagaagatgaagaagagcaaccacaacaagaacaatcagagaaggtttagcgacgagcagatcaagtcactggagatgatgtttgagtctgagacaaggcttgagccaaggaagaaggttcaattagctagagagctagggttgcagccgaggcaagtggctatatggtttcagaacaagagggctcgttggaaatccaagcagctcgagactgagtacaacattctcagacaaaactacgacaacttggcttctcagttcgagtccttaaagaaagaaaaacaagctttagtctctgagttgcagaggctaaaagaggcgacgcaaaagaagacacaggaggaggaaaggcagtgtagtggagatcaagcggtggttgctctaagcagcacacatcatgaatcagaaaacgaagagaaccggaggcgtaaaccggaagaggttagaccggagatggagatgaaagatgataggggtcatcatggggttatgtgtgatcatcatgattatgaagatgatgataatggttatagtaacaacatcaagagagagtgttttggtgggtttgaggaagaaccagatcacttaatgaacattgttgaaccagctgatagttgtttgacatcatctgatgattggagaggtttcaaatcagatactactactctcttggaccaatcctgcaacaattacccttggcgggatttttggtcatgaaaacaataaactctaaacaagaagatgaaacagattgagactaaagattggatatatacatattcaaatcgaaatttaccggtctacatcgcatgaaccgagccacggatatagagatattcggtccagcaaatgactcgtttctcagcgagaattttgcaggattttgagctgaaattgtatggttttgtctgtataaatgatgtgtttagaaagacgtatattctcagttcgtgtttgtaattctgtttttaagtagtaagtactcgtcatgctttgtagctaagtagtaagtttaagactaaatttggatgaataaaaatcaaaagcaggagaaatc

SEQ ID NO: 76616 - protein, 270 aa, Arabidopsis thaliana
  peptide (1)..(270): Ceres Seq. ID no. 7108605
EKFMEVLIPVDEMTEGGEYSPAMMSAEPFLTMKKMKKSNHNKNNQRRFSDEQIKSLEMMFESETRLEPRKKVQLARELGLQPRQVAIWFQNKRARWKSKQLETEYNILRQNYDNLASQFESLKKEKQALVSELQRLKEATQKKTQEEERQCSGDQAVVALSSTHHESENEENRRRKPEEVRPEMEMKDDRGHHGVMCDHHDYEDDDNGYSNNIKRECFGGFEEEPDHLMNIVEPADSCLTSSDDWRGFKSDTTTLLDQSCNNYPWRDFWS

SEQ ID NO: 76617 - protein, 267 aa, Arabidopsis thaliana
  peptide (1)..(267): Ceres Seq. ID no. 7108606
MEVLIPVDEMTEGGEYSPAMMSAEPFLTMKKMKKSNHNKNNQRRFSDEQIKSLEMMFESETRLEPRKKVQLARELGLQPRQVAIWFQNKRARWKSKQLETEYNILRQNYDNLASQFESLKKEKQALVSELQRLKEATQKKTQEEERQCSGDQAVVALSSTHHESENEENRRRKPEEVRPEMEMKDDRGHHGVMCDHHDYEDDDNGYSNNIKRECFGGFEEEPDHLMNIVEPADSCLTSSDDWRGFKSDTTTLLDQSCNNYPWRDFWS

SEQ ID NO: 76618 - protein, 258 aa, Arabidopsis thaliana
  peptide (1)..(258): Ceres Seq. ID no. 7108607
MTEGGEYSPAMMSAEPFLTMKKMKKSNHNKNNQRRFSDEQIKSLEMMFESETRLEPRKKVQLARELGLQPRQVAIWFQNKRARWKSKQLETEYNILRQNYDNLASQFESLKKEKQALVSELQRLKEATQKKTQEEERQCSGDQAVVALSSTHHESENEENRRRKPEEVRPEMEMKDDRGHHGVMCDHHDYEDDDNGYSNNIKRECFGGFEEEPDHLMNIVEPADSCLTSSDDWRGFKSDTTTLLDQSCNNYPWRDFWS

SEQ ID NO: 76619 - DNA, 768 bp, Arabidopsis thaliana
  misc_feature (1)..(768): Ceres Seq. ID no. 7108616
  misc_feature (1)..(768): Ortholog of  Ceres SEQ ID NO 12610031 as cited in SEQ ID NO 55811
  misc_feature (1)..(768): Ortholog of  Ceres SEQ ID NO 12610896 as cited in SEQ ID NO 55861
  misc_feature (1)..(768): Ortholog of  Ceres SEQ ID NO 12635952 as cited in SEQ ID NO 0
actagtctcttatctttcagcaactactctcatactttccgactaaaaaaatggttaccgtcaagctctacggcatggcctactcgacctgcactaagcgtgtatacaccaccgccaaggaaatcggtgtcgatgtcaagatcgttcctgttgatcttatgaaaggcgagcacaaggagcccgcgtaccttgacaactaccacccattcggtgttatccccgtccttgaggacgaagatggaacaaagatctatgaatctcgcgctatttcccgttacttggtcgccaagtatggaaaaggttcttccttgcttcccagcccgagcgaccccaaggcatatggactgtttgaacaagcagccagcgtcgagtactcgagctttgaccctccggcttcctcccttgcctacgagcgggtctttgcaggaatgaggggtttgaaaaccaacgaagaattggctaaaaaatacgtcgacacgttgaatgcgaagatggatggctacgagcgcattttgtccaagcaaaagtatctcgctggaaacgatttcaccctcgccgacttgttccatttgccctacggtgccatggtagctcagctcgagcctaccgtcctggattccaaaccccatgtcaaggcgtggtgggctgcatcccttcgcgtgattcctggaaggctgctcaggaactcaagtaaggagttcatgtgatgccaagtgtgtgtagtagctacgattgaaagtgaaatatacaagcaatacttacgaagcg

SEQ ID NO: 76620 - protein, 218 aa, Arabidopsis thaliana
  peptide (1)..(218): Ceres Seq. ID no. 7108617
MVTVKLYGMAYSTCTKRVYTTAKEIGVDVKIVPVDLMKGEHKEPAYLDNYHPFGVIPVLEDEDGTKIYESRAISRYLVAKYGKGSSLLPSPSDPKAYGLFEQAASVEYSSFDPPASSLAYERVFAGMRGLKTNEELAKKYVDTLNAKMDGYERILSKQKYLAGNDFTLADLFHLPYGAMVAQLEPTVLDSKPHVKAWWAASLRVIPGRLLRNSSKEFM

SEQ ID NO: 76621 - protein, 210 aa, Arabidopsis thaliana
  peptide (1)..(210): Ceres Seq. ID no. 7108618
MAYSTCTKRVYTTAKEIGVDVKIVPVDLMKGEHKEPAYLDNYHPFGVIPVLEDEDGTKIYESRAISRYLVAKYGKGSSLLPSPSDPKAYGLFEQAASVEYSSFDPPASSLAYERVFAGMRGLKTNEELAKKYVDTLNAKMDGYERILSKQKYLAGNDFTLADLFHLPYGAMVAQLEPTVLDSKPHVKAWWAASLRVIPGRLLRNSSKEFM

SEQ ID NO: 76622 - protein, 182 aa, Arabidopsis thaliana
  peptide (1)..(182): Ceres Seq. ID no. 7108619
MKGEHKEPAYLDNYHPFGVIPVLEDEDGTKIYESRAISRYLVAKYGKGSSLLPSPSDPKAYGLFEQAASVEYSSFDPPASSLAYERVFAGMRGLKTNEELAKKYVDTLNAKMDGYERILSKQKYLAGNDFTLADLFHLPYGAMVAQLEPTVLDSKPHVKAWWAASLRVIPGRLLRNSSKEFM

SEQ ID NO: 76623 - DNA, 1106 bp, Arabidopsis thaliana
  misc_feature (1)..(1106): Ceres Seq. ID no. 7108656
  misc_feature (1)..(1106): Ortholog of  Ceres SEQ ID NO 13593831 as cited in SEQ ID NO 53828
ctggcttgaaaaaccagagctttacggtttctctctacagagatcgaagatatggaaggcaaggaagaagacgttagagttggagctaacaagttcccggagagacaaccaatcggaacatcagctcagagtgacaaggactacaaggaaccaccaccagctccgtttttcgaacctggtgagctttcttcatggtctttttggagagctgggatcgctgagttcatcgctacttttctctttctctacatcactgtcttgactgttatgggagtgaaaaggtcaccgaacatgtgtgcttccgtcggaatccaaggaatcgcttgggctttcggtggtatgatatttgccttagtctactgtaccgctggtatctccggtggacacatcaacccagcggttacttttggtctgttcttagcccggaagctgtcgcttactagagctctgtactacatagtgatgcagtgcttgggagctatctgtggtgctggagtggttaaagggttccagcctaagcaataccaggctctaggaggaggagctaacactgtggcacatggttacaccaagggaagtggtcttggtgctgagatcattggcacattcgttcttgtatacacagtcttctcagcaactgacgccaagagaaatgctcgtgactctcatgtccctattcttgcaccactcccaatcgggtttgcggttttcttggttcacttggcaaccatcccaatcactgccacaggcatcaacccagctagaagccttggagctgcaatcatctacaacaaagaccattcctgggatgaccactgggtgttttgggttggccccttcattggagctgcacttgctgctctttaccatgtggttgtcatcagagccatccccttcaagtccagaagctaagtaaaaacaagacatcaagtcctctggtttctggccttgtccttagttagttgcttctatagttctattgttgatctactacatgtatgtgtgcaatgtgtttatctatgtgccctcttaatgcaatatttgtaaacaaggaagaagtcaaaggagaactatttcgaaattatgatgtttaacatgtttattag

SEQ ID NO: 76624 - protein, 286 aa, Arabidopsis thaliana
  peptide (1)..(286): Ceres Seq. ID no. 7108657
MEGKEEDVRVGANKFPERQPIGTSAQSDKDYKEPPPAPFFEPGELSSWSFWRAGIAEFIATFLFLYITVLTVMGVKRSPNMCASVGIQGIAWAFGGMIFALVYCTAGISGGHINPAVTFGLFLARKLSLTRALYYIVMQCLGAICGAGVVKGFQPKQYQALGGGANTVAHGYTKGSGLGAEIIGTFVLVYTVFSATDAKRNARDSHVPILAPLPIGFAVFLVHLATIPITATGINPARSLGAAIIYNKDHSWDDHWVFWVGPFIGAALAALYHVVVIRAIPFKSRS

SEQ ID NO: 76625 - protein, 214 aa, Arabidopsis thaliana
  peptide (1)..(214): Ceres Seq. ID no. 7108658
MGVKRSPNMCASVGIQGIAWAFGGMIFALVYCTAGISGGHINPAVTFGLFLARKLSLTRALYYIVMQCLGAICGAGVVKGFQPKQYQALGGGANTVAHGYTKGSGLGAEIIGTFVLVYTVFSATDAKRNARDSHVPILAPLPIGFAVFLVHLATIPITATGINPARSLGAAIIYNKDHSWDDHWVFWVGPFIGAALAALYHVVVIRAIPFKSRS

SEQ ID NO: 76626 - protein, 206 aa, Arabidopsis thaliana
  peptide (1)..(206): Ceres Seq. ID no. 7108659
MCASVGIQGIAWAFGGMIFALVYCTAGISGGHINPAVTFGLFLARKLSLTRALYYIVMQCLGAICGAGVVKGFQPKQYQALGGGANTVAHGYTKGSGLGAEIIGTFVLVYTVFSATDAKRNARDSHVPILAPLPIGFAVFLVHLATIPITATGINPARSLGAAIIYNKDHSWDDHWVFWVGPFIGAALAALYHVVVIRAIPFKSRS

SEQ ID NO: 76627 - DNA, 1317 bp, Arabidopsis thaliana
  misc_feature (1)..(1317): Ceres Seq. ID no. 7108668
  misc_feature (1)..(1317): Ortholog of  Ceres SEQ ID NO 13596048 as cited in SEQ ID NO 68476
  misc_feature (1)..(1317): Ortholog of  Ceres SEQ ID NO 12589137 as cited in SEQ ID NO 0
caaatacttacttttgaatccgtttttttcattgtttgatcgattatgggaaaggttcttcagaaagaggcgttcggattagccgcgaaagacaattccggagttctctcgcctttcagtttctctagaagggcgacgggtgaaaaggatgtgaggttcaaagtcttgttctgtggaatttgccacactgatctgagtatggccaaaaacgaatgggggttaactacttatcctcttgtccctgggcatgagattgtgggcgtggtgactgaagttggagccaaagtgaaaaaattcaacgctggagacaaagtcggagttggctatatggccggctcgtgcaggtcatgtgacagctgcaatgatggcgacgagaactactgtccaaagatgatcttaacgtccggagccaaaaactttgacgataccatgacccatggtggatactccgaccacatggtgtgtgctgaggatttcatcatccgtattcctgacaatctcccattagacggtgccgcaccactactctgcgccggggtcacggtctactcccccatgaagtatcacgggctcgacaagcccggtatgcacatcggtgtggtgggactaggcggtttgggccatgtagcagtgaaatttgctaaggctatgggtactaaagttacggttattagtacttcggagcgtaagagagacgaggccgttactcggcttggtgcggatgccttcttggtgagccgtgacccgaaacaaatgaaggatgcaatggggactatggatggtatcattgataccgtatctgcgacccatccacttcttccgctgcttggtttgcttaaaaataagggaaaacttgttatggttggtgcaccagcagaaccgctcgagcttcctgtttttcctctcatctttgggcggaagatggtggtgggtagtatggtaggaggtataaaggagacgcaagagatggtggatttggctggaaaacacaacatcacggcggatattgagctcatctctgcggattatgtcaacaccgccatggaacggcttgcaaaggctgacgttaagtaccgatttgtgattgatgttgccaacacgatgaagccaactccttaactagaaagcttaagaattgaatatccccaaagcttttttcatgtttttgcttgtttgtttgatgttgtttgctggcgactttgtgtgtagtattaccacactgcatgtactttatcagttgaataaacttgaatattgtatttaataagctatctacattagattttggggaagtttgattaaaatttattccgattg

SEQ ID NO: 76628 - protein, 357 aa, Arabidopsis thaliana
  peptide (1)..(357): Ceres Seq. ID no. 7108669
MGKVLQKEAFGLAAKDNSGVLSPFSFSRRATGEKDVRFKVLFCGICHTDLSMAKNEWGLTTYPLVPGHEIVGVVTEVGAKVKKFNAGDKVGVGYMAGSCRSCDSCNDGDENYCPKMILTSGAKNFDDTMTHGGYSDHMVCAEDFIIRIPDNLPLDGAAPLLCAGVTVYSPMKYHGLDKPGMHIGVVGLGGLGHVAVKFAKAMGTKVTVISTSERKRDEAVTRLGADAFLVSRDPKQMKDAMGTMDGIIDTVSATHPLLPLLGLLKNKGKLVMVGAPAEPLELPVFPLIFGRKMVVGSMVGGIKETQEMVDLAGKHNITADIELISADYVNTAMERLAKADVKYRFVIDVANTMKPTP

SEQ ID NO: 76629 - protein, 306 aa, Arabidopsis thaliana; identical to SEQ ID NO: 41177
  peptide (1)..(306): Ceres Seq. ID no. 7108670

SEQ ID NO: 76630 - protein, 263 aa, Arabidopsis thaliana; identical to SEQ ID NO: 41178
  peptide (1)..(263): Ceres Seq. ID no. 7108671

SEQ ID NO: 76631 - DNA, 1184 bp, Arabidopsis thaliana
  misc_feature (1)..(1184): Ceres Seq. ID no. 7108672
  misc_feature (1)..(1184): Ortholog of  Ceres SEQ ID NO 12636774 as cited in SEQ ID NO 372
  misc_feature (1)..(1184): Ortholog of  Ceres SEQ ID NO 12562215 as cited in SEQ ID NO 20489
  misc_feature (1)..(1184): Ortholog of  Ceres SEQ ID NO 13595548 as cited in SEQ ID NO 51024
  misc_feature (1)..(1184): Ortholog of  Ceres SEQ ID NO 13582350 as cited in SEQ ID NO 56734
  misc_feature (1)..(1184): Ortholog of  Ceres SEQ ID NO 12476493 as cited in SEQ ID NO 58163
  misc_feature (1)..(1184): Ortholog of  Ceres SEQ ID NO 14313459 as cited in SEQ ID NO 62395
  misc_feature (1)..(1184): Ortholog of  Ceres SEQ ID NO 13597295 as cited in SEQ ID NO 63743
  misc_feature (1)..(1184): Ortholog of  Ceres SEQ ID NO 12617090 as cited in SEQ ID NO 64005
  misc_feature (1)..(1184): Ortholog of  Ceres SEQ ID NO 13597439 as cited in SEQ ID NO 64081
  misc_feature (1)..(1184): Ortholog of  Ceres SEQ ID NO 13597233 as cited in SEQ ID NO 64370
  misc_feature (1)..(1184): Ortholog of  Ceres SEQ ID NO 13623850 as cited in SEQ ID NO 0
cgttgctgtcgaagttaggccaagaaacccatttaaaaaaaaagagagagagatggagagtttcccgatcatcaatctcgagaagcttaatggagaagagagagcaatcactatggagaagatcaaagacgcttgtgaaaactggggcttctttgagtgtgtgaaccatgggatttcactcgagcttttggacaaagtggagaagatgaccaaggaacattacaagaagtgcatggaagagagattcaaggaatcgattaagaacagaggtcttgactctcttcgctctgaagtcaacgacgttgactgggaatccactttctacctcaagcaccttcccgtctctaatatctccgatgtccctgatctcgacgacgattacagaacgttaatgaaagacttcgccggaaagatagagaagttgtcggaggagctactggatctgctgtgcgagaatctcggtttagagaagggttatttaaaaaaggtgttttacgggtcgaaaagaccgacttttggaaccaaagtcagcaattatccaccttgtcctaatccggacctagtcaagggtctccgagcccacaccgacgccggcggcatcatcctcctcttccaagacgacaaagtcagtggacttcagcttcttaaagacggcgagtgggtcgatgttcctccggttaagcattcaatcgtcgttaatctcggcgatcaacttgaggtgataaccaatgggaagtacaagagtgtggaacatagagtgctatctcagacagacggagaaggaagaatgtcgatcgcatcattctataatccgggaagcgactctgttatttttccggtgccggagctgatcggaaaagaagcagagaaggagaagaaagagaactatccgagatttgtgtttgaagattacatgaaactctactctgctgtcaagtttcaggccaaggaaccaaggtttgaagccatgaaagctatggagacaactgtggccaacaatgttggaccattggccactgcgtgaatgatatgtaactggttaataaatatatatatatatatatatatagtctttatataatgtcttagaaacttgattattcactatacgaataattttgttcatgttgttgtatgtttaagtggtgaatgtgttatatatgggaattaatgttttctgttcg

SEQ ID NO: 76632 - protein, 340 aa, Arabidopsis thaliana
  peptide (1)..(340): Ceres Seq. ID no. 7108673
VAVEVRPRNPFKKKEREMESFPIINLEKLNGEERAITMEKIKDACENWGFFECVNHGISLELLDKVEKMTKEHYKKCMEERFKESIKNRGLDSLRSEVNDVDWESTFYLKHLPVSNISDVPDLDDDYRTLMKDFAGKIEKLSEELLDLLCENLGLEKGYLKKVFYGSKRPTFGTKVSNYPPCPNPDLVKGLRAHTDAGGIILLFQDDKVSGLQLLKDGEWVDVPPVKHSIVVNLGDQLEVITNGKYKSVEHRVLSQTDGEGRMSIASFYNPGSDSVIFPVPELIGKEAEKEKKENYPRFVFEDYMKLYSAVKFQAKEPRFEAMKAMETTVANNVGPLATA

SEQ ID NO: 76633 - protein, 323 aa, Arabidopsis thaliana
  peptide (1)..(323): Ceres Seq. ID no. 7108674
MESFPIINLEKLNGEERAITMEKIKDACENWGFFECVNHGISLELLDKVEKMTKEHYKKCMEERFKESIKNRGLDSLRSEVNDVDWESTFYLKHLPVSNISDVPDLDDDYRTLMKDFAGKIEKLSEELLDLLCENLGLEKGYLKKVFYGSKRPTFGTKVSNYPPCPNPDLVKGLRAHTDAGGIILLFQDDKVSGLQLLKDGEWVDVPPVKHSIVVNLGDQLEVITNGKYKSVEHRVLSQTDGEGRMSIASFYNPGSDSVIFPVPELIGKEAEKEKKENYPRFVFEDYMKLYSAVKFQAKEPRFEAMKAMETTVANNVGPLATA

SEQ ID NO: 76634 - protein, 303 aa, Arabidopsis thaliana
  peptide (1)..(303): Ceres Seq. ID no. 7108675
MEKIKDACENWGFFECVNHGISLELLDKVEKMTKEHYKKCMEERFKESIKNRGLDSLRSEVNDVDWESTFYLKHLPVSNISDVPDLDDDYRTLMKDFAGKIEKLSEELLDLLCENLGLEKGYLKKVFYGSKRPTFGTKVSNYPPCPNPDLVKGLRAHTDAGGIILLFQDDKVSGLQLLKDGEWVDVPPVKHSIVVNLGDQLEVITNGKYKSVEHRVLSQTDGEGRMSIASFYNPGSDSVIFPVPELIGKEAEKEKKENYPRFVFEDYMKLYSAVKFQAKEPRFEAMKAMETTVANNVGPLATA

SEQ ID NO: 76635 - DNA, 872 bp, Arabidopsis thaliana
  misc_feature (1)..(872): Ceres Seq. ID no. 7108678
  misc_feature (1)..(872): Ortholog of  Ceres SEQ ID NO 14311683 as cited in SEQ ID NO 51263
  misc_feature (1)..(872): Ortholog of  Ceres SEQ ID NO 13661430 as cited in SEQ ID NO 61258
  misc_feature (1)..(872): Ortholog of  Ceres SEQ ID NO 13590940 as cited in SEQ ID NO 68653
  misc_feature (1)..(872): Ortholog of  Ceres SEQ ID NO 14301982 as cited in SEQ ID NO 0
  misc_feature (1)..(872): Ortholog of  Ceres SEQ ID NO 15180040 as cited in SEQ ID NO 0
gtctaatggatgagaaagaagaattcccggggaagcgtcgctgttgaggagaccgagaacagtttagagtcacaagatgtgagcgaaggagatgagagcgaaggagatgcgagcgaaggagatgtgagcgaaggagatgagagcgaaggagatgtgagcgaaggagctgtgagcgaaagagctgagttcccggagccatcggaagaagccaagcttttcgtcggaaatttggcttatgatgttaatagccaagctttggctatgctctttgagcaagccggtactgttgaaatcgccgaggttatatacaatagggaaactgaccagagtcgtgggtttggatttgtgacaatgagttctgtggacgaagctgagacagctgtggagaagttcaaccgttatgatcttaacggacgtctactaactgtaaacaaggcagctccaagaggatcacgtccagaacgtgcgcctcgggtatatgaacctgcattcagagtatatgtagggaatctaccatgggatgtggacaatggccgtctagaacagcttttcagtgagcatggtaaagttgtggaagctagggtggtttacgaccgtgagacaggtcgttcacgtggattcgggtttgtcacaatgtctgacgtggatgaactcaacgaagccatctctgccctcgatggacagaacttggagggtagagcaatcagagtgaatgtagcggaagagcgtcctccaaggcgtggatattaaagctgagatctagctgtgccctctctctctccctatcttgcattttgtttagacgagattcttacactcttcaacgattgtttttggctgaactctgaatgtgaaagttaagctgcttctaa

SEQ ID NO: 76636 - protein, 246 aa, Arabidopsis thaliana
  peptide (1)..(246): Ceres Seq. ID no. 7108679
MRKKNSRGSVAVEETENSLESQDVSEGDESEGDASEGDVSEGDESEGDVSEGAVSERAEFPEPSEEAKLFVGNLAYDVNSQALAMLFEQAGTVEIAEVIYNRETDQSRGFGFVTMSSVDEAETAVEKFNRYDLNGRLLTVNKAAPRGSRPERAPRVYEPAFRVYVGNLPWDVDNGRLEQLFSEHGKVVEARVVYDRETGRSRGFGFVTMSDVDELNEAISALDGQNLEGRAIRVNVAEERPPRRGY

SEQ ID NO: 76637 - protein, 162 aa, Arabidopsis thaliana; identical to SEQ ID NO: 76559
  peptide (1)..(162): Ceres Seq. ID no. 7108680

SEQ ID NO: 76638 - protein, 132 aa, Arabidopsis thaliana
  peptide (1)..(132): Ceres Seq. ID no. 7108681
MSSVDEAETAVEKFNRYDLNGRLLTVNKAAPRGSRPERAPRVYEPAFRVYVGNLPWDVDNGRLEQLFSEHGKVVEARVVYDRETGRSRGFGFVTMSDVDELNEAISALDGQNLEGRAIRVNVAEERPPRRGY

SEQ ID NO: 76639 - DNA, 1939 bp, Arabidopsis thaliana
  misc_feature (1)..(1939): Ceres Seq. ID no. 7108686
  misc_feature (1)..(1939): Ortholog of  Ceres SEQ ID NO 12613725 as cited in SEQ ID NO 68196
gcggccgccagtgtgagtaatttagcgaaaacgatgggttccatcgaagaagaagcaagacctctcatcgaagaaggtttaattttacaggaagtgaaattgtatgctgaagatggttcagtggactttaatggaaacccaccattgaaggagaaaacaggaaactggaaagcttgtccttttattcttggtaatgaatgttgtgagaggctagcttactatggtattgctgggaatttaatcacttacctcaccactaagcttcaccaaggaaatgtttctgctgctacaaacgttaccacatggcaagggacttgttatctcactcctctcattggagctgttctggctgatgcttactggggacgttactggaccatcgcttgtttctccgggatttatttcatcgggatgtctgcgttaactctttcagcttcagttccggcattgaagccagcggaatgtattggtgacttttgtccatctgcaacgccagctcagtatgcgatgttctttggtgggctttacctgatcgctcttggaactggaggtatcaaaccgtgtgtctcatccttcggtgccgatcagtttgatgacacggactctcgggaacgagttagaaaagcttcgttctttaactggttttacttctccatcaatattggagcacttgtgtcatctagtcttctagtttggattcaagagaatcgggggtggggtttagggtttgggataccaacagtgttcatgggactagccattgcaagtttcttctttggcacacctctttataggtttcagaaacctggaggaagccctataactcggatttcccaagtcgtggttgcttcgttccggaaatcgtctgtcaaagtccctgaagacgccacacttctgtatgaaactcaagacaagaactctgctattgctggaagtagaaaaatcgagcataccgatgattgccagtatcttgacaaagccgctgttatctcagaagaagaatcgaaatccggagattattccaactcgtggagactatgcacggttacgcaagtcgaagaactcaagattctgatccgaatgttcccaatctgggcttctggtatcattttctcagctgtatacgcacaaatgtccacaatgtttgttcaacaaggccgagccatgaactgcaaaattggatcattccagcttcctcctgcagcactcgggacattcgacacagcaagcgtcatcatctgggtgccgctctacgaccggttcatcgttcccttagcaagaaagttcacaggagtagacaaaggattcactgagatacaaagaatgggaattggtctgtttgtctctgttctctgtatggcagctgcagctatcgtcgaaatcatccgtctccatatggccaacgatcttggattagtcgagtcaggagccccagttcccatatccgtcttgtggcagattccacagtacttcattctcggtgcagccgaagtattctacttcatcggtcagctcgagttcttctacgaccaatctccagatgcaatgagaagcttgtgcagtgccttagctcttttgaccaatgcacttggtaactacttgagctcgttgatcctcacgctcgtgacttattttacaacaagaaatgggcaagaaggttggatttcggataatctcaattcaggtcatctcgattacttcttctggctcttggctggtcttagccttgtgaacatggcggtttacttcttctctgctgctaggtataagcaaaagaaagcttcgtcgtagtaatgctgttatctatctactttcattacatacaaaagtttgtttctttcaactgtaactgtctctgtatcaataacaacattgctgtgtacttttcctttcaatttcaaaagtttaagtcgcctaaattactcacactggcggccgc

SEQ ID NO: 76640 - protein, 596 aa, Arabidopsis thaliana
  peptide (1)..(596): Ceres Seq. ID no. 7108687
AAASVSNLAKTMGSIEEEARPLIEEGLILQEVKLYAEDGSVDFNGNPPLKEKTGNWKACPFILGNECCERLAYYGIAGNLITYLTTKLHQGNVSAATNVTTWQGTCYLTPLIGAVLADAYWGRYWTIACFSGIYFIGMSALTLSASVPALKPAECIGDFCPSATPAQYAMFFGGLYLIALGTGGIKPCVSSFGADQFDDTDSRERVRKASFFNWFYFSINIGALVSSSLLVWIQENRGWGLGFGIPTVFMGLAIASFFFGTPLYRFQKPGGSPITRISQVVVASFRKSSVKVPEDATLLYETQDKNSAIAGSRKIEHTDDCQYLDKAAVISEEESKSGDYSNSWRLCTVTQVEELKILIRMFPIWASGIIFSAVYAQMSTMFVQQGRAMNCKIGSFQLPPAALGTFDTASVIIWVPLYDRFIVPLARKFTGVDKGFTEIQRMGIGLFVSVLCMAAAAIVEIIRLHMANDLGLVESGAPVPISVLWQIPQYFILGAAEVFYFIGQLEFFYDQSPDAMRSLCSALALLTNALGNYLSSLILTLVTYFTTRNGQEGWISDNLNSGHLDYFFWLLAGLSLVNMAVYFFSAARYKQKKASS

SEQ ID NO: 76641 - protein, 585 aa, Arabidopsis thaliana; identical to SEQ ID NO: 23352
  peptide (1)..(585): Ceres Seq. ID no. 7108688

SEQ ID NO: 76642 - protein, 459 aa, Arabidopsis thaliana; identical to SEQ ID NO: 23353
  peptide (1)..(459): Ceres Seq. ID no. 7108689

SEQ ID NO: 76643 - DNA, 1302 bp, Arabidopsis thaliana
  misc_feature (1)..(1302): Ceres Seq. ID no. 7108708
  misc_feature (1)..(1302): Ortholog of  Ceres SEQ ID NO 13654187 as cited in SEQ ID NO 68219
tgagttctcctacaattttcctaaattcttggatttgagatttcactttttccgatttgaaacaatgatgataactcgcggtggagccaaggcggcgaaatcgctgttagtggcggctggaccacgtttgttctcgacggtccgtacggtttcgtctcacgaggctttatcagcaagccatattttgaagcctggtgttacatctgcttggatatggacactagagctccgacgattggaggtatgagattcgctagcacgattactctgggagagaaaactccgatgaaggaggaggacgcgaatcagaagaaaacagagaacgaatccaccggtggagacgccgccggaggtaataacaagggagataaaggaatcgcgagctattggggtgttgaacctaataagattactaaagaagatggttctgaatggaagtggaactgtttcaggccatgggaaacgtataaagctgatataacgatagatctgaagaagcatcatgttccaacgacgtttcttgatagaatagcttattggactgttaaatctcttcgctggcctaccgatttgttcttccagaggagatatggatgtcgagctatgatgcttgaaactgtagcagcagtacctggaatggttggaggaatgttactacactgcaaatcgcttcgacgttttgagcaaagtggaggatggattaaggctcttcttgaggaagcagagaatgagagaatgcatcttatgacattcatggaagtcgcgaaaccgaaatggtacgagagagcgctcgtgatcactgtgcaaggagtcttcttcaacgcttatttccttggttacttaatctctcccaagtttgctcatcgtatggttgggtaccttgaagaagaagcgatccattcttatactgagtttctcaaggaacttgacaaaggtaacattgagaatgttcctgctccggctattgctattgattactggaggcttcctgctgatgcgacacttcgtgatgttgtgatggttgttcgtgctgacgaggctcatcaccgtgatgtaaaccattttgcatctgatattcactaccaaggtcgtgaactaaaggaagctccagctccaattgggtatcattgattcgattaaaagaagagctttttctcaagtttaaaactttgttctaaacaatttgactgatatacatcatcacctctgcttaagccatacttggattcggctttctttgaatgttgcatacgaatgttctgatttcttctttacttttcctgtcaatggggcttttgggct

SEQ ID NO: 76644 - protein, 305 aa, Arabidopsis thaliana
  peptide (1)..(305): Ceres Seq. ID no. 7108709
MDTRAPTIGGMRFASTITLGEKTPMKEEDANQKKTENESTGGDAAGGNNKGDKGIASYWGVEPNKITKEDGSEWKWNCFRPWETYKADITIDLKKHHVPTTFLDRIAYWTVKSLRWPTDLFFQRRYGCRAMMLETVAAVPGMVGGMLLHCKSLRRFEQSGGWIKALLEEAENERMHLMTFMEVAKPKWYERALVITVQGVFFNAYFLGYLISPKFAHRMVGYLEEEAIHSYTEFLKELDKGNIENVPAPAIAIDYWRLPADATLRDVVMVVRADEAHHRDVNHFASDIHYQGRELKEAPAPIGYH

SEQ ID NO: 76645 - protein, 295 aa, Arabidopsis thaliana; identical to SEQ ID NO: 40787
  peptide (1)..(295): Ceres Seq. ID no. 7108710

SEQ ID NO: 76646 - protein, 281 aa, Arabidopsis thaliana
  peptide (1)..(281): Ceres Seq. ID no. 7108711
MKEEDANQKKTENESTGGDAAGGNNKGDKGIASYWGVEPNKITKEDGSEWKWNCFRPWETYKADITIDLKKHHVPTTFLDRIAYWTVKSLRWPTDLFFQRRYGCRAMMLETVAAVPGMVGGMLLHCKSLRRFEQSGGWIKALLEEAENERMHLMTFMEVAKPKWYERALVITVQGVFFNAYFLGYLISPKFAHRMVGYLEEEAIHSYTEFLKELDKGNIENVPAPAIAIDYWRLPADATLRDVVMVVRADEAHHRDVNHFASDIHYQGRELKEAPAPIGYH

SEQ ID NO: 76647 - DNA, 963 bp, Arabidopsis thaliana
  misc_feature (1)..(963): Ceres Seq. ID no. 7108712
  misc_feature (1)..(963): Ortholog of  Ceres SEQ ID NO 13595658 as cited in SEQ ID NO 59888
  misc_feature (1)..(963): Ortholog of  Ceres SEQ ID NO 13661330 as cited in SEQ ID NO 61614
  misc_feature (1)..(963): Ortholog of  Ceres SEQ ID NO 13596025 as cited in SEQ ID NO 62024
  misc_feature (1)..(963): Ortholog of  Ceres SEQ ID NO 13662324 as cited in SEQ ID NO 62162
  misc_feature (1)..(963): Ortholog of  Ceres SEQ ID NO 12625713 as cited in SEQ ID NO 64160
ggcacgagctcgtgcaattcggccgaattcggcacgagaaaatatggcaaatatctccagtattcacattctcttcctcgtgttcatcacaagcggcattgctgttatggccacagacttcactctaaggaacaattgccctaccaccgtctgggccggaactctcgccggtcaaggacccaagctcggcgatggaggatttgaattgactccaggtgcttcccgacagctcacggctcctgcaggatggtcaggccggttctgggctcgtacaggctgcaactttgacgcctccggaaacggtagatgtgtaaccggagactgtggcggtctaagatgtaacggcggcggagttcctcccgtcactctggctgaattcactctagtaggcgatggcggcaaagatttctacgatgtgagcctcgtagatggttacaatgtcaagctggggataagaccatccggaggatcgggagattgcaaatacgcaggctgtgtctctgacctcaacgcggcttgccccgacatgcttaaggtcatggatcagaacaatgtcgtggcctgcaagagtgcctgtgagaggtttaatacggatcaatattgctgccgtggagctaacgataagccggaaacttgtcctcccacggactactcgaggattttcaagaacgcttgccctgacgcctatagctacgcttatgacgacgaaacgagcaccttcacttgtaccggagctaactacgaaatcactttctgcccttaaaaaccgaagcttcgagttagatacagtcgggtttaattatctctcacgtttcttttgcttattatgtacggaaagataaataaggaaagctgatgactatgaatcatcgtcttccacttttaagcttttttagtgagtattagtcagttgttacactcagctgatttgtttacaaagaaataaaacaaaatgattgatct

SEQ ID NO: 76648 - protein, 253 aa, Arabidopsis thaliana
  peptide (1)..(253): Ceres Seq. ID no. 7108713
ARARAIRPNSARENMANISSIHILFLVFITSGIAVMATDFTLRNNCPTTVWAGTLAGQGPKLGDGGFELTPGASRQLTAPAGWSGRFWARTGCNFDASGNGRCVTGDCGGLRCNGGGVPPVTLAEFTLVGDGGKDFYDVSLVDGYNVKLGIRPSGGSGDCKYAGCVSDLNAACPDMLKVMDQNNVVACKSACERFNTDQYCCRGANDKPETCPPTDYSRIFKNACPDAYSYAYDDETSTFTCTGANYEITFCP

SEQ ID NO: 76649 - protein, 239 aa, Arabidopsis thaliana; identical to SEQ ID NO: 43814
  peptide (1)..(239): Ceres Seq. ID no. 7108714

SEQ ID NO: 76650 - protein, 218 aa, Arabidopsis thaliana; identical to SEQ ID NO: 43815
  peptide (1)..(218): Ceres Seq. ID no. 7108715

SEQ ID NO: 76651 - DNA, 1819 bp, Arabidopsis thaliana
  misc_feature (1)..(1819): Ceres Seq. ID no. 7108716
  misc_feature (1)..(1819): Ortholog of  Ceres SEQ ID NO 14305409 as cited in SEQ ID NO 55679
aacgatacgtccctataaattagcaatgtcgctggttcgaacagtgacgatcgttctttttataatcgcgtttctgcaaaacctgcggctcagaaaagacagcaaagtattgttaagtctcgcggtgcttgcgacagatgatggacggtgttctgttatcgggatgcgtgttcttcgtgaaggaggaaacgcgattgatgcgtctgtggctgctgctctgtgtttgggcgttgtaagtcccgcgtctggactaggcggtggagcgtttacagtggttaagatagctggtgggaaagaaattgcttatgattctagagaaaccgctcctctaagagccactgagaatatgtatggaggtaatgttgacctaaagaagaaaggagccttatcagtaggcgttcccggggaagtcgcaggtctattcacggcttggaaacaacatgggaagctaccgtggaagcgttcagtgactcctgcagagaaacttgcagagggattcaagatttccaagtatctttatatgcagatgaacgcgactagaagcgatatcttagcagacaaaggtctctctgacctatttgtttcaaatggagagctcaagaggccagggacgatttgccataacccaaaattggctttaaccttgaagctaattggagagtacggtccaaaagcattttacaatggcacagttggggttaacctagcgagagatatcaaaaaatctggaggaataataactttgaaagatctgcaaagttatagagttaagattaaagaaccgttgtctgcagaacttcttggatatagagtccttggtatgcctcctccttcatctggtggcgctgcaatgatgcttgttttgaacatctttctcaatatgggatcatcagtgttcaggcctctcggtgttcatcgactaatcgaggctctgaaacatgcattcgcagttagaatgaacctcggggatccagatttcactgatgttaccaaggttgtttcggatatgttgtcgccaaagtttgcaaaagacttgaagagcaagataaacgaccaaaaaacttttgatccaaaatattacgggggcatgtggaatcagatcgacgaccacgggacaagtcatttatcgatcatagaccgcgagaggaacgctgtgtctatgactagtacaataaatggttactttggggcattgatgctatctccgagcacaggaatagttctgaacaacgaaatggacgatttctcaatccctatgaaatctaacggtaacttagatgttccaccaccagcaccagctaacttcatccgtcctggaaaacgacctttgtcctctatgtcacccaccattgtactcaaggacggtaaagtgaaagccgctgtgggtgcgagcggaggagccaacattattgccgggacaacggaagtttacttgaatcattttttcctcaagatggatcctctttcttccgtcttagctccaagaatctaccatcagctgataccaaacagagcttcgtacgagaactggacaacagtattcaatgatcatttcgagattcctaaagcaacaagagttgtgttggagaagaaaggtcatgtcctatctcctattgccggagggacgattgctcagttcatagttcaagaatccggtgagaactccggtggaagaagtgagcttgtggcagttagtgatcctcgaaaaggagggttcccttcaggatattgagaattttagatcgagatttattttatgtttttattgtttctttgattattgaaccgaactttgtgatcaatataattttatttcact

SEQ ID NO: 76652 - protein, 576 aa, Arabidopsis thaliana
  peptide (1)..(576): Ceres Seq. ID no. 7108717
TIRPYKLAMSLVRTVTIVLFIIAFLQNLRLRKDSKVLLSLAVLATDDGRCSVIGMRVLREGGNAIDASVAAALCLGVVSPASGLGGGAFTVVKIAGGKEIAYDSRETAPLRATENMYGGNVDLKKKGALSVGVPGEVAGLFTAWKQHGKLPWKRSVTPAEKLAEGFKISKYLYMQMNATRSDILADKGLSDLFVSNGELKRPGTICHNPKLALTLKLIGEYGPKAFYNGTVGVNLARDIKKSGGIITLKDLQSYRVKIKEPLSAELLGYRVLGMPPPSSGGAAMMLVLNIFLNMGSSVFRPLGVHRLIEALKHAFAVRMNLGDPDFTDVTKVVSDMLSPKFAKDLKSKINDQKTFDPKYYGGMWNQIDDHGTSHLSIIDRERNAVSMTSTINGYFGALMLSPSTGIVLNNEMDDFSIPMKSNGNLDVPPPAPANFIRPGKRPLSSMSPTIVLKDGKVKAAVGASGGANIIAGTTEVYLNHFFLKMDPLSSVLAPRIYHQLIPNRASYENWTTVFNDHFEIPKATRVVLEKKGHVLSPIAGGTIAQFIVQESGENSGGRSELVAVSDPRKGGFPSGY

SEQ ID NO: 76653 - protein, 568 aa, Arabidopsis thaliana
  peptide (1)..(568): Ceres Seq. ID no. 7108718
MSLVRTVTIVLFIIAFLQNLRLRKDSKVLLSLAVLATDDGRCSVIGMRVLREGGNAIDASVAAALCLGVVSPASGLGGGAFTVVKIAGGKEIAYDSRETAPLRATENMYGGNVDLKKKGALSVGVPGEVAGLFTAWKQHGKLPWKRSVTPAEKLAEGFKISKYLYMQMNATRSDILADKGLSDLFVSNGELKRPGTICHNPKLALTLKLIGEYGPKAFYNGTVGVNLARDIKKSGGIITLKDLQSYRVKIKEPLSAELLGYRVLGMPPPSSGGAAMMLVLNIFLNMGSSVFRPLGVHRLIEALKHAFAVRMNLGDPDFTDVTKVVSDMLSPKFAKDLKSKINDQKTFDPKYYGGMWNQIDDHGTSHLSIIDRERNAVSMTSTINGYFGALMLSPSTGIVLNNEMDDFSIPMKSNGNLDVPPPAPANFIRPGKRPLSSMSPTIVLKDGKVKAAVGASGGANIIAGTTEVYLNHFFLKMDPLSSVLAPRIYHQLIPNRASYENWTTVFNDHFEIPKATRVVLEKKGHVLSPIAGGTIAQFIVQESGENSGGRSELVAVSDPRKGGFPSGY

SEQ ID NO: 76654 - protein, 522 aa, Arabidopsis thaliana
  peptide (1)..(522): Ceres Seq. ID no. 7108719
MRVLREGGNAIDASVAAALCLGVVSPASGLGGGAFTVVKIAGGKEIAYDSRETAPLRATENMYGGNVDLKKKGALSVGVPGEVAGLFTAWKQHGKLPWKRSVTPAEKLAEGFKISKYLYMQMNATRSDILADKGLSDLFVSNGELKRPGTICHNPKLALTLKLIGEYGPKAFYNGTVGVNLARDIKKSGGIITLKDLQSYRVKIKEPLSAELLGYRVLGMPPPSSGGAAMMLVLNIFLNMGSSVFRPLGVHRLIEALKHAFAVRMNLGDPDFTDVTKVVSDMLSPKFAKDLKSKINDQKTFDPKYYGGMWNQIDDHGTSHLSIIDRERNAVSMTSTINGYFGALMLSPSTGIVLNNEMDDFSIPMKSNGNLDVPPPAPANFIRPGKRPLSSMSPTIVLKDGKVKAAVGASGGANIIAGTTEVYLNHFFLKMDPLSSVLAPRIYHQLIPNRASYENWTTVFNDHFEIPKATRVVLEKKGHVLSPIAGGTIAQFIVQESGENSGGRSELVAVSDPRKGGFPSGY

SEQ ID NO: 76655 - DNA, 1081 bp, Arabidopsis thaliana
  misc_feature (1)..(1081): Ceres Seq. ID no. 7108736
  misc_feature (1)..(1081): Ortholog of  Ceres SEQ ID NO 13582073 as cited in SEQ ID NO 56218
agatatcaaaaccgaatattcttttattcctcacacacacataggaacacacctgaatggtgcatcacacgggataacaacaacacacattcaacacaaacatgacgaaattaaagacaataaaccaaaccaaacattcagagagacacaacacaaccacatcatcacacgtttctctctctctctttcctctccgtcgtctctctctctctagccaccaccaaaatccttaaaacctagacttttctcttccatcgatggcggctaataacagatccgatcatgggtcagacgaaaacacaagactttacaatccttaccaaaactacgaagtcccaatcaacaaatctcagtacctttacaagcttcctacctcccctgagtttctcttcacggaggaggctttaaggcaacgtagatcttggggtgagaatctcactttctacaccggaacagcttacctcggtggctccgttgccggagcttctgttggagtcatcactggagtcaaaagcttcgaatctggcgacactactaagctcaaaatcaacaggatcttgaactcttctggtcaaactggtcgaacttggggtaatcggattggtatcattggattggtttacgcagggatcgagagtggtattgtggctgccacggatagagatgatgtttggaccagtgtggtggctggtcttggaaccggagctgtttgtagagcggcgagaggagtgagatctgcagctgtagctggtgctcttggtggacttgcggctggagctgttgtagctgggaagcaaattgtgaagcggtatgtgcccatttgaagactgcaagagtctaattggcagactctttttcgggtcgttgttgaaatttttgataggggaaatggtgagaatttgataggtttggtatgtcttggaatcataaaaatgaaaactttatttggtttctagaggtacaacaagtctgtatgtcaagtcataatgcagtttcactttgaagaataacctgcaaacctttttcttatattcatactgattaaatgttttgccgattggtaatttaaaaacccgaattc

SEQ ID NO: 76656 - protein, 188 aa, Arabidopsis thaliana; identical to SEQ ID NO: 27627
  peptide (1)..(188): Ceres Seq. ID no. 7108737

SEQ ID NO: 76657 - DNA, 1617 bp, Arabidopsis thaliana
  misc_feature (1)..(1617): Ceres Seq. ID no. 7108738
  misc_feature (1)..(1617): Ortholog of  Ceres SEQ ID NO 14308851 as cited in SEQ ID NO 55618
gtcgacccacgcgtccgcaccatttctctatctttctctctcgctgcttctcgaatcttctgtatcatcttcttcttcttcaagtgaaaaatggccgatggtgaggatattcagccacttgtctgtgacaatggaactggaatggtgaaggctggttttgctggtgatgatgccccgagagcagtgttcccaagtattgttggtcgtcctaggcacactggtgtcatggttggtatgggtcagaaagatgcttacgttggtgatgaagctcagtccaagagaggtatcctcactctgaagtatccaatcgaacatggtattgtaagtaactgggatgacatggaaaagatatggcatcacactttctacaacgagcttcgtgttgcccctgaggagcacccagttctactcacagaggcacctcttaaccctaaagctaacagggagaagatgactcagatcatgtttgagacattcaatgtccctgccatgtatgttgccattcaggccgttctttctctctatgccagtggtcgtacaaccggtattgtgctcgattctggtgatggtgtgtctcacactgtgccaatctacgaggggtatgctcttcctcatgctatccttcgtcttgatcttgcgggtcgggatctcacagactcactcatgaagattctcactgagagaggttacatgttcaccactaccgcagaacgggaaattgtccgtgacataaaggagaaacttgcttatgtcgctcttgactacgagcaagagctagagacagccaagagcagttcttcagtggagaagaactacgagcttcctgatggacaagtcataaccatcggagctgagagattccgttgtcctgaggttctgttccagccatcgctcatcggaatggaagctcctggaatccatgaaacaacttacaactccatcatgaaatgtgatgtcgatatcaggaaggatctctatggaaacatcgttctcagtggtggttccaccatgttcccaggaattgctgaccgtatgagcaaagagatcaccgctcttgcacctagcagcatgaagatcaaggtggttgcaccgccagagagaaaatacagtgtctggatcggaggatcaatccttgcatccctcagcaccttccaacagatgtggatttcaaagagtgagtacgatgagtcaggtccatcgattgttcacaggaaatgtttctaagtgtgtcttgtcttatctggttcgtggtggtgagtttgttacaaaaaaatctattttttctagttgagatgggaattgaactatctgttgttatgtggattttattttcttttttctctttagaaccttatggttgtgtcaagaagtcttgtgtactttagttttatatctctgttttatctcttctattttctttaggatgcttgtgatgatgctgtttttttttgtccctaagcaaaaaatatcatattatatttggtccttggttcatttttttggtttttttttgtcttcacatataaatattgtttgaatgtcttcaatcttttatttgtatgagacaattatttaagtatcgggtgacaatgcagctattatgtattgtcgattgtt

SEQ ID NO: 76658 - protein, 377 aa, Arabidopsis thaliana; identical to SEQ ID NO: 41654
  peptide (1)..(377): Ceres Seq. ID no. 7108739

SEQ ID NO: 76659 - protein, 360 aa, Arabidopsis thaliana; identical to SEQ ID NO: 41655
  peptide (1)..(360): Ceres Seq. ID no. 7108740

SEQ ID NO: 76660 - protein, 332 aa, Arabidopsis thaliana; identical to SEQ ID NO: 41656
  peptide (1)..(332): Ceres Seq. ID no. 7108741

SEQ ID NO: 76661 - DNA, 1196 bp, Arabidopsis thaliana
  misc_feature (1)..(1196): Ceres Seq. ID no. 7108744
  misc_feature (1)..(1196): Ortholog of  Ceres SEQ ID NO 15172958 as cited in SEQ ID NO 51206
  misc_feature (1)..(1196): Ortholog of  Ceres SEQ ID NO 15171139 as cited in SEQ ID NO 60093
tcgacccacgcgtccgtccaaattcaaacaccatactttatctcctcctccttctcctcctcctcctcctcctatggctgcgtgcatcgacacctgccgcactggtaaaccccagatttctcctcgcgattcttctaaacaccacgacgatgaatctggctttcgttacatgaactacttccgttatcctgatcgatcttccttcaatggaacccagaccaaaaccctccatactcgtcctttgcttgaagatctcgatcgcgacgctgaagtcgatgatgtttgggccaaaatccgagaagaggctaaatctgatatcgccaaagaacctattgtttccgcttattatcacgcttcgattgtttctcagcgttcgttggaagctgcgttggcgaatactttatctgttaaactcagcaatttgaatcttccaagcaacacgcttttcgatttgttctctggtgttcttcaaggaaacccagatattgttgaatctgtcaagctagatcttttagctgttaaggagagagatcctgcttgtataagctacgttcattgtttccttcactttaaaggcttcctcgcttgtcaagcgcatcgtattgctcatgagctttggactcaggacagaaaaatcctagctttgttgatccagaacagagtctctgaagctttcgctgttgatttccaccctggagctaaaatcggtaccgggattttgctagaccatgctacggctattgtgatcggtgagacggcggttgtggggaacaatgtttcgattctccataacgttacgcttggaggaacggggaaacagtgtggagataggcacccgaagattggcgatggggttttgattggagctgggacttgtattttggggaatatcacgattggtgaaggagctaagattggtgcggggtcggtggtgttgaaagacgtgccgccgcgtacgacggctgttggaaatccggcgaggttgcttggtggtaaagataatccgaaaacgcatgacaagattcctggtttgactatggaccagacgtcgcatatatccgagtggtcggattatgtaatttgaaaaagtctttgtttttggttgttgttgttgtttatggcttttcattgttctctcggcttcttctgttattgaagctggtgaagtatatgatatgcgatgatgctgtttccat

SEQ ID NO: 76662 - protein, 360 aa, Arabidopsis thaliana
  peptide (1)..(360): Ceres Seq. ID no. 7108745
RPTRPSKFKHHTLSPPPSPPPPPPMAACIDTCRTGKPQISPRDSSKHHDDESGFRYMNYFRYPDRSSFNGTQTKTLHTRPLLEDLDRDAEVDDVWAKIREEAKSDIAKEPIVSAYYHASIVSQRSLEAALANTLSVKLSNLNLPSNTLFDLFSGVLQGNPDIVESVKLDLLAVKERDPACISYVHCFLHFKGFLACQAHRIAHELWTQDRKILALLIQNRVSEAFAVDFHPGAKIGTGILLDHATAIVIGETAVVGNNVSILHNVTLGGTGKQCGDRHPKIGDGVLIGAGTCILGNITIGEGAKIGAGSVVLKDVPPRTTAVGNPARLLGGKDNPKTHDKIPGLTMDQTSHISEWSDYVI

SEQ ID NO: 76663 - protein, 336 aa, Arabidopsis thaliana
  peptide (1)..(336): Ceres Seq. ID no. 7108746
MAACIDTCRTGKPQISPRDSSKHHDDESGFRYMNYFRYPDRSSFNGTQTKTLHTRPLLEDLDRDAEVDDVWAKIREEAKSDIAKEPIVSAYYHASIVSQRSLEAALANTLSVKLSNLNLPSNTLFDLFSGVLQGNPDIVESVKLDLLAVKERDPACISYVHCFLHFKGFLACQAHRIAHELWTQDRKILALLIQNRVSEAFAVDFHPGAKIGTGILLDHATAIVIGETAVVGNNVSILHNVTLGGTGKQCGDRHPKIGDGVLIGAGTCILGNITIGEGAKIGAGSVVLKDVPPRTTAVGNPARLLGGKDNPKTHDKIPGLTMDQTSHISEWSDYVI

SEQ ID NO: 76664 - protein, 304 aa, Arabidopsis thaliana
  peptide (1)..(304): Ceres Seq. ID no. 7108747
MNYFRYPDRSSFNGTQTKTLHTRPLLEDLDRDAEVDDVWAKIREEAKSDIAKEPIVSAYYHASIVSQRSLEAALANTLSVKLSNLNLPSNTLFDLFSGVLQGNPDIVESVKLDLLAVKERDPACISYVHCFLHFKGFLACQAHRIAHELWTQDRKILALLIQNRVSEAFAVDFHPGAKIGTGILLDHATAIVIGETAVVGNNVSILHNVTLGGTGKQCGDRHPKIGDGVLIGAGTCILGNITIGEGAKIGAGSVVLKDVPPRTTAVGNPARLLGGKDNPKTHDKIPGLTMDQTSHISEWSDYVI

SEQ ID NO: 76665 - DNA, 1211 bp, Arabidopsis thaliana
  misc_feature (1)..(1211): Ceres Seq. ID no. 7108782
  misc_feature (1)..(1211): Ortholog of  Ceres SEQ ID NO 13596891 as cited in SEQ ID NO 62868
  misc_feature (1)..(1211): Ortholog of  Ceres SEQ ID NO 12617235 as cited in SEQ ID NO 63990
  misc_feature (1)..(1211): Ortholog of  Ceres SEQ ID NO 13655371 as cited in SEQ ID NO 68945
acaacaaatataaaaccagcggccgccagtgtgagtaatttaggcagtaacaaatttggtgaagtcacgagaatcaacgatgacggcgacgaacaagcaagtcatattgaaagactacgtgagtggtttccctacggaatccgatttcgatttcactaccaccaccgtcgaacttagggttccggaaggtactaactctgttctagtgaagaatctctacttgtcatgcgatccttacatgagaattcgcatggggaaacctgatccttccactgctgctcttgctcaagcttacactcccggccagccaatccaagggtatggagtgtctagaataatagaatctggacatccagattacaagaaaggagacttactctggggtatagttgcatgggaggagtacagtgttatcactccaatgactcacgcgcatttcaagatccaacatactgatgttccattatcttattacactggacttttaggtatgcctggtatgactgcctatgctgggttttatgaagtttgttctccaaaggaaggagagacagtttatgtgtcagctgcatctggtgctgttggtcagcttgtgggacaacttgctaagatgatgggctgttatgttgttggaagcgctggaagtaaagagaaggttgatcttctgaagaccaagtttgggtttgatgatgcatttaactacaaggaagaatctgaccttactgctgccctaaaaaggtgtttccctaatggcattgacatatactttgagaatgtaggaggcaaaatgctagatgcagtgcttgtgaacatgaacatgcacgggcgtatcgctgtctgtggaatgatctcacagtacaatcttgagaaccaggaaggtgtacacaacctatccaacataatctacaaaagaatccgcattcaaggctttgtagtgtctgatttctacgacaaatactcaaagttcttggagtttgtgcttccccacattagagaagggaagataacgtacgtggaagatgtagctgatgggcttgagaaagctcccgaagctcttgtgggactcttccatggtaagaatgttgggaaacaagttgttgttgttgctcgtgagtgaaactatgtttgatacttgtactttatccaattagagtttgtgtgggtggtttttgttttatggataaagataatgtttgttatggtttcgaatc

SEQ ID NO: 76666 - protein, 345 aa, Arabidopsis thaliana
  peptide (1)..(345): Ceres Seq. ID no. 7108783
MTATNKQVILKDYVSGFPTESDFDFTTTTVELRVPEGTNSVLVKNLYLSCDPYMRIRMGKPDPSTAALAQAYTPGQPIQGYGVSRIIESGHPDYKKGDLLWGIVAWEEYSVITPMTHAHFKIQHTDVPLSYYTGLLGMPGMTAYAGFYEVCSPKEGETVYVSAASGAVGQLVGQLAKMMGCYVVGSAGSKEKVDLLKTKFGFDDAFNYKEESDLTAALKRCFPNGIDIYFENVGGKMLDAVLVNMNMHGRIAVCGMISQYNLENQEGVHNLSNIIYKRIRIQGFVVSDFYDKYSKFLEFVLPHIREGKITYVEDVADGLEKAPEALVGLFHGKNVGKQVVVVARE

SEQ ID NO: 76667 - protein, 292 aa, Arabidopsis thaliana
  peptide (1)..(292): Ceres Seq. ID no. 7108784
MRIRMGKPDPSTAALAQAYTPGQPIQGYGVSRIIESGHPDYKKGDLLWGIVAWEEYSVITPMTHAHFKIQHTDVPLSYYTGLLGMPGMTAYAGFYEVCSPKEGETVYVSAASGAVGQLVGQLAKMMGCYVVGSAGSKEKVDLLKTKFGFDDAFNYKEESDLTAALKRCFPNGIDIYFENVGGKMLDAVLVNMNMHGRIAVCGMISQYNLENQEGVHNLSNIIYKRIRIQGFVVSDFYDKYSKFLEFVLPHIREGKITYVEDVADGLEKAPEALVGLFHGKNVGKQVVVVARE

SEQ ID NO: 76668 - protein, 288 aa, Arabidopsis thaliana
  peptide (1)..(288): Ceres Seq. ID no. 7108785
MGKPDPSTAALAQAYTPGQPIQGYGVSRIIESGHPDYKKGDLLWGIVAWEEYSVITPMTHAHFKIQHTDVPLSYYTGLLGMPGMTAYAGFYEVCSPKEGETVYVSAASGAVGQLVGQLAKMMGCYVVGSAGSKEKVDLLKTKFGFDDAFNYKEESDLTAALKRCFPNGIDIYFENVGGKMLDAVLVNMNMHGRIAVCGMISQYNLENQEGVHNLSNIIYKRIRIQGFVVSDFYDKYSKFLEFVLPHIREGKITYVEDVADGLEKAPEALVGLFHGKNVGKQVVVVARE

SEQ ID NO: 76669 - DNA, 1093 bp, Arabidopsis thaliana
  misc_feature (1)..(1093): Ceres Seq. ID no. 7108793
  misc_feature (1)..(1093): Ortholog of  Ceres SEQ ID NO 14306066 as cited in SEQ ID NO 57378
gcggccgcgtcgacgaaggaagaagaagaagaagaagaagaaaaaactatggagaatgagagggaaaagcaggtttacttggctaagctctccgagcaaaccgaaagatacgatgaaatggtggaggcgatgaagaaagttgctcagcttgatgtggagctaactgtggaagagaggaatcttgtatctgtagggtacaagaatgtgattggtgcaaggagagcatcatggagaatactatcttccattgagcagaaggaagagtccaagggaaatgatgaaaatgtcaagaggcttaagaattatcgtaagagagttgaagatgagcttgctaaagtttgtaatgacatcttgtctgtcattgataagcatctcattccatcgtctaacgctgtggagtcaactgtctttttctacaaaatgaaaggagattactatcgctatcttgcggagttcagttctggtgctgaacgcaaggaagctgcagatcagtctcttgaagcatataaggctgctgttgctgctgcagagaatggtttggcacccacacatccagttagacttggcttggcgttgaacttttcagttttctactatgagatcttgaactctcccgaaagcgcatgccaattggctaagcaagcattcgatgatgcaattgctgaacttgacagcctcaacgaggaatcatacaaagacagcactcttattatgcagctacttagagacaatctcaccttgtggacttcagaccttaatgaggaaggagatgagagaaccaaaggtgctgatgagcctcaagatgagaactaaatcctctgtgagaagagaaacgactcttgctgcatcctgaatcttgaagtgaagacagtaagtgtcgttgtttgttactcgaatgtgtaatttttaatctatgtctttcttgatggtgttttccagattcttgaacttttcacaacacaacactgcgttgcgtatcttcaaccctcttatgatgtggttgaattctgttttacgcttagtttgcttcttttgttgttgaattgagccagcaggcatgatttgggtttttgtttatcagaatattaggcgt

SEQ ID NO: 76670 - protein, 270 aa, Arabidopsis thaliana
  peptide (1)..(270): Ceres Seq. ID no. 7108794
AAASTKEEEEEEEEKTMENEREKQVYLAKLSEQTERYDEMVEAMKKVAQLDVELTVEERNLVSVGYKNVIGARRASWRILSSIEQKEESKGNDENVKRLKNYRKRVEDELAKVCNDILSVIDKHLIPSSNAVESTVFFYKMKGDYYRYLAEFSSGAERKEAADQSLEAYKAAVAAAENGLAPTHPVRLGLALNFSVFYYEILNSPESACQLAKQAFDDAIAELDSLNEESYKDSTLIMQLLRDNLTLWTSDLNEEGDERTKGADEPQDEN

SEQ ID NO: 76671 - protein, 254 aa, Arabidopsis thaliana; identical to SEQ ID NO: 23632
  peptide (1)..(254): Ceres Seq. ID no. 7108795

SEQ ID NO: 76672 - protein, 231 aa, Arabidopsis thaliana; identical to SEQ ID NO: 23633
  peptide (1)..(231): Ceres Seq. ID no. 7108796

SEQ ID NO: 76673 - DNA, 1856 bp, Arabidopsis thaliana
  misc_feature (1)..(1856): Ceres Seq. ID no. 7108813
  misc_feature (1)..(1856): Ortholog of  Ceres SEQ ID NO 15174547 as cited in SEQ ID NO 59586
  misc_feature (1)..(1856): Ortholog of  Ceres SEQ ID NO 15169470 as cited in SEQ ID NO 66036
gaattcctcgagctacgtcagggccctgacgtagccgtcaatcgaaatcccaaagatcagcgatggtgactctaaacgcttcttctcctctcacgaccaagtcgttcctcccctaccgtcacgctcctcgccgtccaatctctttctcccctgtcttcgccgttcattcgactgaccccaagaaatctacccaatcagcctccgcttcggttaaatggagtctagagagttggaagtcgaagaaagctttgcaattgccggattatcctgatcagaaggatgttgattcggttctacagacgctttcttcttttcctcctatagttttcgctggtgaggctaggaaactagaggataagcttggtcaagcggctatgggtcaagcctttatgcttcaaggtggtgattgtgctgagagtttcaaggaatttaacgctaataacattagagacacctttagggttcttcttcagatgggtgttgttctcatgttcggtggccagttaccagttatcaaggtgggaagaatggctggtcagtttgcgaagccgagattagacccatttgaggagaaagatggtgtgaagctgccgagttacagaggagataacataaatggtgatgcttttgatgagaaatcgaggattcctgatcctcataggatggttagagcgtacacacagtctgtggctacgttgaatctcttgagagcatttgctactggaggttatgcagctatgcagagagttagccagtggaaccttgatttcacgcaacatagtgaacagggtgacaggtaccgtgaattggctaatagagttgatgaggctttgggattcatgggtgcagctggacttactagtgctcacccgatcatgactactactgagttttggacatcccatgagtgtttgttattgccttatgagcaagcactcacaagagaggattcaacatctggactttactatgattgctctgcgcacatgctttgggttggagaacgaactcgccaacttgatggtgctcatgttgagtttctgaggggaatcgctaaccccctcggaatcaaggtgagtgataaaatggtccctagtgaactggttaagctgatagagatactaaaccctcagaacaagcctggaaggattacggttatagtgagaatgggagctgagaatatgcgggtcaagcttcctaatttgatcagagcagtccgtggagccggtcagattgtgacttgggttagtgatccaatgcacggaaacacaatcatggctcctggtgggctaaaaactcgttctttcgatgcaatcagggcggaattgagagcgttcttcgacgtccatgatcaagaagggagtttccctggcggggttcatttagaaatgactggtcaaaacgtgactgaatgtgtcggagggtcacgcaccatcacttacaacgatctaagctcacgctaccacactcactgtgacccaagactcaacgcatctcagtctctggagcttgcattcatcattgcagagcgtctgcgaaagagaaggcttggttccgggaatcttccgtcatctattggagtctagagaacaagaaaatacttatccgagctaggatgtgtgtgtatagaggctgatctctacttattaagttgccaagttaaatgagcttgtgtactgttaaaagtaagatattgttgtttttgtgtgttgggttatgattttgtctgaaataagtggctgactttataacccgtaaatctctacgtcacgcttgcaacaaaaattcgatatttgattcaatcacagaaaagtcctcccattaaggtgtaaaccctgacgtagctcgaggaattc

SEQ ID NO: 76674 - protein, 507 aa, Arabidopsis thaliana
  peptide (1)..(507): Ceres Seq. ID no. 7108814
MVTLNASSPLTTKSFLPYRHAPRRPISFSPVFAVHSTDPKKSTQSASASVKWSLESWKSKKALQLPDYPDQKDVDSVLQTLSSFPPIVFAGEARKLEDKLGQAAMGQAFMLQGGDCAESFKEFNANNIRDTFRVLLQMGVVLMFGGQLPVIKVGRMAGQFAKPRLDPFEEKDGVKLPSYRGDNINGDAFDEKSRIPDPHRMVRAYTQSVATLNLLRAFATGGYAAMQRVSQWNLDFTQHSEQGDRYRELANRVDEALGFMGAAGLTSAHPIMTTTEFWTSHECLLLPYEQALTREDSTSGLYYDCSAHMLWVGERTRQLDGAHVEFLRGIANPLGIKVSDKMVPSELVKLIEILNPQNKPGRITVIVRMGAENMRVKLPNLIRAVRGAGQIVTWVSDPMHGNTIMAPGGLKTRSFDAIRAELRAFFDVHDQEGSFPGGVHLEMTGQNVTECVGGSRTITYNDLSSRYHTHCDPRLNASQSLELAFIIAERLRKRRLGSGNLPSSIGV

SEQ ID NO: 76675 - protein, 403 aa, Arabidopsis thaliana
  peptide (1)..(403): Ceres Seq. ID no. 7108815
MGQAFMLQGGDCAESFKEFNANNIRDTFRVLLQMGVVLMFGGQLPVIKVGRMAGQFAKPRLDPFEEKDGVKLPSYRGDNINGDAFDEKSRIPDPHRMVRAYTQSVATLNLLRAFATGGYAAMQRVSQWNLDFTQHSEQGDRYRELANRVDEALGFMGAAGLTSAHPIMTTTEFWTSHECLLLPYEQALTREDSTSGLYYDCSAHMLWVGERTRQLDGAHVEFLRGIANPLGIKVSDKMVPSELVKLIEILNPQNKPGRITVIVRMGAENMRVKLPNLIRAVRGAGQIVTWVSDPMHGNTIMAPGGLKTRSFDAIRAELRAFFDVHDQEGSFPGGVHLEMTGQNVTECVGGSRTITYNDLSSRYHTHCDPRLNASQSLELAFIIAERLRKRRLGSGNLPSSIGV

SEQ ID NO: 76676 - protein, 398 aa, Arabidopsis thaliana
  peptide (1)..(398): Ceres Seq. ID no. 7108816
MLQGGDCAESFKEFNANNIRDTFRVLLQMGVVLMFGGQLPVIKVGRMAGQFAKPRLDPFEEKDGVKLPSYRGDNINGDAFDEKSRIPDPHRMVRAYTQSVATLNLLRAFATGGYAAMQRVSQWNLDFTQHSEQGDRYRELANRVDEALGFMGAAGLTSAHPIMTTTEFWTSHECLLLPYEQALTREDSTSGLYYDCSAHMLWVGERTRQLDGAHVEFLRGIANPLGIKVSDKMVPSELVKLIEILNPQNKPGRITVIVRMGAENMRVKLPNLIRAVRGAGQIVTWVSDPMHGNTIMAPGGLKTRSFDAIRAELRAFFDVHDQEGSFPGGVHLEMTGQNVTECVGGSRTITYNDLSSRYHTHCDPRLNASQSLELAFIIAERLRKRRLGSGNLPSSIGV

SEQ ID NO: 76677 - DNA, 1918 bp, Arabidopsis thaliana
  misc_feature (1)..(1918): Ceres Seq. ID no. 7108817
  misc_feature (1)..(1918): Ortholog of  Ceres SEQ ID NO 15174547 as cited in SEQ ID NO 59586
  misc_feature (1)..(1918): Ortholog of  Ceres SEQ ID NO 15169470 as cited in SEQ ID NO 66036
gaattcctcgagctacgtcagggctcattctctctctctctaaaaaaccaaatccagagtcagagaaaatctgtgatggctctttccaacgcctcctctctctccaccagatctatctacggcggtgatctttctcaccgtccaagcaaccgtcaatcatccttcacatttcatcccgccgtcaacaccaagcctaaatccgttaacctcgtcacggctgtacacgcggctgagccagctagaaacgctgtttcagtcaaagaatccgttgcgtcttcttcgtctggtgcattgaaatggactccagagagctggaaactgaagaaggctctgcaacttcctgattatcctaacgccaatgagcttgagtctgtgcttaaaacgatagaggcttttcctccgattgtgttcgccggagaagctaggaatcttgaagagagattggctgatgctgctgttggtaaagcttttcttctccaaggaggtgattgtgctgagagtttcaaggagttcaatgctactaatatcagagacaccttcagggttctgcttcagatgagtattgttcttacattcggtggccaggttccggtcattaaggttgggaggatggctggtcaatttgcaaagcctagatctgatgcatttgaggagaaggatggagtgaaattaccaagctacaagggagataacatcaatggtgatacttttgatgagaaatccaggattcctgatcctaataggatgattcgagcttacactcaatctgcagctactttgaatcttcttagagcctttgccactggaggttacgctgctattcaaagagttactcaatggaaccttgattttgttgaacaaagtgagcaagctgacaggtaccaggaattagctaatagggttgatgaggccttggggttcatgtctgcatgtggacttggcacggatcatccacttatgactacaactgatttctacacatcccatgagtgtttgcttctgccttatgaacagtcccttacaaggttggattcaacttctggtctctactatgattgttctgcacacatggtctggtgcggagagcgtaccagacaattggatggcgctcatgtcgagtttctcagggggattgctaatcctctgggcattaaggtgagcaacaaaatggatccctttgagctggttaagctagtagaaatcctgaatcctaataacaagcctggaagaatcactgtaattgtgagaatgggtgccgagaacatgagagttaagcttccccacctgatcagagcagtccgcagatcaggccagattgtgacatgggtctgcgatccaatgcatggaaacaccatcaaaagcacttgcggtcttaaaacacgtgcctttgactcaatactggctgaagtccgagcattccttgatgtgcacgagcaagaaggaagccacgcgggcggtatccatctcgagatgacaggtcagaacgtgacagaatgcattggagggtcccgcactgtgacctacgatgacctcagttctcgctaccacacacactgtgacccaaggctgaacgcgtcacagtctcttgaacttgccttcattgttgcagaacggctcaggaagagaagaacgggtagccagcgtgtgtcttgagtccggttcttcccttttatacactttttgattccaaacaaatcttttctctttgtcctgtgactgtgagttggtgtgtttatgacctaagttaaaagccccaaaagcctctctagagagtaaacctgtttctgctgtggacagaccatgtcatgtcattgttctttatgttaactttaatgtcaaaccgtgtcacttacactagtgtatatttctttttacatatctacacgaacatgaaccctgacgtagctcgaggaattcc

SEQ ID NO: 76678 - protein, 550 aa, Arabidopsis thaliana
  peptide (1)..(550): Ceres Seq. ID no. 7108818
EFLELRQGSFSLSLKNQIQSQRKSVMALSNASSLSTRSIYGGDLSHRPSNRQSSFTFHPAVNTKPKSVNLVTAVHAAEPARNAVSVKESVASSSSGALKWTPESWKLKKALQLPDYPNANELESVLKTIEAFPPIVFAGEARNLEERLADAAVGKAFLLQGGDCAESFKEFNATNIRDTFRVLLQMSIVLTFGGQVPVIKVGRMAGQFAKPRSDAFEEKDGVKLPSYKGDNINGDTFDEKSRIPDPNRMIRAYTQSAATLNLLRAFATGGYAAIQRVTQWNLDFVEQSEQADRYQELANRVDEALGFMSACGLGTDHPLMTTTDFYTSHECLLLPYEQSLTRLDSTSGLYYDCSAHMVWCGERTRQLDGAHVEFLRGIANPLGIKVSNKMDPFELVKLVEILNPNNKPGRITVIVRMGAENMRVKLPHLIRAVRRSGQIVTWVCDPMHGNTIKSTCGLKTRAFDSILAEVRAFLDVHEQEGSHAGGIHLEMTGQNVTECIGGSRTVTYDDLSSRYHTHCDPRLNASQSLELAFIVAERLRKRRTGSQRVS

SEQ ID NO: 76679 - protein, 525 aa, Arabidopsis thaliana
  peptide (1)..(525): Ceres Seq. ID no. 7108819
MALSNASSLSTRSIYGGDLSHRPSNRQSSFTFHPAVNTKPKSVNLVTAVHAAEPARNAVSVKESVASSSSGALKWTPESWKLKKALQLPDYPNANELESVLKTIEAFPPIVFAGEARNLEERLADAAVGKAFLLQGGDCAESFKEFNATNIRDTFRVLLQMSIVLTFGGQVPVIKVGRMAGQFAKPRSDAFEEKDGVKLPSYKGDNINGDTFDEKSRIPDPNRMIRAYTQSAATLNLLRAFATGGYAAIQRVTQWNLDFVEQSEQADRYQELANRVDEALGFMSACGLGTDHPLMTTTDFYTSHECLLLPYEQSLTRLDSTSGLYYDCSAHMVWCGERTRQLDGAHVEFLRGIANPLGIKVSNKMDPFELVKLVEILNPNNKPGRITVIVRMGAENMRVKLPHLIRAVRRSGQIVTWVCDPMHGNTIKSTCGLKTRAFDSILAEVRAFLDVHEQEGSHAGGIHLEMTGQNVTECIGGSRTVTYDDLSSRYHTHCDPRLNASQSLELAFIVAERLRKRRTGSQRVS

SEQ ID NO: 76680 - protein, 365 aa, Arabidopsis thaliana
  peptide (1)..(365): Ceres Seq. ID no. 7108820
MSIVLTFGGQVPVIKVGRMAGQFAKPRSDAFEEKDGVKLPSYKGDNINGDTFDEKSRIPDPNRMIRAYTQSAATLNLLRAFATGGYAAIQRVTQWNLDFVEQSEQADRYQELANRVDEALGFMSACGLGTDHPLMTTTDFYTSHECLLLPYEQSLTRLDSTSGLYYDCSAHMVWCGERTRQLDGAHVEFLRGIANPLGIKVSNKMDPFELVKLVEILNPNNKPGRITVIVRMGAENMRVKLPHLIRAVRRSGQIVTWVCDPMHGNTIKSTCGLKTRAFDSILAEVRAFLDVHEQEGSHAGGIHLEMTGQNVTECIGGSRTVTYDDLSSRYHTHCDPRLNASQSLELAFIVAERLRKRRTGSQRVS

SEQ ID NO: 76681 - DNA, 1151 bp, Arabidopsis thaliana
  misc_feature (1)..(1151): Ceres Seq. ID no. 7108844
  misc_feature (1)..(1151): Ortholog of  Ceres SEQ ID NO 13595497 as cited in SEQ ID NO 51127
cttcaactgctgcgtctagctgtccttccttcttcatttgcttcttcttctctagctcagcgcggatcgctgcagtagtaccctgacgtagcctttcttcttcctttactttctcatcttctatctctcaaaagaaaagcagacaactttatttgcaaaaacagagtttttttttcttatcttgagaaagttcaacagaagatgatgttcgagaaagacgatctgggtctaagcttaggcttgaattttccaaagaaacagatcaatctcaaatcaaatccatctgtttctgttactccttcttcttcttcttttggattattcagaagatcttcatggaacgagagttttacttcttcagttccaaactcagattcgtcacaaaaagaaacaagaactttcatccgaggaatcgacgtgaacagaccaccgtctacagcggaatacggcgacgaagacgctggagtatcttcacctaacagtacagtctcaagctctacagggaaaagaagcgagagagaagaagacacagatccacaaggctcaagaggaatcagtgacgatgaagatggtgataactccaggaaaaagcttagactttccaaagatcaatctgctattcttgaagagaccttcaaagatcacagtactctcaatccgaagcagaagcaagcattggctaaacaattagggttacgagcaagacaagtggaagtttggtttcagaacagacgagcaagaacaaagctgaagcaaacggaggtagactgcgagttcttacggagatgctgcgagaatctaacggaagagaaccgtcggctacaaaaagaagtaacggaattgagagtacttaagctctctcctcagttctacatgcacatgagcccacccactactttgaccatgtgcccttcatgtgaacacgtgtcggtcccgccaccacaacctcaggctgctacgtcagcgcaccaccggtcgttgccggtcaatgcgtgggctcctgctacgaggatatctcacggcttgacttttgacgctcttcgtcctaggtcctaagtctttttacttgcaaccaaagggcattttggtcgttttttaagtttcatggaccagatatgcatgtagttgttaacatgtatgtattttcttag

SEQ ID NO: 76682 - protein, 284 aa, Arabidopsis thaliana
  peptide (1)..(284): Ceres Seq. ID no. 7108845
MMFEKDDLGLSLGLNFPKKQINLKSNPSVSVTPSSSSFGLFRRSSWNESFTSSVPNSDSSQKETRTFIRGIDVNRPPSTAEYGDEDAGVSSPNSTVSSSTGKRSEREEDTDPQGSRGISDDEDGDNSRKKLRLSKDQSAILEETFKDHSTLNPKQKQALAKQLGLRARQVEVWFQNRRARTKLKQTEVDCEFLRRCCENLTEENRRLQKEVTELRVLKLSPQFYMHMSPPTTLTMCPSCEHVSVPPPQPQAATSAHHRSLPVNAWAPATRISHGLTFDALRPRS

SEQ ID NO: 76683 - protein, 283 aa, Arabidopsis thaliana
  peptide (1)..(283): Ceres Seq. ID no. 7108846
MFEKDDLGLSLGLNFPKKQINLKSNPSVSVTPSSSSFGLFRRSSWNESFTSSVPNSDSSQKETRTFIRGIDVNRPPSTAEYGDEDAGVSSPNSTVSSSTGKRSEREEDTDPQGSRGISDDEDGDNSRKKLRLSKDQSAILEETFKDHSTLNPKQKQALAKQLGLRARQVEVWFQNRRARTKLKQTEVDCEFLRRCCENLTEENRRLQKEVTELRVLKLSPQFYMHMSPPTTLTMCPSCEHVSVPPPQPQAATSAHHRSLPVNAWAPATRISHGLTFDALRPRS

SEQ ID NO: 76684 - DNA, 838 bp, Arabidopsis thaliana
  misc_feature (1)..(838): Ceres Seq. ID no. 7108852
  misc_feature (1)..(838): Ortholog of  Ceres SEQ ID NO 15171235 as cited in SEQ ID NO 52469
  misc_feature (1)..(838): Ortholog of  Ceres SEQ ID NO 15172705 as cited in SEQ ID NO 56069
  misc_feature (1)..(838): Ortholog of  Ceres SEQ ID NO 12635657 as cited in SEQ ID NO 0
  misc_feature (1)..(838): Ortholog of  Ceres SEQ ID NO 12635879 as cited in SEQ ID NO 0
  misc_feature (1)..(838): Ortholog of  Ceres SEQ ID NO 13599649 as cited in SEQ ID NO 0
  misc_feature (1)..(838): Ortholog of  Ceres SEQ ID NO 14309205 as cited in SEQ ID NO 0
  misc_feature (1)..(838): Ortholog of  Ceres SEQ ID NO 15177492 as cited in SEQ ID NO 0
gtcgacccacgcgtccgcaatcttcttcatcgatttctctcttccaaatctcccaaaagatgtcgaaccctagagttttcttcgacatgagtctcagcggtactcccatcggacggatcgagatggagcttttcgctgatacaaccccaaacacggcggagaatttccgtgctctctgtaccggcgagaaaggaatgggaaagctaggtaagccacttcacttcaaaggatcgatcttccaccgtgtgattcccggattcatgtgtcaaggaggtgatttcaccgccaagaacggaaccggtggtgaatcgatctacggtgctaagttcaaggacgagaactttatcaagaagcatacaggagctgggattctctcaatggctaactctggtcctaacactaacggatctcagttcttcatctgtaccgataagacgtcgtggttagatggtaagcacgttgtgtttggacaagttgttaaaggcttggacgtcgtgaaggcgattgagaaagttggatctgattctggaaagacttccaaagtcgttaccatcactgattgtggtcagctttcttagatctgagtgagaaagtgagagactttgatctttatgagtaataatggtgtcttttgctttcggttgttcttcctcttaccttaatggattattctgtttagggtttgagttttcgtttcagagtttgtaacaaaacccttttgtgttttctggggtttgaaataattatgagcttacccaattgcttctttgtgtttttgcttctatgaacaagtagtaactgattcgtcttctgattcttcaactgaatcgtgaatctt

SEQ ID NO: 76685 - protein, 191 aa, Arabidopsis thaliana
  peptide (1)..(191): Ceres Seq. ID no. 7108853
RPTRPQSSSSISLFQISQKMSNPRVFFDMSLSGTPIGRIEMELFADTTPNTAENFRALCTGEKGMGKLGKPLHFKGSIFHRVIPGFMCQGGDFTAKNGTGGESIYGAKFKDENFIKKHTGAGILSMANSGPNTNGSQFFICTDKTSWLDGKHVVFGQVVKGLDVVKAIEKVGSDSGKTSKVVTITDCGQLS

SEQ ID NO: 76686 - protein, 172 aa, Arabidopsis thaliana; identical to SEQ ID NO: 25632
  peptide (1)..(172): Ceres Seq. ID no. 7108854

SEQ ID NO: 76687 - protein, 163 aa, Arabidopsis thaliana; identical to SEQ ID NO: 25633
  peptide (1)..(163): Ceres Seq. ID no. 7108855

SEQ ID NO: 76688 - DNA, 715 bp, Arabidopsis thaliana
  misc_feature (1)..(715): Ceres Seq. ID no. 7108888
  misc_feature (1)..(715): Ortholog of  Ceres SEQ ID NO 15226850 as cited in SEQ ID NO 62501
gtataattgtttttgtcggtcgctaagatattttcacagcttcggagacttcaggaaaaaaaaaaatcatttcttctctgaaacgaaaaaccaaagaaacgagaagaagaagctatggcggatcagctaactgatgaacagatctctgagtttaaggaagcttttagcctcttcgacaaagatggagatggttgcatcaccacaaaggagctgggaacagtgatgcggtcactagggcagaacccaacagaagctgagctacaagacatgatcaacgaggttgacgctgatggaaacggaaccattgacttccctgagttcttaaacctaatggctaaaaagatgaaggacacagactcggaggaagagctgaaagaagctttcagggtgttcgacaaagaccagaacggtttcatatccgctgcagagcttcgccatgtgatgacgaatctaggtgagaaactgactgatgaagaggtcgaggagatgattcgtgaagcagatgttgatggagatggtcagataaactacgaggagtttgtcaagattatgatggctaagtgatgatgataagaaaaaaatgaagaataaaagtggtgatgtgatgaccttttaggcttttactatctacaaaagaatgattcgacctttaatgtcttgggtttgatttgagcctagtagtttcttaaggttttaacagactgaatttgtgact

SEQ ID NO: 76689 - protein, 149 aa, Arabidopsis thaliana; identical to SEQ ID NO: 27678
  peptide (1)..(149): Ceres Seq. ID no. 7108889

SEQ ID NO: 76690 - protein, 113 aa, Arabidopsis thaliana; identical to SEQ ID NO: 27679
  peptide (1)..(113): Ceres Seq. ID no. 7108890

SEQ ID NO: 76691 - protein, 98 aa, Arabidopsis thaliana; identical to SEQ ID NO: 27680
  peptide (1)..(98): Ceres Seq. ID no. 7108891

SEQ ID NO: 76692 - DNA, 1438 bp, Arabidopsis thaliana
  misc_feature (1)..(1438): Ceres Seq. ID no. 11023447
  misc_feature (1)..(1438): Ortholog of  Ceres SEQ ID NO 13590671 as cited in SEQ ID NO 68208
ttccccccgaaaaacgcagagctgagctgagttacataagatcgagagaattcgcaaactcgtttcttcattcgtcttcgtctttcgccatggctgctctacaatacttggaatctctgaaaaatacgcatccagagctcggcgaatggtacaattcccttgcagatctgtatcagaaaaagctctggcatcaactcacccttaagctcgaacagttcatcgctctcgctgtctttcaggctggtgatgctttgattcagttctatcacaatttcatcactgactttgagacgaagatcaatcttctgaagcttgcgcattttgctgtggtggtctctcgacagtactctgagaaagaagctgcagttagctatcttgaaagcgtgattgagaaacttagagctactaaagagcctaggattactgaaccaatcatttatattgaaacacaaaaagctttattcaagcttgagcaaggtgatcagaaggagtgcaaaaaaatcttggacgatggaaagagctctcttgatagtatgactgacattgatccatcagtctatgccaacttctattgggtgtcttctcagtaccataagtgccgtcaagaattttctgatttctacaaaagtgctctgctttatcttgcatacacgtctgtggaggacctttcagaatcgtttaagctggatttggctttcgatttgtcactatcagctctacttggggagaacatctataactttggggaactgttagcccatcccattttgaaaagtctccttggaacaaatgtggaatggctctaccacattctacaggcattcaaccatggtgatttagttcagtatcaagaactatgccgtgtgcacaacgcatccttgattgctcaaccagcacttgttgagaacgagaagaagcttttggaaaagatcaacattctctgccttatcgagatcatcttcagccgacccgctgaagatagaaccattcctttgagcatcatcgctgagcgtactaaactttccattgaagatgttgagcaccttctcatgaagagcctttctgtgcatttgatcgagggcatcatagaccaagtgaacggaacaatttatgtctcatgggcgcaaccgagagtactagggattccacagatcaaggctttgagggatcaattagacagttgggttgacaaagttcacaccactttactatctgttgaagccgagacaccagatcttgttgcagcataagagaaaagaaaaccttcttcctccttttgaagctactgaatgtaaaacaccatcttctctgggattagattcaagttttttatttcagtcgtagaagaaattacaattgctttttaatcttttgacttccatttcaagatgtccgaaatttcagttctacatttagactattttcatacattttttct

SEQ ID NO: 76693 - protein, 415 aa, Arabidopsis thaliana
  peptide (1)..(415): Ceres Seq. ID no. 11023448
PPEKRRAELSYIRSREFANSFLHSSSSFAMAALQYLESLKNTHPELGEWYNSLADLYQKKLWHQLTLKLEQFIALAVFQAGDALIQFYHNFITDFETKINLLKLAHFAVVVSRQYSEKEAAVSYLESVIEKLRATKEPRITEPIIYIETQKALFKLEQGDQKECKKILDDGKSSLDSMTDIDPSVYANFYWVSSQYHKCRQEFSDFYKSALLYLAYTSVEDLSESFKLDLAFDLSLSALLGENIYNFGELLAHPILKSLLGTNVEWLYHILQAFNHGDLVQYQELCRVHNASLIAQPALVENEKKLLEKINILCLIEIIFSRPAEDRTIPLSIIAERTKLSIEDVEHLLMKSLSVHLIEGIIDQVNGTIYVSWAQPRVLGIPQIKALRDQLDSWVDKVHTTLLSVEAETPDLVAA

SEQ ID NO: 76694 - protein, 386 aa, Arabidopsis thaliana; identical to SEQ ID NO: 49844
  peptide (1)..(386): Ceres Seq. ID no. 11023449

SEQ ID NO: 76695 - protein, 238 aa, Arabidopsis thaliana; identical to SEQ ID NO: 49845
  peptide (1)..(238): Ceres Seq. ID no. 11023450

SEQ ID NO: 76696 - DNA, 1956 bp, Arabidopsis thaliana
  misc_feature (1)..(1956): Ceres Seq. ID no. 11026568
  misc_feature (1)..(1956): Ortholog of  Ceres SEQ ID NO 15171762 as cited in SEQ ID NO 57846
  misc_feature (1)..(1956): Ortholog of  Ceres SEQ ID NO 12597287 as cited in SEQ ID NO 63982
gaatatagaccccacgcgtccggggtttatatcttttcatcggattttctttgtcgagcaagagccatgtcactgagacccaacgctaagacggaggttcgccggaaccgatacaaagttgcagtggatgcggaggaaggacgacggaggagagaagacaacatggttgagatccgtaaaagcaagcgtgaggagagtttgatgaagaagagacgtgaaggtatgcaagctcttcagggtttcccttcagcttccgccgcctccgtcgataagaagttggatagtctgaaggatatggtcgctggggtttggtccgatgaccctgccttgcagcttgagtccactactcagttcaggaagcttctctctattgagagaagtcctccaatcgaggaagtgataagtgctggtgttgttcctaggtttgttgagtttcttaagaaagaagattaccccgccattcagtttgaggcagcttgggctctaacaaacattgcatctggaacatcggatcacactaaggttgtaatcgatcacaatgctgttccaatctttgttcagcttcttgcttcccctagcgatgatgttcgtgaacaggctgtatgggctttgggtaacgttgctggtgattcaccacggtgccgtgatcttgttcttggatgtggggcactgcttccgctgctcaatcagcttaatgagcatgctaaattgtccatgcttcgaaatgccacttggaccttgtcaaacttctgtcgtggcaagcctcagcctcactttgaccaggtcaaacctgctcttcccgcccttgaacgactaattcattcagatgatgaagaagtcttgacagatgcctgttgggctctttcttacctctctgatgggaccaatgacaaaatccagactgtcatccaggccggtgttgtcccaaaacttgttgaacttctcctccatcattctccatctgtgctaattcctgctcttcgcactgttggaaatatagttactggagatgatatacaaacacagtgcgtgatcaatagtggtgctctaccttgtcttgccaacctgctcactcaaaaccataagaaaagcataaagaaggaagcttgctggacgatttcaaacatcacagcaggcaacaaagatcagatccagacggtagttgaggctaatttgatttccccgttggtgagtctgcttcaaaatgctgaatttgacattaagaaggaagctcatgggcaatttcaaatgcaacttcaggtggttctcatgatcaaataaaatacctggtggagcaagggtgcataaaaccattatgcgatctcctggtttgcccagatccaagaatcataactgtctgccttgaaggattggaaaacattttgaaggtgggagaggcagagaagaacttgggtcacacaggagacatgaactattacgctcagctgattgatgatgcagaagggctagaaaagatcgagaaccttcagagccatgacaacaatgagatctatgagaaggctgttaaaattctggagacatactggcttgaagaggaagatgatgagacacagcaacctccaggtgttgatggttctcaggctgggttccagtttggagggaatcaagctccagtaccatccggaggattcaacttcagctgaaggaatggaattggaagcttgcaacttgagaatggtgaaaggtcagagtcagtcagagtctagtttcactgccatggttatactccaggtctggtctggtctggtctcagaggtttgtaccgggtggtcggtttaaaagtacagcgtctgagaaagtgtttggttcattgtccagggctatttttttgaaatgactggtacaccggtcgtgagtcgacctttgtgttgtttttaaattttggagggttataaaaacttacagtggagtcttttgtttttgtgttgacaacag

SEQ ID NO: 76697 - protein, 426 aa, Arabidopsis thaliana
  peptide (1)..(426): Ceres Seq. ID no. 11026569
EYRPHASGVYIFSSDFLCRARAMSLRPNAKTEVRRNRYKVAVDAEEGRRRREDNMVEIRKSKREESLMKKRREGMQALQGFPSASAASVDKKLDSLKDMVAGVWSDDPALQLESTTQFRKLLSIERSPPIEEVISAGVVPRFVEFLKKEDYPAIQFEAAWALTNIASGTSDHTKVVIDHNAVPIFVQLLASPSDDVREQAVWALGNVAGDSPRCRDLVLGCGALLPLLNQLNEHAKLSMLRNATWTLSNFCRGKPQPHFDQVKPALPALERLIHSDDEEVLTDACWALSYLSDGTNDKIQTVIQAGVVPKLVELLLHHSPSVLIPALRTVGNIVTGDDIQTQCVINSGALPCLANLLTQNHKKSIKKEACWTISNITAGNKDQIQTVVEANLISPLVSLLQNAEFDIKKEAHGQFQMQLQVVLMIK

SEQ ID NO: 76698 - protein, 404 aa, Arabidopsis thaliana
  peptide (1)..(404): Ceres Seq. ID no. 11026570
MSLRPNAKTEVRRNRYKVAVDAEEGRRRREDNMVEIRKSKREESLMKKRREGMQALQGFPSASAASVDKKLDSLKDMVAGVWSDDPALQLESTTQFRKLLSIERSPPIEEVISAGVVPRFVEFLKKEDYPAIQFEAAWALTNIASGTSDHTKVVIDHNAVPIFVQLLASPSDDVREQAVWALGNVAGDSPRCRDLVLGCGALLPLLNQLNEHAKLSMLRNATWTLSNFCRGKPQPHFDQVKPALPALERLIHSDDEEVLTDACWALSYLSDGTNDKIQTVIQAGVVPKLVELLLHHSPSVLIPALRTVGNIVTGDDIQTQCVINSGALPCLANLLTQNHKKSIKKEACWTISNITAGNKDQIQTVVEANLISPLVSLLQNAEFDIKKEAHGQFQMQLQVVLMIK

SEQ ID NO: 76699 - protein, 372 aa, Arabidopsis thaliana
  peptide (1)..(372): Ceres Seq. ID no. 11026571
MVEIRKSKREESLMKKRREGMQALQGFPSASAASVDKKLDSLKDMVAGVWSDDPALQLESTTQFRKLLSIERSPPIEEVISAGVVPRFVEFLKKEDYPAIQFEAAWALTNIASGTSDHTKVVIDHNAVPIFVQLLASPSDDVREQAVWALGNVAGDSPRCRDLVLGCGALLPLLNQLNEHAKLSMLRNATWTLSNFCRGKPQPHFDQVKPALPALERLIHSDDEEVLTDACWALSYLSDGTNDKIQTVIQAGVVPKLVELLLHHSPSVLIPALRTVGNIVTGDDIQTQCVINSGALPCLANLLTQNHKKSIKKEACWTISNITAGNKDQIQTVVEANLISPLVSLLQNAEFDIKKEAHGQFQMQLQVVLMIK

SEQ ID NO: 76700 - DNA, 2297 bp, Arabidopsis thaliana
  misc_feature (1)..(2297): Ceres Seq. ID no. 11033056
  misc_feature (1)..(2297): Ortholog of  Ceres SEQ ID NO 13657789 as cited in SEQ ID NO 66154
tgaaaccaaactttcgtcttcttcccggctttactctctttctctctccaccgtcggctcagatctagacggaaatgtgccggtgaaatcgaatcatgaaaagatctcacatttcgtctcctcgttcttattcacgaccagcgatttcaatcttcggtgtcttcctcttgtttcttctggttttaacactaagctctcgaaaaccatcagattcatcctccggtttagctccaaatcgaaacttagccacaaaatcgacgattccgaggtttgcgtatttggtaacgggaacgaaaggagatgggaaacgagtgaagcggctgcttaaagcaatacatcatccgagaaattactatctgcttcatttggatctcgaagcttcagatgaagagagaatggagctggcgaagtatgtgagatcggagaagaagaagtttgagaatgttatggtaatgggtttagctgatttggttacggagaaaggtccaacgatgttagctagtacgcttcatggtgttgccattttgttgaagaaagctaaggattgggattggtttattaatcttagtgcttctgattatcctttaatgcctcaagatgatattttgcatatattctcatacttgccacgctacctgaactttatcgagcacacaagcaacatcggttggaaagagtgagggagctaatattatgaaccaaagagcaaggcctatcattattgatcctggtttttaccatttgaagaaatctggtgtcttttgggctaaagaacggagatctttgcctgcttcattcaaacttttcatgggttcaaccagcgttgctttaacaagaccgttcctcgagttttgcatttggggatgggataatctcccaagaacgctattgatgtactataccaacttcctcttgtcatctgaaggctactttcagacagttgtgtgcaacaataaagattatcagaacacaacggttaaccacgacctgcattacacaaaatgggatccaaaagaaaagaggaaaaaatggactatatgtatggaccagggagacaccatctgtttgtaccaggaccagtgaacataccggaaccggtaatccgggcgatgaaccggaacaacgaggattaccggtcaccagccattccggcgcttacgaaaacattgttggaggatgttaagaagatattcaagaccacatcagggacaccttttctgtttcccacgaccggggctggtgcttgggagagtgccttgaccaacacgttatctcctggagacaggattgtttcgtttctgattggacaatttagcttgctctggattgaccagcagaagaggcttaatttcaatgttgatgtggttgagagtgattggggacaaggtgctaatctccaagtcttggcctcaaagctctcacaagacgagaatcataccatcaaagccatttgcattgtccacaacgagaccgcgaccggagttaccaatgacatctctgctgtccgcacactcctcgatcactacaagcatccggctttgctgctagtggacggtgtttcgtccatctgcgcgcttgatttccgaatggatgagtggggagtggacgtggccttgactgggtctcagaaagccttatctcttccaacaggacttggtattgtctgcgccagtcctaaagctttggaagctgccaaaacttctaaatctctcaaagtattctttgactggaatgactaccttaagttttacaagctaggaacctattggccatacacaccttccattcaacttctctacggtcttagagctgctcttgatcttatctttgaggaaggacttgagaacatcatcgcccgccatgctcgtttgggaaaggccaccaggcttgcggtggaagcatgggggctgaaaaactgcacacagaaggaggaatggataagtaacacagtgacagcagttatggtgcctccgcatatagacggttcggagattgtgagaagggcatggcagaggtacaacttaagtcttggtcttggtctcaacaaagtggctggaaaggttttcagaattggacacctaggaaatgtgaatgagttgcaacttctcgggtgtcttgcgggagtggagatgatactgaaggatgttggatacccagttgtaatgggaagtggagttgcagctgcctctacttatcttcagcaccacattcctctcattccctctagaatctaatccatgtggtccttctctttctttctcttcctctcaatgtaaacaaactctcatgttttctct

SEQ ID NO: 76701 - protein, 410 aa, Arabidopsis thaliana
  peptide (1)..(410): Ceres Seq. ID no. 11033057
MGSKRKEEKMDYMYGPGRHHLFVPGPVNIPEPVIRAMNRNNEDYRSPAIPALTKTLLEDVKKIFKTTSGTPFLFPTTGAGAWESALTNTLSPGDRIVSFLIGQFSLLWIDQQKRLNFNVDVVESDWGQGANLQVLASKLSQDENHTIKAICIVHNETATGVTNDISAVRTLLDHYKHPALLLVDGVSSICALDFRMDEWGVDVALTGSQKALSLPTGLGIVCASPKALEAAKTSKSLKVFFDWNDYLKFYKLGTYWPYTPSIQLLYGLRAALDLIFEEGLENIIARHARLGKATRLAVEAWGLKNCTQKEEWISNTVTAVMVPPHIDGSEIVRRAWQRYNLSLGLGLNKVAGKVFRIGHLGNVNELQLLGCLAGVEMILKDVGYPVVMGSGVAAASTYLQHHIPLIPSRI

SEQ ID NO: 76702 - protein, 401 aa, Arabidopsis thaliana
  peptide (1)..(401): Ceres Seq. ID no. 11033058
MDYMYGPGRHHLFVPGPVNIPEPVIRAMNRNNEDYRSPAIPALTKTLLEDVKKIFKTTSGTPFLFPTTGAGAWESALTNTLSPGDRIVSFLIGQFSLLWIDQQKRLNFNVDVVESDWGQGANLQVLASKLSQDENHTIKAICIVHNETATGVTNDISAVRTLLDHYKHPALLLVDGVSSICALDFRMDEWGVDVALTGSQKALSLPTGLGIVCASPKALEAAKTSKSLKVFFDWNDYLKFYKLGTYWPYTPSIQLLYGLRAALDLIFEEGLENIIARHARLGKATRLAVEAWGLKNCTQKEEWISNTVTAVMVPPHIDGSEIVRRAWQRYNLSLGLGLNKVAGKVFRIGHLGNVNELQLLGCLAGVEMILKDVGYPVVMGSGVAAASTYLQHHIPLIPSRI

SEQ ID NO: 76703 - protein, 398 aa, Arabidopsis thaliana
  peptide (1)..(398): Ceres Seq. ID no. 11033059
MYGPGRHHLFVPGPVNIPEPVIRAMNRNNEDYRSPAIPALTKTLLEDVKKIFKTTSGTPFLFPTTGAGAWESALTNTLSPGDRIVSFLIGQFSLLWIDQQKRLNFNVDVVESDWGQGANLQVLASKLSQDENHTIKAICIVHNETATGVTNDISAVRTLLDHYKHPALLLVDGVSSICALDFRMDEWGVDVALTGSQKALSLPTGLGIVCASPKALEAAKTSKSLKVFFDWNDYLKFYKLGTYWPYTPSIQLLYGLRAALDLIFEEGLENIIARHARLGKATRLAVEAWGLKNCTQKEEWISNTVTAVMVPPHIDGSEIVRRAWQRYNLSLGLGLNKVAGKVFRIGHLGNVNELQLLGCLAGVEMILKDVGYPVVMGSGVAAASTYLQHHIPLIPSRI

SEQ ID NO: 76704 - DNA, 3083 bp, Arabidopsis thaliana
  misc_feature (1)..(3083): Ceres Seq. ID no. 11033071
  misc_feature (1)..(3083): Ortholog of  Ceres SEQ ID NO 13600220 as cited in SEQ ID NO 0
ataaaaaaaacttacttgaaaaatggcactcaaagcgattctctttttgggtttatttctcgtcgtgatagtttctccgatcaccgtctacggtggagctgtgtgtccggcgagttccacgtttggtcgtggaagctttcctgatggtttcttgttcggtgctacaacttctgctttccagcatgaaggtgcagcagaagaaggaggccgaggttccagcatttgggactcattcactcttaaacaacattcagaaagcaacaacaatcttgacggcaggctcggagttgatttctatcatcattacaaggaagatgttcaactattgaaaaaactgaatatggatgcctttaggttctctatatcttggtcaagaatatttccccatgggaaaaaagacaagggagtgagtgaaacaggagttaaattctacaatgatcttatcaacgagctcattgcaaatggtgtaacgcctcttgtcacattgtttcaatgggatgtacctcaggctcttgaagatgaatacggcggtttcttgagtgaccgtattttggaggatttccgtgattttgcacagtttgctttcaataaatatggtgatagagtgaagcattgggttactataaacgaaccttatgaatttagtcgtggtggatacgagactggagagaaagcaccaggaagatgttctaaatatgtcaatgagaaatgtgttgcaggcaagagtggccatgaagtttacactgttagtcacaatctgctgttggctcatgccgaagctgtggaagaattcaggaaatgtggaaagtgcacaggtggaaagatcggaattgttcaaagtccaatgtggtttgagccttatgataagaaatccacctcgagtccttcagaggagatagtgaagagagctatggatttcactctaggctggcatatggagccaataacacatggagattaccctcaggccatgaaagatgttgttggtagtcgattaccatcttttacgcccgagcagaaggagaaactgaagggttcttatgattttgtcggtatcaattacttcacttctacatttgttgctcatacggacaatgttaatccagagaaaccgagttgggaagctgattctcgcttgcagttacattcgaataacgttgatgggttcaagattggttctcagcctgctactgcgaagtactgatgaatcccctaatgatttttatcaaaatcattaagttaaggtagatacacatcttgtcatatgatcaaatggtttcgccaaaaatcaataatcagacaacaaaatgtgcgaactcgatattttacacgactctctttaccaattctgccccgaattacacttaaaacgactcaacagcttaacgttggcttgccacgccttacttgactgtaaaactctcactcttaccgaacttggccgtaacctgccaaccaaagcgagaacaaaacataacatcaaacgaatcgaccgattgttaggtaatcgtcacctccacaaagagcgactcgctgtataccgttggcatgctagctttatctgttcgggcaatacgatgcccattgtacttgttgactggtctgatatccgtgagcaaaaacggcttatggtattgcgagcttcagtcgcactacacggtcgttctgttactctttatgagaaagcgttcccgctttcagagcaatgttcaaagaaagctcatgaccaatttctagccgaccttgcgagcattctaccgagtaacaccacaccgctcattgtcagtgatgctggctttaaagtgccatggtataaatccgttgagaagctgggttggtactggttaagtcgagtaagaggaaaagtacaatatgcagacctaggagcggaaaactggaaacctatcagcaacttacatgatatgtcatctagtcactcaaagactttaggctataagaggctgactaaaagcaatccaatctcatgccaaattctattgtataaatctcgctctaaaggccgaaaaaatcagcgctcgacacggactcattgtcaccacccgtcacctaaaatctactcagcgtcggcaaaggagccatggattctagcaactaacttacctgttgaaattcgaacacccaaacaacttgttaatatctattcgaagcgaatgcagattgaagaaaccttccgagacttgaaaagtcctgcctacggactaggcctacgccatagccgaacgagcagctcagagcgttttgatatcatgctgctaatcgccctgatgcttcaactaacatgttggcttgcgggcgttcatgctcagaaacaaggttgggacaagcacttccaggctaacacagtcagaaatcgaaacgtactctcaacagttcgcttaggcatggaagttttgcggcattctggctacacaataacaagggaagactcactcgtggctgcaaccctgcttactcaaaatctattcacacatggttacgttttggggaaattatgaggggatctctcagtgcgaagtatcctgtttgcgctgacgggttaagaaaagttttgaaatacatcaaagagaactacaatgacccagaaatcatagtcactggaaacgggtacaaggagacacttgaagagaaagatgtacttccagatgccctcagcgatagtaacaggaagtattatcatatgagacatctcatggcattacatggagcagtctgcgaggacaaggttaatgttaaaggttactttgtgtcgtcgcttatggatggactagagtgggaagatggatacaagacgaggtctggactgtactatgtagactatggacacaatatgggacggcatgagaaacaatctgccaagtggctctccaagctccttgagaaagtcccggacacgattcagtcgaaggtagattcggattcaaggaaagagttataaatgatcagagatccttttcgcaactctgtttaatcgatcatatgatgttatgtgtgtttttatcttaaaagagtgtaatccacgatctatgtagtttatataataaataaagaagtaacttatatcg

SEQ ID NO: 76705 - protein, 402 aa, Arabidopsis thaliana
  peptide (1)..(402): Ceres Seq. ID no. 11033072
MCELDILHDSLYQFCPELHLKRLNSLTLACHALLDCKTLTLTELGRNLPTKARTKHNIKRIDRLLGNRHLHKERLAVYRWHASFICSGNTMPIVLVDWSDIREQKRLMVLRASVALHGRSVTLYEKAFPLSEQCSKKAHDQFLADLASILPSNTTPLIVSDAGFKVPWYKSVEKLGWYWLSRVRGKVQYADLGAENWKPISNLHDMSSSHSKTLGYKRLTKSNPISCQILLYKSRSKGRKNQRSTRTHCHHPSPKIYSASAKEPWILATNLPVEIRTPKQLVNIYSKRMQIEETFRDLKSPAYGLGLRHSRTSSSERFDIMLLIALMLQLTCWLAGVHAQKQGWDKHFQANTVRNRNVLSTVRLGMEVLRHSGYTITREDSLVAATLLTQNLFTHGYVLGKL

SEQ ID NO: 76706 - protein, 393 aa, Arabidopsis thaliana
  peptide (1)..(393): Ceres Seq. ID no. 11033073
MALKAILFLGLFLVVIVSPITVYGGAVCPASSTFGRGSFPDGFLFGATTSAFQHEGAAEEGGRGSSIWDSFTLKQHSESNNNLDGRLGVDFYHHYKEDVQLLKKLNMDAFRFSISWSRIFPHGKKDKGVSETGVKFYNDLINELIANGVTPLVTLFQWDVPQALEDEYGGFLSDRILEDFRDFAQFAFNKYGDRVKHWVTINEPYEFSRGGYETGEKAPGRCSKYVNEKCVAGKSGHEVYTVSHNLLLAHAEAVEEFRKCGKCTGGKIGIVQSPMWFEPYDKKSTSSPSEEIVKRAMDFTLGWHMEPITHGDYPQAMKDVVGSRLPSFTPEQKEKLKGSYDFVGINYFTSTFVAHTDNVNPEKPSWEADSRLQLHSNNVDGFKIGSQPATAKY

SEQ ID NO: 76707 - protein, 312 aa, Arabidopsis thaliana
  peptide (1)..(312): Ceres Seq. ID no. 11033074
MPIVLVDWSDIREQKRLMVLRASVALHGRSVTLYEKAFPLSEQCSKKAHDQFLADLASILPSNTTPLIVSDAGFKVPWYKSVEKLGWYWLSRVRGKVQYADLGAENWKPISNLHDMSSSHSKTLGYKRLTKSNPISCQILLYKSRSKGRKNQRSTRTHCHHPSPKIYSASAKEPWILATNLPVEIRTPKQLVNIYSKRMQIEETFRDLKSPAYGLGLRHSRTSSSERFDIMLLIALMLQLTCWLAGVHAQKQGWDKHFQANTVRNRNVLSTVRLGMEVLRHSGYTITREDSLVAATLLTQNLFTHGYVLGKL

SEQ ID NO: 76708 - DNA, 1176 bp, Arabidopsis thaliana
  misc_feature (1)..(1176): Ceres Seq. ID no. 11033599
  misc_feature (1)..(1176): Ortholog of  Ceres SEQ ID NO 12582736 as cited in SEQ ID NO 51489
  misc_feature (1)..(1176): Ortholog of  Ceres SEQ ID NO 13658622 as cited in SEQ ID NO 60780
agccaccgccgcgcatgtgtctcgttggccgtggttttttttgggttctagtctttcgttcttcgcttttagacaagcaaatatgagacccccagttacaggaggacgtggtggtggaggattcagaggtggaagagatggtggtggaagaggttttggaggtggaagaagctttggaggaggccgtagtggtgacagaggccgtagtgggcctcgcggcagaggacgtggtgcgcctcgtggtcgtggaggaccacctcgtggaggaatgaaaggaggaagcaaagtgattgttgagcctcacagacatgcgggagtgtttattgctaagggtaaagaagatgctcttgtcactaagaatttggttcctggtgaagctgtttacaatgagaagagaatctctgttcagaatgaagatggaactaaggttgaatacagagtttggaatccgtttagatctaagttagctgctgcaattcttggtggtgtcgacaacatttggatcaaacctggtgccaaagttctttacttgggtgctgcttctgggaccactgtctctcatgtttctgacctcgttggccctgagggatgtgtttatgctgttgagttttctcatagaagtggtagagatttggtgaacatggccaagaagagaactaacgttattccaatcattgaagatgctagacatccggctaagtacagaatgctcgtgggcatggttgatgtcatattctctgatgttgctcagccagatcaggcaagaatcttggccctgaatgcctcatttttcctcaaaactggtggacactttgttatctcaatcaaggccaactgtatcgactctacagttgcagcagaagcagtcttccagagcgaggtgaagaagctgcaacaagagcagtttaagccagcagaacaggtgactctcgagccgtttgagcgtgaccatgcctgtgttgttggtggttaccgcatgccgaagaaacaaaagaccccagcctcatagaggaactgtggacagtagtgcctgtgtattaagacttatttactgggttttgtttttatctccttgcttgttgtattaagctagagatggataatgcttttatgtctcatttggaaaattttatcctcgttttagaactaatatatattgatgcaacattttcgtcc

SEQ ID NO: 76709 - protein, 335 aa, Arabidopsis thaliana
  peptide (1)..(335): Ceres Seq. ID no. 11033600
ATAAHVSRWPWFFLGSSLSFFAFRQANMRPPVTGGRGGGGFRGGRDGGGRGFGGGRSFGGGRSGDRGRSGPRGRGRGAPRGRGGPPRGGMKGGSKVIVEPHRHAGVFIAKGKEDALVTKNLVPGEAVYNEKRISVQNEDGTKVEYRVWNPFRSKLAAAILGGVDNIWIKPGAKVLYLGAASGTTVSHVSDLVGPEGCVYAVEFSHRSGRDLVNMAKKRTNVIPIIEDARHPAKYRMLVGMVDVIFSDVAQPDQARILALNASFFLKTGGHFVISIKANCIDSTVAAEAVFQSEVKKLQQEQFKPAEQVTLEPFERDHACVVGGYRMPKKQKTPAS

SEQ ID NO: 76710 - protein, 308 aa, Arabidopsis thaliana
  peptide (1)..(308): Ceres Seq. ID no. 11033601
MRPPVTGGRGGGGFRGGRDGGGRGFGGGRSFGGGRSGDRGRSGPRGRGRGAPRGRGGPPRGGMKGGSKVIVEPHRHAGVFIAKGKEDALVTKNLVPGEAVYNEKRISVQNEDGTKVEYRVWNPFRSKLAAAILGGVDNIWIKPGAKVLYLGAASGTTVSHVSDLVGPEGCVYAVEFSHRSGRDLVNMAKKRTNVIPIIEDARHPAKYRMLVGMVDVIFSDVAQPDQARILALNASFFLKTGGHFVISIKANCIDSTVAAEAVFQSEVKKLQQEQFKPAEQVTLEPFERDHACVVGGYRMPKKQKTPAS

SEQ ID NO: 76711 - protein, 246 aa, Arabidopsis thaliana
  peptide (1)..(246): Ceres Seq. ID no. 11033602
MKGGSKVIVEPHRHAGVFIAKGKEDALVTKNLVPGEAVYNEKRISVQNEDGTKVEYRVWNPFRSKLAAAILGGVDNIWIKPGAKVLYLGAASGTTVSHVSDLVGPEGCVYAVEFSHRSGRDLVNMAKKRTNVIPIIEDARHPAKYRMLVGMVDVIFSDVAQPDQARILALNASFFLKTGGHFVISIKANCIDSTVAAEAVFQSEVKKLQQEQFKPAEQVTLEPFERDHACVVGGYRMPKKQKTPAS

SEQ ID NO: 76712 - DNA, 1570 bp, Arabidopsis thaliana
  misc_feature (1)..(1570): Ceres Seq. ID no. 11033619
  misc_feature (1)..(1570): Ortholog of  Ceres SEQ ID NO 12779893 as cited in SEQ ID NO 66238
accaatctctcacaagtcacaacatatccattttccaggaagctttggaagcacatgatggagcaagtaaagggaaatacactattggacttggccaagattgtttagctttttgcactgagcttgaagatgttatctctatgagtttcaatgcggtgacatcactttttgagaagtataagattgaccctaaccaaatcgggcgtcttgaagtaggaagtgagactgttattgacaaaagcaagtccatcaagaccttcttgatgcagctctttgagaaatgtggaaacactgatgtcgaaggtgttgactcgaccaatgcttgctatggtggaactgcagctttgttaaactgtgtcaattgggttgagagtaactcttgggatggacgttatggcctcgtcatttgtactgacagcgcggtttatgcagaaggacccgcaaggcccactggaggagctgcagcgattgctatgttgataggacctgatgctcctatcgttttcgaaagcaaattgagagcaagccacatggctcatgtctatgacttttacaagcccaatcttgctagcgagtacccggttgttgatggtaagctttcacagacttgctacctcatggctcttgactcctgctataaacatttatgcaacaagttcgagaagatcgagggcaaagagttctccataaatgatgctgattacattgttttccattctccatacaataaacttgtacagaaaagctttgctcgtctcttgtacaacgacttcttgagaaacgcaagctccattgacgaggctgccaaagaaaagttcaccccttattcatctttgacccttgacgagagttaccaaagccgtgatcttgaaaaggtgtcacaacaaattgcgaaaccgttttatgatgctaaagtgcaaccaacgactttaataccaaaggaagtcggtaacatgtacactgcttctctctacgctgcatttgcttccctcatccacaagaaacacaatgatttggcgggaaagcgggtggttatgttctcttatggaagtggctcaaccgcaacaatgttctcattacgcctcaacgacaataagcctcctttcagcatttcaaacattgcatctgtaatggatgttggcggtaaattgaaagctagacatgagtatgcacctgagaagtttgtggagacaatgaagctaatggaacataggtatggagcaaaggactttgtgacaaccaaggagggtattatagatcttttggcaccgggaacttattatctgaaagaggttgattccttgtaccggagattctatggcaagaaaggtgaagatggatctgtagccaatggacactgattcttgaaaaggaacaaatcataaaaagtcacctgaaaatgttatgttttacttgcaccattttaatcgttttataagtttgttgttactttgatttagggacaaagaaggaatgtattctctgtttttatttactgtttgatttactctctcatgcaaatgataatttggaaattattggaatctctattttgtatgtttgtgttctt

SEQ ID NO: 76713 - protein, 452 aa, Arabidopsis thaliana
  peptide (1)..(452): Ceres Seq. ID no. 11033620
QSLTSHNISIFQEALEAHDGASKGKYTIGLGQDCLAFCTELEDVISMSFNAVTSLFEKYKIDPNQIGRLEVGSETVIDKSKSIKTFLMQLFEKCGNTDVEGVDSTNACYGGTAALLNCVNWVESNSWDGRYGLVICTDSAVYAEGPARPTGGAAAIAMLIGPDAPIVFESKLRASHMAHVYDFYKPNLASEYPVVDGKLSQTCYLMALDSCYKHLCNKFEKIEGKEFSINDADYIVFHSPYNKLVQKSFARLLYNDFLRNASSIDEAAKEKFTPYSSLTLDESYQSRDLEKVSQQIAKPFYDAKVQPTTLIPKEVGNMYTASLYAAFASLIHKKHNDLAGKRVVMFSYGSGSTATMFSLRLNDNKPPFSISNIASVMDVGGKLKARHEYAPEKFVETMKLMEHRYGAKDFVTTKEGIIDLLAPGTYYLKEVDSLYRRFYGKKGEDGSVANGH

SEQ ID NO: 76714 - protein, 406 aa, Arabidopsis thaliana
  peptide (1)..(406): Ceres Seq. ID no. 11033621
MSFNAVTSLFEKYKIDPNQIGRLEVGSETVIDKSKSIKTFLMQLFEKCGNTDVEGVDSTNACYGGTAALLNCVNWVESNSWDGRYGLVICTDSAVYAEGPARPTGGAAAIAMLIGPDAPIVFESKLRASHMAHVYDFYKPNLASEYPVVDGKLSQTCYLMALDSCYKHLCNKFEKIEGKEFSINDADYIVFHSPYNKLVQKSFARLLYNDFLRNASSIDEAAKEKFTPYSSLTLDESYQSRDLEKVSQQIAKPFYDAKVQPTTLIPKEVGNMYTASLYAAFASLIHKKHNDLAGKRVVMFSYGSGSTATMFSLRLNDNKPPFSISNIASVMDVGGKLKARHEYAPEKFVETMKLMEHRYGAKDFVTTKEGIIDLLAPGTYYLKEVDSLYRRFYGKKGEDGSVANGH

SEQ ID NO: 76715 - protein, 365 aa, Arabidopsis thaliana
  peptide (1)..(365): Ceres Seq. ID no. 11033622
MQLFEKCGNTDVEGVDSTNACYGGTAALLNCVNWVESNSWDGRYGLVICTDSAVYAEGPARPTGGAAAIAMLIGPDAPIVFESKLRASHMAHVYDFYKPNLASEYPVVDGKLSQTCYLMALDSCYKHLCNKFEKIEGKEFSINDADYIVFHSPYNKLVQKSFARLLYNDFLRNASSIDEAAKEKFTPYSSLTLDESYQSRDLEKVSQQIAKPFYDAKVQPTTLIPKEVGNMYTASLYAAFASLIHKKHNDLAGKRVVMFSYGSGSTATMFSLRLNDNKPPFSISNIASVMDVGGKLKARHEYAPEKFVETMKLMEHRYGAKDFVTTKEGIIDLLAPGTYYLKEVDSLYRRFYGKKGEDGSVANGH

SEQ ID NO: 76716 - DNA, 1351 bp, Arabidopsis thaliana
  misc_feature (1)..(1351): Ceres Seq. ID no. 11033748
  misc_feature (1)..(1351): Ortholog of  Ceres SEQ ID NO 13594345 as cited in SEQ ID NO 58043
  misc_feature (1)..(1351): Ortholog of  Ceres SEQ ID NO 13662880 as cited in SEQ ID NO 65422
  misc_feature (1)..(1351): Ortholog of  Ceres SEQ ID NO 12779098 as cited in SEQ ID NO 67698
  misc_feature (1)..(1351): Ortholog of  Ceres SEQ ID NO 13596180 as cited in SEQ ID NO 67941
  misc_feature (1)..(1351): Ortholog of  Ceres SEQ ID NO 13591190 as cited in SEQ ID NO 68044
  misc_feature (1)..(1351): Ortholog of  Ceres SEQ ID NO 13596089 as cited in SEQ ID NO 68373
gaaccgagtatattggtggtcaccgaagaatggctcgggttcatcgggtccgacccgaaacctaaccggatccatttcgccactctccccaacatcattccctccgagctcgtccgagccaacgacttcatcgccttcatcgacgccgtcctcaccagattagaagagccgttcgaacagctacttgaccgtctaaactctcctcccaccgcaatcatcgccgatacttacatcatttgggcagtacgtgtaggcacaaaaaggaatattccggtggcttctttctggactacgtcagccacgattctctccctcttcattaactccgatcttctcgcaagtcacggccattttccgatcgaaccatcagaatcaaaactagacgagattgttgattacatccccggtttatctccgacaagactcagtgacttacagatcttacacggctatagtcatcaagtcttcaatatattcaaaaagtctttcggtgagctttataaagctaagtatcttctcttcccttctgcttatgagctcgaaccaaaagccattgactttttcacttccaagtttgatttcccggtttactccactggtccgttaatacccttggaagaactatccgttggaaatgagaatagagaacttgattactttaagtggcttgatgagcaacctgaaagctctgttctttacatatctcaagggagttttctttcagtctccgaagctcagatggaggagattgttgtaggagttagagaggctggagttaagttcttttgggtggctcgtgggggtgagttaaagcttaaggaggctcttgaaggtagcttgggtgttgtggtgagctggtgtgatcagctacgtgttttgtgtcatgcggctataggcgggttttggacgcattgcgggtataactcgacattggaagggatatgttcgggagtaccgttgcttacatttcctgttttttgggatcagtttctgaatgctaagatgattgttgaggagtggagagttggaatggggatcgagaggaagaagcagatggagttgttgatagtgagtgatgagatcaaggaattggtaaaaaggtttatggatggagagagtgaagaagggaaagagatgagaagaaggacttgtgatctcagtgagatatgtcgtggagcggttgcgaaaggtggttcttctgatgctaacatcgatgctttcattaaagatattactaagatcgtgtgagttctattgttgttaatgattcaagtctatattagtatttgtataagtttgttaaagattcaaactttgtagagatttaagattgtttgtaaaactgttattt

SEQ ID NO: 76717 - protein, 415 aa, Arabidopsis thaliana
  peptide (1)..(415): Ceres Seq. ID no. 11033749
EPSILVVTEEWLGFIGSDPKPNRIHFATLPNIIPSELVRANDFIAFIDAVLTRLEEPFEQLLDRLNSPPTAIIADTYIIWAVRVGTKRNIPVASFWTTSATILSLFINSDLLASHGHFPIEPSESKLDEIVDYIPGLSPTRLSDLQILHGYSHQVFNIFKKSFGELYKAKYLLFPSAYELEPKAIDFFTSKFDFPVYSTGPLIPLEELSVGNENRELDYFKWLDEQPESSVLYISQGSFLSVSEAQMEEIVVGVREAGVKFFWVARGGELKLKEALEGSLGVVVSWCDQLRVLCHAAIGGFWTHCGYNSTLEGICSGVPLLTFPVFWDQFLNAKMIVEEWRVGMGIERKKQMELLIVSDEIKELVKRFMDGESEEGKEMRRRTCDLSEICRGAVAKGGSSDANIDAFIKDITKIV

SEQ ID NO: 76718 - DNA, 809 bp, Arabidopsis thaliana
  misc_feature (1)..(809): Ceres Seq. ID no. 11033782
  misc_feature (1)..(809): Ortholog of  Ceres SEQ ID NO 15172991 as cited in SEQ ID NO 51333
  misc_feature (1)..(809): Ortholog of  Ceres SEQ ID NO 13594870 as cited in SEQ ID NO 51929
  misc_feature (1)..(809): Ortholog of  Ceres SEQ ID NO 12610679 as cited in SEQ ID NO 56077
  misc_feature (1)..(809): Ortholog of  Ceres SEQ ID NO 12635481 as cited in SEQ ID NO 0
tccccccccccccgacaaagcgtacaaatcacaaacacgtagttattctctctttactctctctatttctctctcttcaaaccctacgaagatcttcttcttcttcttcaagaatcgatcatgaaaggagctaaatctaaggctgaaaccaggagcacaaagctctctgtgactaagaagcctgctaagggagccaaaggtgctgctaaagatccaaacaaacctaagaggccttccagtgccttcttcgttttcatggaagatttccgtgtgacgtacaaggaggagcaccctaagaacaagtctgttgctgctgttggcaaagctggtggtgaaaagtggaaatccttgtctgactctgagaaggctccttatgtggctaaggctgacaagcgcaaggttgagtatgagaagaacatgaaagcctacaacaagaaattggaggaaggccctaaggaggatgaggaatctgacaagtcagtttcagaggttaacgatgaggatgatgctgaggatggcagtgaagaggaggaagacgatgattaagaagttgaagttgtggtagcgtaatatagaaggctgcaaggaatctctcggatgtttttatctcctctcttaaaatgttaattcgggtggttaaagtggtttttttttttttctttttctttttcttactgatgtttcgttttagtaaactattacctatctcccactgattctacgggtaatggaaaaagtgaatgtagaatgtttagatggtgaaatgagagatttgtagctctatataatgaatgatttagtttttaatt

SEQ ID NO: 76719 - protein, 141 aa, Arabidopsis thaliana; identical to SEQ ID NO: 28781
  peptide (1)..(141): Ceres Seq. ID no. 11033783

SEQ ID NO: 76720 - protein, 96 aa, Arabidopsis thaliana; identical to SEQ ID NO: 28782
  peptide (1)..(96): Ceres Seq. ID no. 11033784

SEQ ID NO: 76721 - DNA, 1251 bp, Arabidopsis thaliana
  misc_feature (1)..(1251): Ceres Seq. ID no. 11034106
  misc_feature (1)..(1251): Ortholog of  Ceres SEQ ID NO 12616314 as cited in SEQ ID NO 64355
aatccgagaaaatgctgactctactcttcttctctctcggagcgcttcttcttatcgttctgctcttcaaatttgcattcgccgatggagattttaccttgatttcgaagaagcatgtgaagcgtgaggccatacaaggcaaggtcgtctggatcacaggggctagccgtggaattggtgaaattcttgctaaacagtttgcaagtttagatgccaagcttattctctctgctaggaataaagctgaactggatcgggttaagagtgagcttaaaggtaaatttgcaccagaagatgtcaaggttttgcctttagatttagctagcggcgaagagtcactcaaacatgttgtagagcaagcagtgtcgcttttccctggagctggtgttgattatttggttcacaatgctgcctttgagcgtccgaaatccaaggcatcggatgcaagtgaggaaactctcaagactacattcgatgttaatgtctttgggacgatatctctgacaaagttggtagctcctcatatgctaaaacaaggagggggtcattttgttgtgataagcagtgctgcaggaaaggtaccatcacctggacaggctatatattctgcttcaaaacatgctcttcatggctacttccacagcttgcgttctgagttctgtcagaagggaatcaaggttaccgtcgtttgtcctggtccaatagaaacctggaatggtacaggaacatcaacttcggaagacagcaagtctcctgagaaacgtgtgtcatctgaacgatgtgcagagctgactataatcgctgcatctcataacttgaaggaagcttggatttcatatcagccagtactactcgtgatgtatctagtgcagtacatgccttcccttggcttctggctcatggacaaggttggaggaaagcgtgtggaggtcgcggaaaagaaaggcaacacatactcgtgggatttactgttcgggaagaagactaaaacaaactgaagctgattctctagaagatacacatagatgtggttggttgagccttagtccgtaaatgtggttggtgtttgtttgctagtttgattgttaaataactaccaaagcgtcgaaaaatgttttgttgccaaaaaaaaaaaacaattcactcaggtactggacacattgataatgataatcgctgaatggtgacttgcatggctggtagtcattaaggatgatctgcgagcaaggcacaatgctggatataattgtg

SEQ ID NO: 76722 - protein, 331 aa, Arabidopsis thaliana
  peptide (1)..(331): Ceres Seq. ID no. 11034107
SEKMLTLLFFSLGALLLIVLLFKFAFADGDFTLISKKHVKREAIQGKVVWITGASRGIGEILAKQFASLDAKLILSARNKAELDRVKSELKGKFAPEDVKVLPLDLASGEESLKHVVEQAVSLFPGAGVDYLVHNAAFERPKSKASDASEETLKTTFDVNVFGTISLTKLVAPHMLKQGGGHFVVISSAAGKVPSPGQAIYSASKHALHGYFHSLRSEFCQKGIKVTVVCPGPIETWNGTGTSTSEDSKSPEKRVSSERCAELTIIAASHNLKEAWISYQPVLLVMYLVQYMPSLGFWLMDKVGGKRVEVAEKKGNTYSWDLLFGKKTKTN

SEQ ID NO: 76723 - protein, 328 aa, Arabidopsis thaliana; identical to SEQ ID NO: 35978
  peptide (1)..(328): Ceres Seq. ID no. 11034108

SEQ ID NO: 76724 - DNA, 3816 bp, Arabidopsis thaliana
  misc_feature (1)..(3816): Ceres Seq. ID no. 11034675
  misc_feature (1)..(3816): Ortholog of  Ceres SEQ ID NO 13594209 as cited in SEQ ID NO 59089
  misc_feature (1)..(3816): Ortholog of  Ceres SEQ ID NO 13502874 as cited in SEQ ID NO 66298
  misc_feature (1)..(3816): Ortholog of  Ceres SEQ ID NO 12614124 as cited in SEQ ID NO 68392
actcaaaagtagtaacaactaagaatggaagatatcatcatcggcgtggtggctctcgccgcggttctccttttcttcctctaccaaaaaccgaaaaccaaacggtacaagctacctccagggccatcaccacttccggtgatcggaaacctccttcagcttcagaagcttaacccacaacgcttcttcgctggatgggccaaaaaatacggtccaatcttgtcatacaggataggaagcagaacaatggtggtgatatcttcagctgagctagctaaagagcttctcaagacgcaagatgtcaactttgcggaccggcctccacatcgtggccatgagttcatatcctacggcaggcgtgacatggcattaaaccactacacaccgtattaccgagagataaggaagatggggatgaaccacttgttctcaccaacacgtgtggccacctttaagcatgtacgagaggaagaggctaggaggatgatggataagatcaacaaggccgcggataaatccgaagtagtcgatataagtgagcttatgttgaccttcacgaactcggttgtgtgtagacaagcgttcgggaagaagtacaatgaagatggagaagagatgaagaggttcatcaagattctttatgggactcaaagcgttttggggaagatctttttctctgattttttcccatattgtggctttcttgatgatttatcaggcctcacagcttatatgaaagagtgtttcgaaagacaagacacttatattcaagaggttgtcaatgagacgcttgatcctaagagagtcaagcccgaaaccgagagcatgattgatctcttgatggggatctacaaagaacaacctttcgcttctgagtttactgtagataatgtcaaagccgtcatcttggatattgtagtggcgggaacagatactgcagctgcggcggttgtgtgggggatgacgtatctaatgaagtacccacaagtgttgaagaaagctcaagcagaagtgagagagtatatgaaagagaaaggttcaacgttcgttactgaagacgatgtcaagaaccttccttacttcagagccttagttaaagaaaccctaaggatcgaaccagtgattcctctccttatccctcgtgcttgcattcaagataccaagatcgccggttacgacatccccgcaggaacaacggtcaacgtcaacgcgtgggccgtgtcacgtgacgagaaagaatggggaccgaaccctgatgagtttaggcccgagaggtttcttgagaaggaagttgacttcaaaggcacggactacgagtttataccgttcgggtcaggccggagaatgtgcccgggaatgcgtcttggggccgcgatgcttgaggttccttatgcgaaccttctcctcagcttcaactttaaacttcctaatgggatgaaaccagatgatatcaatatggatgtcatgactggtcttgctatgcacaagtcgcagcatctcaagcttgttccagagaaagtgaacaagtattagctaatatatatcaaataaatctaccttctctgattatatagtatatgttcctccagtgtattctgtttcaatgtttggtttctttcttaaatggcaatcgtctctccaaaaaaaaaaaaaaaagagctcttggatccaacgattgtctttacacctatctccctccttgacgccgtcgccgtcgttaccgttggtgcagacggagacgtgttcggcgaggtcgaagaagctggatgtcaacggcgaagctttgtcgctgtatatgagaggaaaacatatagatatacaagagaaaattttcgactttttcaattcccgacccgatttgcagacgccgatcgagatctccaaggatgatcatcgggaattgtgtatgaatcagcttatagggcttgttagagaagctggggtaaggccgtttaggtatgttgctgatgatcctgagaagtatttcgcaatcatggaagctgttggaagtgttgatatgtcccttgggattaagatgggcgttcaatacagtctctggggaggctctgtgatcaatttagggactaagaagcatagagacaagtattttgaaggcattgacaatcttgattacaccggttgctttgccatgactgaattacaccatgggtcaaatgtgcaaggtcttcagaccacggcgacattcgatccacttaaagacgaatttgtgatcgatacacctaatgatggagctatcaaatggtggattggaaatgctgcagttcatgggaagtttgccactgtttttgccaggcttatacttccaactcatgattccaaaggagtctcggatatgggtgttcacgccttcattgttccgataagggatatgaaaacacaccagacactccctggtgttgaaatccaagattgtggacataaagtgggacttaatggagtggataatggtgcgttgagattccgttctgtgagaataccccgtgataatcttctcaatcgttttggagatgtgtcccgagatgggacgtatacaagtagtttgccaacaatcaataaaagatttggtgcaacactcggtgagcttgtaggtggtcgagttggccttgcctatgcatctgttggcgtccttaaaatctctgcaacgattgccattcgttattctcttctaagacaacaattcgggcctccaaagcaacctgaggtcagtattctcgattaccagtctcaacaacacaagctcatgccgatgttagcctccacctatgcataccattttgcaactgtataccttgtggagaaatattcagagatgaagaagactcacgatgagcaattggttgctgatgtccatgcactctctgctgggctcaaatcttatgtgacgtcttacaccgccaaggcgctctcggtctgcagagaagcctgtggaggtcatggttacgcagctgttaaccgatttggaagcttgagaaatgatcatgacattttccaaacatttgaaggagacaacactgtacttctgcaacaggtggctgctgatttattgaagcgttataaagaaaagttccaaggcgggacattgacagttacatggagctacttgagagaatcaatgaacacttatttgtctcagccaaatcccgttacagcgcgttgggaaggtgaagatcatctaagagatcctaaattccaactagatgctttccggtatcgaacatcgcgattgctacaaaatgtggcagcgagattgcagaagcattcaaagactcttggtggtttcggggcatggaacagatgcttgaatcatcttttaacgcttgcagaatctcacattgaaacagtcattcttgccaagttcatcgaagctgttaaaaactgcccggacccaagtgcaaaagctgctctgaaactagcatgtgatctttacgcattggaccgaatctggaaagatataggaacgtaccgtaacgtggattatgtggcgcctaacaaagctaaggcgattcataaactgacagagtatttgagttttcaagtaaggaatgtggccaaggaactagtggatgcgttcgagctccctgatcatgttactcgagcaccaattgctatgcagtccgatgcttattcccagtatactcaagttgttggattctaaaaacacaagaacaaaacatatatcatcacaatgatcttttaattcgaagcaaaaaaaagatgaaaaacaatttacagggggtacaaaagaatctgcagtcctttgtatgtgtttttagttgttgtttgttttcacaggag

SEQ ID NO: 76725 - protein, 690 aa, Arabidopsis thaliana
  peptide (1)..(690): Ceres Seq. ID no. 11034676
MFGFFLKWQSSLQKKKKKSSWIQRLSLHLSPSLTPSPSLPLVQTETCSARSKKLDVNGEALSLYMRGKHIDIQEKIFDFFNSRPDLQTPIEISKDDHRELCMNQLIGLVREAGVRPFRYVADDPEKYFAIMEAVGSVDMSLGIKMGVQYSLWGGSVINLGTKKHRDKYFEGIDNLDYTGCFAMTELHHGSNVQGLQTTATFDPLKDEFVIDTPNDGAIKWWIGNAAVHGKFATVFARLILPTHDSKGVSDMGVHAFIVPIRDMKTHQTLPGVEIQDCGHKVGLNGVDNGALRFRSVRIPRDNLLNRFGDVSRDGTYTSSLPTINKRFGATLGELVGGRVGLAYASVGVLKISATIAIRYSLLRQQFGPPKQPEVSILDYQSQQHKLMPMLASTYAYHFATVYLVEKYSEMKKTHDEQLVADVHALSAGLKSYVTSYTAKALSVCREACGGHGYAAVNRFGSLRNDHDIFQTFEGDNTVLLQQVAADLLKRYKEKFQGGTLTVTWSYLRESMNTYLSQPNPVTARWEGEDHLRDPKFQLDAFRYRTSRLLQNVAARLQKHSKTLGGFGAWNRCLNHLLTLAESHIETVILAKFIEAVKNCPDPSAKAALKLACDLYALDRIWKDIGTYRNVDYVAPNKAKAIHKLTEYLSFQVRNVAKELVDAFELPDHVTRAPIAMQSDAYSQYTQVVGF

SEQ ID NO: 76726 - protein, 626 aa, Arabidopsis thaliana
  peptide (1)..(626): Ceres Seq. ID no. 11034677
MRGKHIDIQEKIFDFFNSRPDLQTPIEISKDDHRELCMNQLIGLVREAGVRPFRYVADDPEKYFAIMEAVGSVDMSLGIKMGVQYSLWGGSVINLGTKKHRDKYFEGIDNLDYTGCFAMTELHHGSNVQGLQTTATFDPLKDEFVIDTPNDGAIKWWIGNAAVHGKFATVFARLILPTHDSKGVSDMGVHAFIVPIRDMKTHQTLPGVEIQDCGHKVGLNGVDNGALRFRSVRIPRDNLLNRFGDVSRDGTYTSSLPTINKRFGATLGELVGGRVGLAYASVGVLKISATIAIRYSLLRQQFGPPKQPEVSILDYQSQQHKLMPMLASTYAYHFATVYLVEKYSEMKKTHDEQLVADVHALSAGLKSYVTSYTAKALSVCREACGGHGYAAVNRFGSLRNDHDIFQTFEGDNTVLLQQVAADLLKRYKEKFQGGTLTVTWSYLRESMNTYLSQPNPVTARWEGEDHLRDPKFQLDAFRYRTSRLLQNVAARLQKHSKTLGGFGAWNRCLNHLLTLAESHIETVILAKFIEAVKNCPDPSAKAALKLACDLYALDRIWKDIGTYRNVDYVAPNKAKAIHKLTEYLSFQVRNVAKELVDAFELPDHVTRAPIAMQSDAYSQYTQVVGF

SEQ ID NO: 76727 - protein, 589 aa, Arabidopsis thaliana
  peptide (1)..(589): Ceres Seq. ID no. 11034678
MNQLIGLVREAGVRPFRYVADDPEKYFAIMEAVGSVDMSLGIKMGVQYSLWGGSVINLGTKKHRDKYFEGIDNLDYTGCFAMTELHHGSNVQGLQTTATFDPLKDEFVIDTPNDGAIKWWIGNAAVHGKFATVFARLILPTHDSKGVSDMGVHAFIVPIRDMKTHQTLPGVEIQDCGHKVGLNGVDNGALRFRSVRIPRDNLLNRFGDVSRDGTYTSSLPTINKRFGATLGELVGGRVGLAYASVGVLKISATIAIRYSLLRQQFGPPKQPEVSILDYQSQQHKLMPMLASTYAYHFATVYLVEKYSEMKKTHDEQLVADVHALSAGLKSYVTSYTAKALSVCREACGGHGYAAVNRFGSLRNDHDIFQTFEGDNTVLLQQVAADLLKRYKEKFQGGTLTVTWSYLRESMNTYLSQPNPVTARWEGEDHLRDPKFQLDAFRYRTSRLLQNVAARLQKHSKTLGGFGAWNRCLNHLLTLAESHIETVILAKFIEAVKNCPDPSAKAALKLACDLYALDRIWKDIGTYRNVDYVAPNKAKAIHKLTEYLSFQVRNVAKELVDAFELPDHVTRAPIAMQSDAYSQYTQVVGF

SEQ ID NO: 76728 - DNA, 1340 bp, Arabidopsis thaliana
  misc_feature (1)..(1340): Ceres Seq. ID no. 11034962
  misc_feature (1)..(1340): Ortholog of  Ceres SEQ ID NO 14314925 as cited in SEQ ID NO 57985
  misc_feature (1)..(1340): Ortholog of  Ceres SEQ ID NO 13591365 as cited in SEQ ID NO 62720
ttcctcctcatttggagatgtcactaactcatcttctctaattcaccaacatcctaaaacccttttgatcaaaacatggcttccatttccagaatcttaccaacagatggcagattaagtcaatgcagaatcaacacctcgtgggttccttctacaaccagaactcaaactcacttagattttcccaagttagtttctgttagtaactctgggataagtttgaggattcagaatagtaaacctattagccctgtctttgctcttgaagcaacttcctccaggagggttgtttgcaaagctgctgctggtgtgtcaggtgacttacctgagagtactcctaaggaacttagtcagtatgagaagattattgagcttttgacaaccctttttccactttgggttattttgggaacacttgttggcatcttcaagccatccttggttacatggttggaaacagatctctttagtctaggtcttggatttcttatgctttccatgggtttgactcttacgtttgaagatttcagaagatgtttacgtaatccatggacggtgggtgttggttttcttgctcaatatatgatcaagccaattctaggttttctcattgcaatgactcttaagctttcggcacctcttgcgactggccttatcctagtctcatgctgccctggaggacaggcgtcaaacgttgctacttacatttccaaggggaatgtagcgctctctgtactcatgacaacgtgttcaaccattggggctattataatgactcctcttcttactaagcttcttgctggtcagcttgttcccgttgacgctgctggacttgctcttagtacgttccaagtagtgttggttcctaccataattggagttctggcaaatgagttctttcctaaatttacgtctaagatcataacagtgacgcctctaatcggagtcattctgactactctgctctgtgccagccctattggacaagttgcagatgttttgaaaacccaaggagctcaacttatactcccggtggcactccttcatgctgcagcctttgctattggctattggatttcaaagttttctttcggcgagtccacttcgcgtaccatttctatagaatgtggaatgcaaagttcagcgctcgggttcttgcttgcacaaaagcatttcacaaaccctctagttgctgttccttctgcagtcagtgttgtctgtatggcgcttggcgggagcggcctggccgtgttctggagaaacctaccgattccggcagatgacaaggatgacttcaaagagtaaatgaaggaggaaaggcggtttgcataatcactagt

SEQ ID NO: 76729 - protein, 409 aa, Arabidopsis thaliana
  peptide (1)..(409): Ceres Seq. ID no. 11034963
MASISRILPTDGRLSQCRINTSWVPSTTRTQTHLDFPKLVSVSNSGISLRIQNSKPISPVFALEATSSRRVVCKAAAGVSGDLPESTPKELSQYEKIIELLTTLFPLWVILGTLVGIFKPSLVTWLETDLFSLGLGFLMLSMGLTLTFEDFRRCLRNPWTVGVGFLAQYMIKPILGFLIAMTLKLSAPLATGLILVSCCPGGQASNVATYISKGNVALSVLMTTCSTIGAIIMTPLLTKLLAGQLVPVDAAGLALSTFQVVLVPTIIGVLANEFFPKFTSKIITVTPLIGVILTTLLCASPIGQVADVLKTQGAQLILPVALLHAAAFAIGYWISKFSFGESTSRTISIECGMQSSALGFLLAQKHFTNPLVAVPSAVSVVCMALGGSGLAVFWRNLPIPADDKDDFKE

SEQ ID NO: 76730 - protein, 271 aa, Arabidopsis thaliana; identical to SEQ ID NO: 22581
  peptide (1)..(271): Ceres Seq. ID no. 11034964

SEQ ID NO: 76731 - protein, 268 aa, Arabidopsis thaliana; identical to SEQ ID NO: 22582
  peptide (1)..(268): Ceres Seq. ID no. 11034965

SEQ ID NO: 76732 - DNA, 865 bp, Arabidopsis thaliana
  misc_feature (1)..(865): Ceres Seq. ID no. 11034973
  misc_feature (1)..(865): Ortholog of  Ceres SEQ ID NO 14304132 as cited in SEQ ID NO 56475
  misc_feature (1)..(865): Ortholog of  Ceres SEQ ID NO 13661994 as cited in SEQ ID NO 60568
  misc_feature (1)..(865): Ortholog of  Ceres SEQ ID NO 13664228 as cited in SEQ ID NO 61166
  misc_feature (1)..(865): Ortholog of  Ceres SEQ ID NO 15179439 as cited in SEQ ID NO 0
ggaattcggcacgagctttgttttcttcctcttctccttcttctactttcgaacactcgtgaatctgattctactctagtctaattgggtgctttcgatttctgaataaaaattcgattttggtctgacgattaagaaagcgaaagtgatggccgccgtaaatggatatcagggaaatactccggcagatcctccggcgtctaatggatcaaaacaacctgcggctccgaccaagactgttgacagccaatctgttctcaaaagactgcaatctgaattgatgggcttgatgatgggcggtggtccaggaatatcggctttccctgaggaagacaacatattctgctggaaagggacaataacaggaagcaaagatactgtgtttgaaggaactgagtacagactctcactctctttctccaatgactatcctttcaagcctccaaaggttaagtttgagacatgttgcttccaccccaatgttgatgtctatggcaatatctgcttagacattcttcaggataagtggtcatctgcttacgatgtgaggacgatactactatcgattcagagcctcctgggagaaccgaacatcagttcaccattgaacactcaagcagctcagctttggagtaaccaagaagagtacaggaagatggttgagaagctttacaagcctccaagtgcatgatttctgcaagctggtctgattcataaatctccaatgcctctgatgatttcacataaaacgatttttcagaagaaaacactgtcattcatttgctttattctttgtttttgaacatcagaagttctatctgtaacgttaccttgagttcaaataatgagtagtatttcagagatt

SEQ ID NO: 76733 - protein, 180 aa, Arabidopsis thaliana
  peptide (1)..(180): Ceres Seq. ID no. 11034974
MAAVNGYQGNTPADPPASNGSKQPAAPTKTVDSQSVLKRLQSELMGLMMGGGPGISAFPEEDNIFCWKGTITGSKDTVFEGTEYRLSLSFSNDYPFKPPKVKFETCCFHPNVDVYGNICLDILQDKWSSAYDVRTILLSIQSLLGEPNISSPLNTQAAQLWSNQEEYRKMVEKLYKPPSA

SEQ ID NO: 76734 - protein, 136 aa, Arabidopsis thaliana
  peptide (1)..(136): Ceres Seq. ID no. 11034975
MGLMMGGGPGISAFPEEDNIFCWKGTITGSKDTVFEGTEYRLSLSFSNDYPFKPPKVKFETCCFHPNVDVYGNICLDILQDKWSSAYDVRTILLSIQSLLGEPNISSPLNTQAAQLWSNQEEYRKMVEKLYKPPSA

SEQ ID NO: 76735 - protein, 133 aa, Arabidopsis thaliana
  peptide (1)..(133): Ceres Seq. ID no. 11034976
MMGGGPGISAFPEEDNIFCWKGTITGSKDTVFEGTEYRLSLSFSNDYPFKPPKVKFETCCFHPNVDVYGNICLDILQDKWSSAYDVRTILLSIQSLLGEPNISSPLNTQAAQLWSNQEEYRKMVEKLYKPPSA

SEQ ID NO: 76736 - DNA, 830 bp, Arabidopsis thaliana
  misc_feature (1)..(830): Ceres Seq. ID no. 11035332
  misc_feature (1)..(830): Ortholog of  Ceres SEQ ID NO 13596601 as cited in SEQ ID NO 62486
cgctttattcagatctgaagaagaagaagaagaagaaacatagttgaagtctctgttaatatgtcttcaacaacaacagattctacagaattgcaaaatctgatcaaactgtttcaaaattgccaaactcatcctcgtcaacattttcctgcaaaatcttcagctgtattagtttgtctataccaagaacaaagagaagacaaaaacgagctacgcgtaatcttaaccaaacgatctactactctctcttctcatcctggggaagtagcattgcctggaggaaaaagagaccaagaagataaagatgatatagctactgcgttgagagaagctcgtgaagaaatcggtttagatccttctcttgttacaatcatttctgttcttgaaccatttgttaacaagaagggaatgtcggtagcaccagttatcggttttctacacgataagaaagcgtttaaacagttaccaaatccagctgaagtggaagagatctttgatgtgccattagagatgttcctcaaggacagaaacaggcgagcagaggaacgagagcatgaaggagagagatatcttcttcaatactttgattactattccgaagataaagagagaagctttatcatatgggcactcactgctggtattctgatcagagttgcctccattgtttatcagagattaccggagtttcaagaacgtaaaccgagtttctggaatcagcctaactgattcttgacttgatctgattgagaaaattgaaacttttatgtataataagcgatacagattgaatcttctttaaatgtgtttcaagaatctatctttactct

SEQ ID NO: 76737 - protein, 222 aa, Arabidopsis thaliana; identical to SEQ ID NO: 74452
  peptide (1)..(222): Ceres Seq. ID no. 11035333

SEQ ID NO: 76738 - DNA, 850 bp, Arabidopsis thaliana
  misc_feature (1)..(850): Ceres Seq. ID no. 11035355
  misc_feature (1)..(850): Ortholog of  Ceres SEQ ID NO 12780822 as cited in SEQ ID NO 67471
acaaaattttgccttggcttgcgaaaaaaggagatcaagtgatcatatggaggaagaacaagtaagagcaattaagataatagtatttggagtcatctcatggggtgtggccttcattctcacccggagaatcttctcaagctactcattcagcttcagcaaccgtcttctctccacggctcacgcgactatcgctgtcactttagcaacactctctgttcaagatttgtcttgccctgtttgtccccttgcttctaagccatctcataaacagatggacgtgatggcgttttcgttgtcgtacatgatctacgatctaatatgttgtcatttcgatcaagtgtttagcattgataacgcggttcatcatttcgttagcattcttggttttatagctggacttgcataccaaaagtctggatctgagatcgtggctacactgtgggtagcagagatatcaagtccttttttccaccttagggagattctcaaagagattggatacaaagacaccaaactcaatctagctgccgatgtgtgttttgccactatattcacattggcgagaattgtgtgtggacctttcctcgtttacgtcagtctatcagctgataatcccatcttcatcaaggcaatgggatcaggattacaactcgtgagcatcttttggttctataaaattttcgggatgatgagatataaactttttaagaagccaaagtcaaacaaaaagtctacttagcttagttagagatatacaaaagctgattcaatccaaatatttttttcttatttttatttatggtcatttatctattttattaataaaataataataaaaaaatgtctc

SEQ ID NO: 76739 - protein, 246 aa, Arabidopsis thaliana
  peptide (1)..(246): Ceres Seq. ID no. 11035356
QNFALACEKRRSSDHMEEEQVRAIKIIVFGVISWGVAFILTRRIFSSYSFSFSNRLLSTAHATIAVTLATLSVQDLSCPVCPLASKPSHKQMDVMAFSLSYMIYDLICCHFDQVFSIDNAVHHFVSILGFIAGLAYQKSGSEIVATLWVAEISSPFFHLREILKEIGYKDTKLNLAADVCFATIFTLARIVCGPFLVYVSLSADNPIFIKAMGSGLQLVSIFWFYKIFGMMRYKLFKKPKSNKKST

SEQ ID NO: 76740 - protein, 231 aa, Arabidopsis thaliana; identical to SEQ ID NO: 34728
  peptide (1)..(231): Ceres Seq. ID no. 11035357

SEQ ID NO: 76741 - protein, 155 aa, Arabidopsis thaliana; identical to SEQ ID NO: 34729
  peptide (1)..(155): Ceres Seq. ID no. 11035358

SEQ ID NO: 76742 - DNA, 1494 bp, Arabidopsis thaliana
  misc_feature (1)..(1494): Ceres Seq. ID no. 11035369
  misc_feature (1)..(1494): Ortholog of  Ceres SEQ ID NO 15226493 as cited in SEQ ID NO 59078
atgggaatggcgtccatgagctctggtactgaaagccttcgtctttgcgtgtttgacttaagaagaggccaacacgaaggacaggaactggacaagatcttgttcttctatcctcctgatctaaccttctccactcagctatcggttataggtctcagtgaagggcttatcacgttcacgagacttttctccccggaggcagcttgtgaggtaattgaagcagagagacattcccatgttttctatgaggccgagcccgatatctggatggtcatgattgtagagaaaaataaggagattgaagctgtatggaggattgatgcattgcggagagtgcttaaggaagtgcactctctctttgttatgtttcaagggtcaattagggcattgcttgagaaagaaccaactggaggacttgtaagatcgcacttgtatccattcatcacagactatttaaatgatcttttcgttgggaaaaaacaacagttaccttccttccgtgacactttgaaagagcgtggaacagttcagatgctaactttagctagagatgcggcacttgaagttcagtctctcgtcggagtgctagattcatgtgctgggaccgttcgatgccactctgtgattctatttcatgatctactggtgtcaacaactctctcacctgatgataccgtcgacttgtttgcattttctgtcatgagattaaccacaaacgcgctatcatctggcacaagttcctggtcatatctacgcaaaggatccggttcacctcaaatatcttctagatctactacggtgccccctcttggttcaggtggtacattgccttcgggaaatggtagtagcacaggtcgtgttattagacctttgcagcacgataagtggtcgaaggggaaagatgggtttcttgtaactgatatttggggtttagatgccaccccgacaattttgatacagaagacacaggaaagtttttaccttttgacttatcagtacaagagtctcaccttggttcttctcgtgcctatcgctgcaattgttaatggagagctagacatctcattcgtgaagcagcaagttattgaaaacgcatcgaccaaaatcttgaaagtcgaagagaagctatcgaaagggtggggcggtgagaatgcttaccatgtaagcggttaccgttacttactagttgataatgacatggaagtttccagagcttctccaccaggaaaggtagcaacactagcaaaggagtctttgcttgcactaaacaagctaagggaagaagtggatacagaaaaaaaccgctcgaagcaagagaaagacatggaaatatgcattcgagcgaagaacaacacatgggtcatcgcgcgtctaaacagaggtaaagagctttacatggctttagagaaagcaagtgaaactcttcttgatgctacagactctgtccaaagattcagcaacaggtactgcagcggggcattccccatggattag

SEQ ID NO: 76743 - protein, 497 aa, Arabidopsis thaliana
  peptide (1)..(497): Ceres Seq. ID no. 11035370
MGMASMSSGTESLRLCVFDLRRGQHEGQELDKILFFYPPDLTFSTQLSVIGLSEGLITFTRLFSPEAACEVIEAERHSHVFYEAEPDIWMVMIVEKNKEIEAVWRIDALRRVLKEVHSLFVMFQGSIRALLEKEPTGGLVRSHLYPFITDYLNDLFVGKKQQLPSFRDTLKERGTVQMLTLARDAALEVQSLVGVLDSCAGTVRCHSVILFHDLLVSTTLSPDDTVDLFAFSVMRLTTNALSSGTSSWSYLRKGSGSPQISSRSTTVPPLGSGGTLPSGNGSSTGRVIRPLQHDKWSKGKDGFLVTDIWGLDATPTILIQKTQESFYLLTYQYKSLTLVLLVPIAAIVNGELDISFVKQQVIENASTKILKVEEKLSKGWGGENAYHVSGYRYLLVDNDMEVSRASPPGKVATLAKESLLALNKLREEVDTEKNRSKQEKDMEICIRAKNNTWVIARLNRGKELYMALEKASETLLDATDSVQRFSNRYCSGAFPMD

SEQ ID NO: 76744 - protein, 495 aa, Arabidopsis thaliana
  peptide (1)..(495): Ceres Seq. ID no. 11035371
MASMSSGTESLRLCVFDLRRGQHEGQELDKILFFYPPDLTFSTQLSVIGLSEGLITFTRLFSPEAACEVIEAERHSHVFYEAEPDIWMVMIVEKNKEIEAVWRIDALRRVLKEVHSLFVMFQGSIRALLEKEPTGGLVRSHLYPFITDYLNDLFVGKKQQLPSFRDTLKERGTVQMLTLARDAALEVQSLVGVLDSCAGTVRCHSVILFHDLLVSTTLSPDDTVDLFAFSVMRLTTNALSSGTSSWSYLRKGSGSPQISSRSTTVPPLGSGGTLPSGNGSSTGRVIRPLQHDKWSKGKDGFLVTDIWGLDATPTILIQKTQESFYLLTYQYKSLTLVLLVPIAAIVNGELDISFVKQQVIENASTKILKVEEKLSKGWGGENAYHVSGYRYLLVDNDMEVSRASPPGKVATLAKESLLALNKLREEVDTEKNRSKQEKDMEICIRAKNNTWVIARLNRGKELYMALEKASETLLDATDSVQRFSNRYCSGAFPMD

SEQ ID NO: 76745 - protein, 492 aa, Arabidopsis thaliana
  peptide (1)..(492): Ceres Seq. ID no. 11035372
MSSGTESLRLCVFDLRRGQHEGQELDKILFFYPPDLTFSTQLSVIGLSEGLITFTRLFSPEAACEVIEAERHSHVFYEAEPDIWMVMIVEKNKEIEAVWRIDALRRVLKEVHSLFVMFQGSIRALLEKEPTGGLVRSHLYPFITDYLNDLFVGKKQQLPSFRDTLKERGTVQMLTLARDAALEVQSLVGVLDSCAGTVRCHSVILFHDLLVSTTLSPDDTVDLFAFSVMRLTTNALSSGTSSWSYLRKGSGSPQISSRSTTVPPLGSGGTLPSGNGSSTGRVIRPLQHDKWSKGKDGFLVTDIWGLDATPTILIQKTQESFYLLTYQYKSLTLVLLVPIAAIVNGELDISFVKQQVIENASTKILKVEEKLSKGWGGENAYHVSGYRYLLVDNDMEVSRASPPGKVATLAKESLLALNKLREEVDTEKNRSKQEKDMEICIRAKNNTWVIARLNRGKELYMALEKASETLLDATDSVQRFSNRYCSGAFPMD

SEQ ID NO: 76746 - DNA, 1367 bp, Arabidopsis thaliana
  misc_feature (1)..(1367): Ceres Seq. ID no. 11035385
  misc_feature (1)..(1367): Ortholog of  Ceres SEQ ID NO 13623732 as cited in SEQ ID NO 0
gaattcggcacgagcggcacgaggagtgattcatggcggaagcttgcggagtgagaaggatgaagctgggaagccaaggccttgaggtatctgcgcaaggccttggttgcatgggcctctccgctttctacggtgctcccaagccggaaaatgaagccatcgctctcatccaccacgctattcactccggcgttactctccttgacacctccgatatctacggccctgagaccaatgaagttctcctcggaaaggctctcaaggatggggtgagagaaaaagtggaacttgcgaccaaatttggaatcagttatgcagaggggaaaagagaggtcagaggagatcctgaatatgtaagggctgcttgtgaggcaaagtttaagaggctagatattgcctgcatcgatctctattatcagcatcgtgtcgatactcgtgtacctatcgaaatcactatgggagaactgaagaagctggttgaagagggtaaaataaagtacattggtttgtctgaagcctctgcctcaactatcagaagagcacatgctgttcacccaattactgccgtgcagatagaatggtccttgtggacgagagatgtggaagaagaaatcattccgacctgcagggaacttgggattgggattgttgcttacagtcctctaggacgaggtttcttcgcatctggacccaagcttgttgagaacctagaaaaggatgacttcagaaaggctctaccaagattccaagaggaaaacttagaccacaacaagattgtttatgaaaaagtttgtgcaatatcggagaagaaagggtgcactcctggacaactagccctggcatgggttcatcaccagggagatgacgtttgccctatcccaggaaccactaagatcgagaacctcaaacagaacattggagctttgtcagtgaaactcactcctgaagagatgactgagcttgaggccattgcccaaccaggttttgtgaaaggagatagatacagtaacatgataccaactttcaagaacgctgagacaccaccattgtctgcttggaaagccgcttaaaaccggctgaagtttctacggttgtggtggtgcatcatgacattgaagtggtcttaactttctgtcagctagatcagtgtgttggggaataatggtgcgtcttcgagagtagagtatcattcccacggaaacccaagtatcatggttatgccttgaagaataaataatgtagagttccccaagtgaaaacttcaattttacatttccatacattgtaaccaaactctataaataaagtgttgtgatacataccttaccaaaaaaggctatctatattgtaaaattcatcttctactc

SEQ ID NO: 76747 - protein, 345 aa, Arabidopsis thaliana
  peptide (1)..(345): Ceres Seq. ID no. 11035386
MAEACGVRRMKLGSQGLEVSAQGLGCMGLSAFYGAPKPENEAIALIHHAIHSGVTLLDTSDIYGPETNEVLLGKALKDGVREKVELATKFGISYAEGKREVRGDPEYVRAACEAKFKRLDIACIDLYYQHRVDTRVPIEITMGELKKLVEEGKIKYIGLSEASASTIRRAHAVHPITAVQIEWSLWTRDVEEEIIPTCRELGIGIVAYSPLGRGFFASGPKLVENLEKDDFRKALPRFQEENLDHNKIVYEKVCAISEKKGCTPGQLALAWVHHQGDDVCPIPGTTKIENLKQNIGALSVKLTPEEMTELEAIAQPGFVKGDRYSNMIPTFKNAETPPLSAWKAA

SEQ ID NO: 76748 - protein, 336 aa, Arabidopsis thaliana
  peptide (1)..(336): Ceres Seq. ID no. 11035387
MKLGSQGLEVSAQGLGCMGLSAFYGAPKPENEAIALIHHAIHSGVTLLDTSDIYGPETNEVLLGKALKDGVREKVELATKFGISYAEGKREVRGDPEYVRAACEAKFKRLDIACIDLYYQHRVDTRVPIEITMGELKKLVEEGKIKYIGLSEASASTIRRAHAVHPITAVQIEWSLWTRDVEEEIIPTCRELGIGIVAYSPLGRGFFASGPKLVENLEKDDFRKALPRFQEENLDHNKIVYEKVCAISEKKGCTPGQLALAWVHHQGDDVCPIPGTTKIENLKQNIGALSVKLTPEEMTELEAIAQPGFVKGDRYSNMIPTFKNAETPPLSAWKAA

SEQ ID NO: 76749 - protein, 319 aa, Arabidopsis thaliana
  peptide (1)..(319): Ceres Seq. ID no. 11035388
MGLSAFYGAPKPENEAIALIHHAIHSGVTLLDTSDIYGPETNEVLLGKALKDGVREKVELATKFGISYAEGKREVRGDPEYVRAACEAKFKRLDIACIDLYYQHRVDTRVPIEITMGELKKLVEEGKIKYIGLSEASASTIRRAHAVHPITAVQIEWSLWTRDVEEEIIPTCRELGIGIVAYSPLGRGFFASGPKLVENLEKDDFRKALPRFQEENLDHNKIVYEKVCAISEKKGCTPGQLALAWVHHQGDDVCPIPGTTKIENLKQNIGALSVKLTPEEMTELEAIAQPGFVKGDRYSNMIPTFKNAETPPLSAWKAA

SEQ ID NO: 76750 - DNA, 1452 bp, Arabidopsis thaliana
  misc_feature (1)..(1452): Ceres Seq. ID no. 11035471
  misc_feature (1)..(1452): Ortholog of  Ceres SEQ ID NO 15177742 as cited in SEQ ID NO 1202
  misc_feature (1)..(1452): Ortholog of  Ceres SEQ ID NO 15226750 as cited in SEQ ID NO 58711
aacgagtggtgttgctctctccatcttcctcttcatcttcttctgttctctctctataaatacaagtttactcttcctcttcctcaaatctctgactcttctctgcattatctcttcgatctctccaactctccaaaaccttcctcagatgggaactaccaatggaacagactatggagcatacacatacaaggagctagaaagagagcaatattggccatctgagaatctcaagatatcaataacaggagctggaggtttcattgcatctcacattgctcgtcgtttgaagcacgaaggtcattacgtgattgcttctgactggaaaaagaatgaacacatgactgaagacatgttctgtgatgagttccatcttgttgatcttagggttatggagaattgtctcaaagttactgaaggagttgatcatgtttttaacttagctgctgatatgggtggtatgggttttatccagagtaatcactctgtgattatgtataataatactatgattagtttcaatatgattgaggctgctaggatcaatgggattaagaggttcttttatgcttcgagtgcttgtatctatccagagtttaagcagttggagactactaatgtgagcttgaaggagtcagatgcttggcctgcagagcctcaagatgcttatggtttggagaagcttgctacggaggagttgtgtaagcattacaacaaagattttggtattgagtgtcgaattggaaggttccataacatttatggtccttttggaacatggaaaggtggaagggagaaggctccagctgctttctgtaggaaggctcagacttccactgataggtttgagatgtggggagatgggcttcagacccgttcttttacctttatcgatgagtgtgttgaaggtgtactcaggttgacaaaatcagatttccgtgagccggtgaacatcggaagcgatgagatggtgagcatgaatgagatggctgagatggttctcagctttgaggaaaagaagcttccaattcaccacattcctggcccggaaggtgttcgtggtcgtaactcagacaacaatctgatcaaagaaaagcttggttgggctcctaatatgagattgaaggaggggcttagaataacctacttctggataaaggaacagatcgagaaagagaaagcaaagggaagcgatgtgtcgctttacgggtcatcaaaggtggttggaactcaagcaccggttcagctaggctcactccgcgcggctgatggaaaagagtgaagttcaccaaagtataagtcaagctcaaatatggccttttaagttcagcaaaatgtttagatatatttttaggtagcttcctattaaaaaagcaataataagtgttttggattttggttccttctattctgctaatccttgtttatgtttagttgaaaaagtttgcttgc

SEQ ID NO: 76751 - protein, 426 aa, Arabidopsis thaliana; identical to SEQ ID NO: 23827
  peptide (1)..(426): Ceres Seq. ID no. 11035472

SEQ ID NO: 76752 - protein, 377 aa, Arabidopsis thaliana; identical to SEQ ID NO: 23828
  peptide (1)..(377): Ceres Seq. ID no. 11035473

SEQ ID NO: 76753 - protein, 313 aa, Arabidopsis thaliana; identical to SEQ ID NO: 23829
  peptide (1)..(313): Ceres Seq. ID no. 11035474

SEQ ID NO: 76754 - DNA, 1617 bp, Arabidopsis thaliana
  misc_feature (1)..(1617): Ceres Seq. ID no. 11035475
  misc_feature (1)..(1617): Ortholog of  Ceres SEQ ID NO 15178909 as cited in SEQ ID NO 0
aaaaaaaaaaaactcgaaacaaagtattaaaacaaaatcaataaaaagagaataaaaaatggtgggttctcacaaagcaagcggagtgcttcttgtgctactagtggttatggccaccacaatagcaaacgggacacctgttgtcgatacagcaaaaaatgcagctacagcagttgaagatacagcaaaaaatgtagctacagcagttggcggtgcagctgcatcagttggtgctaaagtaacaggtgccaaaccaggcggtgcatcacttgatgttaaagcatcaggagccaaaggagacggcaaaactgatgatagtgcggcatttgcggctgcatggaaagaagcttgtgcagcagggagcacgattacagtgccaaaaggtgagtatttggtagagagcctagagttcaaaggtccatgcaaaggtccagtcactttggaattgaatggcaattttaaggctccggctacggtcaagaccactaagcctcatgccggatggattgatttcgaaaatctcgctgatttcactttgaatggaaacaaagctatttttgacggtcaagggtccctcgcttggaaggccaatgactgcgccaaaaccggcaaatgcaactctctccctatcaacatccgattcactggtctaacaaactcaaagattaacagtattacatcaacaaacagcaagcttttccacatgaacatccttaactgcaagaacataactcttacggatatcagtattgatgcacctccggagagtctcaacaccgatggtatccacatcggaaggtccaatggagtcaacttaattggggcaaagattaaaaccggagatgactgcgtttccattggagatggtaccgaaaatctcattgttgagaacgtagaatgtggaccaggacacggaatttccattggaagtcttggaagataccctaatgaacaaccagtaaaaggagtcaccgtgaggaaatgcctcatcaagaacactgacaatggtgttcgcatcaagacatggccaggatctccccccggtatcgcctccaacattcttttcgaagatatcacaatggacaatgttagccttcccgttctcatcgaccaagagtactgtccttatggccactgcaaagctggggtaccatcgaaagtgaagttgtcagacgtgactatcaagaacattaagggaacatcagcaacaaaggtagcagtgaagctaatgtgcagcaaaggcgttccttgcaccaatattgctctctctgacatcaacttggtccacaacggcaaagagggaccagctgtctcagcatgttctaacatcaagcctattctcagcggaaagttggttccagcggcttgcactgaagtcgctaaaccgggtccttaaattaaagttgcatgtccaccataaatccatccaatctggtgaagacgctttgattagggtgcgatgaaaaattttgcaatattttttttgagatataaattatataatagataaaacagagtccattcagggttggagtttatcacctgaagagtgacttgtgtgattgggtagtaatgttatatgattcgcaatatgcgagagttatgtaaattattttt

SEQ ID NO: 76755 - protein, 445 aa, Arabidopsis thaliana
  peptide (1)..(445): Ceres Seq. ID no. 11035476
MVGSHKASGVLLVLLVVMATTIANGTPVVDTAKNAATAVEDTAKNVATAVGGAAASVGAKVTGAKPGGASLDVKASGAKGDGKTDDSAAFAAAWKEACAAGSTITVPKGEYLVESLEFKGPCKGPVTLELNGNFKAPATVKTTKPHAGWIDFENLADFTLNGNKAIFDGQGSLAWKANDCAKTGKCNSLPINIRFTGLTNSKINSITSTNSKLFHMNILNCKNITLTDISIDAPPESLNTDGIHIGRSNGVNLIGAKIKTGDDCVSIGDGTENLIVENVECGPGHGISIGSLGRYPNEQPVKGVTVRKCLIKNTDNGVRIKTWPGSPPGIASNILFEDITMDNVSLPVLIDQEYCPYGHCKAGVPSKVKLSDVTIKNIKGTSATKVAVKLMCSKGVPCTNIALSDINLVHNGKEGPAVSACSNIKPILSGKLVPAACTEVAKPGP

SEQ ID NO: 76756 - protein, 428 aa, Arabidopsis thaliana
  peptide (1)..(428): Ceres Seq. ID no. 11035477
MATTIANGTPVVDTAKNAATAVEDTAKNVATAVGGAAASVGAKVTGAKPGGASLDVKASGAKGDGKTDDSAAFAAAWKEACAAGSTITVPKGEYLVESLEFKGPCKGPVTLELNGNFKAPATVKTTKPHAGWIDFENLADFTLNGNKAIFDGQGSLAWKANDCAKTGKCNSLPINIRFTGLTNSKINSITSTNSKLFHMNILNCKNITLTDISIDAPPESLNTDGIHIGRSNGVNLIGAKIKTGDDCVSIGDGTENLIVENVECGPGHGISIGSLGRYPNEQPVKGVTVRKCLIKNTDNGVRIKTWPGSPPGIASNILFEDITMDNVSLPVLIDQEYCPYGHCKAGVPSKVKLSDVTIKNIKGTSATKVAVKLMCSKGVPCTNIALSDINLVHNGKEGPAVSACSNIKPILSGKLVPAACTEVAKPGP

SEQ ID NO: 76757 - protein, 230 aa, Arabidopsis thaliana
  peptide (1)..(230): Ceres Seq. ID no. 11035478
MNILNCKNITLTDISIDAPPESLNTDGIHIGRSNGVNLIGAKIKTGDDCVSIGDGTENLIVENVECGPGHGISIGSLGRYPNEQPVKGVTVRKCLIKNTDNGVRIKTWPGSPPGIASNILFEDITMDNVSLPVLIDQEYCPYGHCKAGVPSKVKLSDVTIKNIKGTSATKVAVKLMCSKGVPCTNIALSDINLVHNGKEGPAVSACSNIKPILSGKLVPAACTEVAKPGP

SEQ ID NO: 76758 - DNA, 2022 bp, Arabidopsis thaliana
  misc_feature (1)..(2022): Ceres Seq. ID no. 11389309
  misc_feature (1)..(2022): Ortholog of  Ceres SEQ ID NO 12606053 as cited in SEQ ID NO 20448
atggttgcagcattctcttacactgcctgcaccaagctttctctattacatccttctatggttgctcaaatccgaccaagaacaacacaaaaggcgttcgtggtgacaaatccggaacaagacagtactcttgaagtacaagaaacagagacactcaaagaagagcaatcaacagagaagatgaagaagcagccaacaccattgagaccagtggagaaacagctgaacgtgaagagcaagggtatgggcgattttggtggtcagtggctaagcagtgtcacacgtcacgttaggatctacgctgcttatattgatccagagacttgtgagtttgaccagtcacaaatggataaactcactttgattcttgatcctactgaagaatttgtgtgggatgatgaaagctgtaacaaggtctattcttatttccaagaactcgtcgatcactacgaggtaacgataacaataaacgaacgaaacattcatctaaaagttagactcatttcaagaagaccttataatattgtttttgaacagggagcaccattaacggagtacacattgagattgataggatcggacgtagaacattacataaggaagatgttgttcgatggagaaatacaatacaatatggatgcaagagttcttaatttcagtatgggaaagcctcgtgtacaattcaataccagtaacattgaaggtggtggagatgacgaactttgtgagggagaaaaaatggcgaatttactggaaacatcaatctttttctcctctgctgataaattactgtctttcccgcctaagaattctcaaacccatcatctccctttctctgctttcatcaatggaggaagaaagatacgcaaaagctcaactatcacctttgctaccgacactgtcacttacaatggcactacaagtgcggaagtaaaaagctctgttgaggatccaatggaagttgaggttgctgaaggttacactatggctcagttttgtgacaagattattgatctcttcttgaatgagaaacctaaagttaaacaatggaagacgtatttggttttaagagatgaatggaacaagtacagtgttaatttctataagcgttgcagaatccgagctgataccgaaactgatcctatattgaagcagaaactggtatctttggaaagtaaagtcaagaagatagataaggaaatggagaaacacaatgaccttttgaaggagattcaagaaaacccaacagacataaacgcaatcgctgccaagagacgcagagactttacgggagagtttttccgctatgttactttgttatcagaaactcttgatggcttggaagaccgagatgctgttgcgaggcttgcaactagatgtttatctgctgtgagtgcttatgacaacacgttggagagtgttgagactctagatactgctcaagcaaagtttgaagatattttaaactctccatccgtggattctgcttgcgaaaagatcagaagtttagccaaggcaaaggagcttgattcctcattgatcttattgatcaacagtgcatacgctgctgcaaaagagtctcaaactgttacgaacgaggctaaagacataatgtatcatttatacaaagctacaaagagcagtcttagaagcatcacaccgaaagagatcaaacttttaaagtacttactcaacataacagaccccgaagaacgattctctgccctagctacagcattctctcctggtgatgaccacgaagctaaggaccctaaagcattatacacgacgccaaaggagctgcataagtggataaagataatgcttgatgcttaccatctcaacaaagaagaaacagacattaaagaagctaaacagatgagccaacctatcgttattcagcggcttttcattctcaaggacactatcgaagacgagtatttagacaagaaaacaatcgtggctgatgaaactccaaagaaggaagaagaagatacgactattgaagattttttgaactga

SEQ ID NO: 76759 - protein, 673 aa, Arabidopsis thaliana
  peptide (1)..(673): Ceres Seq. ID no. 11389310
MVAAFSYTACTKLSLLHPSMVAQIRPRTTQKAFVVTNPEQDSTLEVQETETLKEEQSTEKMKKQPTPLRPVEKQLNVKSKGMGDFGGQWLSSVTRHVRIYAAYIDPETCEFDQSQMDKLTLILDPTEEFVWDDESCNKVYSYFQELVDHYEVTITINERNIHLKVRLISRRPYNIVFEQGAPLTEYTLRLIGSDVEHYIRKMLFDGEIQYNMDARVLNFSMGKPRVQFNTSNIEGGGDDELCEGEKMANLLETSIFFSSADKLLSFPPKNSQTHHLPFSAFINGGRKIRKSSTITFATDTVTYNGTTSAEVKSSVEDPMEVEVAEGYTMAQFCDKIIDLFLNEKPKVKQWKTYLVLRDEWNKYSVNFYKRCRIRADTETDPILKQKLVSLESKVKKIDKEMEKHNDLLKEIQENPTDINAIAAKRRRDFTGEFFRYVTLLSETLDGLEDRDAVARLATRCLSAVSAYDNTLESVETLDTAQAKFEDILNSPSVDSACEKIRSLAKAKELDSSLILLINSAYAAAKESQTVTNEAKDIMYHLYKATKSSLRSITPKEIKLLKYLLNITDPEERFSALATAFSPGDDHEAKDPKALYTTPKELHKWIKIMLDAYHLNKEETDIKEAKQMSQPIVIQRLFILKDTIEDEYLDKKTIVADETPKKEEEDTTIEDFLN

SEQ ID NO: 76760 - protein, 654 aa, Arabidopsis thaliana
  peptide (1)..(654): Ceres Seq. ID no. 11389311
MVAQIRPRTTQKAFVVTNPEQDSTLEVQETETLKEEQSTEKMKKQPTPLRPVEKQLNVKSKGMGDFGGQWLSSVTRHVRIYAAYIDPETCEFDQSQMDKLTLILDPTEEFVWDDESCNKVYSYFQELVDHYEVTITINERNIHLKVRLISRRPYNIVFEQGAPLTEYTLRLIGSDVEHYIRKMLFDGEIQYNMDARVLNFSMGKPRVQFNTSNIEGGGDDELCEGEKMANLLETSIFFSSADKLLSFPPKNSQTHHLPFSAFINGGRKIRKSSTITFATDTVTYNGTTSAEVKSSVEDPMEVEVAEGYTMAQFCDKIIDLFLNEKPKVKQWKTYLVLRDEWNKYSVNFYKRCRIRADTETDPILKQKLVSLESKVKKIDKEMEKHNDLLKEIQENPTDINAIAAKRRRDFTGEFFRYVTLLSETLDGLEDRDAVARLATRCLSAVSAYDNTLESVETLDTAQAKFEDILNSPSVDSACEKIRSLAKAKELDSSLILLINSAYAAAKESQTVTNEAKDIMYHLYKATKSSLRSITPKEIKLLKYLLNITDPEERFSALATAFSPGDDHEAKDPKALYTTPKELHKWIKIMLDAYHLNKEETDIKEAKQMSQPIVIQRLFILKDTIEDEYLDKKTIVADETPKKEEEDTTIEDFLN

SEQ ID NO: 76761 - protein, 613 aa, Arabidopsis thaliana
  peptide (1)..(613): Ceres Seq. ID no. 11389312
MKKQPTPLRPVEKQLNVKSKGMGDFGGQWLSSVTRHVRIYAAYIDPETCEFDQSQMDKLTLILDPTEEFVWDDESCNKVYSYFQELVDHYEVTITINERNIHLKVRLISRRPYNIVFEQGAPLTEYTLRLIGSDVEHYIRKMLFDGEIQYNMDARVLNFSMGKPRVQFNTSNIEGGGDDELCEGEKMANLLETSIFFSSADKLLSFPPKNSQTHHLPFSAFINGGRKIRKSSTITFATDTVTYNGTTSAEVKSSVEDPMEVEVAEGYTMAQFCDKIIDLFLNEKPKVKQWKTYLVLRDEWNKYSVNFYKRCRIRADTETDPILKQKLVSLESKVKKIDKEMEKHNDLLKEIQENPTDINAIAAKRRRDFTGEFFRYVTLLSETLDGLEDRDAVARLATRCLSAVSAYDNTLESVETLDTAQAKFEDILNSPSVDSACEKIRSLAKAKELDSSLILLINSAYAAAKESQTVTNEAKDIMYHLYKATKSSLRSITPKEIKLLKYLLNITDPEERFSALATAFSPGDDHEAKDPKALYTTPKELHKWIKIMLDAYHLNKEETDIKEAKQMSQPIVIQRLFILKDTIEDEYLDKKTIVADETPKKEEEDTTIEDFLN

SEQ ID NO: 76762 - DNA, 1951 bp, Arabidopsis thaliana
  misc_feature (1)..(1951): Ceres Seq. ID no. 11393359
  misc_feature (1)..(1951): Ortholog of  Ceres SEQ ID NO 15174638 as cited in SEQ ID NO 53185
  misc_feature (1)..(1951): Ortholog of  Ceres SEQ ID NO 13657460 as cited in SEQ ID NO 66115
  misc_feature (1)..(1951): Ortholog of  Ceres SEQ ID NO 13659394 as cited in SEQ ID NO 67049
agtaatttagttttttttttttttttttacaatttattttgttattagaagtggtagtggagtgaaaaaacaaatcctaagcagtcctaaccgatccccgaagctaaagattcttcaccttcccaaataaagcaaaacctagatccgacattgaaggaaaaaccttttagatccatctctgaaaaaaacccaaccatgaagagagatcatcatcatcatcatcaagataagaagactatgatgatgaatgaagaagacgacggtaacggcatggatgagcttctagctgttcttggttacaaggttaggtcatcggaaatggctgatgttgctcagaaactcgagcagcttgaagttatgatgtctaatgttcaagaagacgatctttctcaactcgctactgagactgttcactataatccggcggagctttacacgtggcttgattctatgctcaccgaccttaatcctccgtcgtctaacgccgagtacgatcttaaagctattcccggtgacgcgattctcaatcagttcgctatcgattcggcttcttcgtctaaccaaggcggcggaggagatacgtatactacaaacaagcggttgaaatgctcaaacggcgtcgtggaaaccaccacagcgacggctgagtcaactcggcatgttgtcctggttgactcgcaggagaacggtgtgcgtctcgttcacgcgcttttggcttgcgctgaagctgttcagaaggagaatctgactgtggcggaagctctggtgaagcaaatcggattcttagctgtttctcaaatcggagctatgagacaagtcgctacttacttcgccgaagctctcgcgcggcggatttaccgtctctctccgtcgcagagtccaatcgaccactctctctccgatactcttcagatgcacttctacgagacttgtccttatctcaagttcgctcacttcacggcgaatcaagcgattctcgaagcttttcaagggaagaaaagagttcatgtcattgatttctctatgagtcaaggtcttcaatggccggcgcttatgcaggctcttgcgcttcgacctggtggtcctcctgttttccggttaaccggaattggtccaccggcaccggataatttcgattatcttcatgaagttgggtgtaagctggctcatttagctgaggcgattcacgttgagtttgagtacagaggatttgtggctaacactttagctgatcttgatgcttcgatgcttgagcttagaccaagtgagattgaatctgttgcggttaactctgttttcgagcttcacaagctcttgggacgacctggtgcgatcgataaggttcttggtgtggtgaatcagattaaaccggagattttcactgtggttgagcaggaatcgaaccataatagtccgattttcttagatcggtttactgagtcgttgcattattactcgacgttgtttgactcgttggaaggtgtaccgagtggtcaagacaaggtcatgtcggaggtttacttgggtaaacagatctgcaacgttgtggcttgtgatggacctgaccgagttgagcgtcatgaaacgttgagtcagtggaggaaccggttcgggtctgctgggtttgcggctgcacatattggttcgaatgcgtttaagcaagcgagtatgcttttggctctgttcaacggcggtgagggttatcgggtggaggagagtgacggctgtctcatgttgggttggcacacacgaccgctcatagccacctcggcttggaaactctccaccaattagatggtggctcaatgaattgatctgttgaaccggttatgatgatagatttccgaccgaagccaaactaaatcctactgtttttccctttgtcacttgttaagatcttatctttcattatattaggtaattgaaaaattttaatctcgcctaaattact

SEQ ID NO: 76763 - protein, 532 aa, Arabidopsis thaliana
  peptide (1)..(532): Ceres Seq. ID no. 11393360
MKRDHHHHHQDKKTMMMNEEDDGNGMDELLAVLGYKVRSSEMADVAQKLEQLEVMMSNVQEDDLSQLATETVHYNPAELYTWLDSMLTDLNPPSSNAEYDLKAIPGDAILNQFAIDSASSSNQGGGGDTYTTNKRLKCSNGVVETTTATAESTRHVVLVDSQENGVRLVHALLACAEAVQKENLTVAEALVKQIGFLAVSQIGAMRQVATYFAEALARRIYRLSPSQSPIDHSLSDTLQMHFYETCPYLKFAHFTANQAILEAFQGKKRVHVIDFSMSQGLQWPALMQALALRPGGPPVFRLTGIGPPAPDNFDYLHEVGCKLAHLAEAIHVEFEYRGFVANTLADLDASMLELRPSEIESVAVNSVFELHKLLGRPGAIDKVLGVVNQIKPEIFTVVEQESNHNSPIFLDRFTESLHYYSTLFDSLEGVPSGQDKVMSEVYLGKQICNVVACDGPDRVERHETLSQWRNRFGSAGFAAAHIGSNAFKQASMLLALFNGGEGYRVEESDGCLMLGWHTRPLIATSAWKLSTN

SEQ ID NO: 76764 - protein, 518 aa, Arabidopsis thaliana
  peptide (1)..(518): Ceres Seq. ID no. 11393361
MMMNEEDDGNGMDELLAVLGYKVRSSEMADVAQKLEQLEVMMSNVQEDDLSQLATETVHYNPAELYTWLDSMLTDLNPPSSNAEYDLKAIPGDAILNQFAIDSASSSNQGGGGDTYTTNKRLKCSNGVVETTTATAESTRHVVLVDSQENGVRLVHALLACAEAVQKENLTVAEALVKQIGFLAVSQIGAMRQVATYFAEALARRIYRLSPSQSPIDHSLSDTLQMHFYETCPYLKFAHFTANQAILEAFQGKKRVHVIDFSMSQGLQWPALMQALALRPGGPPVFRLTGIGPPAPDNFDYLHEVGCKLAHLAEAIHVEFEYRGFVANTLADLDASMLELRPSEIESVAVNSVFELHKLLGRPGAIDKVLGVVNQIKPEIFTVVEQESNHNSPIFLDRFTESLHYYSTLFDSLEGVPSGQDKVMSEVYLGKQICNVVACDGPDRVERHETLSQWRNRFGSAGFAAAHIGSNAFKQASMLLALFNGGEGYRVEESDGCLMLGWHTRPLIATSAWKLSTN

SEQ ID NO: 76765 - protein, 517 aa, Arabidopsis thaliana
  peptide (1)..(517): Ceres Seq. ID no. 11393362
MMNEEDDGNGMDELLAVLGYKVRSSEMADVAQKLEQLEVMMSNVQEDDLSQLATETVHYNPAELYTWLDSMLTDLNPPSSNAEYDLKAIPGDAILNQFAIDSASSSNQGGGGDTYTTNKRLKCSNGVVETTTATAESTRHVVLVDSQENGVRLVHALLACAEAVQKENLTVAEALVKQIGFLAVSQIGAMRQVATYFAEALARRIYRLSPSQSPIDHSLSDTLQMHFYETCPYLKFAHFTANQAILEAFQGKKRVHVIDFSMSQGLQWPALMQALALRPGGPPVFRLTGIGPPAPDNFDYLHEVGCKLAHLAEAIHVEFEYRGFVANTLADLDASMLELRPSEIESVAVNSVFELHKLLGRPGAIDKVLGVVNQIKPEIFTVVEQESNHNSPIFLDRFTESLHYYSTLFDSLEGVPSGQDKVMSEVYLGKQICNVVACDGPDRVERHETLSQWRNRFGSAGFAAAHIGSNAFKQASMLLALFNGGEGYRVEESDGCLMLGWHTRPLIATSAWKLSTN

SEQ ID NO: 76766 - DNA, 2559 bp, Arabidopsis thaliana
  misc_feature (1)..(2559): Ceres Seq. ID no. 11401795
  misc_feature (1)..(2559): Ortholog of  Ceres SEQ ID NO 14308723 as cited in SEQ ID NO 58758
attggtgcttttggttttggcaaagcgtgagtgagatcgggaatcaaacatcgcctccgtctctcatttcaaacgctatctccatctccttcctccgccgccgccatggaatctccgaagaattctctgatcccgagcttcctctattcatcatcttcatctccgagatctttcctcctcgaccaggtgctcaattccaactccaacgctgcattcgagaaatctccttctccggccccgcgttcctctcctacgtcgatgatttctcggaagaatttccttattgcatctcccaccgagccagggaaggggatcgagatgtattcacctgccttctacgctgcttgtacctttggtggaattctcagctgtggtcttactcacatgaccgtgactcctctcgatctcgtcaagtgcaatatgcagattgatccagcgaagtacaagagcatctcgtctggttttggaattttgctgaaagagcaaggagtcaaaggctttttccgtggatgggttcctactcttttgggttacagtgctcagggtgcctgcaagtttggattctacgagtactttaagaagacttactctgaccttgctggacctgagtacactgccaaatacaagactctcatctaccttgctggttctgcttctgctgagatcattgccgatattgcactttgcccatttgaagctgtgaaggttcgtgttcagacacagcctggatttgctagggggatgtctgatggatttcccaagtttatcaagtccgaaggatacggaggcttgtataagggtcttgctccactctggggacgtcagattccttacactatgatgaagtttgcttcctttgagaccattgttgagatgatttacaagtacgcaatccccaacccaaagagtgagtgcagcaaaggtctgcaactcggagtgagttttgccggaggttacgttgccggagtgttctgtgccatcgtttctcatccagcagacaatctagtgtcattcctcaacaacgctaagggagcaaccgttggagatgcggtgaagaagattggtatggtgggactgttcacaagagggcttcctcttagaattgtgatgatcgggacgttgactggagcacagtggggattatacgatgccttcaaagtgtttgttggcctgccaaccactggtggtgttgctccagctcctgccatcgcagctactgaagccaaagcctaaacaatgacgaaaaaggttattaggagttcgatggggtaggatttttgtttggaaaaataagagaaaccatacggtgatgaggaagagtgagtaagctcaatttcttcctgatttgaactttatcatttttgttttttttgaaatttgtgttcctgaattcaggatagtgctctctctctctttacatactctcttcctattgtttcttgtcctttttttctttgtgtgatgtaatcttaaaagatgagagggacacactccaagatagagagagtgggcatacacccactcactactttttattcagtttcagttgaaattcaaaaaaaaaaaaaaaagagctcttggatcccaacaatgtggggacctttcactgcttactgctataggtccatattagacggaatagagcacatagcaatggttaagggtgagattggtgacggtcaagacattctcgtgagggttcattctgaatgtctaacaggggacatatttgggtctgcaaggtgtgattgcgggaaccagctagcactctcgatgcagcagatcgaggctactggtcgcggtgtgctggtttacctacgtggacatgaaggaagagggatcggtttaggacacaagcttcgagcttacaatctgcaagatgctggtcgagacacggttgaagctaatgaggaattaggacttcctgttgattctagagagtatggaattggtgcacagataataagggatttaggtgttaggacaatgaagctgatgacaaataatcccgcaaagtatgttggtttgaagggatatggattagccattgttgggagagtccctctattgagtcttatcacgaaggagaataagagatatctggagacaaagcggaccaagatgggtcacatgtatggcttgaagttcaaaggggatgttgtggagaagattgagtctgaatctgagtcctaagcttaaaaaccaggacgaaccgaatggaatcaagaactatagatataatacttcacaaaaaacaaggaaagaaattgacacagaagaagaggaaaaagacatttgatctgtctgagaaacttgattagattggtttatgttctaatctaatctgatttgatttttttttattttgtctacgattcttgagttacgaaatgttcatcatttgttacttcttgttgtcgggattgagtagttgcatttttttagttgtggagctgtgacaaagaggccagctagtgtgtggaatgtggatcatcatcctttggttgattccttgtagaatcctttttgtaaacatttaaactataataaagtgttatg

SEQ ID NO: 76767 - protein, 375 aa, Arabidopsis thaliana
  peptide (1)..(375): Ceres Seq. ID no. 11401796
MESPKNSLIPSFLYSSSSSPRSFLLDQVLNSNSNAAFEKSPSPAPRSSPTSMISRKNFLIASPTEPGKGIEMYSPAFYAACTFGGILSCGLTHMTVTPLDLVKCNMQIDPAKYKSISSGFGILLKEQGVKGFFRGWVPTLLGYSAQGACKFGFYEYFKKTYSDLAGPEYTAKYKTLIYLAGSASAEIIADIALCPFEAVKVRVQTQPGFARGMSDGFPKFIKSEGYGGLYKGLAPLWGRQIPYTMMKFASFETIVEMIYKYAIPNPKSECSKGLQLGVSFAGGYVAGVFCAIVSHPADNLVSFLNNAKGATVGDAVKKIGMVGLFTRGLPLRIVMIGTLTGAQWGLYDAFKVFVGLPTTGGVAPAPAIAATEAKA

SEQ ID NO: 76768 - protein, 324 aa, Arabidopsis thaliana
  peptide (1)..(324): Ceres Seq. ID no. 11401797
MISRKNFLIASPTEPGKGIEMYSPAFYAACTFGGILSCGLTHMTVTPLDLVKCNMQIDPAKYKSISSGFGILLKEQGVKGFFRGWVPTLLGYSAQGACKFGFYEYFKKTYSDLAGPEYTAKYKTLIYLAGSASAEIIADIALCPFEAVKVRVQTQPGFARGMSDGFPKFIKSEGYGGLYKGLAPLWGRQIPYTMMKFASFETIVEMIYKYAIPNPKSECSKGLQLGVSFAGGYVAGVFCAIVSHPADNLVSFLNNAKGATVGDAVKKIGMVGLFTRGLPLRIVMIGTLTGAQWGLYDAFKVFVGLPTTGGVAPAPAIAATEAKA

SEQ ID NO: 76769 - protein, 304 aa, Arabidopsis thaliana
  peptide (1)..(304): Ceres Seq. ID no. 11401798
MYSPAFYAACTFGGILSCGLTHMTVTPLDLVKCNMQIDPAKYKSISSGFGILLKEQGVKGFFRGWVPTLLGYSAQGACKFGFYEYFKKTYSDLAGPEYTAKYKTLIYLAGSASAEIIADIALCPFEAVKVRVQTQPGFARGMSDGFPKFIKSEGYGGLYKGLAPLWGRQIPYTMMKFASFETIVEMIYKYAIPNPKSECSKGLQLGVSFAGGYVAGVFCAIVSHPADNLVSFLNNAKGATVGDAVKKIGMVGLFTRGLPLRIVMIGTLTGAQWGLYDAFKVFVGLPTTGGVAPAPAIAATEAKA

SEQ ID NO: 76770 - DNA, 1890 bp, Arabidopsis thaliana
  misc_feature (1)..(1890): Ceres Seq. ID no. 11401901
  misc_feature (1)..(1890): Ortholog of  Ceres SEQ ID NO 13584744 as cited in SEQ ID NO 69137
atggctattggagatagagctatgtttactgttttgcttctattcattgcttcgatctctggattctctgttgttcgttgtgttactgatccatctgatggagtctctggcactcttggatacttgctctcagaccttaagtcactcagaaaattggatgttagtggtaacagcatccatgatacacttccatatcagttgccaccgaatctcacaagcctgaatgtaagtggtaattcacttacaatgtcaataggagatatctttgctgatcataagtcactggcaaccttggacctttctcataacaacttcagtggcgatcttcctagttccttaagcacagtgtccacactttccgttctttatgttcagaacaatcaattgacaggttccatcgatgttctctcggggttgcctttgaaaactttaaatgttgcaaacaatcatttcaatggatccatacctaaggagcttagttctattcagaccttaatatatgatggtaattcctttgataacgtccctgcctctcctcagccagaaagacctggcaaaaaagagacaccttctggttctaagaaacccaaaattggttctgaagagaaatcttcagactctggcaagggtttgtctggtggagtagtcactggtatagtgttcggttctctatttgttgctggtattatagcacttgttctttacttgtgccttcacaagaaaaaacggaaagttagaggaagtacaagagcttcccaaagaagtcttccgcttagtggaacacctgaggtgcaggagcagagggtaaaaagtgtagcatccgttgcagacttgaagtcttcacctgcagaaaaagtaacggttgatcgcgttatgaagaacggctctataagtagaataagatctcctatcactgcttcacaatacactgtttcctctctgcaagttgcaacaaacagctttagtcaagaaaacatcattggtgaaggttctctaggccgtgtctatagagcagagttccccaatggaaagataatggcgattaagaagattgataatgcagcactttcattacaagaagaagataatttcttagaagccgtttcaaatatgtcgcggttgaggcatccaaacattgttcccttggctggatactgcaccgagcatggtcaacgtcttctagtgtatgaatatgtaggaaatgggaatctagatgatacgcttcacacgaatgatgatagaagcatgaatctgacttggaatgcgcgtgttaaagtggctcttggaactgccaaggctttagagtacttgcacgaagtttgcttgccttcaattgtccatagaaacttcaaatcagcgaatatattgctagacgaagaacttaatcctcacctatcagacagtggtttagctgctttgacacctaacactgagagacaggtttcaactcaagtggtaggttcatttggatacagcgctccagagtttgcactgtcgggaatttacacagtgaaaagtgatgtatacacttttggagtagtcatgcttgagctcttaactggtcggaagcctcttgacagctcgaggacgagagcagagcaatcactagtgagatgggcaacaccgcagcttcacgatatagatgctttgtctaaaatggttgatccttctcttaatggcatgtatccagctaagtcactgtctcgttttgcggacatcattgctctctgtattcagccggaaccagagttcaggcctccaatgtcagaggtggtgcaacagctagtaagattagttcaaagggcaagtgttgtcaaacgaagatcaagtgatgacactggattttcatacaggacacctgaacacgagcacgtcgatatctcattctga

SEQ ID NO: 76771 - protein, 629 aa, Arabidopsis thaliana
  peptide (1)..(629): Ceres Seq. ID no. 11401902
MAIGDRAMFTVLLLFIASISGFSVVRCVTDPSDGVSGTLGYLLSDLKSLRKLDVSGNSIHDTLPYQLPPNLTSLNVSGNSLTMSIGDIFADHKSLATLDLSHNNFSGDLPSSLSTVSTLSVLYVQNNQLTGSIDVLSGLPLKTLNVANNHFNGSIPKELSSIQTLIYDGNSFDNVPASPQPERPGKKETPSGSKKPKIGSEEKSSDSGKGLSGGVVTGIVFGSLFVAGIIALVLYLCLHKKKRKVRGSTRASQRSLPLSGTPEVQEQRVKSVASVADLKSSPAEKVTVDRVMKNGSISRIRSPITASQYTVSSLQVATNSFSQENIIGEGSLGRVYRAEFPNGKIMAIKKIDNAALSLQEEDNFLEAVSNMSRLRHPNIVPLAGYCTEHGQRLLVYEYVGNGNLDDTLHTNDDRSMNLTWNARVKVALGTAKALEYLHEVCLPSIVHRNFKSANILLDEELNPHLSDSGLAALTPNTERQVSTQVVGSFGYSAPEFALSGIYTVKSDVYTFGVVMLELLTGRKPLDSSRTRAEQSLVRWATPQLHDIDALSKMVDPSLNGMYPAKSLSRFADIIALCIQPEPEFRPPMSEVVQQLVRLVQRASVVKRRSSDDTGFSYRTPEHEHVDISF

SEQ ID NO: 76772 - protein, 622 aa, Arabidopsis thaliana
  peptide (1)..(622): Ceres Seq. ID no. 11401903
MFTVLLLFIASISGFSVVRCVTDPSDGVSGTLGYLLSDLKSLRKLDVSGNSIHDTLPYQLPPNLTSLNVSGNSLTMSIGDIFADHKSLATLDLSHNNFSGDLPSSLSTVSTLSVLYVQNNQLTGSIDVLSGLPLKTLNVANNHFNGSIPKELSSIQTLIYDGNSFDNVPASPQPERPGKKETPSGSKKPKIGSEEKSSDSGKGLSGGVVTGIVFGSLFVAGIIALVLYLCLHKKKRKVRGSTRASQRSLPLSGTPEVQEQRVKSVASVADLKSSPAEKVTVDRVMKNGSISRIRSPITASQYTVSSLQVATNSFSQENIIGEGSLGRVYRAEFPNGKIMAIKKIDNAALSLQEEDNFLEAVSNMSRLRHPNIVPLAGYCTEHGQRLLVYEYVGNGNLDDTLHTNDDRSMNLTWNARVKVALGTAKALEYLHEVCLPSIVHRNFKSANILLDEELNPHLSDSGLAALTPNTERQVSTQVVGSFGYSAPEFALSGIYTVKSDVYTFGVVMLELLTGRKPLDSSRTRAEQSLVRWATPQLHDIDALSKMVDPSLNGMYPAKSLSRFADIIALCIQPEPEFRPPMSEVVQQLVRLVQRASVVKRRSSDDTGFSYRTPEHEHVDISF

SEQ ID NO: 76773 - protein, 547 aa, Arabidopsis thaliana
  peptide (1)..(547): Ceres Seq. ID no. 11401904
MSIGDIFADHKSLATLDLSHNNFSGDLPSSLSTVSTLSVLYVQNNQLTGSIDVLSGLPLKTLNVANNHFNGSIPKELSSIQTLIYDGNSFDNVPASPQPERPGKKETPSGSKKPKIGSEEKSSDSGKGLSGGVVTGIVFGSLFVAGIIALVLYLCLHKKKRKVRGSTRASQRSLPLSGTPEVQEQRVKSVASVADLKSSPAEKVTVDRVMKNGSISRIRSPITASQYTVSSLQVATNSFSQENIIGEGSLGRVYRAEFPNGKIMAIKKIDNAALSLQEEDNFLEAVSNMSRLRHPNIVPLAGYCTEHGQRLLVYEYVGNGNLDDTLHTNDDRSMNLTWNARVKVALGTAKALEYLHEVCLPSIVHRNFKSANILLDEELNPHLSDSGLAALTPNTERQVSTQVVGSFGYSAPEFALSGIYTVKSDVYTFGVVMLELLTGRKPLDSSRTRAEQSLVRWATPQLHDIDALSKMVDPSLNGMYPAKSLSRFADIIALCIQPEPEFRPPMSEVVQQLVRLVQRASVVKRRSSDDTGFSYRTPEHEHVDISF

SEQ ID NO: 76774 - DNA, 1736 bp, Arabidopsis thaliana
  misc_feature (1)..(1736): Ceres Seq. ID no. 11403153
  misc_feature (1)..(1736): Ortholog of  Ceres SEQ ID NO 14303850 as cited in SEQ ID NO 53464
  misc_feature (1)..(1736): Ortholog of  Ceres SEQ ID NO 15176262 as cited in SEQ ID NO 54751
  misc_feature (1)..(1736): Ortholog of  Ceres SEQ ID NO 13656177 as cited in SEQ ID NO 64997
gaattcctcgagctacgtcagggccagtctctcgcaatcttcgctcttctctttgctctctctctctcaacgcggttcagatccgagtttgggagattcaagctccctgaaaaaagccctttactctcgcttaccaactttgctccagcatggcaggatctgcaccagaaggcacacagtttgatgcacgtcagtttgaccagaaactcaatgaagtacttgagggacaagatgagttcttcacatcctatgatgatgttcatgagagctttgatgccatgggtcttcaagagaaccttctcaggggtatttatgcttatggttttgagaagccttctgctattcagcaaagaggaatcgtccccttctgtaagggtcttgatgtgattcaacaggctcagtctggtactgggaaaacagcaactttctgctctggtgtcttgcagcagctggacttctcccttatccagtgtcaggctttggttctagctccaactagagagcttgctcagcaaattgagaaggtcatgagggcccttggtgattaccttggtgtcaaggttcacgcctgtgttggtggaaccagtgtccgtgaggatcagcgcatcctccaagctggtgtccatgttgttgttggaactccagggcgtgtctttgacatgttgaagaggcagtctcttcgtgctgacaacatcaagatgtttgttctcgatgaagctgatgaaatgctctcccgtggtttcaaggaccagatctatgacatattccagcttcttccaccaaagatccaagttggtgtgttctccgcaacaatgccaccagaagctcttgagatcacaaggaagttcatgagcaagccagtgagaatcttggtgaagcgtgatgagcttacccttgaaggtatcaagcagttctacgtcaacgttgagaaagaagagtggaagctcgagacactctgtgatctctacgagactcttgccatcactcagagtgtcatcttcgtgaacaccaggcgtaaggttgattggctcacagacaaaatgagaagccgtgaccacacagtctctgcaactcacggagacatggaccagaacaccagggacatcatcatgagagagttcaggtctggttcctcccgtgttctcatcaccactgacctcttagctcgtggtattgatgtccaacaagtctccctggttatcaacttcgatctcccaactcagccagagaactaccttcaccgtatcggaagaagtggaaggttcgggagaaagggtgttgcgatcaatttcgtgacccgtgatgatgagaggatgctgtttgatattcagaaattctacaatgtggttgtcgaagagctgccttcgaacgtggccgatctgctgtgaagggagaaaagaagtcggttctgttgctgtgtttgctctgccgtactagtatcaccggagaagaaaggttttcttgttttgcaaggcactctttgatctgattttgacccgtcgtctatcagcgatttacatttcttaaattttcttagttgttgttctctcctctctctcccagctacgaacatatctctctcttcttgaccatttttaagtttaagtcatatggagtatttatttcttcactattttaatattcggctttgttgtttgtctttgatttttgtatcaatcaaatcttttcatcaaagtttggttttaagctaaaccctgacgtagctcgaggaattc

SEQ ID NO: 76775 - protein, 412 aa, Arabidopsis thaliana; identical to SEQ ID NO: 21228
  peptide (1)..(412): Ceres Seq. ID no. 11403154

SEQ ID NO: 76776 - protein, 369 aa, Arabidopsis thaliana; identical to SEQ ID NO: 21229
  peptide (1)..(369): Ceres Seq. ID no. 11403155

SEQ ID NO: 76777 - protein, 286 aa, Arabidopsis thaliana; identical to SEQ ID NO: 21230
  peptide (1)..(286): Ceres Seq. ID no. 11403156

SEQ ID NO: 76778 - DNA, 2124 bp, Arabidopsis thaliana
  misc_feature (1)..(2124): Ceres Seq. ID no. 11403170
  misc_feature (1)..(2124): Ortholog of  Ceres SEQ ID NO 14312408 as cited in SEQ ID NO 55042
cggtggcggccgcactagaactagnggatcccccgggctgcangaattcggcacgagaagttgatgcagaagcaataataacaaaacaaaaaaacattaaaaaaaaaagctcttcagttttggtttctgcagtctccaatggctctcaagctctttctctttgctcttcttctctgtctcccgacttctctctcctccactgcctctaaaggtaaagagaagaagtcgaagtttaatccatacagatacacattcatcgataaagcaagcacattctcatcatcttcctcatcttcattttcatccaacggtcaagattcgtcctacgactacatagtcatcggaggtggaaccgcagggtgtcctctcgccgcaacgttgtcgcagaatttcagcgttcttgttttagagagaggtggcgttccgtttacaaacgcaaacgtttctttcctcaggaattttcacatcggacttgctgacatttcagcttcttccgcgtctcaagcgtttgtttccactgacggcgtttacaacgcccgtgctagagttctcggtggcggttcctgtattaacgccggtttttactccagagccgatgctgcgttcgtgaagcgagcaggatgggatccgaagctggtgaaggagtcgtatccatgggtggagagagagattgttcatcagccaaagttaacgttatggcagaaagctctcagagacagtcttttagaggttggagtcagacctttcaatggtttcacttacgatcacgtttccggaaccaaaatcggcggtacaatattcgacagattcggccgtcgtcacaccgcggcggagcttctcgcttacgctaatcctcagaagcttagagtcttgatctacgccaccgtgcaaaaaatcgtctttgacacttctggaacaaggcctcgagtaacaggagtaatattcaaagatgagaaaggtaatcaacaccaggctttactctcgaatagaaagggaagtgaagtgatcttatctagtggagctattgggtcaccacagatgctgatgttaagtgggattggacctaagaaggagcttcagaggctgaagattcctgtggttttagagaatgagcatgtagggaaaggaatggctgataatcccatgaacacgatcttggtgccttcaaaggcgcctatagagcagtcacttattcagactgttggaattacaaagatgggtgtgtatgttgaagccagtactggctttgggcaatctcctgagagtattcatactcactatgggattatgtcgaacaagaatgaattgttttccaccattcctgcaaagcagagaagaccagaagcaacgcaagcttacatcacaagaaacaaataccaacttcacgaagcattcaatggaagtttcatcttggagaaacttgcttacccgatctctagagggcatttgagcttggtcaacacaaatgttgatgacaacccttcagtcaccttcaattactttaaacacccggtggatctccaacgctgtgttgaagccattcgtcttgtttccaaagtggtgacgtctaaccgtttcttaaactacacgcagtgtgacaagcaaaacgtacacaagatgcttagcttaagcgtcaaggcaaacatcaatctaaggccaaagcaactgaacgataccaaatcaatggctcagttctgcaaagacactgttgtcacaatctggcactaccatggtggatgtcttgtgggtaaagttgtgagccctaaccgcaaagttcttggtgtcgacaggctcagagttattgatggttcaacgtttgacgagtctccaggaaccaacccgcaagctactatgatgatgatgggaagatacatgggagtcaagattcttcgggagagacttggaaacaaagctggtgtttagtttgcagattgagcttttatggtagacaaattcgtagcagataattctgttgtggaattgtgttggagaatatctctctctgtctccttctctgttatttgatattcgattcattgaagtataggatcatattgtctaatgaactgtgtaaccctctattgggcaatcggctctgttgcttattagcttgtgtgaaaagtt

SEQ ID NO: 76779 - protein, 594 aa, Arabidopsis thaliana
  peptide (1)..(594): Ceres Seq. ID no. 11403171
MALKLFLFALLLCLPTSLSSTASKGKEKKSKFNPYRYTFIDKASTFSSSSSSSFSSNGQDSSYDYIVIGGGTAGCPLAATLSQNFSVLVLERGGVPFTNANVSFLRNFHIGLADISASSASQAFVSTDGVYNARARVLGGGSCINAGFYSRADAAFVKRAGWDPKLVKESYPWVEREIVHQPKLTLWQKALRDSLLEVGVRPFNGFTYDHVSGTKIGGTIFDRFGRRHTAAELLAYANPQKLRVLIYATVQKIVFDTSGTRPRVTGVIFKDEKGNQHQALLSNRKGSEVILSSGAIGSPQMLMLSGIGPKKELQRLKIPVVLENEHVGKGMADNPMNTILVPSKAPIEQSLIQTVGITKMGVYVEASTGFGQSPESIHTHYGIMSNKNELFSTIPAKQRRPEATQAYITRNKYQLHEAFNGSFILEKLAYPISRGHLSLVNTNVDDNPSVTFNYFKHPVDLQRCVEAIRLVSKVVTSNRFLNYTQCDKQNVHKMLSLSVKANINLRPKQLNDTKSMAQFCKDTVVTIWHYHGGCLVGKVVSPNRKVLGVDRLRVIDGSTFDESPGTNPQATMMMMGRYMGVKILRERLGNKAGV

SEQ ID NO: 76780 - DNA, 1436 bp, Arabidopsis thaliana
  misc_feature (1)..(1436): Ceres Seq. ID no. 11403187
  misc_feature (1)..(1436): Ortholog of  Ceres SEQ ID NO 13596392 as cited in SEQ ID NO 62136
  misc_feature (1)..(1436): Ortholog of  Ceres SEQ ID NO 13654360 as cited in SEQ ID NO 67980
  misc_feature (1)..(1436): Ortholog of  Ceres SEQ ID NO 13596394 as cited in SEQ ID NO 68561
cggtggcggccgctctagaactagtggatcccccgggctgcaggaattccctttttaggtccaaagatcgagagagaagagaagatttgaaatttttttgttttataaagtttcgtcttaagcgatcgattttttgtgcgaaagattgaaactttttggtaagataattgtgttgtgtggttggatcgtggaggtgggtcttctttggaatggcgcaacaagggcagggaagcatggaccctgccgctctcgatgatatcattcgtcgtttgttggattacagaaaccctaagcctggtaccaaacaggctatgctcaacgagtctgagatccgtcagctttgcatcgtctctagagagatttttcttcaacagcctaaccttcttgagctcgaagctcctatcaagatctgcggtgatattcatggacaatactcagatctattgaggctgtttgagtatggaggcttcccacctacagctaactatttattcttaggagattacgtagacaggggcaagcagagtttggagactatttgtcttctgcttgcttacaaaatcaaataccctgagaacttttttcttctaagaggaaaccacgaatgtgcttctattaacagaatctatggattctatgatgaatgtaaacgtcgattcagtgtgagactctggaaagtgtttacagattcttttaactgtctccctgttgctgctgttatagacgataagatattatgtatgcacggtgccatttctcccgatttgaccaacgtggaacagattaagaacattaagcgacctactgatgttcctgactctggtttgctctgtgatctgctttggtctgatccaagcaaagatgtcaaaggttgggggatgaatgaccgtggagtctcttacacgtttggccctgacaaagtcgcggagtttctaataaagaatgatatggatctcatctgccgtgcccaccaggttgtagaggatggatatgagtttttcgccgatagacagcttgttacgatattttctgctcccaactactgtggtgaatttgacaatgctggtgctatgatgagtgttgatgaaagtttaatgtgctctttccaaattcttaagcctgctgatcgaaagccccggttcttatgaagtaaagagttgaaacctcgcgggaaagaagaggaaaaaggcgatacgaaagcgggagagacatttgaagctccctgagactttgtccggaggccttgcaaaggcaaaaaaacataatttacatgttatatcatcttatttgaactcttgccatttcttttctcaaaacactttatgttcttatgatcttctcctctgactctatatagacagtaaaaaaaagtctgcaaattttcattctttttcaacaaaaaaaaaaaggaattcgatatcaagcttatcgatacc

SEQ ID NO: 76781 - protein, 312 aa, Arabidopsis thaliana
  peptide (1)..(312): Ceres Seq. ID no. 11403188
MAQQGQGSMDPAALDDIIRRLLDYRNPKPGTKQAMLNESEIRQLCIVSREIFLQQPNLLELEAPIKICGDIHGQYSDLLRLFEYGGFPPTANYLFLGDYVDRGKQSLETICLLLAYKIKYPENFFLLRGNHECASINRIYGFYDECKRRFSVRLWKVFTDSFNCLPVAAVIDDKILCMHGAISPDLTNVEQIKNIKRPTDVPDSGLLCDLLWSDPSKDVKGWGMNDRGVSYTFGPDKVAEFLIKNDMDLICRAHQVVEDGYEFFADRQLVTIFSAPNYCGEFDNAGAMMSVDESLMCSFQILKPADRKPRFL

SEQ ID NO: 76782 - protein, 304 aa, Arabidopsis thaliana
  peptide (1)..(304): Ceres Seq. ID no. 11403189
MDPAALDDIIRRLLDYRNPKPGTKQAMLNESEIRQLCIVSREIFLQQPNLLELEAPIKICGDIHGQYSDLLRLFEYGGFPPTANYLFLGDYVDRGKQSLETICLLLAYKIKYPENFFLLRGNHECASINRIYGFYDECKRRFSVRLWKVFTDSFNCLPVAAVIDDKILCMHGAISPDLTNVEQIKNIKRPTDVPDSGLLCDLLWSDPSKDVKGWGMNDRGVSYTFGPDKVAEFLIKNDMDLICRAHQVVEDGYEFFADRQLVTIFSAPNYCGEFDNAGAMMSVDESLMCSFQILKPADRKPRFL

SEQ ID NO: 76783 - protein, 278 aa, Arabidopsis thaliana
  peptide (1)..(278): Ceres Seq. ID no. 11403190
MLNESEIRQLCIVSREIFLQQPNLLELEAPIKICGDIHGQYSDLLRLFEYGGFPPTANYLFLGDYVDRGKQSLETICLLLAYKIKYPENFFLLRGNHECASINRIYGFYDECKRRFSVRLWKVFTDSFNCLPVAAVIDDKILCMHGAISPDLTNVEQIKNIKRPTDVPDSGLLCDLLWSDPSKDVKGWGMNDRGVSYTFGPDKVAEFLIKNDMDLICRAHQVVEDGYEFFADRQLVTIFSAPNYCGEFDNAGAMMSVDESLMCSFQILKPADRKPRFL

SEQ ID NO: 76784 - DNA, 870 bp, Arabidopsis thaliana
  misc_feature (1)..(870): Ceres Seq. ID no. 11438591
  misc_feature (1)..(870): Ortholog of  Ceres SEQ ID NO 13595072 as cited in SEQ ID NO 55971
atggccgcctccacaatggctctctcctcccctgccttcgccggaaaggctgtgaacctttcccccgcggcatctgaagtcctcggaagcggccgtgtgacaatgaggaagactgttgccaagccaaagggtccatcaggcagcccatggtacggatccgaccgagtcaagtacttgggtccattctctggcgagtcaccgagctaccttaccggagagttccccggagactacggatgggacaccgctggactttcagctgatcccgagacattcgcaaggaaccgtgagctagaagttatccacagcaggtgggctatgctcggagccctaggctgcgtcttccctgagcttttggctaggaacggagtcaagttcggagaggcggtttggttcaaggccggttcacagatctttagcgatggaggactcgattacttgggaaaccctagcttggtccacgctcagagcattttggccatttgggccactcaagttatcttgatgggagctgttgaaggctacagagtcgcaggaaatgagccgttgggagaggccgaggacttgctttaccccggtggcagcttcgacccattgggtcttgctaccgacccagaggctttcgcggagttgaaggtgaaggagctcaagaacggaagattggctatgttctctatgtttggattcttcgttcaagccattgtcactggtaagggaccgatagagaaccttgctgaccatttggccgatccagtcaacaacaacgcatgggccttcgcaaccaactttgttcccggaaagtgagccaagttttatcagtttgtattttgcttttctttcagtcttttgaattcgagtgagagacatgag

SEQ ID NO: 76785 - protein, 267 aa, Arabidopsis thaliana
  peptide (1)..(267): Ceres Seq. ID no. 11438592
MAASTMALSSPAFAGKAVNLSPAASEVLGSGRVTMRKTVAKPKGPSGSPWYGSDRVKYLGPFSGESPSYLTGEFPGDYGWDTAGLSADPETFARNRELEVIHSRWAMLGALGCVFPELLARNGVKFGEAVWFKAGSQIFSDGGLDYLGNPSLVHAQSILAIWATQVILMGAVEGYRVAGNEPLGEAEDLLYPGGSFDPLGLATDPEAFAELKVKELKNGRLAMFSMFGFFVQAIVTGKGPIENLADHLADPVNNNAWAFATNFVPGK

SEQ ID NO: 76786 - protein, 262 aa, Arabidopsis thaliana
  peptide (1)..(262): Ceres Seq. ID no. 11438593
MALSSPAFAGKAVNLSPAASEVLGSGRVTMRKTVAKPKGPSGSPWYGSDRVKYLGPFSGESPSYLTGEFPGDYGWDTAGLSADPETFARNRELEVIHSRWAMLGALGCVFPELLARNGVKFGEAVWFKAGSQIFSDGGLDYLGNPSLVHAQSILAIWATQVILMGAVEGYRVAGNEPLGEAEDLLYPGGSFDPLGLATDPEAFAELKVKELKNGRLAMFSMFGFFVQAIVTGKGPIENLADHLADPVNNNAWAFATNFVPGK

SEQ ID NO: 76787 - protein, 233 aa, Arabidopsis thaliana
  peptide (1)..(233): Ceres Seq. ID no. 11438594
MRKTVAKPKGPSGSPWYGSDRVKYLGPFSGESPSYLTGEFPGDYGWDTAGLSADPETFARNRELEVIHSRWAMLGALGCVFPELLARNGVKFGEAVWFKAGSQIFSDGGLDYLGNPSLVHAQSILAIWATQVILMGAVEGYRVAGNEPLGEAEDLLYPGGSFDPLGLATDPEAFAELKVKELKNGRLAMFSMFGFFVQAIVTGKGPIENLADHLADPVNNNAWAFATNFVPGK

SEQ ID NO: 76788 - DNA, 942 bp, Arabidopsis thaliana
  misc_feature (1)..(942): Ceres Seq. ID no. 11438660
  misc_feature (1)..(942): Ortholog of  Ceres SEQ ID NO 12778345 as cited in SEQ ID NO 62792
  misc_feature (1)..(942): Ortholog of  Ceres SEQ ID NO 13662513 as cited in SEQ ID NO 63303
atggatttctccaaagaggaaactcctaagtctccagaagaaatggtcgctgcttatgaagaaacttgcgcccaaggacttggcatcagcgtggaagaggctaagcaaaggatgtatgcttgtagcacaactacttaccaaggatttcaagcaatcatgactgaacaagaatcagaaaagttcaaggatctacccggagtggttttcatcttgccagattcctacattgatccccagaacaaagagtatggaggagataaatacgagaatggagtgataacacacaggccaccaccgattcagagtggcagagcaagacctcgtcctagatttgaccgttcaggaggaggaagtggtggtccccaaaacttccaaagaaacacacagtatggtcagcaaccaccaatgcaaggtggtggagggagctatggtcctcaacagggctatgccactccaggacaaggtcagggaactcaagcgcctccaccatttcaaggaggttataaccaaggcccgagatctccaccacctccatatcaggcaggttacaatcaaggccagggatctccagtgcctccatatcaggcaggttacaatcaagtccagggatctccagtgcctccataccaaggaacacaaagcagttacggtcaaggtggatctgggaactatagtcaagggccacaaggtggttacaaccaaggaggacctaggaattacaatccacagggagctggaaactttggtcctgcatctggagctggaaacttaggtcctgcacctggagctggaaatcctggctatggtcaggggtattctggaccaggacaagagcagaatcagacattcccacaggcagatcagaggaatcgagactggaacaacaataatccagcaggccagcccgggtctgaccaatttccacagggaagaaggtactag

SEQ ID NO: 76789 - protein, 313 aa, Arabidopsis thaliana
  peptide (1)..(313): Ceres Seq. ID no. 11438661
MDFSKEETPKSPEEMVAAYEETCAQGLGISVEEAKQRMYACSTTTYQGFQAIMTEQESEKFKDLPGVVFILPDSYIDPQNKEYGGDKYENGVITHRPPPIQSGRARPRPRFDRSGGGSGGPQNFQRNTQYGQQPPMQGGGGSYGPQQGYATPGQGQGTQAPPPFQGGYNQGPRSPPPPYQAGYNQGQGSPVPPYQAGYNQVQGSPVPPYQGTQSSYGQGGSGNYSQGPQGGYNQGGPRNYNPQGAGNFGPASGAGNLGPAPGAGNPGYGQGYSGPGQEQNQTFPQADQRNRDWNNNNPAGQPGSDQFPQGRRY

SEQ ID NO: 76790 - protein, 299 aa, Arabidopsis thaliana
  peptide (1)..(299): Ceres Seq. ID no. 11438662
MVAAYEETCAQGLGISVEEAKQRMYACSTTTYQGFQAIMTEQESEKFKDLPGVVFILPDSYIDPQNKEYGGDKYENGVITHRPPPIQSGRARPRPRFDRSGGGSGGPQNFQRNTQYGQQPPMQGGGGSYGPQQGYATPGQGQGTQAPPPFQGGYNQGPRSPPPPYQAGYNQGQGSPVPPYQAGYNQVQGSPVPPYQGTQSSYGQGGSGNYSQGPQGGYNQGGPRNYNPQGAGNFGPASGAGNLGPAPGAGNPGYGQGYSGPGQEQNQTFPQADQRNRDWNNNNPAGQPGSDQFPQGRRY

SEQ ID NO: 76791 - protein, 276 aa, Arabidopsis thaliana
  peptide (1)..(276): Ceres Seq. ID no. 11438663
MYACSTTTYQGFQAIMTEQESEKFKDLPGVVFILPDSYIDPQNKEYGGDKYENGVITHRPPPIQSGRARPRPRFDRSGGGSGGPQNFQRNTQYGQQPPMQGGGGSYGPQQGYATPGQGQGTQAPPPFQGGYNQGPRSPPPPYQAGYNQGQGSPVPPYQAGYNQVQGSPVPPYQGTQSSYGQGGSGNYSQGPQGGYNQGGPRNYNPQGAGNFGPASGAGNLGPAPGAGNPGYGQGYSGPGQEQNQTFPQADQRNRDWNNNNPAGQPGSDQFPQGRRY

SEQ ID NO: 76792 - DNA, 974 bp, Arabidopsis thaliana
  misc_feature (1)..(974): Ceres Seq. ID no. 12322564
  misc_feature (1)..(974): Ortholog of  Ceres SEQ ID NO 13599328 as cited in SEQ ID NO 1002
  misc_feature (1)..(974): Ortholog of  Ceres SEQ ID NO 14302544 as cited in SEQ ID NO 56628
  misc_feature (1)..(974): Ortholog of  Ceres SEQ ID NO 14312239 as cited in SEQ ID NO 59176
  misc_feature (1)..(974): Ortholog of  Ceres SEQ ID NO 13584819 as cited in SEQ ID NO 64536
  misc_feature (1)..(974): Ortholog of  Ceres SEQ ID NO 13663748 as cited in SEQ ID NO 67516
  misc_feature (1)..(974): Ortholog of  Ceres SEQ ID NO 12635897 as cited in SEQ ID NO 0
ccactacgtctctctctcttgctctccctcttcaagtcggctcctttattgctacagtgaaaaagtttcgagctttagaaacaatggcggctttccccaacctcaactctggctccggattgaagaagctcgatgagcatcttctcactcgcagttacatcactgggtaccaagcttcaaaggatgatatcactgtgtttacagctctttcaaagcccccaacttcagagtttgtcaatgtatctcgttggttcaaccacatcgatgccctcttgaggatctctggtgtctctgctgaaggaagtggtgtcattgttgaagggtcatcacctatcacagaagaggctgttgctactccccctgcagctgattctaaggatactgctgctgaagaagaagatgatgatgatgttgaccttttcggggaggagaccgaagaggaaaagaaagctgctgaagagagagcagcttctgtgaaggcatctacaaagaagaaagaatccggaaagtcatcagttttgatggatatcaagccgtgggatgatgagacggacatgaagaagctagaggaagctgtaagatccattcagatggaaggattgttttggggagcatcaaagcttgtacccgttggttacggtatcaagaagttgcacatcatgtgcaccattgttgatgaccttgtatctatcgacaccatgatcgaagagcaactcactgttgaaccgatcaatgaatatgtccagagttgtgacattgttgccttcaacaagatatgaggatggagaatagcttgaaggaagaactgtttatgttgttgttttcttctctatatccagttttgttacctgtttttattgtactctgtgggagggcttttaccaactctgattcattttgatatatgtgaagacaattcagttttgtcttaaagtttccaccaaatctcaaatacgaaaaatcataagtttgat

SEQ ID NO: 76793 - protein, 258 aa, Arabidopsis thaliana
  peptide (1)..(258): Ceres Seq. ID no. 12322565
TTSLSLALPLQVGSFIATVKKFRALETMAAFPNLNSGSGLKKLDEHLLTRSYITGYQASKDDITVFTALSKPPTSEFVNVSRWFNHIDALLRISGVSAEGSGVIVEGSSPITEEAVATPPAADSKDTAAEEEDDDDVDLFGEETEEEKKAAEERAASVKASTKKKESGKSSVLMDIKPWDDETDMKKLEEAVRSIQMEGLFWGASKLVPVGYGIKKLHIMCTIVDDLVSIDTMIEEQLTVEPINEYVQSCDIVAFNKI

SEQ ID NO: 76794 - protein, 231 aa, Arabidopsis thaliana
  peptide (1)..(231): Ceres Seq. ID no. 12322566
MAAFPNLNSGSGLKKLDEHLLTRSYITGYQASKDDITVFTALSKPPTSEFVNVSRWFNHIDALLRISGVSAEGSGVIVEGSSPITEEAVATPPAADSKDTAAEEEDDDDVDLFGEETEEEKKAAEERAASVKASTKKKESGKSSVLMDIKPWDDETDMKKLEEAVRSIQMEGLFWGASKLVPVGYGIKKLHIMCTIVDDLVSIDTMIEEQLTVEPINEYVQSCDIVAFNKI

SEQ ID NO: 76795 - DNA, 1560 bp, Arabidopsis thaliana
  misc_feature (1)..(1560): Ceres Seq. ID no. 12325078
  misc_feature (1)..(1560): Ortholog of  Ceres SEQ ID NO 15172321 as cited in SEQ ID NO 55415
gtcaacacagatcagaatctgaggctttggccgagacgagagaagcagaagaagaaaatggcggagactgtacattctccgatcgttacttacgcatcgatgttatcgcttctcgccttctgtccacctttcgtcattctcctatggtacacaatggttcatcaggatggttctgttactcagacctttggcttcttttgggagaatggagttcaaggacttatcaacatatggccaagacccactttgattgcttggaaaattatattttgctatggagcatttgaagctattcttcagctgcttctgcctggtaaaagagttgagggtccaatatctccagccggaaaccgaccagtttacaaggccaatggtctggctgcttactttgtgacactagcaacctatcttggtctttggtggtttggaatcttcaaccctgcaattgtctatgatcacttgggtgaaatattttcggcactaatattcggaagcttcatattttgtgttttgttgtacataaaaggccatgttgcaccttcatcaagtgactctggttcatgtggtaacctaataattgacttctattggggcatggagttgtaccctcgaattggtaagagctttgacatcaaggtgtttactaattgcagattcggaatgatgtcttgggcagttcttgcagtcacgtactgcataaaacagtatgaaataaatggcaaagtatctgattcaatgctggtgaacaccatcctgatgctggtgtatgtcacaaaattcttctggtgggaagctggttattggaacaccatggacattgcacatgaccgagctggattctatatatgctggggttgtctagtgtgggtgccttctgtctacacttctccaggcatgtaccttgtgaaccaccccgtcgaactcggaactcagttggcaatatacattctcgttgcaggaattctgtgcatttacataaactatgactgtgatagacaaaggcaagagttcaggaggacaaacgggaaatgtttggtttggggaagggccccgtcaaagattgtggcgtcgtatactacaacatctggtgaaactaaaactagtcttctcttaacgtctggatggtggggattggctcgtcatttccattatgttcctgagatcttaagtgctttcttctggaccgtaccggctctcttcgataacttcttggcatacttctacgtcatatttctcacccttcttctctttgatcgagccaagagagacgatgaccgatgccgatcaaagtatgggaaatattggaagctgtattgtgagaaagtcaaatacaggatcattccgggaatttattgattgtaacgaagtctgttgttctcattttctacttattacgttaattcgaacgttggaatcatcaaaagaccgtgccaaaacaaaaatgcaaattgatgcgatagacattcttttgctgatttgtatgctataggttttcaaatctctagctacacttatgtatttccctagattatcaaagttagcctgccgttttctaatttt

SEQ ID NO: 76796 - protein, 451 aa, Arabidopsis thaliana
  peptide (1)..(451): Ceres Seq. ID no. 12325079
VNTDQNLRLWPRREKQKKKMAETVHSPIVTYASMLSLLAFCPPFVILLWYTMVHQDGSVTQTFGFFWENGVQGLINIWPRPTLIAWKIIFCYGAFEAILQLLLPGKRVEGPISPAGNRPVYKANGLAAYFVTLATYLGLWWFGIFNPAIVYDHLGEIFSALIFGSFIFCVLLYIKGHVAPSSSDSGSCGNLIIDFYWGMELYPRIGKSFDIKVFTNCRFGMMSWAVLAVTYCIKQYEINGKVSDSMLVNTILMLVYVTKFFWWEAGYWNTMDIAHDRAGFYICWGCLVWVPSVYTSPGMYLVNHPVELGTQLAIYILVAGILCIYINYDCDRQRQEFRRTNGKCLVWGRAPSKIVASYTTTSGETKTSLLLTSGWWGLARHFHYVPEILSAFFWTVPALFDNFLAYFYVIFLTLLLFDRAKRDDDRCRSKYGKYWKLYCEKVKYRIIPGIY

SEQ ID NO: 76797 - protein, 432 aa, Arabidopsis thaliana; identical to SEQ ID NO: 37667
  peptide (1)..(432): Ceres Seq. ID no. 12325080

SEQ ID NO: 76798 - protein, 418 aa, Arabidopsis thaliana; identical to SEQ ID NO: 37668
  peptide (1)..(418): Ceres Seq. ID no. 12325081

SEQ ID NO: 76799 - DNA, 1151 bp, Arabidopsis thaliana
  misc_feature (1)..(1151): Ceres Seq. ID no. 12325886
  misc_feature (1)..(1151): Ortholog of  Ceres SEQ ID NO 13595164 as cited in SEQ ID NO 56222
  misc_feature (1)..(1151): Ortholog of  Ceres SEQ ID NO 13595665 as cited in SEQ ID NO 59902
  misc_feature (1)..(1151): Ortholog of  Ceres SEQ ID NO 14302438 as cited in SEQ ID NO 62982
  misc_feature (1)..(1151): Ortholog of  Ceres SEQ ID NO 13591068 as cited in SEQ ID NO 69043
  misc_feature (1)..(1151): Ortholog of  Ceres SEQ ID NO 13623041 as cited in SEQ ID NO 0
tcttcactaataattcgtttaaacgcaaagaaaacagaccaacatggaagatcggtgcttgatcaagaacgatatcactgaattgattggtaacacaccaatggtgtatctgaacaatgttgttgatggttgcgtggctcgtatcgctgcgaagcttgagatgatggagccttgttctagcgtcaaagacagaatcgcgtatagtatgatcaaagatgcagaagacaaaggattgattactcccggaaagagtacattgatagagccaactgctggtaacaccgggattggtttagcttgcatgggagctgcaagaggctataaagtgatccttgtgatgccttcaactatgagcttagagagaagaatcattctgagggcactaggtgcagagcttcatctctcggaccagcgcataggccttaaaggaatgttggagaaaactgaagcgattttaagcaaaactcctggtggttacattccacaacaatttgaaaatcctgcaaaccccgagattcattaccgaaccacgggaccggaaatatggagagattcagccgggaaagtagatatattggtcgctggcgtagggactggtggaactgctactggagtagggaagttcctcaaggagcagaacaaagacatcaaggtttgtgtggtggaaccagtagaaagtccggtacttagcggaggtcaaccaggtccacatttgattcagggaattggctctggtatcgtcccattcaatttggacttaaccattgttgatgaaattattcaagtggcaggtgaagaggctattgaaacagccaagcttcttgccctcaaagaaggattactggtgggaatatcctctggagccgcagcagcggctgcgttaaaggttgcaaagcggccagaaaacgcggggaaactcattgtggtggtttttcctagtggaggagaacgttatttatcgactaaactgttcgattcgattagatatgaagcagagaatttgcctattgaatgaatgttggacgtgtgccggtttcgtgtgtaataagagacgttcgttccaagagtccaagatttcaatttgcttattactggtcaatgtgaaatgtataaaaagttgcatattcgattatgaataattttagttgact

SEQ ID NO: 76800 - protein, 323 aa, Arabidopsis thaliana; identical to SEQ ID NO: 75872
  peptide (1)..(323): Ceres Seq. ID no. 12325887

SEQ ID NO: 76801 - protein, 304 aa, Arabidopsis thaliana; identical to SEQ ID NO: 75873
  peptide (1)..(304): Ceres Seq. ID no. 12325888

SEQ ID NO: 76802 - protein, 284 aa, Arabidopsis thaliana; identical to SEQ ID NO: 75874
  peptide (1)..(284): Ceres Seq. ID no. 12325889

SEQ ID NO: 76803 - DNA, 1829 bp, Arabidopsis thaliana
  misc_feature (1)..(1829): Ceres Seq. ID no. 12325986
  misc_feature (1)..(1829): Ortholog of  Ceres SEQ ID NO 15171040 as cited in SEQ ID NO 55332
aatcatttgattatttcctcctctccgtatctgtgtctctcttctcttgatcttttagtgttcttgctttgtcgcttcaacgcttaagtttggatttgtgtgagtctgcataatcatggcgaggaagatgcttgttgatggtgagattgataaggtggcggctgatgaagccaacgcgacgcactatgattttgatttgtttgtcatcggtgccgggagtggcggtgttcgtgctgctaggttttcggctaatcatggcgctaaggttggtatttgtgagcttccatttcaccctattagctctgaggagattggaggcgttggtggaacctgtgttatccgtggttgtgttcctaaaaagattctcgtctatggagctacttacggtggtgaacttgaggatgctaaaaattatgggtgggaaataaatgagaaagtcgacttcacatggaagaagcttttgcaaaagaagactgatgagatactaagactgaataatatctacaagcggttattggcaaatgctgcggtgaaattgtatgaaggtgaaggaagagtagttggtcccaacgaagtggaggtgagacaaatagatggcacaaaaataagttataccgcaaagcacatattgattgccactggcagtcgggcgcaaaagcctaatattcctggacatgagctggctattacatctgatgaagctttgagcttggaagaatttcccaagcgtgctatagtgcttggaggagggtatattgctgtggagtttgcatcaatatggcgtggaatgggtgctactgtagatttattcttcaggaaggaacttccgctaaggggttttgatgacgaaatgagggcactagttgctagaaatcttgaaggaaggggcgttaatctgcatccacaaacaagtttgactcagttgacaaaaacagaccaggggatcaaagtcatatcgtcccatggggaggaattcgtggcagatgtcgtcctatttgctactggcagaagtcctaataccaaaagattgaatttagaagctgttggtgttgaacttgatcaggctggagctgtgaaggttgacgagtattcacgaactaatatacctagcatatgggctgtaggagatgccacaaaccgaattaaccttacacctgttgcgttaatggaggccacctgttttgcgaacactgcttttggtggaaagcctactaaagcagaatacagcaatgtcgcctgtgctgtattttgcataccaccactagctgtagtgggtctcagcgaagaagaagcagtagaacaagcaaccggtgatattctggtcttcacctcaggctttaatccaatgaagaacaccatttctggacgccaggaaaagacattgatgaagctaatagttgatgagaagagtgataaggttattggagcatccatgtgcggtcctgatgcagctgagatcatgcaggggattgcaattgcgctcaagtgtggagcaaccaaagcacaatttgatagcacggttgggatacatccatcttctgcagaggaatttgtgacaatgcgcagtgtgaccagacgcattgcccacaaacccaaacctaagacaaatctatgaaccgcaaaatataaagagctatatagcatgaaaactcggtacacttaatttgatcaaagagtcagacaacgatgagtttaatcatactcgtgtcccaataaaggatttgtaatttttgtttgtttgtatgatgcttctcttcttacttacttgagaaaacatcaaggtttcttctcttattgcttagtggaactttattacaaagaattattct

SEQ ID NO: 76804 - protein, 499 aa, Arabidopsis thaliana; identical to SEQ ID NO: 24219
  peptide (1)..(499): Ceres Seq. ID no. 12325987

SEQ ID NO: 76805 - protein, 495 aa, Arabidopsis thaliana; identical to SEQ ID NO: 24220
  peptide (1)..(495): Ceres Seq. ID no. 12325988

SEQ ID NO: 76806 - protein, 275 aa, Arabidopsis thaliana; identical to SEQ ID NO: 24221
  peptide (1)..(275): Ceres Seq. ID no. 12325989

SEQ ID NO: 76807 - DNA, 1158 bp, Arabidopsis thaliana
  misc_feature (1)..(1158): Ceres Seq. ID no. 12326070
  misc_feature (1)..(1158): Ortholog of  Ceres SEQ ID NO 14306479 as cited in SEQ ID NO 53033
attcagtcggaccaacttgtgaccgaagaaagcaaattgagactacgcaccaactagtcctttggtttgtatcttaagataaaggtttcttttatggacggttcttcgtttctcgacatctctctcgatctcaacaccaatcctttctccgcaaaacttccgaagaaggaggtctcagttttggcttctactcacttaaagaggaaatggttggagcaagacgagagcgcaagtgagttacgagaggagctaaacagagttaattcagagaacaagaagctaacagagatgttagctagagtctgtgagagctacaacgaactacataatcatttggagaagcttcagagtcgccagagccctgaaatcgagcagaccgatataccgataaagaaaagaaaacaagacccggatgagttcttaggctttcctattggactcagtagtggaaaaactgagaacagctccagcaacgaagatcatcatcatcatcatcagcaacatgagcagaaaaatcagcttctttcatgtaaaagaccagtcactgatagcttcaacaaagcaaaagtttcgactgtctacgtgcctactgaaacatcggacacaagcttgacagttaaagatggatttcaatggaggaaatacggacaaaaggttacaagagacaacccgtcacctagagcttactttagatgctcgtttgcaccgtcttgtccagtaaaaaagaaggtacaacgcagcgcagaggatccatctttacttgtagcgacatacgaagggacgcataaccacttgggtccaaatgcttctgaaggggatgctacaagccagggtgggtcaagcacagtgactttggatctggttaatggctgtcatagactagcgttggagaaaaacgaaagggataatacgatgcaagaggttctgattcaacaaatggcgtcatcgttaacaaaagattcgaaatttacagctgctcttgctgctgctatatctgggaggttaatggagcaatctagaacatgaacgtttttagtgaatgtattgtttttgtttgtttagaatgattcttcgttttcgaattgtgtctttcgattaggagataaaagatgtatataaatattataagtagatgaagaaatcgtataagtattcgag

SEQ ID NO: 76808 - protein, 310 aa, Arabidopsis thaliana
  peptide (1)..(310): Ceres Seq. ID no. 12326071
MDGSSFLDISLDLNTNPFSAKLPKKEVSVLASTHLKRKWLEQDESASELREELNRVNSENKKLTEMLARVCESYNELHNHLEKLQSRQSPEIEQTDIPIKKRKQDPDEFLGFPIGLSSGKTENSSSNEDHHHHHQQHEQKNQLLSCKRPVTDSFNKAKVSTVYVPTETSDTSLTVKDGFQWRKYGQKVTRDNPSPRAYFRCSFAPSCPVKKKVQRSAEDPSLLVATYEGTHNHLGPNASEGDATSQGGSSTVTLDLVNGCHRLALEKNERDNTMQEVLIQQMASSLTKDSKFTAALAAAISGRLMEQSRT

SEQ ID NO: 76809 - protein, 245 aa, Arabidopsis thaliana
  peptide (1)..(245): Ceres Seq. ID no. 12326072
MLARVCESYNELHNHLEKLQSRQSPEIEQTDIPIKKRKQDPDEFLGFPIGLSSGKTENSSSNEDHHHHHQQHEQKNQLLSCKRPVTDSFNKAKVSTVYVPTETSDTSLTVKDGFQWRKYGQKVTRDNPSPRAYFRCSFAPSCPVKKKVQRSAEDPSLLVATYEGTHNHLGPNASEGDATSQGGSSTVTLDLVNGCHRLALEKNERDNTMQEVLIQQMASSLTKDSKFTAALAAAISGRLMEQSRT

SEQ ID NO: 76810 - DNA, 1189 bp, Arabidopsis thaliana
  misc_feature (1)..(1189): Ceres Seq. ID no. 12326479
  misc_feature (1)..(1189): Ortholog of  Ceres SEQ ID NO 14314164 as cited in SEQ ID NO 54346
  misc_feature (1)..(1189): Ortholog of  Ceres SEQ ID NO 13595066 as cited in SEQ ID NO 55849
  misc_feature (1)..(1189): Ortholog of  Ceres SEQ ID NO 13597721 as cited in SEQ ID NO 65430
  misc_feature (1)..(1189): Ortholog of  Ceres SEQ ID NO 14309100 as cited in SEQ ID NO 0
ctctctcgtctctaagcagtagcagatctgagttttggagagttcaaaggaagaagataactccaataccagagtgaaagcattcaggaaacatgcctcctcagaagattgaaactggtcatagcgacactattcatgatgtggtcatggattactatggaaagcgagtagcaactgcctcgtctgactgcacgatcaagataaccggagtaagcaacagcggtggatctcagcatctagctaccttaaccggtcatcgaggtcctgtctggcaagtcgcttgggcgcacccaaagtttggttcacttctcgcttcatgttcctatgatgggcaaattatattatggaaagaaggtaaccaaaaccaatggacacaagctcatgtcttcacagaccacaaagtatctgtcaactctatcgcttgggctcctcatgaacttggactctccttagcttgcggagcatctgatggaaacatatcagttttctcggctcgagctgatggcggttgggacacgacaaagatagaccaagcacaccctgttggtgtcacttcagtgtcgtgggcaccggccacagaaccaggcgcactcgttagctctggtatgatcgatccggtctacaaactagcatccggcgggtgtgatagcacggtgaaagtgtggaagttctcgaacgggtcatggaaaatggattgtttcccggctctcaacaagcacacggattgggtccgtgatgtggcttgggcaccgaacttgggtctcccaaagtcaaccatagccagtggttcagaagatgggaaagtgatcatatggaccatagggaaagaaggtgagcaatgggaaggtactgttttgaaagatttcaaaacaccagtgtggcgggtctcgtggtcgttgaccggtaatttgttggctgtttccgatgggaacaataacgttacagtgtggaaagagtctgttgatggagagtgggaacaagtgactgttgttgagccatagattgttgtttgtttgtttggttatcttttgttttgtggtaatatcaaaatgtggtgtgttctgtatacaatttctagggacctgtttctctctatacgtttctcaggaaagtatattcttatgtattttaatcagacaacagagattgcaaaagaaatgtatttttcataaaactttttaattccgat

SEQ ID NO: 76811 - protein, 302 aa, Arabidopsis thaliana; identical to SEQ ID NO: 35570
  peptide (1)..(302): Ceres Seq. ID no. 12326480

SEQ ID NO: 76812 - protein, 284 aa, Arabidopsis thaliana; identical to SEQ ID NO: 35571
  peptide (1)..(284): Ceres Seq. ID no. 12326481

SEQ ID NO: 76813 - DNA, 1413 bp, Arabidopsis thaliana
  misc_feature (1)..(1413): Ceres Seq. ID no. 12330672
  misc_feature (1)..(1413): Ortholog of  Ceres SEQ ID NO 14306565 as cited in SEQ ID NO 53000
  misc_feature (1)..(1413): Ortholog of  Ceres SEQ ID NO 14312192 as cited in SEQ ID NO 59249
aacaaaggcagacagacaaaaggctaattcggagctctcctccacatcttcttccaaaacacaaacaaacccccaaatttccagaaaaatcagatcattctttcatcaatctcgtcttctttaatcttaggtgagaattcatcagctcaaaaacgcagcacccgatcgttttacgactcaaatcagagaagctgattcttttccaatcattccaatttccatttcttccttgggaggttttacaccaaattagccgtcgaaaggggtgcttctttgatctaatttcgatggcgggattagagaaaaacgctgatttctcagggaagacgacgaaatcggctacaacgacgtcgttcttcaacaggtcgcttacaattcacggaagaacagtggtggattcgggccccaaatcccacaatctcaatccttctctcaatcgtaccacctccattaccaaattctacacccccgtagaatcgatgggaacttctcttaaaggcaaagtcaaaaacctttgtagattattcgagacttccaaacccgttaaacctgccttagctgagattcctcagaagcagaaatccggtaaatcccttttacccgaatcgcggatatcgcctttttcgagcttaaacaactcggtcatccgtcttcccgggacagaggacaggattgtggtgtattttactagcttgagagggattagacggacgtatgaggattgctatgctgtcagaatgatatttagagggtttcgggtttggatcgatgagcgcgacgtctccatggatatcgcttataggaaagagttgcagattgcaatgggagagaagtctgtgtctttgcctcaagttttcattatgggcaagtatgttggtggtgctgatgtgatcaagagtttgtttgagattggtgagcttgctaagattcttaaagagtttccaatgagacaaccagggtttgtttgccattgctgtggggacattcgatttgttccgtgttccaattgtagtggcagcaagaaactgtttgatgaggatgaagatagggtcaagagatgtcctgaatgcaatgagaatggattgatacgttgtcctgattgctcttcttgagatatatcatcaatgaacctgaaaaaaccattaaaaaaaagaagaaaaaagaggtatttatttctcttttgatgtttccattgttgtgtagaacagtgaatgatgctgccacaagtatccgaaaatctcttttggatcagcagcatttcactttgggttttttaaggtttgcgatcaacggtaatgggaatgccggtgatcgtggatttagtttatgtatgtgtttgctactaagggctaaatgtaattgtgtaatcaaaatgtctgaaacgggtagtaagcattttgactcttgtgtgtc

SEQ ID NO: 76814 - protein, 274 aa, Arabidopsis thaliana; identical to SEQ ID NO: 40766
  peptide (1)..(274): Ceres Seq. ID no. 12330673

SEQ ID NO: 76815 - protein, 210 aa, Arabidopsis thaliana; identical to SEQ ID NO: 40767
  peptide (1)..(210): Ceres Seq. ID no. 12330674

SEQ ID NO: 76816 - DNA, 1538 bp, Arabidopsis thaliana
  misc_feature (1)..(1538): Ceres Seq. ID no. 12330954
  misc_feature (1)..(1538): Ortholog of  Ceres SEQ ID NO 14310259 as cited in SEQ ID NO 20662
gcattttccgagtactcaagagaaaggcgatggggtcatcacagtcttcgcaattactcgatgaagaagaagaagaagaagatgaagcagagagcgaaggtgaagaagtagaagaagaagaagatgaagcagagagcgaattgaataacagaagaatcgagctggataatctcttggtcaagaaagttctcgagcaagagcctgagatgcttccttgtcacgcctctgcttctccactctctcctcagctctcttctcttggaactcctcgaatcggaccttccattaaagtctgggatccttacaacgtcctcgcgccacctcctccttcttctccgcctcttttctctcgtatctcctccgccgcggaacacgatcgctccgccgtgacggaagtctatttcatcagccacggcgagtgtgatctcaatctcaggcctgatctgattggaggtagatgccacgtggctactctcacacccaacgggaaacgtcaggcgagagctctagccgtatttttaaactctgaaggtgttcgattcacctccgtcttctcttcgcctctggatcgagctagatccatggctgtttctgtttgccaggaaatgaattttcctgaggagcatttgcaagtctcggatgctgtggttgagatgagtttaggggactgggaaagctgtcatcggtcagagatttacacacctgaaactctaagtttaatagaaagatgccaacctgatttctcagctccatctggtgaatcactcagacaagtagagtttcggatggttcagtttctgaatgggacagtctcaggactttcggagaagctcaggtcagaacttcttccatctacacagcacacaaattccagagggttctcgttagctacttctattcatcgcccaattcttacaaggaagaaatctgggaagagccggtttcaggtgatgaatgcaactggtgatcacgagggtagtgaagagatatttagtaatcacaatgatgaacaacacctaggtgatataaacatcaagagttcttcttctcaactctcaacctgcattggagttttcactcactctttacctataaagtgtcttcttaccggtatccttggatgcagcccggtaatgacacataagatctgtgtggaggattcctctgtgaccgtattacagcattcgtggaaaaccgggtggcaggtaaagcggttaaatgacaccgctcatcttagactgttgtagcctcatcatcatcaaattcttttactctctgaaagctcgaaaacacagcgagctggtaaattattgcaagaccttcacaagtcatttgagtctgcagaagaagatcaacaagcttgcagattacatgctcccgccacgagcctcttgtacgtttgttttgagaaagaaaagctaaagatttgttaatgctgatgtttcactaccttgttctgtttgattctttctatttgcaagcttcctcttatgtaattcttatgcttgaaatcacaaaaaaaaaaaaagctcattgcc

SEQ ID NO: 76817 - protein, 414 aa, Arabidopsis thaliana; identical to SEQ ID NO: 43666
  peptide (1)..(414): Ceres Seq. ID no. 12330955

SEQ ID NO: 76818 - protein, 405 aa, Arabidopsis thaliana; identical to SEQ ID NO: 43667
  peptide (1)..(405): Ceres Seq. ID no. 12330956

SEQ ID NO: 76819 - protein, 346 aa, Arabidopsis thaliana; identical to SEQ ID NO: 43668
  peptide (1)..(346): Ceres Seq. ID no. 12330957

SEQ ID NO: 76820 - DNA, 1687 bp, Arabidopsis thaliana
  misc_feature (1)..(1687): Ceres Seq. ID no. 12331544
  misc_feature (1)..(1687): Ortholog of  Ceres SEQ ID NO 13595870 as cited in SEQ ID NO 62101
  misc_feature (1)..(1687): Ortholog of  Ceres SEQ ID NO 13590241 as cited in SEQ ID NO 63878
  misc_feature (1)..(1687): Ortholog of  Ceres SEQ ID NO 13657939 as cited in SEQ ID NO 66349
  misc_feature (1)..(1687): Ortholog of  Ceres SEQ ID NO 13660597 as cited in SEQ ID NO 67655
ataatccattccttcttctctcttctccatctccttcctccgatcttcgtctccaattcggaatcttcctatcacaatttcaaggctcctttaacccttgatcatcaccgattcaatcaattcggaatcacaatttcaaatcgagagaatttcaatttctcttgtaaaaccctaaattatgtacagcaatttcaaggaacaagcgatcgagtacgtgaagcaagcggttcatgaagacaatgctgggaattacaataaagctttccctctatacatgaacgcgcttgagtacttcaaaactcatctcaagtatgagaagaaccctaagatcagagaagctattacccagaaattcaccgagtatctccgtcgtgctgaggagatccgtgctgttctcgatgaaggtggatcgggtccaggatctaacggtgatgcagccgtcgcaacgaggcccaaaactaagcctaaagatggagaaggtggtggtaaagatggagaagatcctgaacaatcaaagcttcgagctgggttaaactctgcgattgttagagagaaacctaatatcaagtggtcagatgttgctgggcttgaaagtgctaaacaagctctgcaggaagctgtgattttgcctgtcaagtttccacagttcttcactggaaagagacggccttggagagcttttctgttgtatgggcctcctggaacaggaaaatcgtatttggctaaggctgttgccactgaagctgactctaccttttttagcgtgtcttcatcagaccttgtctcgaagtggatgggtgaaagtgagaagctagtatcaaaccttttcgagatggcccgtgaaagtgctccctcgattatttttgttgatgagatagattctttgtgtggtacacgtggagaaggaaacgagagtgaagcttcaagacgtatcaaaacagagcttctagtgcagatgcagggtgttggacacaatgatgagaaagtacttgtacttgcagcaaccaatacaccctatgctcttgatcaggctatccggcgacgttttgacaagcgtatctatattcctctcccagaggccaaggctcggcagcacatgttcaaagtccacttgggagatacacctcataatttaactgaacctgattttgaatatttaggccaaaagacagaagggttttctggttcagatgtgtctgtttgtgtaaaagatgttctgtttgaacctgttcgtaaaacacaagatgcaatgttctttttcaagtctcctgatggtacatggatgccatgtgggcctaggcaccctggtgccatccagactacaatgcaagatctagcaacaaaagggcttgccgaaaagattattccaccaccaatcaccagaacagatttcgagaaggtacttgcaagacaaaggccaacagtgagcaagtctgaccttgatgtccacgagagattcacacaggagtttggagaagaaggttgatagatttgacattcccatcaagcatctttcacaatcatattattattagtctcttcaccatctccttatgtatgtactgagaagcaaaacaaaatctcaaacccatgtttgatttcttcccaaaacattgaatttgctttatttctcgaattgtgtaaaaaaaaaatgttctgaacaatgttttctatttattatgtcacc

SEQ ID NO: 76821 - protein, 435 aa, Arabidopsis thaliana
  peptide (1)..(435): Ceres Seq. ID no. 12331545
MYSNFKEQAIEYVKQAVHEDNAGNYNKAFPLYMNALEYFKTHLKYEKNPKIREAITQKFTEYLRRAEEIRAVLDEGGSGPGSNGDAAVATRPKTKPKDGEGGGKDGEDPEQSKLRAGLNSAIVREKPNIKWSDVAGLESAKQALQEAVILPVKFPQFFTGKRRPWRAFLLYGPPGTGKSYLAKAVATEADSTFFSVSSSDLVSKWMGESEKLVSNLFEMARESAPSIIFVDEIDSLCGTRGEGNESEASRRIKTELLVQMQGVGHNDEKVLVLAATNTPYALDQAIRRRFDKRIYIPLPEAKARQHMFKVHLGDTPHNLTEPDFEYLGQKTEGFSGSDVSVCVKDVLFEPVRKTQDAMFFFKSPDGTWMPCGPRHPGAIQTTMQDLATKGLAEKIIPPPITRTDFEKVLARQRPTVSKSDLDVHERFTQEFGEEG

SEQ ID NO: 76822 - protein, 403 aa, Arabidopsis thaliana
  peptide (1)..(403): Ceres Seq. ID no. 12331546
MNALEYFKTHLKYEKNPKIREAITQKFTEYLRRAEEIRAVLDEGGSGPGSNGDAAVATRPKTKPKDGEGGGKDGEDPEQSKLRAGLNSAIVREKPNIKWSDVAGLESAKQALQEAVILPVKFPQFFTGKRRPWRAFLLYGPPGTGKSYLAKAVATEADSTFFSVSSSDLVSKWMGESEKLVSNLFEMARESAPSIIFVDEIDSLCGTRGEGNESEASRRIKTELLVQMQGVGHNDEKVLVLAATNTPYALDQAIRRRFDKRIYIPLPEAKARQHMFKVHLGDTPHNLTEPDFEYLGQKTEGFSGSDVSVCVKDVLFEPVRKTQDAMFFFKSPDGTWMPCGPRHPGAIQTTMQDLATKGLAEKIIPPPITRTDFEKVLARQRPTVSKSDLDVHERFTQEFGEEG

SEQ ID NO: 76823 - protein, 230 aa, Arabidopsis thaliana
  peptide (1)..(230): Ceres Seq. ID no. 12331547
MGESEKLVSNLFEMARESAPSIIFVDEIDSLCGTRGEGNESEASRRIKTELLVQMQGVGHNDEKVLVLAATNTPYALDQAIRRRFDKRIYIPLPEAKARQHMFKVHLGDTPHNLTEPDFEYLGQKTEGFSGSDVSVCVKDVLFEPVRKTQDAMFFFKSPDGTWMPCGPRHPGAIQTTMQDLATKGLAEKIIPPPITRTDFEKVLARQRPTVSKSDLDVHERFTQEFGEEG

SEQ ID NO: 76824 - DNA, 1006 bp, Arabidopsis thaliana
  misc_feature (1)..(1006): Ceres Seq. ID no. 12333661
  misc_feature (1)..(1006): Ortholog of  Ceres SEQ ID NO 12557432 as cited in SEQ ID NO 92
agagcaaaagcttctgtttattctccgattcgcagatcaattagctgggttttgattccgttgtgcgaaggactttaagaggttttgcagatcgaaatcggaagagaagaagaagatgtttctcactagaactgagtatgacagaggagtgaacactttttctccagaaggaaggctatttcaagtggaatatgccattgaagctatcaagcttggttctactgcaattggagtaaagacaaaagaaggagttgtgcttgctgtcgagaagcgtatcacgtcgccattgctggaaccgagcagtgtggagaagattatggaaattgatgaccatattggttgtgctatgagcggtttaattgctgacgcgcgcacacttgttgagcatgctagagttgaaactcaaaaccatagattctcgtatggtgagccgatgactgtagagtccacaacacaagcactgtgtgatctggctttacggtttggtgaaggagaggaagaatcaatgtctcggccgtttggagtatctcttctcattgctggccatgatgaaaatggaccaagcttgtactacactgatccttcaggaacattctggcagtgcaatgcaaaggcaattggttcaggttctgaaggagctgatagctctcttcaagagcaattcaacaaagatttgtctctacaagaagctgagactatcgctgtatctatcctaaagcaagttatggaagaaaaggtgactccaaataacgtggatattgccaaggtagcaccagcttatcatctctacactccacaagaagtcgaagcagtcatcgctcgtctttgattgaaaaaactcaatttgggtaatttacctatcagcttgtgtcacaaaacttgttacttttgtctgttagattgaggatcatgtcacattttagtcggttgtgtaagagaatcttttggctcccatgtcattcaataacctttcggatttgtgacttataaaatttcctttcctacc

SEQ ID NO: 76825 - protein, 237 aa, Arabidopsis thaliana; identical to SEQ ID NO: 34799
  peptide (1)..(237): Ceres Seq. ID no. 12333662

SEQ ID NO: 76826 - protein, 170 aa, Arabidopsis thaliana; identical to SEQ ID NO: 34800
  peptide (1)..(170): Ceres Seq. ID no. 12333663

SEQ ID NO: 76827 - protein, 160 aa, Arabidopsis thaliana; identical to SEQ ID NO: 34801
  peptide (1)..(160): Ceres Seq. ID no. 12333664

SEQ ID NO: 76828 - DNA, 1690 bp, Arabidopsis thaliana
  misc_feature (1)..(1690): Ceres Seq. ID no. 12333741
  misc_feature (1)..(1690): Ortholog of  Ceres SEQ ID NO 13597407 as cited in SEQ ID NO 64106
gtcctccgcttttccattttactcttcttgtatgtttctgtcttcttactcaacttttgcttcaggcttcgtctcttttgcaatttttgagttagccaagtgctcaagggagatacataatacctgaagatgtccaaggcaagtgatgccgtcagagaaccattggtggacaagaatatggctggatcaaaaccagaccagccgtggatggtttatctcagcacattcgttgcggtctgtggttcttttgcgttcggttcttgtgcgggatactcttcacctgctcaggctgcaattaggaatgacctttcattgactatagctgagttttcactctttggttctttactaacttttggcgcaatgatcggtgctataacaagcgggcctatagctgatttagttggaagaaagggggcgatgagagtttcctctgcattttgtgtagtcgggtggctagcaatcatctttgccaagggagtagtggctctggaccttggaagactggcaacgggatatggaatgggagcattttcctatgtggtgccaatctttatagcagaaattgcacctaaaactttcagaggggctctaaccacactgaaccagattctgatctgcactggagtgtcggtttccttcatcataggcacactagtgacgtggagagtcttggcattaataggaatcatcccatgcgctgcctccttccttggcctcttttttatccctgagtctccaagatggctggcaaaagtggggcgtgatacggagtttgaagctgcactgaggaagctccgtgggaagaaggctgatatttcggaggaggcagcagagatccaggattatatcgaaactctggaaaggctaccgaaagccaagatgctggatttgtttcagaggagatacatacgctctgttcttatagctttcgggttgatggtgtttcagcagtttggaggaatcaacggaatatgtttctacacaagctcgatatttgagcaagcaggttttcccacaagacttgggatgataatatatgctgttcttcaggtggtaatcactgcgcttaatgcaccgatagttgacagagccggaagaaaaccattgctactggtttctgcaacagggttagtgataggctgtttgatagcagcggtttctttctatctcaaggttcacgacatggcgcacgaagcagtcccagtcctggctgttgttggtataatggtgtacataggatcgttttcagcaggaatgggagcaatgccgtgggtggtcatgtctgagatatttcccataaacataaaaggagtagcaggaggcatggcgacgctggtgaactggtttggagcgtgggctgtttcttacactttcaacttcctcatgtcctggagctcttacggaactttcctcatttacgctgccatcaacgcgctggccattgtcttcgtcattgccatcgtgcctgagacaaaagggaagacattggagcagatccaagctatagtcaatccatagctcaaacacttcctagatgttcgtttctattagccagctgggacataaattgcaatcttggatctctttgcttttatgattctttactgagttcaattgttatcactctctctatttctaatctcttcttaatgaactttggacttcaatttgatgtttttccatagtt

SEQ ID NO: 76829 - protein, 463 aa, Arabidopsis thaliana; identical to SEQ ID NO: 40571
  peptide (1)..(463): Ceres Seq. ID no. 12333742

SEQ ID NO: 76830 - protein, 447 aa, Arabidopsis thaliana; identical to SEQ ID NO: 40572
  peptide (1)..(447): Ceres Seq. ID no. 12333743

SEQ ID NO: 76831 - protein, 437 aa, Arabidopsis thaliana; identical to SEQ ID NO: 40573
  peptide (1)..(437): Ceres Seq. ID no. 12333744

SEQ ID NO: 76832 - DNA, 1592 bp, Arabidopsis thaliana
  misc_feature (1)..(1592): Ceres Seq. ID no. 12335338
  misc_feature (1)..(1592): Ortholog of  Ceres SEQ ID NO 15171805 as cited in SEQ ID NO 57433
  misc_feature (1)..(1592): Ortholog of  Ceres SEQ ID NO 13596743 as cited in SEQ ID NO 62731
ggttcatttgctctgcaaatttgtctgaaaaaatctttgtgcgaagcaggaaaaatgtcgtcgacccatcagttagtttcttcgatgatctcttcttcctcatccactttcttagccccttcaaattttaatctcagaactcgaaatgcttgcttacccatggcaaaacgggtcaatacttgcaaatgtgttgctacgccgcaagagaagatcgagtataagaccaaagtgtcacggaattcaaacatgtccaaacttcaggctggatacctattcccggagattgcaagaagaaggtctgcacacttgttgaaatatccagatgcacaagttataagtcttggaataggcgacacaactgagccaattcctgaagtgatcacttctgctatggcaaagaaagctcatgagttgtcaacaatagagggatatagtggttatggtgctgaacaaggtgcaaagccactgagagctgctattgcgaaaacattctacggtggccttggcataggggatgatgacgtttttgtttctgatggagctaaatgtgatatctcacgtctccaggttatgtttggttccaatgttacaattgctgttcaggatccttcatatccggcttatgtggactccagtgttattatgggtcagactgggcaatttaacactgatgtgcaaaagtatggaaacatcgagtacatgagatgcactccagagaatggcttctttcccgacttgtccaccgttggcaggacagatataattttcttctgttccccaaataaccctacgggtgctgctgccacgagagagcaactaacgcagttagttgagtttgcaaagaagaacggttctataatagtgtatgattccgcctatgcaatgtacatgtctgatgataacccacgatccatcttcgaaatccctggagcagaggaggtcgctatggagacagcttcgttcagcaaatatgctggtttcactggagttcgacttggttggactgtcatcccgaaaaagctactctattcagacggtttccctgttgccaaagacttcaatcggattatctgcacttgtttcaatggtgcatctaatatctctcaagctggtgctcttgcttgccttacacccgaaggacttgaggcaatgcataaggtgattggattctataaagaaaacacaaacataatcattgacacattcacatctctcgggtatgatgtatatggaggaaagaatgcgccttacgtatgggttcacttcccgaaccaaagctcatgggatgtgtttgctgagattctggagaagactcatgtggttacaactccaggaagtgggtttggaccagggggtgaagggttcgttcgtgtcagtgcctttggtcacagagagaacatcttagaggcatgtcgaagattcaagcagctttacaaatgaagaaccttgtttgtaatcgttcctcatcatcatcaccctctttaatgacatgatttgagttaaaataatgtcgtttccattgttttctggaatttgtagaagacacttttgacaccagtgtttcaagcaatttggcaaagtattttaacaac

SEQ ID NO: 76833 - protein, 479 aa, Arabidopsis thaliana
  peptide (1)..(479): Ceres Seq. ID no. 12335339
GSFALQICLKKSLCEAGKMSSTHQLVSSMISSSSSTFLAPSNFNLRTRNACLPMAKRVNTCKCVATPQEKIEYKTKVSRNSNMSKLQAGYLFPEIARRRSAHLLKYPDAQVISLGIGDTTEPIPEVITSAMAKKAHELSTIEGYSGYGAEQGAKPLRAAIAKTFYGGLGIGDDDVFVSDGAKCDISRLQVMFGSNVTIAVQDPSYPAYVDSSVIMGQTGQFNTDVQKYGNIEYMRCTPENGFFPDLSTVGRTDIIFFCSPNNPTGAAATREQLTQLVEFAKKNGSIIVYDSAYAMYMSDDNPRSIFEIPGAEEVAMETASFSKYAGFTGVRLGWTVIPKKLLYSDGFPVAKDFNRIICTCFNGASNISQAGALACLTPEGLEAMHKVIGFYKENTNIIIDTFTSLGYDVYGGKNAPYVWVHFPNQSSWDVFAEILEKTHVVTTPGSGFGPGGEGFVRVSAFGHRENILEACRRFKQLYK

SEQ ID NO: 76834 - protein, 461 aa, Arabidopsis thaliana [sequence omitted]

SEQ ID NO: 76835 - protein, 451 aa, Arabidopsis thaliana
  peptide (1)..(451): Ceres Seq. ID no. 12335341
MISSSSSTFLAPSNFNLRTRNACLPMAKRVNTCKCVATPQEKIEYKTKVSRNSNMSKLQAGYLFPEIARRRSAHLLKYPDAQVISLGIGDTTEPIPEVITSAMAKKAHELSTIEGYSGYGAEQGAKPLRAAIAKTFYGGLGIGDDDVFVSDGAKCDISRLQVMFGSNVTIAVQDPSYPAYVDSSVIMGQTGQFNTDVQKYGNIEYMRCTPENGFFPDLSTVGRTDIIFFCSPNNPTGAAATREQLTQLVEFAKKNGSIIVYDSAYAMYMSDDNPRSIFEIPGAEEVAMETASFSKYAGFTGVRLGWTVIPKKLLYSDGFPVAKDFNRIICTCFNGASNISQAGALACLTPEGLEAMHKVIGFYKENTNIIIDTFTSLGYDVYGGKNAPYVWVHFPNQSSWDVFAEILEKTHVVTTPGSGFGPGGEGFVRVSAFGHRENILEACRRFKQLYK

SEQ ID NO: 76836 - DNA, 1303 bp, Arabidopsis thaliana
  misc_feature (1)..(1303): Ceres Seq. ID no. 12335593
  misc_feature (1)..(1303): Ortholog of  Ceres SEQ ID NO 14315788 as cited in SEQ ID NO 20749
aaagaacccaaagctcttggaggaggtgatcttctcttctcagatcatcttctactcttgagtatacccttcctttgaagataattcctagtttgggacttatccttacttctccgggatttcactttaatccaccgaagagttttgacatctgaattgtattgttttgggtgtgatcccgatagaattcgagggtaggaatcggaaagtagggtgatttggtttagaagaagaaagaaatggagggttttgtcgatcactacattgttctaggtttagcttctggagaggaagctctgaagcttaccgagaaggagattgcaaaagcatacaagttgaaagctttggacttgcatcctgataaacgccctgatgatcctgatgcccatgagaaatttcagaggcttaagacatcttacgaggttctcaaagacgagaaagcccggaagctgtttgatgatcttcttagaatccagcgtgagaaacaacataagaaatcgcaagtagattccaagaggcgtaagatgatgtcagatctggaggaaagggagcgttctgctttttctcctaatccttccgctagagcttatgatgaagaagagagaatcgctaggaagcttaaggaggagatagataggatacgtgcaagacatgcgaagaagaaaagtggtttccaaactccagagagtaatgtagatgaaaagagaaaagaagaaagaagtggtgctggagctagtgttcaactcgataaagagagaatgttgaaggtttcttgggaaaaaagtggtgaagggtatacagctggaaggctaagagaagtgttttctgagtttggtgaggttgaagatgttgttattaggagtaccaagaagaaatgttctgctcttattgtaatggctacaaaggatggagctgttgcagcgacgaggacattgtgtggcaatctttctaatccattgttggttgtacctcttcagaaagcagcccaaactgattttctgacggctaagaaatctgcagaagcagaaccgcagagtaacatagtaggtgccggtcttcaagcttatgaagatgccgtcatgcaaagactgctacaggcggctatggaccagaaaaagcgaggggtttaagccacatgatcaagaacaaagctccttcaagaccaaagtgataaagaataaagctctgcttcatgattaagaattaagctccttatacattgtttgtgtacatccaatctcatatcagttgttgttgtagaatttaaaattctaactcttctcgaaaaaaaaaatgcttcgta

SEQ ID NO: 76837 - protein, 296 aa, Arabidopsis thaliana
  peptide (1)..(296): Ceres Seq. ID no. 12335594
MEGFVDHYIVLGLASGEEALKLTEKEIAKAYKLKALDLHPDKRPDDPDAHEKFQRLKTSYEVLKDEKARKLFDDLLRIQREKQHKKSQVDSKRRKMMSDLEERERSAFSPNPSARAYDEEERIARKLKEEIDRIRARHAKKKSGFQTPESNVDEKRKEERSGAGASVQLDKERMLKVSWEKSGEGYTAGRLREVFSEFGEVEDVVIRSTKKKCSALIVMATKDGAVAATRTLCGNLSNPLLVVPLQKAAQTDFLTAKKSAEAEPQSNIVGAGLQAYEDAVMQRLLQAAMDQKKRGV

SEQ ID NO: 76838 - protein, 201 aa, Arabidopsis thaliana
  peptide (1)..(201): Ceres Seq. ID no. 12335595
MMSDLEERERSAFSPNPSARAYDEEERIARKLKEEIDRIRARHAKKKSGFQTPESNVDEKRKEERSGAGASVQLDKERMLKVSWEKSGEGYTAGRLREVFSEFGEVEDVVIRSTKKKCSALIVMATKDGAVAATRTLCGNLSNPLLVVPLQKAAQTDFLTAKKSAEAEPQSNIVGAGLQAYEDAVMQRLLQAAMDQKKRGV

SEQ ID NO: 76839 - protein, 200 aa, Arabidopsis thaliana
  peptide (1)..(200): Ceres Seq. ID no. 12335596
MSDLEERERSAFSPNPSARAYDEEERIARKLKEEIDRIRARHAKKKSGFQTPESNVDEKRKEERSGAGASVQLDKERMLKVSWEKSGEGYTAGRLREVFSEFGEVEDVVIRSTKKKCSALIVMATKDGAVAATRTLCGNLSNPLLVVPLQKAAQTDFLTAKKSAEAEPQSNIVGAGLQAYEDAVMQRLLQAAMDQKKRGV

SEQ ID NO: 76840 - DNA, 898 bp, Arabidopsis thaliana
  misc_feature (1)..(898): Ceres Seq. ID no. 12335660
  misc_feature (1)..(898): Ortholog of  Ceres SEQ ID NO 13598160 as cited in SEQ ID NO 61317
  misc_feature (1)..(898): Ortholog of  Ceres SEQ ID NO 13579986 as cited in SEQ ID NO 64562
  misc_feature (1)..(898): Ortholog of  Ceres SEQ ID NO 12614253 as cited in SEQ ID NO 68518
aaaaggagaaagcttgaaacgccgcttcttcttcttcttcttccactgtcgttctctctgtaaatcgcttcttcaatcatctctgtggatttgtctctattcataacttggtgaagaagatgttgacggaagaggagctcaaaagattgtacagaatccagaagacgttgatgcagatgttaagggatcgtggatattttatcgcggattctgaacttacgatgactaaacaacagtttattaggaaacatggtgataacatgaaaagagaggatcttgttactcttaaggctaagcgaaatgataatagtgatcagctctatatattcttccctgatgaggcgaaagttggtgtgaagacgatgaaaatgtacacgaacaggatgaaatcagagaatgtgttcagagctattttggttgtgcaacagaacttgaccccgtttgctcgaacttgcattagtgagatctcttctaagtttcatctggaagttttccagggaggcggaaatgctagtgaacattaaagaacatgttcttgttcctgagcatcaagttcttaccactgaagagaagaaaactttactggagagatacacagtgaaggagacacagcttccaaggatccaagtgactgatccaatcgcaagatactttggactaaaacgtgggcaagtcgtgaagatcattcgtccgagtgaaacggctggtcgttatgttacctatcgttatgttgtataagccaaagcaaaaggcttttgtggattgtaatgcgaattgaacgctgagagttgtgaaacataagagtaatgcttttgtactaaaccaaactgatgactgtgttttatttttgtttgtccgataggagaaattaaagcttgaaacaacttatttgtattac

SEQ ID NO: 76841 - protein, 134 aa, Arabidopsis thaliana
  peptide (1)..(134): Ceres Seq. ID no. 12335661
MLTEEELKRLYRIQKTLMQMLRDRGYFIADSELTMTKQQFIRKHGDNMKREDLVTLKAKRNDNSDQLYIFFPDEAKVGVKTMKMYTNRMKSENVFRAILVVQQNLTPFARTCISEISSKFHLEVFQGGGNASEH

SEQ ID NO: 76842 - protein, 117 aa, Arabidopsis thaliana
  peptide (1)..(117): Ceres Seq. ID no. 12335662
MQMLRDRGYFIADSELTMTKQQFIRKHGDNMKREDLVTLKAKRNDNSDQLYIFFPDEAKVGVKTMKMYTNRMKSENVFRAILVVQQNLTPFARTCISEISSKFHLEVFQGGGNASEH

SEQ ID NO: 76843 - protein, 115 aa, Arabidopsis thaliana
  peptide (1)..(115): Ceres Seq. ID no. 12335663
MLRDRGYFIADSELTMTKQQFIRKHGDNMKREDLVTLKAKRNDNSDQLYIFFPDEAKVGVKTMKMYTNRMKSENVFRAILVVQQNLTPFARTCISEISSKFHLEVFQGGGNASEH

SEQ ID NO: 76844 - DNA, 775 bp, Arabidopsis thaliana
  misc_feature (1)..(775): Ceres Seq. ID no. 12335918
  misc_feature (1)..(775): Ortholog of  Ceres SEQ ID NO 12610341 as cited in SEQ ID NO 56073
gaagcgaatcaacaacaacagtcgggttcgtgaaaaaaaaagatttgatcggctaaacttggtcgctttcaggtttatcgtggaaggacttgtcaatggcagacgtacctggatacctgcgcacttgtttggatatggggaagatagctttcttagcaatccttgtatctacagggattgtgttgcagattctggcttgtgctctgttcaataactggtggccaatgctaagtgttataatgtatgtgctcctcccaatgcctttgctcttctttggtggatcagacagtacatctctattcaacgagtcagataatagttggatcaatgcagccaagttcttgactggtgcatcagcagttggaagcgtcgcgataccatcgattctaaaacacgccggactcatcggttggggcgcattagcccttgatctctcatcctacgttgtcttcctcgtggctattttgggttacatttgcataggagatgccagtgacaactattacagctacatttaaaaagacacacacaaattcatcatcatttgtttaaacctcaacaaagtctcagccttttatcacttccccgttcgattgatgcttcgaaacgaaaacatcttgtttctatggaatgactcactgattggattttcacaagtttaagagtttgtgtgtcaagtgtatgtatgaatgattttttttttgggtggttttgttacgttttgatgtatagaacatatttattatttggtggaatatatataaattttctttac

SEQ ID NO: 76845 - protein, 140 aa, Arabidopsis thaliana; identical to SEQ ID NO: 27802
  peptide (1)..(140): Ceres Seq. ID no. 12335919

SEQ ID NO: 76846 - protein, 127 aa, Arabidopsis thaliana; identical to SEQ ID NO: 27803
  peptide (1)..(127): Ceres Seq. ID no. 12335920

SEQ ID NO: 76847 - protein, 97 aa, Arabidopsis thaliana; identical to SEQ ID NO: 27804
  peptide (1)..(97): Ceres Seq. ID no. 12335921

SEQ ID NO: 76848 - DNA, 1072 bp, Arabidopsis thaliana
  misc_feature (1)..(1072): Ceres Seq. ID no. 12338383
  misc_feature (1)..(1072): Ortholog of  Ceres SEQ ID NO 15173907 as cited in SEQ ID NO 62356
  misc_feature (1)..(1072): Ortholog of  Ceres SEQ ID NO 13596519 as cited in SEQ ID NO 62572
  misc_feature (1)..(1072): Ortholog of  Ceres SEQ ID NO 12625108 as cited in SEQ ID NO 68102
atcatcatcatcatctctttcttcttccaaaagtcataatcatgtcaaagtctctagctggattggcggttttggccgctctttttattgcggttgatgcgtttaggccttctggtttaactaatggtcacgctacattctatggaggaagtgacgcttctggaacaatgggtggagcttgtggttacggagatctttactcggcggggtacgggacaatgacggcggcgttaagcacggctctgttcaacgacggagcttcttgcggagaatgctataggataacgtgtgatcacgcggcggactcacggtggtgcttgaaaggagcttctgtggttattacagccactaacttttgcccaccaaactttgctttgcctaacaacaacggtggttggtgcaatccgccgcttaaacatttcgacatggcacaacccgcttgggaaaagatcggaatttacagaggaggaatcgttcccgtcgttttccaaagagtaagctgttacaagaaaggaggagttagattcagaataaacggaagagactacttcgagctagtgaatattcaaaatgtaggaggagcaggttctattaaatctgtatccatcaaaggatcaaagactggttggttagccatgtctcgtaactggggagctaattggcaatcgaatgcttatctagatggtcaagctctctctttctccattaccactactgatggtgctactagagtctttctcaatgttgttccttcttcttggtcttttggacagatttattcttccaacgttcagttttaagtttttttttttgttttgtatgaaatatcattggcagtggtcgcgctttgagtctgtttcttttctccctgagcgacccgccctctttgttttttttatcttatggtatgatgggtctgttaatacaaaagacccgatatgatttgagggtatatgattatatgaagtgtattgtatttgaatgtttcagactcgaaaaagattctgtagcaaaaggagttttaacacatttgtacttggttttgtttatatgaagtttgttttagtttttt

SEQ ID NO: 76849 - protein, 265 aa, Arabidopsis thaliana
  peptide (1)..(265): Ceres Seq. ID no. 12338384
HHHHLFLLPKVIIMSKSLAGLAVLAALFIAVDAFRPSGLTNGHATFYGGSDASGTMGGACGYGDLYSAGYGTMTAALSTALFNDGASCGECYRITCDHAADSRWCLKGASVVITATNFCPPNFALPNNNGGWCNPPLKHFDMAQPAWEKIGIYRGGIVPVVFQRVSCYKKGGVRFRINGRDYFELVNIQNVGGAGSIKSVSIKGSKTGWLAMSRNWGANWQSNAYLDGQALSFSITTTDGATRVFLNVVPSSWSFGQIYSSNVQF

SEQ ID NO: 76850 - protein, 252 aa, Arabidopsis thaliana
  peptide (1)..(252): Ceres Seq. ID no. 12338385
MSKSLAGLAVLAALFIAVDAFRPSGLTNGHATFYGGSDASGTMGGACGYGDLYSAGYGTMTAALSTALFNDGASCGECYRITCDHAADSRWCLKGASVVITATNFCPPNFALPNNNGGWCNPPLKHFDMAQPAWEKIGIYRGGIVPVVFQRVSCYKKGGVRFRINGRDYFELVNIQNVGGAGSIKSVSIKGSKTGWLAMSRNWGANWQSNAYLDGQALSFSITTTDGATRVFLNVVPSSWSFGQIYSSNVQF

SEQ ID NO: 76851 - protein, 210 aa, Arabidopsis thaliana; identical to SEQ ID NO: 28573
  peptide (1)..(210): Ceres Seq. ID no. 12338386

SEQ ID NO: 76852 - DNA, 2939 bp, Arabidopsis thaliana
  misc_feature (1)..(2939): Ceres Seq. ID no. 12339772
  misc_feature (1)..(2939): Ortholog of  Ceres SEQ ID NO 13622541 as cited in SEQ ID NO 0
attcactagtgattcagcgtcaggtcgaagaaaggagagaaatgagtggtcacgattcgaaatacttctccacgacgaagaagggagagatccctgagctcaaggaagagcttaattcccagtataaggataagagaaaagatgcagttaagaaggttattgcggcgatgactgttggaaaggatgtttcatcacttttcactgatgtagtcaattgtatgcaaacggaaaatttggagttgaagaagcttgtttacttgtatctcataaattatgcgaaaagccagccagatcttgctattcttgcagtaaatacctttgtaaaggattcacaggatccaaatccgctgattcgtgctttggctgtgcggacaatgggctgcattcgtgttgataaaatcacagaatatctatgtgatcctcttcaaaagtgcctaaaggatgatgacccatatgtcaggaagactgcggctatttgcgtcgctaagcttttcgacataaatgctgaattagttgaggacagaggtttccttgaagccttgaaggatttgatatcagataacaatccaatggttgttgccaatgctgtagcagcccttgcggagattcaagagaacagtagtagccccatctttgagatcaatagtaccactcttacaaagctccttactgctctaaatgaatgcactgagtggggtcaagtttttatactagatgctttatcgaagtataaagcagctgatccccgtgaggctgaaaatattgttgagagagtaacaccaaggttgcaacatgccaactgcgctgttgttctttcagctgttaagatgatccttcaacaaatggaacttattactagtacagacgtgattagaaatctttgtaagaagatggctccaccccttgttacattgctttctgccgaacctgagatacaatatgttgcacttcgtaacattaatcttattgtgcaaaaacgacccactatccttgcccatgaaattaaggttttcttctgcaagtataacgacccaatttatgttaagatggagaagttggagattatgattaaacttgcctctgacagaaacatagaccaggttcttctggaattcaaagagtatgccacagaagtagacgttgattttgttagaaaggctgttcgtgcgataggccgatgtgctatcaaactagagagagcagctgaacggtgcatcagtgttttgctcgagttgatcaagattaaagtgaattatgttgtccaggaggccattattgtcatcaaagatatcttcagaagatatccaaacacgtatgagtccataattgcaacactctgtgagagtttagacactttggatgaaccagaagctaaggcatctatgatatggatcattggtgaatatgctgaaagaattgacaatgccgatgagcttcttgaaagctttctggagaattttcctgaggaaccagcacaggtccagttgcagctcctaactgctactgttaagctattcctgaagaagccaactgaaggccctcaacaaatgattcaggttgtcttgaataatgctactgtggagacggataatcctgatctcagagatcgtgcatacatatactggcgtcttctatccactgatcctgaggctgccaaggatgttgtcttagctgaaaagcccgtgatttctgacgactcaaaccagctagacccatcacttcttgatgagcttcttacaaatatttcgaccttgtcctctgtgtaccacaaacccccagaggcttttgttacccgcttgaaaacgacagttcagaaaacagaagacgaggactttgcggaaggaagcgaacgaggatactcatctagtaatccggttgatagtgcagcttctcctccaggtaatatcccacagccttccggaagacaaccagcaccagcggtcccagctcctgtacctgatctgctaggtgacctgatgggattggataatgccgctattgtcccggttgatgatcccataactcaatctggtcctcctctgcccgttgtcgtcccagcttcaagtggtcaaggtctgcagataagcgctcaattatcccgaaaagatggacaagtattttacagtatgctcttcgagaacaactcgcagtcggttcttgatggtttcatgattcagttcaacaaaaacacattcggccttgcagctgctggatctcttcagattccgcctttgcatcccgcaacatccgccaggacaatgctacctatggtcttgttccaaaacatgtctgctgggcctccaagctcgctcttacaagtcgctgtcaaaaacaaccagcagcccgtgtggtacttcaccgataagattatacttcatgctcttttcggtgaagacggtagaatggaacgtggaaccttccttgagacatggaggtcgttaccggactcaaatgaagtcctgaaagaattccccgggatcaccatcacgagcgtcgaatcaactatcgaattgctcacagcattcaacatgttctttatagcaaagcgcaagaacgggaaccaagacgtgatctacttatcagccaaagatccacgagatgtaccgtttttgatcgagctcactgcaatggtgggccaaccaggtctcaaatgcgcagtgaaaactcccactcccgagattgcgcctctcttcttcgaagctttggagcttctcttcaaggcttgatgattaacgttgttatcaaaaggctaataagaccaagacctgaaaggtttcagagattctttcttgtttcgttatatcccaccttttttcttcttctgagtttagtgtatgtaataaatcccatgtttgtgttacttccggttgcacccttttagtttggtatttgtaatgctcactattttcttataattcttgtatcggaaccacattttt

SEQ ID NO: 76853 - protein, 907 aa, Arabidopsis thaliana
  peptide (1)..(907): Ceres Seq. ID no. 12339773
SLVIQRQVEERREMSGHDSKYFSTTKKGEIPELKEELNSQYKDKRKDAVKKVIAAMTVGKDVSSLFTDVVNCMQTENLELKKLVYLYLINYAKSQPDLAILAVNTFVKDSQDPNPLIRALAVRTMGCIRVDKITEYLCDPLQKCLKDDDPYVRKTAAICVAKLFDINAELVEDRGFLEALKDLISDNNPMVVANAVAALAEIQENSSSPIFEINSTTLTKLLTALNECTEWGQVFILDALSKYKAADPREAENIVERVTPRLQHANCAVVLSAVKMILQQMELITSTDVIRNLCKKMAPPLVTLLSAEPEIQYVALRNINLIVQKRPTILAHEIKVFFCKYNDPIYVKMEKLEIMIKLASDRNIDQVLLEFKEYATEVDVDFVRKAVRAIGRCAIKLERAAERCISVLLELIKIKVNYVVQEAIIVIKDIFRRYPNTYESIIATLCESLDTLDEPEAKASMIWIIGEYAERIDNADELLESFLENFPEEPAQVQLQLLTATVKLFLKKPTEGPQQMIQVVLNNATVETDNPDLRDRAYIYWRLLSTDPEAAKDVVLAEKPVISDDSNQLDPSLLDELLTNISTLSSVYHKPPEAFVTRLKTTVQKTEDEDFAEGSERGYSSSNPVDSAASPPGNIPQPSGRQPAPAVPAPVPDLLGDLMGLDNAAIVPVDDPITQSGPPLPVVVPASSGQGLQISAQLSRKDGQVFYSMLFENNSQSVLDGFMIQFNKNTFGLAAAGSLQIPPLHPATSARTMLPMVLFQNMSAGPPSSLLQVAVKNNQQPVWYFTDKIILHALFGEDGRMERGTFLETWRSLPDSNEVLKEFPGITITSVESTIELLTAFNMFFIAKRKNGNQDVIYLSAKDPRDVPFLIELTAMVGQPGLKCAVKTPTPEIAPLFFEALELLFKA

SEQ ID NO: 76854 - protein, 894 aa, Arabidopsis thaliana
  peptide (1)..(894): Ceres Seq. ID no. 12339774
MSGHDSKYFSTTKKGEIPELKEELNSQYKDKRKDAVKKVIAAMTVGKDVSSLFTDVVNCMQTENLELKKLVYLYLINYAKSQPDLAILAVNTFVKDSQDPNPLIRALAVRTMGCIRVDKITEYLCDPLQKCLKDDDPYVRKTAAICVAKLFDINAELVEDRGFLEALKDLISDNNPMVVANAVAALAEIQENSSSPIFEINSTTLTKLLTALNECTEWGQVFILDALSKYKAADPREAENIVERVTPRLQHANCAVVLSAVKMILQQMELITSTDVIRNLCKKMAPPLVTLLSAEPEIQYVALRNINLIVQKRPTILAHEIKVFFCKYNDPIYVKMEKLEIMIKLASDRNIDQVLLEFKEYATEVDVDFVRKAVRAIGRCAIKLERAAERCISVLLELIKIKVNYVVQEAIIVIKDIFRRYPNTYESIIATLCESLDTLDEPEAKASMIWIIGEYAERIDNADELLESFLENFPEEPAQVQLQLLTATVKLFLKKPTEGPQQMIQVVLNNATVETDNPDLRDRAYIYWRLLSTDPEAAKDVVLAEKPVISDDSNQLDPSLLDELLTNISTLSSVYHKPPEAFVTRLKTTVQKTEDEDFAEGSERGYSSSNPVDSAASPPGNIPQPSGRQPAPAVPAPVPDLLGDLMGLDNAAIVPVDDPITQSGPPLPVVVPASSGQGLQISAQLSRKDGQVFYSMLFENNSQSVLDGFMIQFNKNTFGLAAAGSLQIPPLHPATSARTMLPMVLFQNMSAGPPSSLLQVAVKNNQQPVWYFTDKIILHALFGEDGRMERGTFLETWRSLPDSNEVLKEFPGITITSVESTIELLTAFNMFFIAKRKNGNQDVIYLSAKDPRDVPFLIELTAMVGQPGLKCAVKTPTPEIAPLFFEALELLFKA

SEQ ID NO: 76855 - protein, 852 aa, Arabidopsis thaliana
  peptide (1)..(852): Ceres Seq. ID no. 12339775
MTVGKDVSSLFTDVVNCMQTENLELKKLVYLYLINYAKSQPDLAILAVNTFVKDSQDPNPLIRALAVRTMGCIRVDKITEYLCDPLQKCLKDDDPYVRKTAAICVAKLFDINAELVEDRGFLEALKDLISDNNPMVVANAVAALAEIQENSSSPIFEINSTTLTKLLTALNECTEWGQVFILDALSKYKAADPREAENIVERVTPRLQHANCAVVLSAVKMILQQMELITSTDVIRNLCKKMAPPLVTLLSAEPEIQYVALRNINLIVQKRPTILAHEIKVFFCKYNDPIYVKMEKLEIMIKLASDRNIDQVLLEFKEYATEVDVDFVRKAVRAIGRCAIKLERAAERCISVLLELIKIKVNYVVQEAIIVIKDIFRRYPNTYESIIATLCESLDTLDEPEAKASMIWIIGEYAERIDNADELLESFLENFPEEPAQVQLQLLTATVKLFLKKPTEGPQQMIQVVLNNATVETDNPDLRDRAYIYWRLLSTDPEAAKDVVLAEKPVISDDSNQLDPSLLDELLTNISTLSSVYHKPPEAFVTRLKTTVQKTEDEDFAEGSERGYSSSNPVDSAASPPGNIPQPSGRQPAPAVPAPVPDLLGDLMGLDNAAIVPVDDPITQSGPPLPVVVPASSGQGLQISAQLSRKDGQVFYSMLFENNSQSVLDGFMIQFNKNTFGLAAAGSLQIPPLHPATSARTMLPMVLFQNMSAGPPSSLLQVAVKNNQQPVWYFTDKIILHALFGEDGRMERGTFLETWRSLPDSNEVLKEFPGITITSVESTIELLTAFNMFFIAKRKNGNQDVIYLSAKDPRDVPFLIELTAMVGQPGLKCAVKTPTPEIAPLFFEALELLFKA

SEQ ID NO: 76856 - DNA, 942 bp, Arabidopsis thaliana
  misc_feature (1)..(942): Ceres Seq. ID no. 12340199
  misc_feature (1)..(942): Ortholog of  Ceres SEQ ID NO 14314174 as cited in SEQ ID NO 54350
  misc_feature (1)..(942): Ortholog of  Ceres SEQ ID NO 15224566 as cited in SEQ ID NO 55626
  misc_feature (1)..(942): Ortholog of  Ceres SEQ ID NO 13502979 as cited in SEQ ID NO 69150
gtctacgtatacaattgatcttcccccatctccaattcagatttggacagagtaacctgtgatcgtgtcggttggggtagaagagatcgaagtgggagcaaaatcatgatgaatcggctattcgggaaacccaagcaggaggctaatgctctccaaactttagacaagcttaacgagacgcttgagatgctagagaaaaaggagaaagtactcttgaagaaagctggtgcagaggttgagaaggcaaaagaatactcccgggctaagaacaaacgagcggctatacagtgtttgaaaaggaagaggttatatgagggacaagtcgaacagcttgggaatttccagctccgtattcatgatcaaatgattatgttagaaggtgcaaaagcaacaaccgaaactgttgatgcattgaggagtggagcttctgcaatgaaggcaatgcagaaagcaacaaatattgatgatgtggataagaccatggacgagatcaatgagcaaaccgagaacatgaaacagatccaagaagcattggcgactccaatgggggcagcggctgacttcgacgaggatgagcttgcagcagagcttgatgaactagaaagtgaagagcttgaatcgcaacttctacagccggcaacaacagctcctccattgccttcagttccagtgcctgcagggcgtcaaccggctcgtcctgttccccagaagcggactgctgaggaagaagaactcgctgcattacaggctgagatggccctctaaggttattcacctctccgagcagagacatgtatgcattgatagacacgaacagacgatgtatataaggatctgaatcagattaattcggagcgaaaaacttttataatccccgtcgttaatgttatctgcaatttgagtgttcttcacataatttatcttttgtaatttttgtatctt

SEQ ID NO: 76857 - protein, 219 aa, Arabidopsis thaliana; identical to SEQ ID NO: 26925
  peptide (1)..(219): Ceres Seq. ID no. 12340200

SEQ ID NO: 76858 - protein, 218 aa, Arabidopsis thaliana; identical to SEQ ID NO: 26926
  peptide (1)..(218): Ceres Seq. ID no. 12340201

SEQ ID NO: 76859 - protein, 192 aa, Arabidopsis thaliana; identical to SEQ ID NO: 72232
  peptide (1)..(192): Ceres Seq. ID no. 12340202

SEQ ID NO: 76860 - DNA, 705 bp, Arabidopsis thaliana
  misc_feature (1)..(705): Ceres Seq. ID no. 12345022
  misc_feature (1)..(705): Ortholog of  Ceres SEQ ID NO 13581889 as cited in SEQ ID NO 50900
aaccactacttcaatcatcccctattactgcttttgttacgaaagacaaaaaaacaaaacaaaacaaaagtcagctcaggcgaagaacagatggctcgtaccaagcaaaccgctcgtaagtccaccggaggtaaagctccaaggaagcaacttgctactaaggctgctcgtaaatctgcaccaactactggtggagtcaagaaaccacatcgttaccgtcctggaactgttgctctccgtgaaatccgtaagtaccagaagagtactgagttgcttatcaggaaactgccatttcagaggctagtccgtgagattgctcaagatttcaagactgatttgcgtttccagagccatgctgtcttagctctccaggaagctgcagaagcatatcttgttggtctctttgaagacactaacctttgtgccattcatgccaagcgtgtgaccataatgcccaaagacattcagctcgctcgtcgtatcagaggtgaacgcgcttaagccaaccaagaatccgagatttggttcaagtagtttttgttttttatgaaagcaagatcttaattgctgtgttttttaaatctctgggtatgtagtagtaagagtagtaagaagtctgcaatctaagaatgttgtgttctttaagcttattattatgtgtgttgcgaactctttttaactcttttgttaaattcttatgttttc

SEQ ID NO: 76861 - protein, 166 aa, Arabidopsis thaliana; identical to SEQ ID NO: 74816
  peptide (1)..(166): Ceres Seq. ID no. 12345023

SEQ ID NO: 76862 - protein, 136 aa, Arabidopsis thaliana; identical to SEQ ID NO: 26403
  peptide (1)..(136): Ceres Seq. ID no. 12345024

SEQ ID NO: 76863 - protein, 100 aa, Arabidopsis thaliana
  peptide (1)..(100): Ceres Seq. ID no. 12345025
TTTSIIPYYCFCYERQKNKTKQKSAQAKNRWLVPSKPLVSPPEVKLQGSNLLLRLLVNLHQLLVESRNHIVTVLELLLSVKSVSTRRVLSCLSGNCHFRG

SEQ ID NO: 76864 - DNA, 1291 bp, Arabidopsis thaliana
  misc_feature (1)..(1291): Ceres Seq. ID no. 12348335
  misc_feature (1)..(1291): Ortholog of  Ceres SEQ ID NO 15177854 as cited in SEQ ID NO 51851
  misc_feature (1)..(1291): Ortholog of  Ceres SEQ ID NO 15177087 as cited in SEQ ID NO 51932
  misc_feature (1)..(1291): Ortholog of  Ceres SEQ ID NO 13662937 as cited in SEQ ID NO 64415
  misc_feature (1)..(1291): Ortholog of  Ceres SEQ ID NO 13595984 as cited in SEQ ID NO 68340
  misc_feature (1)..(1291): Ortholog of  Ceres SEQ ID NO 12635014 as cited in SEQ ID NO 0
acaattcagggaaaatcttcaaagtgtttgcagagaaatctaaattcatcaacagttttttacaaaagaaatggaaaacggagaagcaaaacagagtgtacctcttctcactccctataagatgggaagattcaatctttcccatagggttgttctagcaccattgacgagacagagatcgtacggaaacgttcctcagcctcacgctgccatatattactctcagagaacgactccaggaggttttctcatcactgaagccactggagtttcagatacagctcaaggatatcaagatactcctgggatatggactaaagagcatgtggaggcatggaagccaatcgttgatgctgtacatgccaaaggtggtatcttcttctgtcagatctggcatgttggccgcgtttctaatagcgggtttcagccaaatggaaaagctcctatctcttgttcggataagccattgatgcctcaaattcgctctaatggcatcgatgaagctctctttacccctccaagacggcttggtatcgaagaaatccccggcattgtcaatgattttaggcttgctgcaagaaatgctatggaagctggttttgatggagttgagattcatggagctaatggctatctgattgaccagttcatgaaggatacggtgaatgatagaactgatgaatacggtggatcattgcaaaaccgttgcaaatttcctctagaaatagtcgatgcagttgctaaggagatcggaccagaccgtgttggaatcaggctctctccatttgctgactacatggaatctggagacactaatccaggagcattagggctttatatggcggaatctttgaacaaatacggaatcctctactgtcatgtgattgaagcgagaatgaaaacaatgggagaagtacatgcttgtcctcacacactaatgccgatgaggaaagcgtttaaggggacttttatctccgcaggaggtttcacgagggaagatgggaatgaggctgtgtcaaagggaagaactgatttggtggcttatggtcgatggtttctagccaacccggacctgccaaagaggttccaagtggatgcaccgctgaataagtacgatagaccaacgttttacacttctgatccagtcgtcggttacaccgattaccctttcctcgaatcaacagcttaaaattgttatcaataatgtaatgtagtgtgtttcccttatataagatgtaataagtttctggcttttcatttatactttttaagtttaagtcataaaaccttc

SEQ ID NO: 76865 - protein, 372 aa, Arabidopsis thaliana; identical to SEQ ID NO: 24532
  peptide (1)..(372): Ceres Seq. ID no. 12348336

SEQ ID NO: 76866 - protein, 355 aa, Arabidopsis thaliana; identical to SEQ ID NO: 24533
  peptide (1)..(355): Ceres Seq. ID no. 12348337

SEQ ID NO: 76867 - protein, 239 aa, Arabidopsis thaliana; identical to SEQ ID NO: 24534
  peptide (1)..(239): Ceres Seq. ID no. 12348338

SEQ ID NO: 76868 - DNA, 1155 bp, Arabidopsis thaliana
  misc_feature (1)..(1155): Ceres Seq. ID no. 12350377
  misc_feature (1)..(1155): Ortholog of  Ceres SEQ ID NO 12608889 as cited in SEQ ID NO 50891
agttcttcagtggggcggcttgtggcttctttttcatttttccagaaaaccccataaacctctcgctctcgggaatttgattgattcccacgaggaaaaatcaatcttcccggaaaatggcagctaggttattgttccgtcgaagttctcaaatcctccgatcaattcaacgaaatcctcaaatctcatcgtcattcgaatcaccaccttgcccgatttttcactcattgaccaccgcctcaccagatccatcgcgattatcatccttaaccttcctccgatctctctccatcgctcgtcgcggtccaacacgtcctaagaaaatcgatatcggagccaaagcgcgtcagatgcagaatcgccgtttatggacctacgcgctaaccttcagctgcatcgccggattcgtagttatcgtccttaaccaatttcaggatcagcttgtcttctacctaacgccatcagacgctatggagaaattcgcagagaatccaacaaagaacaaattcagactcggtggtttggttctagaaggtagcgttgcgcagccggcggcgtcacaggagatggagtttgtgatcactgatctgatcactgatattttggttaggtataaaggatctttgccggatctgtttagggaaggtcattcagttgtggttgaaggattcattaagccgtatacagatgaagtaaggaaggaagtttctacaaaacctatttcgaagaaagctaggaacctcgattgtttcttctcggcgactgaagttttggctaagcatgatgagaagtatatgccacaggaagttgcggcggcgattgagaagaataagaaaattattgaagcggcggcgactgaacaagctgctgaagttgcggcttcttagattggtataaacttcattctttttaagttaatcaaaattttccccaagttcgagcttttggtgagtattgttcatcttataaggttatatttgattatagtttctggaaaagagtaggaagattggaatgttatattcctggaaaacagagatttgatttttgagtctatttgagaattaagtggagaaatgtgatacactatacaatagctttgtttgattccacaaagctataagctaatctactttcttgttgtgttgatcaaat

SEQ ID NO: 76869 - protein, 256 aa, Arabidopsis thaliana
  peptide (1)..(256): Ceres Seq. ID no. 12350378
MAARLLFRRSSQILRSIQRNPQISSSFESPPCPIFHSLTTASPDPSRLSSLTFLRSLSIARRGPTRPKKIDIGAKARQMQNRRLWTYALTFSCIAGFVVIVLNQFQDQLVFYLTPSDAMEKFAENPTKNKFRLGGLVLEGSVAQPAASQEMEFVITDLITDILVRYKGSLPDLFREGHSVVVEGFIKPYTDEVRKEVSTKPISKKARNLDCFFSATEVLAKHDEKYMPQEVAAAIEKNKKIIEAAATEQAAEVAAS

SEQ ID NO: 76870 - protein, 178 aa, Arabidopsis thaliana
  peptide (1)..(178): Ceres Seq. ID no. 12350379
MQNRRLWTYALTFSCIAGFVVIVLNQFQDQLVFYLTPSDAMEKFAENPTKNKFRLGGLVLEGSVAQPAASQEMEFVITDLITDILVRYKGSLPDLFREGHSVVVEGFIKPYTDEVRKEVSTKPISKKARNLDCFFSATEVLAKHDEKYMPQEVAAAIEKNKKIIEAAATEQAAEVAAS

SEQ ID NO: 76871 - protein, 138 aa, Arabidopsis thaliana
  peptide (1)..(138): Ceres Seq. ID no. 12350380
MEKFAENPTKNKFRLGGLVLEGSVAQPAASQEMEFVITDLITDILVRYKGSLPDLFREGHSVVVEGFIKPYTDEVRKEVSTKPISKKARNLDCFFSATEVLAKHDEKYMPQEVAAAIEKNKKIIEAAATEQAAEVAAS

SEQ ID NO: 76872 - DNA, 1528 bp, Arabidopsis thaliana
  misc_feature (1)..(1528): Ceres Seq. ID no. 12370374
  misc_feature (1)..(1528): Ortholog of  Ceres SEQ ID NO 13638160 as cited in SEQ ID NO 58847
attttaactctcaaagattcgttttaggtacgcgacggcccgacctcgattctcttccacttctttcttgttccaaaaacctaaaccctctctctctctctctctctctctatctcttgaaaaatcaacaaaacattggaatcaatttctctatgttttgattctattttaaagatccaatattctttctccattgagattaagcttctttctcgctgtcgtctctctatagatcttggttcttagtcccttttgaataataatgatggtggagatggattacgctaagaaaatgcagaaatgtcatgaatacgttgaagcacttgaagaagaacagaagaaaatccaagtctttcaacgcgagcttcctttatgtttagagcttgtcactcaagcgatcgaagcttgtcggaaggagttatctggtacgacgacaactacatcagaacagtgttcagaacagaccacaagtgtttgtggtggtcctgtctttgaagagtttattcctatcaagaaaattagttccttgtgtgaagaagtacaagaagaagaagaagaagatggtgaacatgaatcttctccagaacttgtgaataataagaaatcagattggcttagatctgttcagctatggaatcattcaccggatctaaatccaaaagaggagcgtgtagctaagaaagcgaaagtggtggaggtgaaaccaaaaagcggtgcgtttcagccgtttcaaaagcgcgttttggagactgatttgcaaccggcggtgaaagtagctagttcgatgccagcgacgacgacgagttctacgacggaaacttgtggtggtaaaagtgatttgattaaagctggagatgaggaaagacggatagagcagcagcaatcgcagtcgcatacgcatagaaaacaaaggcggtgctggtcgccggaattacaccgtcgattcctaaacgcgcttcagcagcttggaggatctcatgttgctacaccaaagcaaatcagggatcacatgaaggttgatggattaacaaacgacgaagttaaaagccatttacagaaatatagacttcacacaagaaggccagcagcaacatccgtggcggcacaaagtaccgggaatcagcaacaaccacaatttgtggtggttggaggcatatgggtaccatcgtcacaagattttccaccaccgtccgatgtagccaacaagggtggtgtatatgctccggttgcggtggcgcaatctccaaaacgttcgttggagagaagttgcaactcgccggcggcatcttcctctacaaatacaaatacttctactcctgtgtcataatctgatagtcatactataatcatctcctgatgttgattttggtgtaggtttgaaaatgtttatgtgaatgtaagaaatattttcgtccgtttttgtttgtaaccaagaaatgttatttcctcggttggaaattttgaataaagtagacgaatgctactatgtagtatatacacgagataagtgaagactctttgtttttct

SEQ ID NO: 76873 - protein, 354 aa, Arabidopsis thaliana; identical to SEQ ID NO: 25269
  peptide (1)..(354): Ceres Seq. ID no. 12370375

SEQ ID NO: 76874 - protein, 353 aa, Arabidopsis thaliana; identical to SEQ ID NO: 25270
  peptide (1)..(353): Ceres Seq. ID no. 12370376

SEQ ID NO: 76875 - protein, 350 aa, Arabidopsis thaliana; identical to SEQ ID NO: 25271
  peptide (1)..(350): Ceres Seq. ID no. 12370377

SEQ ID NO: 76876 - DNA, 812 bp, Arabidopsis thaliana
  misc_feature (1)..(812): Ceres Seq. ID no. 12371878
  misc_feature (1)..(812): Ortholog of  Ceres SEQ ID NO 15176321 as cited in SEQ ID NO 52814
  misc_feature (1)..(812): Ortholog of  Ceres SEQ ID NO 12563124 as cited in SEQ ID NO 57104
  misc_feature (1)..(812): Ortholog of  Ceres SEQ ID NO 13598373 as cited in SEQ ID NO 62185
  misc_feature (1)..(812): Ortholog of  Ceres SEQ ID NO 12584664 as cited in SEQ ID NO 62232
  misc_feature (1)..(812): Ortholog of  Ceres SEQ ID NO 15226273 as cited in SEQ ID NO 64934
  misc_feature (1)..(812): Ortholog of  Ceres SEQ ID NO 12617639 as cited in SEQ ID NO 65219
acatctcactgctcactactctcactgtaatcccttagatcttcttttcaaatttcaatggcgtccggtgatgttgagtatcggtgcttcgttggaggtctagcatgggccactgatgacagagctcttgagactgccttcgctcaatacggcgacgttattgattccaagatcattaacgatcgtgagactggaagatcaaggggattcggattcgtcaccttcaaggatgagaaagccatgaaggatgcgattgagggaatgaacggacaagatctcgatggccgtagcatcactgttaacgaggctcagtcacgaggaagcggtggcggcggaggccaccgtggaggtggtggcggtggataccgcagcggcggtggtggaggttactccggtggaggtggtagctacggaggtggcggcggtagacgcgagggtggaggaggatacagcggcggcggcggcggttactcctcaagaggtggtggtggcggaagctacggtggtggaagacgtgagggaggaggaggatacggtggtggtgaaggaggaggttacggaggaagcggtggtggtggaggatggtaattcctttaattaggtttgggattaccaatgaatgttctctctctcgcttgttatgcttctacttggttttgtgtgttctctattttgttctggttctgctttagatttgatgtaacagttcgtgattaggtattttggtatctggaaacgtaatgttaagtcacttgtcattctctaaataacaaatttcttcggagatattatctctgttgattgattctatc

SEQ ID NO: 76877 - protein, 176 aa, Arabidopsis thaliana
  peptide (1)..(176): Ceres Seq. ID no. 12371879
MASGDVEYRCFVGGLAWATDDRALETAFAQYGDVIDSKIINDRETGRSRGFGFVTFKDEKAMKDAIEGMNGQDLDGRSITVNEAQSRGSGGGGGHRGGGGGGYRSGGGGGYSGGGGSYGGGGGRREGGGGYSGGGGGYSSRGGGGGSYGGGRREGGGGYGGGEGGGYGGSGGGGGW

SEQ ID NO: 76878 - protein, 115 aa, Arabidopsis thaliana
  peptide (1)..(115): Ceres Seq. ID no. 12371880
MKDAIEGMNGQDLDGRSITVNEAQSRGSGGGGGHRGGGGGGYRSGGGGGYSGGGGSYGGGGGRREGGGGYSGGGGGYSSRGGGGGSYGGGRREGGGGYGGGEGGGYGGSGGGGGW

SEQ ID NO: 76879 - protein, 108 aa, Arabidopsis thaliana
  peptide (1)..(108): Ceres Seq. ID no. 12371881
MNGQDLDGRSITVNEAQSRGSGGGGGHRGGGGGGYRSGGGGGYSGGGGSYGGGGGRREGGGGYSGGGGGYSSRGGGGGSYGGGRREGGGGYGGGEGGGYGGSGGGGGW

SEQ ID NO: 76880 - DNA, 1038 bp, Arabidopsis thaliana
  misc_feature (1)..(1038): Ceres Seq. ID no. 12372031
  misc_feature (1)..(1038): Ortholog of  Ceres SEQ ID NO 14303324 as cited in SEQ ID NO 54563
  misc_feature (1)..(1038): Ortholog of  Ceres SEQ ID NO 14308575 as cited in SEQ ID NO 58782
atgggcagatcgccatgttgtgataaggccgggttgaagaaagggccttggactccagaagaggatcagaaacttttggcttatattgaagaacatggccatggaagctggcgttctttgcctgagaaagccggtctccaaaggtgtggaaagagttgcagactcagatggactaactacctaagacctgacatcaagagaggcaaattcactgtacaagaagaacaaaccatcattcaactccacgctctcctcggaaacaggtggtcagcgattgcaactcatttaccaaagaggacagacaacgagatcaagaactactggaacacacacttgaagaaacgtctgatcaaaatggggatagatccagtgactcacaagcacaaaaacgagactctttcgtcttccacaggacaatcaaagaacgcagccacgcttagtcatatggctcaatgggagagtgcaagactcgaagctgaagcaaggctagctagagaatcaaagcttctccatttacagcattaccaaaacaataacaaccttaacaaatcagcagctcctcaacaacattgcttcactcaaaaaacatcaacaaactggactaaaccaaaccaaggaaacggagaccaacagcttgaatctccgacatcgacggtgacattctctgagaatcttctgatgcctttaggaatccctacggatagcagcagaaatagaaacaataacaacaatgagtcctcggcgatgattgaattggccgtatcttcgtcaacctcctccgatgtgagtctggtcaaagaacatgaacacgactggattaggcagatcaactgtggtagtggaggaataggagaaggattcacgagtctattgatcggtgattcggtcggccggggtttacccaccgggaaaaacgaagcgacggcgggcgtggggaatgagagtgagtataactactatgaggataacaagaattactggaatagcattctcaacttggttgattcttcaccgtccgattccgcgacgatgttctga

SEQ ID NO: 76881 - protein, 345 aa, Arabidopsis thaliana
  peptide (1)..(345): Ceres Seq. ID no. 12372032
MGRSPCCDKAGLKKGPWTPEEDQKLLAYIEEHGHGSWRSLPEKAGLQRCGKSCRLRWTNYLRPDIKRGKFTVQEEQTIIQLHALLGNRWSAIATHLPKRTDNEIKNYWNTHLKKRLIKMGIDPVTHKHKNETLSSSTGQSKNAATLSHMAQWESARLEAEARLARESKLLHLQHYQNNNNLNKSAAPQQHCFTQKTSTNWTKPNQGNGDQQLESPTSTVTFSENLLMPLGIPTDSSRNRNNNNNESSAMIELAVSSSTSSDVSLVKEHEHDWIRQINCGSGGIGEGFTSLLIGDSVGRGLPTGKNEATAGVGNESEYNYYEDNKNYWNSILNLVDSSPSDSATMF

SEQ ID NO: 76882 - protein, 227 aa, Arabidopsis thaliana
  peptide (1)..(227): Ceres Seq. ID no. 12372033
MGIDPVTHKHKNETLSSSTGQSKNAATLSHMAQWESARLEAEARLARESKLLHLQHYQNNNNLNKSAAPQQHCFTQKTSTNWTKPNQGNGDQQLESPTSTVTFSENLLMPLGIPTDSSRNRNNNNNESSAMIELAVSSSTSSDVSLVKEHEHDWIRQINCGSGGIGEGFTSLLIGDSVGRGLPTGKNEATAGVGNESEYNYYEDNKNYWNSILNLVDSSPSDSATMF

SEQ ID NO: 76883 - protein, 197 aa, Arabidopsis thaliana
  peptide (1)..(197): Ceres Seq. ID no. 12372034
MAQWESARLEAEARLARESKLLHLQHYQNNNNLNKSAAPQQHCFTQKTSTNWTKPNQGNGDQQLESPTSTVTFSENLLMPLGIPTDSSRNRNNNNNESSAMIELAVSSSTSSDVSLVKEHEHDWIRQINCGSGGIGEGFTSLLIGDSVGRGLPTGKNEATAGVGNESEYNYYEDNKNYWNSILNLVDSSPSDSATMF

SEQ ID NO: 76884 - DNA, 1664 bp, Arabidopsis thaliana
  misc_feature (1)..(1664): Ceres Seq. ID no. 12377367
  misc_feature (1)..(1664): Ortholog of  Ceres SEQ ID NO 13594209 as cited in SEQ ID NO 59089
  misc_feature (1)..(1664): Ortholog of  Ceres SEQ ID NO 14313084 as cited in SEQ ID NO 59183
  misc_feature (1)..(1664): Ortholog of  Ceres SEQ ID NO 13502874 as cited in SEQ ID NO 66298
  misc_feature (1)..(1664): Ortholog of  Ceres SEQ ID NO 15169631 as cited in SEQ ID NO 67173
  misc_feature (1)..(1664): Ortholog of  Ceres SEQ ID NO 12614124 as cited in SEQ ID NO 68392
cacgcgtccgactaacacaaaagaaaaaaaaaaaaaaaacagagtatcaaacatgtcaatcttgctctgtttcctctgtcttttacctgttttcttagtttctttatcaatcttgtcaaaaaggctaaaaccctcaaaatggaagcttcctccgggaccaaagacgctcccgatcatcggaaacttacacaacctcacaggtttgcctcacacatgttttcgaaatctctcacaaaagttcggaccagtgatgcttctccacttcggattcgtccccgtagtcgtgatctcatcgaaagaaggagcagaagaagctctcaagacccaagatcttgaatgttgcagccgaccagagactgtagcgacaagaatgatctcttacaacttcaaagacattggattcgctccttacggtgaggaatggaaagcgttgaggaagctcgtggttatggagctcttgaacacgaaaaagtttcagtctttcaggtatataagagaggaagagaatgacttgttgatcaagaaactaaccgaatccgctctgaaaaaatcaccggtgaatctgaagaagacccttttcacgctagtcgcgagtatcgtgtgtaggctcgcgttcggggtgaatatccacaagtgcgagttcgtagacgaggacaacgttgctgatctagttaacaagtttgagatgctagtcgctggtgttgccttcaccgatttcttccctggagtgggttggcttgtagaccgaatctcaggtcagaacaagacactaaacaatgttttctcagaacttgacactttcttccaaaacgtgctcgatgatcatattaagcctggaagacaagtatctgagaaccctgacgtcgtagatgtgatgcttgatctaatgaagaagcaagagaaagatggagaatctttcaaactcacaacagatcatctcaaaggaatcatctcggacatatttcttgcaggagtaaacacaagcgccgtcactttgaactgggcgatggccgagctgatcagaaacccgagagtgatgaagaaagtgcaagacgagattaggacaacacttggggacaagaaacagagaatcacagagcaagatctaagccaagttcactacttcaagcttgtggtcaaggagatatttagattacatccagcagctccacttttgcttccaagagagacaatgtctcatgtcaagatccaaggctacgatattcctgtgaaaacacagatgatgatcaacatctactcgatcgcacgtgatccaaaactatggacaaaccctgatgagtttaaccctgacaggtttcttgacagctccatagattacagaggactaaactttgagctgttaccatttggttctggccggagaatctgtcccgggatgacgctgggaatcaccaccgtggaattgggactgttgaatttgctttacttcttcgattgggtagtgcctgtagggaagaatgtgaaggacatcaacttggaagaaacaggatcaatcattattagcaagaagacaacccttgagcttgttccacttgttcatcattgaaatgacgatcatgaaacaattagtccataagattatgtatttgtatccagcttctttatcttgatatggttgtaatcataatctgaatagtgatatc

SEQ ID NO: 76885 - protein, 521 aa, Arabidopsis thaliana
  peptide (1)..(521): Ceres Seq. ID no. 12377368
TRPTNTKEKKKKNRVSNMSILLCFLCLLPVFLVSLSILSKRLKPSKWKLPPGPKTLPIIGNLHNLTGLPHTCFRNLSQKFGPVMLLHFGFVPVVVISSKEGAEEALKTQDLECCSRPETVATRMISYNFKDIGFAPYGEEWKALRKLVVMELLNTKKFQSFRYIREEENDLLIKKLTESALKKSPVNLKKTLFTLVASIVCRLAFGVNIHKCEFVDEDNVADLVNKFEMLVAGVAFTDFFPGVGWLVDRISGQNKTLNNVFSELDTFFQNVLDDHIKPGRQVSENPDVVDVMLDLMKKQEKDGESFKLTTDHLKGIISDIFLAGVNTSAVTLNWAMAELIRNPRVMKKVQDEIRTTLGDKKQRITEQDLSQVHYFKLVVKEIFRLHPAAPLLLPRETMSHVKIQGYDIPVKTQMMINIYSIARDPKLWTNPDEFNPDRFLDSSIDYRGLNFELLPFGSGRRICPGMTLGITTVELGLLNLLYFFDWVVPVGKNVKDINLEETGSIIISKKTTLELVPLVHH

SEQ ID NO: 76886 - protein, 504 aa, Arabidopsis thaliana
  peptide (1)..(504): Ceres Seq. ID no. 12377369
MSILLCFLCLLPVFLVSLSILSKRLKPSKWKLPPGPKTLPIIGNLHNLTGLPHTCFRNLSQKFGPVMLLHFGFVPVVVISSKEGAEEALKTQDLECCSRPETVATRMISYNFKDIGFAPYGEEWKALRKLVVMELLNTKKFQSFRYIREEENDLLIKKLTESALKKSPVNLKKTLFTLVASIVCRLAFGVNIHKCEFVDEDNVADLVNKFEMLVAGVAFTDFFPGVGWLVDRISGQNKTLNNVFSELDTFFQNVLDDHIKPGRQVSENPDVVDVMLDLMKKQEKDGESFKLTTDHLKGIISDIFLAGVNTSAVTLNWAMAELIRNPRVMKKVQDEIRTTLGDKKQRITEQDLSQVHYFKLVVKEIFRLHPAAPLLLPRETMSHVKIQGYDIPVKTQMMINIYSIARDPKLWTNPDEFNPDRFLDSSIDYRGLNFELLPFGSGRRICPGMTLGITTVELGLLNLLYFFDWVVPVGKNVKDINLEETGSIIISKKTTLELVPLVHH

SEQ ID NO: 76887 - protein, 438 aa, Arabidopsis thaliana
  peptide (1)..(438): Ceres Seq. ID no. 12377370
MLLHFGFVPVVVISSKEGAEEALKTQDLECCSRPETVATRMISYNFKDIGFAPYGEEWKALRKLVVMELLNTKKFQSFRYIREEENDLLIKKLTESALKKSPVNLKKTLFTLVASIVCRLAFGVNIHKCEFVDEDNVADLVNKFEMLVAGVAFTDFFPGVGWLVDRISGQNKTLNNVFSELDTFFQNVLDDHIKPGRQVSENPDVVDVMLDLMKKQEKDGESFKLTTDHLKGIISDIFLAGVNTSAVTLNWAMAELIRNPRVMKKVQDEIRTTLGDKKQRITEQDLSQVHYFKLVVKEIFRLHPAAPLLLPRETMSHVKIQGYDIPVKTQMMINIYSIARDPKLWTNPDEFNPDRFLDSSIDYRGLNFELLPFGSGRRICPGMTLGITTVELGLLNLLYFFDWVVPVGKNVKDINLEETGSIIISKKTTLELVPLVHH

SEQ ID NO: 76888 - DNA, 1143 bp, Arabidopsis thaliana
  misc_feature (1)..(1143): Ceres Seq. ID no. 12377429
  misc_feature (1)..(1143): Ortholog of  Ceres SEQ ID NO 13581579 as cited in SEQ ID NO 58361
  misc_feature (1)..(1143): Ortholog of  Ceres SEQ ID NO 13598714 as cited in SEQ ID NO 62656
  misc_feature (1)..(1143): Ortholog of  Ceres SEQ ID NO 13596969 as cited in SEQ ID NO 63375
  misc_feature (1)..(1143): Ortholog of  Ceres SEQ ID NO 13597519 as cited in SEQ ID NO 64759
  misc_feature (1)..(1143): Ortholog of  Ceres SEQ ID NO 13597870 as cited in SEQ ID NO 64982
  misc_feature (1)..(1143): Ortholog of  Ceres SEQ ID NO 13595926 as cited in SEQ ID NO 67778
  misc_feature (1)..(1143): Ortholog of  Ceres SEQ ID NO 12567001 as cited in SEQ ID NO 0
atacatataaagagaaattgttttttttttttaaatggttgtgatgaacaaaacgaatctcttgttgcttattctctctctttttctcgccatcaacctctcctccgctcaactccgcggcgacttctacgccggaacttgtccgaacgtcgagcaaatcgtcagaaacgccgtacagaaaaaaatccaacaaactttcaccaccattcccgccactctacgcctctatttccatgattgtttcgtcaatggatgtgatgcatcagtgatgatagcgtcgacaaatactaataaggcggagaaggatcatgaggataatttatcgttggccggagatggattcgacaccgtcattaaagctaaagaagctgttgacgccgtcccaaattgtcgtaacaaagtttcttgcgctgatattctcacgatggccactcgtgacgtcgttaatcttgcgggtggaccacaatacgccgtagaattgggaaggcgagatggactttcgtcgtcggcttctagcgtcacagggaagctacccaaaccgacctttgatctcaaccaactcaatgcacttttcgcagaaaacggtcttagccctaatgacatgatcgctctctccggggcacacacattaggattcgcgcattgcacaaaagttttcaatcggctatacaatttcaacaagacaaataacgtggatcccacgattaacaaagattacgtgacagagctaaaagcgtcgtgtcctcaaaacatagatccaagagtggctattaacatggatcccaatacaccaagacaattcgacaacgtttactacaaaaacttgcaacaagggaaaggattgttcacgtctgatcaagtcttattcaccgatagtcggtcaaagccaaccgttgacttatgggctaataatggacagttgtttaatcaagcttttattagctcgatgatcaagcttggtcgtgttggtgttaaaactggtagtaatggtaatattcgtcgtgattgcggagctttcaattaatttaaatatatctgtttaagatattgtttatttgcactcatttgtattgggatttgggaatgggatgggtctcatgaagctggttcagctaaaatgtaataattctggttttgggtttt

SEQ ID NO: 76889 - protein, 329 aa, Arabidopsis thaliana
  peptide (1)..(329): Ceres Seq. ID no. 12377430
MVVMNKTNLLLLILSLFLAINLSSAQLRGDFYAGTCPNVEQIVRNAVQKKIQQTFTTIPATLRLYFHDCFVNGCDASVMIASTNTNKAEKDHEDNLSLAGDGFDTVIKAKEAVDAVPNCRNKVSCADILTMATRDVVNLAGGPQYAVELGRRDGLSSSASSVTGKLPKPTFDLNQLNALFAENGLSPNDMIALSGAHTLGFAHCTKVFNRLYNFNKTNNVDPTINKDYVTELKASCPQNIDPRVAINMDPNTPRQFDNVYYKNLQQGKGLFTSDQVLFTDSRSKPTVDLWANNGQLFNQAFISSMIKLGRVGVKTGSNGNIRRDCGAFN

SEQ ID NO: 76890 - protein, 326 aa, Arabidopsis thaliana
  peptide (1)..(326): Ceres Seq. ID no. 12377431
MNKTNLLLLILSLFLAINLSSAQLRGDFYAGTCPNVEQIVRNAVQKKIQQTFTTIPATLRLYFHDCFVNGCDASVMIASTNTNKAEKDHEDNLSLAGDGFDTVIKAKEAVDAVPNCRNKVSCADILTMATRDVVNLAGGPQYAVELGRRDGLSSSASSVTGKLPKPTFDLNQLNALFAENGLSPNDMIALSGAHTLGFAHCTKVFNRLYNFNKTNNVDPTINKDYVTELKASCPQNIDPRVAINMDPNTPRQFDNVYYKNLQQGKGLFTSDQVLFTDSRSKPTVDLWANNGQLFNQAFISSMIKLGRVGVKTGSNGNIRRDCGAFN

SEQ ID NO: 76891 - protein, 251 aa, Arabidopsis thaliana
  peptide (1)..(251): Ceres Seq. ID no. 12377432
MIASTNTNKAEKDHEDNLSLAGDGFDTVIKAKEAVDAVPNCRNKVSCADILTMATRDVVNLAGGPQYAVELGRRDGLSSSASSVTGKLPKPTFDLNQLNALFAENGLSPNDMIALSGAHTLGFAHCTKVFNRLYNFNKTNNVDPTINKDYVTELKASCPQNIDPRVAINMDPNTPRQFDNVYYKNLQQGKGLFTSDQVLFTDSRSKPTVDLWANNGQLFNQAFISSMIKLGRVGVKTGSNGNIRRDCGAFN

SEQ ID NO: 76892 - DNA, 1974 bp, Arabidopsis thaliana
  misc_feature (1)..(1974): Ceres Seq. ID no. 12377526
  misc_feature (1)..(1974): Ortholog of  Ceres SEQ ID NO 14313288 as cited in SEQ ID NO 67419
aaaacttgtgattcttgtttaccacaataaaaaaaaaaaaaaaaaaatcctgcaatgaagcttctactgttgctgcttgccttctgctgtctatctctatcaaggtgtgaagaacaatccgtcccttatgattactcggcaacaatagagtgtctagagaacccttataaaccacagtacaatggagggatcatcgtgaatcctgacttgcaaaatggttcacaaggctggtcacagtttggaaacgccaaagtcgatttcagagaatttggaggcaataagtttgttgttgccacacaaaggaatcaatcttctgacagcatctcgcagaaggtgtacttggaaaaaggaattctctacactttctctgcttggttacaagtgagcataggaaaatctcccgtgagcgctgttttcaagaagaatggtgaatataagcatgccggttcggttgttgctgaatccaaatgttggtccatgctgaaaggtggtctcactgttgatgaatctggtcctgctgaactcttcttcgagagcgagaacacaatggttgagatttgggttgatagcgtctctttgcaacctttcacacaagaagagtggaactctcaccacgaacagagcattggcaaagtaagaaaaggtaccgtgagaatcagagtcatgaataacaaaggcgagacgatacctaatgcaaccatatccatagaacagaagaaactcggatacccattcgggtgcgcggtagaaaacaacatacttgggaatcaagcataccaaaactggttcactcaaagatttaccgtgacaactttcgggaacgagatgaaatggtacagcacagaaagaataagagggcaagaggattactcgacagctgacgcgatgttaagtttcttcaagagccacgggattgctgtacgtgggcacaatgttttatgggatgatcctaagtaccaacctggatgggtgaattctctgtctggtaacgacctctacaacgctgtgaaacgaagggtttactcggttgtctcgcgatacaaaggacagcttttgggttgggatgttgtgaatgagaatcttcatttctccttctttgagagcaagttcggtcctaaagcctcttataacacctacacaatggcccatgccgtcgatccaaggacaccaatgttcatgaatgaatataatacgttagagcaacctaaggatttaacttctagtccagcaaggtatttgggaaagcttagggagcttcaatctattcgggttgccggaaagattccgttagcgataggtcttgagtctcatttcagcactcctaacattccgtatatgagatcagctcttgatacttttggtgccactggtttgcctatttggctcactgagattgacgttgatgcgcctcccaatgtccgggccaactatttcgagcaagttctaagggaaggccatgcacatccgaaagtgaatggaatggtgatgtggacaggttattctccatcaggttgctaccgaatgtgcctcaccgatggaaactttaagaacctacccactggagacgtcgtggacaagcttttacgtgaatggggagggcttcgcagccaaaccacaggtgtcactgatgctaatgggttatttgaagctccactctttcatggtgactatgatctccgtatatcccatcctctcaccaattcaaaggcttcttacaactttacgttgacttccgatgacgactcctcacagaaacaaccatctctatatgtctttcgtgtttgagaagctaagtttacaactactttgtatttgagtagtttgattcttattggcagattagtgtgttttccattataactttgtgtgaggaaactcccatgggatatccatgagcatcgttgggttggtttcttatactttaattaagccgtgatattgtaataaaattatcaatgatattgaacttccttt

SEQ ID NO: 76893 - protein, 576 aa, Arabidopsis thaliana
  peptide (1)..(576): Ceres Seq. ID no. 12377527
MKLLLLLLAFCCLSLSRCEEQSVPYDYSATIECLENPYKPQYNGGIIVNPDLQNGSQGWSQFGNAKVDFREFGGNKFVVATQRNQSSDSISQKVYLEKGILYTFSAWLQVSIGKSPVSAVFKKNGEYKHAGSVVAESKCWSMLKGGLTVDESGPAELFFESENTMVEIWVDSVSLQPFTQEEWNSHHEQSIGKVRKGTVRIRVMNNKGETIPNATISIEQKKLGYPFGCAVENNILGNQAYQNWFTQRFTVTTFGNEMKWYSTERIRGQEDYSTADAMLSFFKSHGIAVRGHNVLWDDPKYQPGWVNSLSGNDLYNAVKRRVYSVVSRYKGQLLGWDVVNENLHFSFFESKFGPKASYNTYTMAHAVDPRTPMFMNEYNTLEQPKDLTSSPARYLGKLRELQSIRVAGKIPLAIGLESHFSTPNIPYMRSALDTFGATGLPIWLTEIDVDAPPNVRANYFEQVLREGHAHPKVNGMVMWTGYSPSGCYRMCLTDGNFKNLPTGDVVDKLLREWGGLRSQTTGVTDANGLFEAPLFHGDYDLRISHPLTNSKASYNFTLTSDDDSSQKQPSLYVFRV

SEQ ID NO: 76894 - protein, 435 aa, Arabidopsis thaliana; identical to SEQ ID NO: 49508
  peptide (1)..(435): Ceres Seq. ID no. 12377528

SEQ ID NO: 76895 - protein, 412 aa, Arabidopsis thaliana
  peptide (1)..(412): Ceres Seq. ID no. 12377529
MVEIWVDSVSLQPFTQEEWNSHHEQSIGKVRKGTVRIRVMNNKGETIPNATISIEQKKLGYPFGCAVENNILGNQAYQNWFTQRFTVTTFGNEMKWYSTERIRGQEDYSTADAMLSFFKSHGIAVRGHNVLWDDPKYQPGWVNSLSGNDLYNAVKRRVYSVVSRYKGQLLGWDVVNENLHFSFFESKFGPKASYNTYTMAHAVDPRTPMFMNEYNTLEQPKDLTSSPARYLGKLRELQSIRVAGKIPLAIGLESHFSTPNIPYMRSALDTFGATGLPIWLTEIDVDAPPNVRANYFEQVLREGHAHPKVNGMVMWTGYSPSGCYRMCLTDGNFKNLPTGDVVDKLLREWGGLRSQTTGVTDANGLFEAPLFHGDYDLRISHPLTNSKASYNFTLTSDDDSSQKQPSLYVFRV

SEQ ID NO: 76896 - DNA, 1374 bp, Arabidopsis thaliana
  misc_feature (1)..(1374): Ceres Seq. ID no. 12384911
  misc_feature (1)..(1374): Ortholog of  Ceres SEQ ID NO 14312324 as cited in SEQ ID NO 60453
  misc_feature (1)..(1374): Ortholog of  Ceres SEQ ID NO 12624791 as cited in SEQ ID NO 63574
  misc_feature (1)..(1374): Ortholog of  Ceres SEQ ID NO 12780574 as cited in SEQ ID NO 65624
ggatatcgtcgtcatttctctctctaaccccttctctcttcagtctctctctctctagacgatctctatcttgaataaaataccgataatgacctcaaccaatccggtggtcgccgaagtaataccggcggaaacttctacagatgctacagagacgacgattgcaacgacggaagctggtgaagcaccggagaagaaggtgaggaaagcttacacaatcaccaagtctagagagagttggactgaaggagaacacgacaagtttctggaagctcttcaattgtttgatcgtgactggaaaaagatagaagattttgttggttcaaagacagttattcagatcaggagccatgcccaaaaatactttctaaaggtccaaaaaaatgggactttagcacatgttccaccccctaggcctaagcgcaaagctgctcatccatatcctcaaaaggcatcgaaaaatgctcaaatgtcgcttcacgtttccatgtcctttcctactcaaataaataacctgcctggatatactccatgggatgatgatacatctgcattgttaaacattgctgtaagtggggttattccaccagaagatgaacttgatactctttgtggagcagaagttgatgttggatcaaatgacatgataagtgaaactagtccttcagcatctggtatcggaagctcaagcagaacactatcagattctaagggtttgagactggcgaaacaagctccctcaatgcatggtcttcctgattttgctgaggtttataacttcattgggagtgtgttcgatcctgacagcaaaggccgcatgaaaaagctcaaggaaatggatcctataaatttcgaaactgttttgctgttgatgagaaacctcacagtgaacttgtcaaaccctgactttgaacctacttctgaatatgttgatgctgcagaggaaggtcatgaacacttaagctcttagctgtttgtgcactcaacaagttatatatcttcttgacgacttcttgctcgcaacaactctctaccagctatcaaatgcattctacggttgttgtctgaggagaacataactgagtcgtcgtcacaaacaagaggaacatatgcagtttcggtcagaaccagtcgtgtgaatggtagatatatgtatgtgtgtgtagaaaatggttaccaattgtatcttctttttgataattattttttcatgccttttgtaatatgtaagtttctttacctcgttctctgattggttattttctggttatctgtttaaccaaaagctatgtaacacagtagcaaattgttacttaactcggaagtgagatacataactctgttgtattgcacttgtatcaagcgttaacgtcc

SEQ ID NO: 76897 - protein, 293 aa, Arabidopsis thaliana; identical to SEQ ID NO: 46730
  peptide (1)..(293): Ceres Seq. ID no. 12384912

SEQ ID NO: 76898 - protein, 166 aa, Arabidopsis thaliana; identical to SEQ ID NO: 22744
  peptide (1)..(166): Ceres Seq. ID no. 12384913

SEQ ID NO: 76899 - protein, 160 aa, Arabidopsis thaliana; identical to SEQ ID NO: 22745
  peptide (1)..(160): Ceres Seq. ID no. 12384914

SEQ ID NO: 76900 - DNA, 1063 bp, Arabidopsis thaliana
  misc_feature (1)..(1063): Ceres Seq. ID no. 12389077
  misc_feature (1)..(1063): Ortholog of  Ceres SEQ ID NO 13585976 as cited in SEQ ID NO 0
gtaacggtgtcgtcgtcgccaaacgatttgcctcttcctaaagggtacaacaagaatggaagaagagtatgagagtcgtcgattgaggagatgggaagagttggacactgacatcttagtaagaattttccagaagtttagcgtctttgagttgacttcgggattagctcatgtttgtagaggatggagagctgcttgttgcgatccgattctttggaagacggtggatttgtcaaacatgagatctagtttcatcaagatcccattagagccttatgtctatgtggaacgccgatctgatgaggccctaacccgcatcctgaaactctccatgaaccttagcggaggaagcacgaggaccttgatttttcatttcaacttgttcttgagtgatgatcagcttacttacaccgcagaaaggtgtccagggttgagacgggtcgtcctaccggcttggaacagaataaagaagactggtatatgcaaagcgataagaatctggaaagatctagagtcactaacaatgccaagcatcgcaaacccgccttatctcttaacagaaattgccaagaactgcaagaattttaaagagctgaagatcatgggtccattcgaggtcttctttgcaaacacgctcatcacttgcctcccaaacatcaaaacactcagcatcagatgctcggcgataaagcgggaagcactgatgaaaatccttgacggattaccaagccttgaagtgctcaacatatcacactctcacctagtggagtacagcggttggcagcctcagcagaaggtgattgttagagagctcgataagacgataatggagaaaacagcaaggctaaagaaattcttgacttgcatggatcacaagacgtgtgtgatgtgtcagaggactgaaaacgatgaagggattgtgagatggtacaagtatgaggaaggagactggaaggttgatgaagtgagttctcttcatctttgatgtttctgctgtgatcattctctgtgaaggacttaacttgttattgttctcatctttgactgttgaattgtttatttc

SEQ ID NO: 76901 - protein, 309 aa, Arabidopsis thaliana; identical to SEQ ID NO: 37206
  peptide (1)..(309): Ceres Seq. ID no. 12389078

SEQ ID NO: 76902 - protein, 248 aa, Arabidopsis thaliana; identical to SEQ ID NO: 37207
  peptide (1)..(248): Ceres Seq. ID no. 12389079

SEQ ID NO: 76903 - protein, 217 aa, Arabidopsis thaliana; identical to SEQ ID NO: 37208
  peptide (1)..(217): Ceres Seq. ID no. 12389080

SEQ ID NO: 76904 - DNA, 967 bp, Arabidopsis thaliana
  misc_feature (1)..(967): Ceres Seq. ID no. 12389183
  misc_feature (1)..(967): Ortholog of  Ceres SEQ ID NO 14308727 as cited in SEQ ID NO 58726
  misc_feature (1)..(967): Ortholog of  Ceres SEQ ID NO 13663517 as cited in SEQ ID NO 66850
actggtatgtctgtgtttcttcttccattttctgtttctattggaaacttctctctccaatttcgttttcttcacttcttagatcctttagctttgacaaaaccgtagtaaaggatcaaaagttatcatctttggtccatgttgtgaatcgtgctctgcttggntcgtgactcccaaataccggatttgaaaccagcatatctgagcttaattcgagcatagatagcttagcaatggagcagtcagaagagggtcaacagcaacagcaacagggagtgatggattatgtacctcctcatgcttatcagagtgggccagtaaatgcagcttcccatatggcattccaacaagctcaccacttccaccaccaccatcagcagcaacaacagcagcagcttcagatgttctgggctaaccaaatgcaagagatcgagcataccactgatttcaagaaccacacccttcccctagcccgcatcaagaagatcatgaaagctgatgaagatgtgaggatgatctctgcggaggctcctgtgatttttgccaaggcctgtgagatgttcattttggagctcactctacgtgcttggatccacaccgaggagaacaagaggaggaccttgcagaagaacgacatcgccgctgccatttccaggaccgacgtgtttgatttccttgtggacataatcccgagggacgagctgaaagaagaaggtttaggcgtgaccaaagggaccataccatcggtggtgggttccccgccatactattacttgcaacaacaggggatgatgcaacactggccccaggagcaacaccctgatgagtcttaaaacttttcccctttcgtttgtttggttgtatcgtagtaaggtagctctgctctgctgggaaccatttctattgtgttctgtaatgacatgttagtatatccccagtctatatctatggcaatgcagtttctgtt

SEQ ID NO: 76905 - protein, 199 aa, Arabidopsis thaliana; identical to SEQ ID NO: 25138
  peptide (1)..(199): Ceres Seq. ID no. 12389184

SEQ ID NO: 76906 - protein, 184 aa, Arabidopsis thaliana; identical to SEQ ID NO: 25139
  peptide (1)..(184): Ceres Seq. ID no. 12389185

SEQ ID NO: 76907 - protein, 165 aa, Arabidopsis thaliana; identical to SEQ ID NO: 25140
  peptide (1)..(165): Ceres Seq. ID no. 12389186

SEQ ID NO: 76908 - DNA, 1495 bp, Arabidopsis thaliana
  misc_feature (1)..(1495): Ceres Seq. ID no. 12393082
  misc_feature (1)..(1495): Ortholog of  Ceres SEQ ID NO 14314280 as cited in SEQ ID NO 57429
  misc_feature (1)..(1495): Ortholog of  Ceres SEQ ID NO 13595870 as cited in SEQ ID NO 62101
  misc_feature (1)..(1495): Ortholog of  Ceres SEQ ID NO 13590241 as cited in SEQ ID NO 63878
  misc_feature (1)..(1495): Ortholog of  Ceres SEQ ID NO 13657939 as cited in SEQ ID NO 66349
ccctgtgatctatctttgaatctcaaaagcatacttgagagagatctgtttcgataatttgcttcaatcaccgtgttaatggcggccgtaggagtggaggcgagacctcctgtgacagcgatggaggaaacctgcaacgttaagggagcggcggcgaaacaaggagaagggcttaacaagtactacctccagcatctcgatgagctccagcgcctgcaacgcgaaaagtcgtataaccttaatcgtcttgaagctcagaggaatgaactcaattctcgagtacgaatgctcagagaagagttacagctccttcaagaacctgggtcctatgtgggtgaagtggtaaaagtgatgggaaaaaacaaggtcttggttaaggttcatccagaggggaagtatgttgtcgatattgacaaaagtatagacataacgaaactcactccatcaacgagagttgctctccgtaatgatagctatgttctccacctggttctgccaagtaaagtagatcccttggttaaccttatgaaagttgagaaggttccagactccacatatgacatgattggtggtcttgaccagcaaatcaaggaaataaaggaggtcattgaactgccaatcaagcatcctgaattgtttgagtctcttggaattgcgcagccaaagggtgtgttgttgtacggtccacctggaactgggaagacactattggctcgggctgtggcacatcacactgactgtactttcatcagagtttctggttctgagctggtccagaaatacattggagaaggttctagaatggtcagagaactttttgtgatggcaagggagcatgcaccatcaatcatcttcatggatgaaatcgatagtatcgggtctgctcgtatggaatctggtagtggaaatggtgacagtgaggtgcaaaggactatgcttgagcttctcaatcaacttgacggattcgaggcgtcaaacaaaatcaaggttttgatggctacaaatcgtattgatattctggatcaagctcttctccggcctggaaggattgataggaaaattgaatttcctaatcctaatgaagagtcacgttttgatatcttgaagatacactcaaggaaaatgaatttgatgcgtggaatcgatctgaaaaagattgcagagaagatgaatggtgcttcaggtgctgagctgaaggctgtatgcacggaggcgggcatgtttgcacttcgtgagaggagagtacatgtgactcaggaagactttgagatggctgtggcgaaggtaatgaagaaagacacagagaagaacatgtctctgcgtaagctctggaagtaggaatttcagagtcacagattaatttcgattatttcttctctactgtctgtggttctttctgaaaccttttcggctagcgctttaagcttttctaaacaatgtttgtacactagtttctattcattcaaatggttgttcagcataacatcttcgattc

SEQ ID NO: 76909 - protein, 419 aa, Arabidopsis thaliana; identical to SEQ ID NO: 23314
  peptide (1)..(419): Ceres Seq. ID no. 12393083

SEQ ID NO: 76910 - protein, 405 aa, Arabidopsis thaliana; identical to SEQ ID NO: 23315
  peptide (1)..(405): Ceres Seq. ID no. 12393084

SEQ ID NO: 76911 - protein, 350 aa, Arabidopsis thaliana; identical to SEQ ID NO: 23316
  peptide (1)..(350): Ceres Seq. ID no. 12393085

SEQ ID NO: 76912 - DNA, 1718 bp, Arabidopsis thaliana
  misc_feature (1)..(1718): Ceres Seq. ID no. 12394443
  misc_feature (1)..(1718): Ortholog of  Ceres SEQ ID NO 13663060 as cited in SEQ ID NO 60964
  misc_feature (1)..(1718): Ortholog of  Ceres SEQ ID NO 13655298 as cited in SEQ ID NO 68914
aaagaaagagaaagagaagagctggattcacatggtcttgttctttctctctccttcttttctcatcttgcggcttccctttttctctctatcgccacaatgatcattaccaaccaaactgattgaaactcatttgttctctctctctcaaatccactctctctctttcttttctcttctcctctctgtgtctctatcgccatggctgatgataaggagatgcctgctgctgtagttgatggacatgatcaagtcactggtcatattatttccaccacaatcggtggcaaaaatggtgaaccaaaacagacaattagttacatggcggagcgagttgttggtacaggctcgttcgggatcgttttccaagcaaaatgtttggagactggagaaaccgtggcgataaagaaggttttgcaagatagaagatacaagaaccgagaacttcagttgatgcgtgtgatggatcatccgaatgtggtttgtttgaagcattgcttcttttcgactacaagtaaagacgagcttttcttgaacttggttatggagtatgtccctgagagcttgtatcgagttctgaaacattatagtagtgcaaaccaaagaatgcctcttgtctatgttaaactttacatgtatcagatcttccggggacttgcttacattcacaatgttgctggagtttgtcacagagatctaaagcctcaaaatcttctggttgatcctcttactcatcaagtcaaaatctgtgactttggcagtgcgaaacagctcgttaaaggtgaagccaacatttcttacatctgctcacgattctaccgtgcacccgagctcatatttggtgccactgagtacacaacttctattgatatctggtctgctggttgtgttcttgctgagcttcttcttggtcagccattatttcccggagaaaatgctgtggatcagctcgttgaaattataaaagttcttggtacaccaactcgagaagaaatccgttgtatgaatccacattacacagatttcaggtttccacagataaaggcacatccctggcacaagatcttccacaaaaggatgcccccagaagcgattgattttgcatcaaggctgcttcaatactctccaagtctaagatgcacagcgctcgaagcttgtgcacatccgttctttgatgaactcagagaaccaaacgctcgtttaccaaatggacggcctttcccgcctctcttcaacttcaaacaagaagtagctggatcatcacctgaactggtcaacaagttgattccagaccatatcaagagacaattgggtctaagcttcttgaatcaatctggaacttaaaagggatcctgcaaaagacaactacttttttatatataatgtaccattacacgagccacaaggtcgtagttgaaggcaaacgtggaggacacaattcaaagtttttcctcctcaaactcgttcagacaaagccagctgctagcaaaaccaactcccccaaatctgcgaaaacaaaaactctccagtgttgtatctgcttatttctcttctcttttcaagtttggtgaaaaacacagtctcctctttgcttcatttcttctttctttcccccttatgtaaatgagtttagtcagaagtttttttatatagtaaagtttgggcagaaggtgaagaatgtaatcaaagtgatactctttcaacgaggagcttctttc

SEQ ID NO: 76913 - protein, 380 aa, Arabidopsis thaliana; identical to SEQ ID NO: 36837
  peptide (1)..(380): Ceres Seq. ID no. 12394444

SEQ ID NO: 76914 - protein, 374 aa, Arabidopsis thaliana; identical to SEQ ID NO: 36838
  peptide (1)..(374): Ceres Seq. ID no. 12394445

SEQ ID NO: 76915 - protein, 340 aa, Arabidopsis thaliana; identical to SEQ ID NO: 36839
  peptide (1)..(340): Ceres Seq. ID no. 12394446

SEQ ID NO: 76916 - DNA, 1365 bp, Arabidopsis thaliana
  misc_feature (1)..(1365): Ceres Seq. ID no. 12396334
  misc_feature (1)..(1365): Ortholog of  Ceres SEQ ID NO 13596392 as cited in SEQ ID NO 62136
  misc_feature (1)..(1365): Ortholog of  Ceres SEQ ID NO 13654360 as cited in SEQ ID NO 67980
  misc_feature (1)..(1365): Ortholog of  Ceres SEQ ID NO 13596394 as cited in SEQ ID NO 68561
ttacgtaaccctaagcggacggagcaatgctctgctagatctatctttctttcaattcttcaccagagatcgtcgagactcaccattgaaatcgaagaaacagcaccaatttccacttcaccaccgaaagagagagacagagaggataataaaaggccgccatggatttagatcaatggatttccaaggttaaagacggccaacatctctctgaggacgagcttcaacttctctgcgaatacgtgaaagaaattcttattgaggaatcaaatgtacaacctgtcaacagtcctgtcaccgtctgtggtgatatccatggccagtttcatgatcttatgaaacttttccagaccggaggtcatgttcccgagaccaattacatatttatgggggatttcgttgatagaggttacaacagtcttgaagttttcaccattcttttgcttcttaaagcaagacatccagccaatatcactcttttgcgtggaaatcatgaaagtagacagctaactcaggtgtatggtttctatgacgaatgccaaaggaagtatggtaatgctaatgcttggagatattgcacggatgtttttgactatcttacactttcagctattatagatggcactgttctatgtgttcatggtggcctttcacctgatgtacggacaattgaccagataagattgattgagcggaattgcgaaataccgcatgaaggacccttctgtgatcttatgtggagtgatcctgaagatattgaaacatgggctgtcagtccacgtggagctggttggcttttcgggtccagggttaccactgagtttaaccatattaacaatcttgatctagtatgtcgcgctcaccagcttgtacaagaaggtctcaagtacatgttccaagataaaggtcttgtaactgtgtggtctgcgcctaattactgctaccgttgtgggaatgtggcttctatattgagtttcaatgacaacatggaaagggaagtgaagttcttcacggagacagaagagaacaatcaaatgagagggccaaggacaggtgttccttatttcctgtgattcatgatgatgatcctacatcattattagtctcgtattgctcttatcaagttagccattatcatgattgccattggcttatgttctttcaaggtatatcttctgatgttgtttacacttccattgttttttttttcctttttccattttggaaacattttcttgtgaaagtgaatgtcactttggtaattttagtggttttgatgcactttaacctgaacctcttctggatgttattattatacgtgctttctttcttgttttgtttcatctttgttctgtaagcaagacc

SEQ ID NO: 76917 - protein, 303 aa, Arabidopsis thaliana; identical to SEQ ID NO: 71888
  peptide (1)..(303): Ceres Seq. ID no. 12396335

SEQ ID NO: 76918 - protein, 245 aa, Arabidopsis thaliana; identical to SEQ ID NO: 71889
  peptide (1)..(245): Ceres Seq. ID no. 12396336

SEQ ID NO: 76919 - protein, 228 aa, Arabidopsis thaliana; identical to SEQ ID NO: 23042
  peptide (1)..(228): Ceres Seq. ID no. 12396337

SEQ ID NO: 76920 - DNA, 818 bp, Arabidopsis thaliana
  misc_feature (1)..(818): Ceres Seq. ID no. 12420656
  misc_feature (1)..(818): Ortholog of  Ceres SEQ ID NO 13598227 as cited in SEQ ID NO 61591
  misc_feature (1)..(818): Ortholog of  Ceres SEQ ID NO 12584790 as cited in SEQ ID NO 62648
  misc_feature (1)..(818): Ortholog of  Ceres SEQ ID NO 15178116 as cited in SEQ ID NO 0
ccacgaattccccaccaccatctctattttcttcctttcccctaagtcttggttcttcttctctctaatacgagaagaaaaaggcgaaaacctcgccaatccgattacgcgaaaaatcaaaggtttttggatatggcgtcgaagcggatcttgaaggaattgaaggatctccagaaggatccacctacatcatgtagcgcaggtcctgttgctgaagacatgtttcactggcaggcaacgataatgggtccttcagagagtccttatgctggaggtgttttccttgtaaccatccatttccctccggattacccattcaagcctcctaaggtggcctttaggaccaaggtgttccatcccaacattaacagcaacggtagcatttgcctcgacatcttgaaggagcagtggagtcctgcgctcaccatttccaaggtgctgctatcgatctgttctttgttaaccgatccaaacccggatgatcctttggtgcccgagatagctcacatgtacaagactgacaagaacaagtacgagtccactgcacgaagctggactcagaagtatgccatgggctaaatggaaaatcccacctactaaattatctctttatgaagaaaaaaatctgccttaatttctatgtatgattcgatagacatctctttgtgtccttttaactttctgaagacaggaccaaatgaagtgggtcttgttttaaacgaaacaaaaaaaaacatcatctttgtgaaaactagaatctgatcatcttctgttgtttcttcttgtggtgaaattatgatttgatgttaaaggaattc

SEQ ID NO: 76921 - protein, 148 aa, Arabidopsis thaliana; identical to SEQ ID NO: 24844
  peptide (1)..(148): Ceres Seq. ID no. 12420657

SEQ ID NO: 76922 - protein, 119 aa, Arabidopsis thaliana; identical to SEQ ID NO: 24845
  peptide (1)..(119): Ceres Seq. ID no. 12420658

SEQ ID NO: 76923 - protein, 111 aa, Arabidopsis thaliana; identical to SEQ ID NO: 24846
  peptide (1)..(111): Ceres Seq. ID no. 12420659

SEQ ID NO: 76924 - DNA, 911 bp, Arabidopsis thaliana
  misc_feature (1)..(911): Ceres Seq. ID no. 12420894
  misc_feature (1)..(911): Ortholog of  Ceres SEQ ID NO 13504237 as cited in SEQ ID NO 100
  misc_feature (1)..(911): Ortholog of  Ceres SEQ ID NO 15176643 as cited in SEQ ID NO 57825
  misc_feature (1)..(911): Ortholog of  Ceres SEQ ID NO 12598265 as cited in SEQ ID NO 65873
  misc_feature (1)..(911): Ortholog of  Ceres SEQ ID NO 15180736 as cited in SEQ ID NO 0
ctcttaaagcttctcgttttctctgccgtctctctcattcgcgcgacgcaaacgatcttcagccatggccaccgccgcagatgttgacgctgagattcagcaggcgctcactaacgaagtcaagctcttcaaccgctggacctatgacgacgttacggtcacagacatcagtcttgttgactacattggagttcaggcagctaaacatgctacctttgttccccacaccgctggaagatactctgtgaagagattcaggaaggctcagtgccccattgttgagaggctcaccaactctctcatgatgcacgggaggaacaacggtaagaaattgatggctgtcaggatcgtcaagcacgccatggagattatccacctcttgtctgacttgaacccaattcaggtcatcattgacgccattgtcaacagtggtccacgtgaagatgctaccagaattggatctgctggtgttgttaggagacaagctgttgatatctctcctctaagacgtgttaaccaggctatcttcttgattaccactggtgctcgtgaagctgctttcagaaacatcaagactatagctgagtgccttgctgatgaattgatcaacgcagccaagggctcttccaacagctatgccatcaagaagaaggatgagattgaaagagttgccaaggctaatcgttaaggattttccctttgccctgtgcgttacaatctcgtatcaatgagtttaatgttttatcttcatttagattgaaatatgtatctcagatgtttgctcttttgttttatgaagtttatttcgtctgaactactttgaatagataaatttttgatgctttaagctgtttcgcatcagtttattgtcaatttttgaacttatctaggccacctgaagctagaaattt

SEQ ID NO: 76925 - protein, 207 aa, Arabidopsis thaliana [sequence omitted]

SEQ ID NO: 76926 - protein, 128 aa, Arabidopsis thaliana; identical to SEQ ID NO: 21374
  peptide (1)..(128): Ceres Seq. ID no. 12420896

SEQ ID NO: 76927 - protein, 127 aa, Arabidopsis thaliana
  peptide (1)..(127): Ceres Seq. ID no. 12420897
MHGRNNGKKLMAVRIVKHAMEIIHLLSDLNPIQVIIDAIVNSGPREDATRIGSAGVVRRQAVDISPLRRVNQAIFLITTGAREAAFRNIKTIAECLADELINAAKGSSNSYAIKKKDEIERVAKANR

SEQ ID NO: 76928 - DNA, 1338 bp, Arabidopsis thaliana
  misc_feature (1)..(1338): Ceres Seq. ID no. 12422548
  misc_feature (1)..(1338): Ortholog of  Ceres SEQ ID NO 15171297 as cited in SEQ ID NO 51458
agcgaagaagaaagaaaaaaaaaagcgtattcctcgtgagcactaacttctcactcattcttcttcttcagctgaatccaaatacccatttccatttttaaccgtggttggattgttttgagagttgaaggaagaagatgacgtctgacggagcaacgtcgacgtcagctgcagctgcagcagcagcgatggcgacgaggaggaaaccgtcgtggagagagagggagaacaatcggagaagagagcggcggagaagagctgttgcggcgaagatttatactggtcttagagctcaaggtaactacaatcttccaaaacattgtgacaacaatgaggttcttaaggctctttgttctgaagctggttgggttgttgaagaagacggaactacttatcgcaagggacacaagcctctacctggtgacatggctggatcatcttctcgagcaactccttactcttcccataaccaaagtcctctttcttccacttttgatagccccatcttatcttaccaagtcagtccttcctcttcttcattcccgagtccttctcgagttggtgatccacacaatatctccacaatcttccctttcctcaggaatggtggtattccttcatcgcttcctccacttagaatctcaaacagtgctcctgtcactccaccagtgtcatccccaacttctagaaaccccaaaccattgcctacttgggaatcttttaccaaacaatccatgtccatggctgctaaacagtcaatgacttctttgaactacccgttttatgcggtgtctgcacctgccagtcctactcatcatcgccagttccatgctccggctactatacctgaatgtgatgagtctgactcttccactgttgattctggtcattggataagctttcaaaagtttgcacaacaacagccattctctgcctctatggtgccaacctcgcctaccttcaatctcgtgaaacctgcaccacagcaattgtctccaaacacagcagcaatccaagagattggtcaaagctccgagtttaagtttgagaacagccaagttaagccatgggaaggggagaggatccatgatgtggctatggaggatctagagctcacgcttggaaatggtaaagctcatagttgagatgaagtatacatgaacctgttatgtcatgtcggaaggaaggattggagaatgagaattagtgtgttgttcattcagttcatggttttggttcttgttctagaatcgatattcattgtaccagtgagtttgtttcacaacgcattatttgtagatagaatgtttaagatgtatgtttctattatcattcctt

SEQ ID NO: 76929 - protein, 335 aa, Arabidopsis thaliana; identical to SEQ ID NO: 21341
  peptide (1)..(335): Ceres Seq. ID no. 12422549

SEQ ID NO: 76930 - protein, 318 aa, Arabidopsis thaliana; identical to SEQ ID NO: 21342
  peptide (1)..(318): Ceres Seq. ID no. 12422550

SEQ ID NO: 76931 - protein, 239 aa, Arabidopsis thaliana; identical to SEQ ID NO: 21343
  peptide (1)..(239): Ceres Seq. ID no. 12422551

SEQ ID NO: 76932 - DNA, 719 bp, Arabidopsis thaliana
  misc_feature (1)..(719): Ceres Seq. ID no. 12422869
  misc_feature (1)..(719): Ortholog of  Ceres SEQ ID NO 13596404 as cited in SEQ ID NO 61966
atttttcatttcatttcatttctgattgtctttctcagaatccctagaacacacactgattaacgaatcaaagatcgatttggggatcaatcgaggaagaagatgacggaggcgatgataaggaagaagccaggaatggcgagtgtgaaggatatgccgttgcttcaggatggtccaccacctggtggattcgcgccggtccgatatgctcgccggatctccaacacgggacctagcgccatggctattttccttaccgtttccggtgcttttgcttggggcatgtaccaagttggtcagggcaacaaaatccgcagggcgttgaaggaagagaagtacgctgcacgtagagcaattctaccgattcttcaagctgaagaagatgaaaggtttgtgtctgagtggaagaagtatctagaatacgaggcggatgtgatgaaggatgttcctggatggaaagtcggtgaaaacgtgtacaattctggtcgttggatgcctccagctaccggagagcttcgtcctgatgtctggtaaaatttcaatggctccttttgatgatgatgaatgaatgtttgtttaagcattttagaaccttgatgtttgttgtctctatatttccatcgtataataagagaaatgatacatacacagttcatgtattgctggtacggtacggaggaatgttttcggtatttttccctcattcacttatttctgtc

SEQ ID NO: 76933 - protein, 143 aa, Arabidopsis thaliana; identical to SEQ ID NO: 25880
  peptide (1)..(143): Ceres Seq. ID no. 12422870

SEQ ID NO: 76934 - protein, 139 aa, Arabidopsis thaliana; identical to SEQ ID NO: 25881
  peptide (1)..(139): Ceres Seq. ID no. 12422871

SEQ ID NO: 76935 - protein, 132 aa, Arabidopsis thaliana; identical to SEQ ID NO: 25882
  peptide (1)..(132): Ceres Seq. ID no. 12422872

SEQ ID NO: 76936 - DNA, 763 bp, Arabidopsis thaliana
  misc_feature (1)..(763): Ceres Seq. ID no. 12422873
  misc_feature (1)..(763): Ortholog of  Ceres SEQ ID NO 12610129 as cited in SEQ ID NO 55779
aaaaaaacacaatccctcttagaaacagagagcttctcttctttctccattattcatcactttcttccccgaagatgcgtcctttagacgagaccgagacaaccgtcgtcttcgagaagctcttcaaattcgtcggcaacaacctcaagaagatcgtcgagaacccatcagacgaaggacccgaatctacacccggcagctactgcttccgcctccagaaaaacagagtctactacgtcagcgaagccctcgtgaagcgagccacaaacatctccaggaaaaacctagtctccttcggaacctgcatcgggaaatacactcacgccggtagtttccatctgacgattatgtcactcaatatcttggcggcgaatgctaaacacaaggtatggcttaaacccacttcggagatgtcgtttctttatgggaaccatgtcttgaaaggtggattagggaggattactgatagtattgttcctggagatggtgttgttgtgttctcgatgtctgatgttccgttagggtttgggattgctgcgaagagtacacaggattgtaggaaattggatcctaatggtattgttgtgcttcatcaggctgatattggagagtatttgaggggtgaagatgacctttgaaagtttaaaggttttgtctttgttgtgtcttagtttgattctgcttgttgctttgagttttaaagtatgtagctgttacaagtttcgtggaacttggttctggatctatgaaagtctcgattttt

SEQ ID NO: 76937 - protein, 211 aa, Arabidopsis thaliana
  peptide (1)..(211): Ceres Seq. ID no. 12422874
KNTIPLRNRELLFFLHYSSLSSPKMRPLDETETTVVFEKLFKFVGNNLKKIVENPSDEGPESTPGSYCFRLQKNRVYYVSEALVKRATNISRKNLVSFGTCIGKYTHAGSFHLTIMSLNILAANAKHKVWLKPTSEMSFLYGNHVLKGGLGRITDSIVPGDGVVVFSMSDVPLGFGIAAKSTQDCRKLDPNGIVVLHQADIGEYLRGEDDL

SEQ ID NO: 76938 - protein, 187 aa, Arabidopsis thaliana
  peptide (1)..(187): Ceres Seq. ID no. 12422875
MRPLDETETTVVFEKLFKFVGNNLKKIVENPSDEGPESTPGSYCFRLQKNRVYYVSEALVKRATNISRKNLVSFGTCIGKYTHAGSFHLTIMSLNILAANAKHKVWLKPTSEMSFLYGNHVLKGGLGRITDSIVPGDGVVVFSMSDVPLGFGIAAKSTQDCRKLDPNGIVVLHQADIGEYLRGEDDL

SEQ ID NO: 76939 - DNA, 677 bp, Arabidopsis thaliana
  misc_feature (1)..(677): Ceres Seq. ID no. 12466044
  misc_feature (1)..(677): Ortholog of  Ceres SEQ ID NO 13595226 as cited in SEQ ID NO 56331
  misc_feature (1)..(677): Ortholog of  Ceres SEQ ID NO 13661903 as cited in SEQ ID NO 61722
  misc_feature (1)..(677): Ortholog of  Ceres SEQ ID NO 15173940 as cited in SEQ ID NO 61934
aaaacaatcaagaaccactctttcgtgtcgcaataacaataagaaagaaagaaaaagaaaaccagagatggcgatgacgacagcatctacggtatttgttctaccggccaatgtcacctcggtcgccggcgcttcgtcgtccaggagctccgtgtctttcttgccgatgagaaacgccggttctaggctcgtagtcagggcagccgaagatcctgctccggcttcctcttcttcaaaagattctccggcagctgccgctgctccggatggagctactgccaccaaacccaagccaccaccgattggtcctaagagagggtctaaggtcaagattctaaggagagaatcctattggttcaagaacgttggatcagttgttgccgttgatcaggaccctaagactcgatacccggttgtggtccggttcgcaaaagtcaattacgccaacatatcgaccaacaactatgcattggatgaggtcgaagaagttgcagcttaaatgggagaattcaaaaactctgtgtattctataccggtttatccgtttgtaacttgacccaaaccgtatgtaccgcaaaagtttaccaattatttctcctcatctgaatctcgagccggttttcttattctttcacagaatgtgtttggaaaattcagttaaaagtctctttctactc

SEQ ID NO: 76940 - protein, 165 aa, Arabidopsis thaliana; identical to SEQ ID NO: 43772
  peptide (1)..(165): Ceres Seq. ID no. 12466045

SEQ ID NO: 76941 - protein, 143 aa, Arabidopsis thaliana; identical to SEQ ID NO: 43773
  peptide (1)..(143): Ceres Seq. ID no. 12466046

SEQ ID NO: 76942 - protein, 141 aa, Arabidopsis thaliana; identical to SEQ ID NO: 43774
  peptide (1)..(141): Ceres Seq. ID no. 12466047

SEQ ID NO: 76943 - DNA, 605 bp, Arabidopsis thaliana
  misc_feature (1)..(605): Ceres Seq. ID no. 12481828
  misc_feature (1)..(605): Ortholog of  Ceres SEQ ID NO 13624571 as cited in SEQ ID NO 0
gctcttcttgtcaaaggttgaggagaaattcccaaaagactcagagctgattgttgcttgccaaaaaggattgagatccttagctgcttgcgagctactatataatgcagggtatgagaatctgttctgggtacaaggtggtttagaatctgctcaagacgaggatctagtgacagaaggtgtccaacccttgaagcttgctggtattggaggtttttcagagttcctcggttggacagaccagcaaagagctcaagctgcgaaagaaggttgggggtaccgtttggtatatactgctcgtctgtttggagttgttctggctgctgatgctttgttcgttggggctcagcaactaggccattatgttcaggagttaagaggccattaggatctctctttaaccacgctccaagtggctatatttctcttcaacaaaaaaaaaaatgtaaattctgttgaaaagttttggaaggtagagtagttgaaatagatcaaaaatacatctttgaatcctgaaattccaatggcaaacttaccctttgctttataccaagatccgtattatccaaagaataatttgcttatataaaaaagaaaattcgttg

SEQ ID NO: 76944 - protein, 128 aa, Arabidopsis thaliana
  peptide (1)..(128): Ceres Seq. ID no. 12481829
LFLSKVEEKFPKDSELIVACQKGLRSLAACELLYNAGYENLFWVQGGLESAQDEDLVTEGVQPLKLAGIGGFSEFLGWTDQQRAQAAKEGWGYRLVYTARLFGVVLAADALFVGAQQLGHYVQELRGH

SEQ ID NO: 76945 - DNA, 937 bp, Arabidopsis thaliana
  misc_feature (1)..(937): Ceres Seq. ID no. 12481904
  misc_feature (1)..(937): Ortholog of  Ceres SEQ ID NO 13596509 as cited in SEQ ID NO 62004
atgaccagagaattcgaactggaaaataactaccagctttgcgacgagatcggcagaggtagattcggaacaatcactcgctgtttctcaccggcgactaaagaattctacgcctgcaaaaccatcgacaagcgcgtgctcaccgacgcgttagatcgcgagtgtatagagacggagccgaggatcatggcgatgttaccgccgcatccgaatatcatcaggatcttcgatctctacgaaacagaggattctcttgcgatcgtcatggaattagtcgatccgccgatgacgatttacgatcggttaatctccgccggggggaggttatcagaatcagaatccgcctcatacgcgaaacagatcctccgtgcgcttgctcattgtcatcggtgcgacgtcgttcatcgggatgtgaaacctgacaacgtcttagtcgatctcgtaagcggcggtgttaagctctgtgatttcggatcagcggtgtggttaggcggagaaacggcggagggagttgtgggaacaccgtattacgtggcgccggaggtagtgatggggaggaagtacgacgagaaggttgatatatggagcgctggtgtagtgatatacacgatgctagctggagaaccgccgtttaacggtgagacggcggaagatatatttgaatcgatattgagagggaatttgaggtttccgccgaagaagtttgggtctgtatcatcggaagcgaaggatttgttgaggaaaatgatatgtcgcgatgtttctcgacgattttctgcagaggatgctcttcgacattcatggatgatgaacgttggaaacctccaaagcaattagtcgaagcttttcagatatgtgattagagaagtcgtaatatagatgtgagtgtgtaattgcttgattcgaatagtcaaacgtagttgtgtgtttcagcaat

SEQ ID NO: 76946 - protein, 278 aa, Arabidopsis thaliana
  peptide (1)..(278): Ceres Seq. ID no. 12481905
MTREFELENNYQLCDEIGRGRFGTITRCFSPATKEFYACKTIDKRVLTDALDRECIETEPRIMAMLPPHPNIIRIFDLYETEDSLAIVMELVDPPMTIYDRLISAGGRLSESESASYAKQILRALAHCHRCDVVHRDVKPDNVLVDLVSGGVKLCDFGSAVWLGGETAEGVVGTPYYVAPEVVMGRKYDEKVDIWSAGVVIYTMLAGEPPFNGETAEDIFESILRGNLRFPPKKFGSVSSEAKDLLRKMICRDVSRRFSAEDALRHSWMMNVGNLQSN

SEQ ID NO: 76947 - protein, 216 aa, Arabidopsis thaliana
  peptide (1)..(216): Ceres Seq. ID no. 12481906
MAMLPPHPNIIRIFDLYETEDSLAIVMELVDPPMTIYDRLISAGGRLSESESASYAKQILRALAHCHRCDVVHRDVKPDNVLVDLVSGGVKLCDFGSAVWLGGETAEGVVGTPYYVAPEVVMGRKYDEKVDIWSAGVVIYTMLAGEPPFNGETAEDIFESILRGNLRFPPKKFGSVSSEAKDLLRKMICRDVSRRFSAEDALRHSWMMNVGNLQSN

SEQ ID NO: 76948 - protein, 214 aa, Arabidopsis thaliana
  peptide (1)..(214): Ceres Seq. ID no. 12481907
MLPPHPNIIRIFDLYETEDSLAIVMELVDPPMTIYDRLISAGGRLSESESASYAKQILRALAHCHRCDVVHRDVKPDNVLVDLVSGGVKLCDFGSAVWLGGETAEGVVGTPYYVAPEVVMGRKYDEKVDIWSAGVVIYTMLAGEPPFNGETAEDIFESILRGNLRFPPKKFGSVSSEAKDLLRKMICRDVSRRFSAEDALRHSWMMNVGNLQSN

SEQ ID NO: 76949 - DNA, 2244 bp, Arabidopsis thaliana
  misc_feature (1)..(2244): Ceres Seq. ID no. 12482026
  misc_feature (1)..(2244): Ortholog of  Ceres SEQ ID NO 15171406 as cited in SEQ ID NO 51661
actggtcgtctctccacgtgtaccggaaaatgaatgaagatccttaaaaacacgccggagtgaaaccgagccaccattgtttttttccaaatctgccagagtccgtaccatgtccaccatgcctccacaatttcccttggagatccgctcagctcttcgccgggcttcctccaccgtctatctccaccgttccatcagcaccgtcactactactccttcgtttcgtcaccgaacgacgttgttacgaccgagagctttctcttcttcctctgttaagctccccacgaaaccttctctttgcaccgccgacgagcttcattacgtctccgttcctaacaccgattggcgtctcgctctctggcgctacttgcctcctcctcaggctccgacgaggaatcatccattgttactgttgtctggagtaggaactaatgccatcggatatgatttatctcctggttgctcttttgcaaggcatatgtctggacagggatttgagacttggattctcgaggttcgtggagctggattgagtacacgagtatctgatcttaaggacgttgaggaatctgctcatgaattgtcgaatcagatagaatctactgctagagctgctgcaggtaaagaaacttgttctgatgaaaagcagactactgatattatggacagtagtgcacctgcaccagcgtcggatgtttcagttgttggcgaagcatcggcttgggacgagtcacagcttgtggcgagattgacatcaactttcatgagtttgtcagaaagactttctggctttctcagtgaaggtcagtctgtgttcatgtctgctaagttgtttgacaaaattgcaatgcttgtagatgatacacagctgtacgagcgctttaatgatataagatcgaagcttttgagtttgatagagtcaaagcaaaactcaggacttgttaaccaagtcagagatttggctcagcgccttgtgaatcttttcgacgatggtcaaaggtctgtctcgcctccgctgattgatttacaagagcgcctcactgcgaccatagaagattttcagaagcaactggatttgatagttaaatatgactgggattttgatcactacctggaagaggatgtccctgctgcgattgagtatgtaagagcacaaagcaagcccaaggacggcaaactattcgcaattgggcactccatggggggtatcctactctatgcaatgctatcacgttgtgcttttgaaggacgagaaccttccgtggcagctgtggcaactctggcatcatcggttgattacacaacctcaaattctgcactcaaattgctcatacctcttgccaatcctgcagaagctctgagtgttccagttgttcctctgggtgctttgttggctgccgcttttcctctttcgacacgtcctccatatgtattatcttggcttaatgatttgatatcatcaacagatatgatgcaccctgaaatgttagaaaagcttgtcttgaataacttctgtaccatacctgcaaaactacttattcagctgacaacggcctttcgagagggaggcttacgtgatcgtagtggtaaattttactataaggatcatcttcccagaaccagtgtccctgtcttagctcttgcaggtgatcgggacttgatctgcccccctgcggctgtggaagacactgttaagctgtttccggagaacttggtcacttataagttacttggagaaccagatggaccacattatgcacactatgatttggttggaggacgactggcagtggagcaagtctatccttgcataactgaatttcttagccaccatgattccgcataagtgaaacatttcgggagtttctgttccttgcatgctatagcacatgtagattgtagacgtcgcactaaggtggtgtcgaagaagtgtgtttcagaagcgcctgttaaaaaggatgccatttccgtttaagacacgtacatttagtatctgggcaaactgtacatgagcttaggatgcagttttttcaagtcatacacctgtaaattaggaaaagcatcgaatgagatgctggaagctcttgtctactgtgatgatttcccttgttttgttatggcaacgagctttttatttgaacatttatctttagaagaactggtgtgttctcttgtactgctttgcttcttttggaggacttgagttatccatgagagcaattgtatagacatggatttatgtgt

SEQ ID NO: 76950 - protein, 578 aa, Arabidopsis thaliana
  peptide (1)..(578): Ceres Seq. ID no. 12482027
MSTMPPQFPLEIRSALRRASSTVYLHRSISTVTTTPSFRHRTTLLRPRAFSSSSVKLPTKPSLCTADELHYVSVPNTDWRLALWRYLPPPQAPTRNHPLLLLSGVGTNAIGYDLSPGCSFARHMSGQGFETWILEVRGAGLSTRVSDLKDVEESAHELSNQIESTARAAAGKETCSDEKQTTDIMDSSAPAPASDVSVVGEASAWDESQLVARLTSTFMSLSERLSGFLSEGQSVFMSAKLFDKIAMLVDDTQLYERFNDIRSKLLSLIESKQNSGLVNQVRDLAQRLVNLFDDGQRSVSPPLIDLQERLTATIEDFQKQLDLIVKYDWDFDHYLEEDVPAAIEYVRAQSKPKDGKLFAIGHSMGGILLYAMLSRCAFEGREPSVAAVATLASSVDYTTSNSALKLLIPLANPAEALSVPVVPLGALLAAAFPLSTRPPYVLSWLNDLISSTDMMHPEMLEKLVLNNFCTIPAKLLIQLTTAFREGGLRDRSGKFYYKDHLPRTSVPVLALAGDRDLICPPAAVEDTVKLFPENLVTYKLLGEPDGPHYAHYDLVGGRLAVEQVYPCITEFLSHHDSA

SEQ ID NO: 76951 - protein, 575 aa, Arabidopsis thaliana
  peptide (1)..(575): Ceres Seq. ID no. 12482028
MPPQFPLEIRSALRRASSTVYLHRSISTVTTTPSFRHRTTLLRPRAFSSSSVKLPTKPSLCTADELHYVSVPNTDWRLALWRYLPPPQAPTRNHPLLLLSGVGTNAIGYDLSPGCSFARHMSGQGFETWILEVRGAGLSTRVSDLKDVEESAHELSNQIESTARAAAGKETCSDEKQTTDIMDSSAPAPASDVSVVGEASAWDESQLVARLTSTFMSLSERLSGFLSEGQSVFMSAKLFDKIAMLVDDTQLYERFNDIRSKLLSLIESKQNSGLVNQVRDLAQRLVNLFDDGQRSVSPPLIDLQERLTATIEDFQKQLDLIVKYDWDFDHYLEEDVPAAIEYVRAQSKPKDGKLFAIGHSMGGILLYAMLSRCAFEGREPSVAAVATLASSVDYTTSNSALKLLIPLANPAEALSVPVVPLGALLAAAFPLSTRPPYVLSWLNDLISSTDMMHPEMLEKLVLNNFCTIPAKLLIQLTTAFREGGLRDRSGKFYYKDHLPRTSVPVLALAGDRDLICPPAAVEDTVKLFPENLVTYKLLGEPDGPHYAHYDLVGGRLAVEQVYPCITEFLSHHDSA

SEQ ID NO: 76952 - protein, 455 aa, Arabidopsis thaliana
  peptide (1)..(455): Ceres Seq. ID no. 12482029
MSGQGFETWILEVRGAGLSTRVSDLKDVEESAHELSNQIESTARAAAGKETCSDEKQTTDIMDSSAPAPASDVSVVGEASAWDESQLVARLTSTFMSLSERLSGFLSEGQSVFMSAKLFDKIAMLVDDTQLYERFNDIRSKLLSLIESKQNSGLVNQVRDLAQRLVNLFDDGQRSVSPPLIDLQERLTATIEDFQKQLDLIVKYDWDFDHYLEEDVPAAIEYVRAQSKPKDGKLFAIGHSMGGILLYAMLSRCAFEGREPSVAAVATLASSVDYTTSNSALKLLIPLANPAEALSVPVVPLGALLAAAFPLSTRPPYVLSWLNDLISSTDMMHPEMLEKLVLNNFCTIPAKLLIQLTTAFREGGLRDRSGKFYYKDHLPRTSVPVLALAGDRDLICPPAAVEDTVKLFPENLVTYKLLGEPDGPHYAHYDLVGGRLAVEQVYPCITEFLSHHDSA

SEQ ID NO: 76953 - DNA, 1703 bp, Arabidopsis thaliana
  misc_feature (1)..(1703): Ceres Seq. ID no. 12482154
  misc_feature (1)..(1703): Ortholog of  Ceres SEQ ID NO 13647016 as cited in SEQ ID NO 20325
  misc_feature (1)..(1703): Ortholog of  Ceres SEQ ID NO 13657872 as cited in SEQ ID NO 66357
ggcaaatctctccgtttcttatttttcttctcctttcccatttattttctgtgtcccttgtttggttccagagaaaccgcgagaaacaaaaaaatcagagaagaagaagagaaaacaaaaaaaaaaatctgtcttcttcccgtcgtttaacgctttcagtttcgaaagttgtatctgcatttttctcagggtctatatttctctgaggaattggattcttatagaagttaaaccgcagagcttcttctatccaatagtcctctgagaatcgtcgatatagtttgctgatatagttgttatggacatgaaatctggtcactcgtctcctgtaatgactgattctccaccaataagcaactcaagattaaccattcgtcagaatagacttccttactcatcagcagcagccacggctatctcacagaacaacaatctcttactaaccgttccaagaaagaaaactgggatccttgatgatgttaagtctaatggttggcttgatgcgatgaaatcttcttctcctcctcctacaatacttaacaaagataacttaagcaatgatgctacggatatgacttatcgcgaatggatgcagctcaagtatccatcagctcttacctcttttgagaaaatcatgagttttgcaaaaggcaaaagaatagcattgtttcttgattatgacgggacactttcgcctattgttgaggaacctgattgtgcatacatgtcaagtgctatgcgtagtgcagtgcaaaatgttgccaagtatttccctaccgcgatcattagtggaagaagccgggataaggtgtatgagtttgttaatttgagtgaactttattacgccggaagccatggaatggacatcatgagtcccgcaggagaatctttaaaccatgaacatagccgtactgtatcagtttacgaacaggggaaagatgtaaatctattccagcctgctagcgagtttctcccgatgatcgataaggtgctttgttctcttatagagagtacaaaagatatcaaaggggtaaaagtagaagacaacaagttctgcatctctgtgcattaccgcaatgtagaagaaaagaactggacattggttgcacagtgtgtagatgatgtcatcagaacatatccaaaactacggctaacacatggccggaaggttttagagatccgtcctgtgattgactgggacaaagggaaagctgtgacatttctacttgaatcactcggcctaaacaactgtgaggatgttcttccaatctatgttggggatgatcgaacagacgaagatgcatttaaggtactacgagatggaccaaaccacggttatggtatattagtctctgctgtgcctaaagacagcaatgccttttactcgcttcgtgacccgtctgaggtgatggagtttctgaagtcattggtgacatggaagagatcaatgggttaaagtagaagaagaagatgtagaagaaaagtggttaacgttaatatatattacaaatatgcaagttagaggtttattgttacttttcggctttatacaaaaactaccgttgagatttaacttaacggtatcggaggagagatcacatgatggcttaaaacatgccggagatactttttccgaccaatctctttatcttctacaactgtaaattcctccatctccggattaattcaagacatttttgttt

SEQ ID NO: 76954 - protein, 385 aa, Arabidopsis thaliana
  peptide (1)..(385): Ceres Seq. ID no. 12482155
MDMKSGHSSPVMTDSPPISNSRLTIRQNRLPYSSAAATAISQNNNLLLTVPRKKTGILDDVKSNGWLDAMKSSSPPPTILNKDNLSNDATDMTYREWMQLKYPSALTSFEKIMSFAKGKRIALFLDYDGTLSPIVEEPDCAYMSSAMRSAVQNVAKYFPTAIISGRSRDKVYEFVNLSELYYAGSHGMDIMSPAGESLNHEHSRTVSVYEQGKDVNLFQPASEFLPMIDKVLCSLIESTKDIKGVKVEDNKFCISVHYRNVEEKNWTLVAQCVDDVIRTYPKLRLTHGRKVLEIRPVIDWDKGKAVTFLLESLGLNNCEDVLPIYVGDDRTDEDAFKVLRDGPNHGYGILVSAVPKDSNAFYSLRDPSEVMEFLKSLVTWKRSMG

SEQ ID NO: 76955 - protein, 383 aa, Arabidopsis thaliana
  peptide (1)..(383): Ceres Seq. ID no. 12482156
MKSGHSSPVMTDSPPISNSRLTIRQNRLPYSSAAATAISQNNNLLLTVPRKKTGILDDVKSNGWLDAMKSSSPPPTILNKDNLSNDATDMTYREWMQLKYPSALTSFEKIMSFAKGKRIALFLDYDGTLSPIVEEPDCAYMSSAMRSAVQNVAKYFPTAIISGRSRDKVYEFVNLSELYYAGSHGMDIMSPAGESLNHEHSRTVSVYEQGKDVNLFQPASEFLPMIDKVLCSLIESTKDIKGVKVEDNKFCISVHYRNVEEKNWTLVAQCVDDVIRTYPKLRLTHGRKVLEIRPVIDWDKGKAVTFLLESLGLNNCEDVLPIYVGDDRTDEDAFKVLRDGPNHGYGILVSAVPKDSNAFYSLRDPSEVMEFLKSLVTWKRSMG

SEQ ID NO: 76956 - protein, 374 aa, Arabidopsis thaliana
  peptide (1)..(374): Ceres Seq. ID no. 12482157
MTDSPPISNSRLTIRQNRLPYSSAAATAISQNNNLLLTVPRKKTGILDDVKSNGWLDAMKSSSPPPTILNKDNLSNDATDMTYREWMQLKYPSALTSFEKIMSFAKGKRIALFLDYDGTLSPIVEEPDCAYMSSAMRSAVQNVAKYFPTAIISGRSRDKVYEFVNLSELYYAGSHGMDIMSPAGESLNHEHSRTVSVYEQGKDVNLFQPASEFLPMIDKVLCSLIESTKDIKGVKVEDNKFCISVHYRNVEEKNWTLVAQCVDDVIRTYPKLRLTHGRKVLEIRPVIDWDKGKAVTFLLESLGLNNCEDVLPIYVGDDRTDEDAFKVLRDGPNHGYGILVSAVPKDSNAFYSLRDPSEVMEFLKSLVTWKRSMG

SEQ ID NO: 76957 - DNA, 1494 bp, Arabidopsis thaliana
  misc_feature (1)..(1494): Ceres Seq. ID no. 12482196
  misc_feature (1)..(1494): Ortholog of  Ceres SEQ ID NO 15170447 as cited in SEQ ID NO 52849
  misc_feature (1)..(1494): Ortholog of  Ceres SEQ ID NO 13589042 as cited in SEQ ID NO 60626
  misc_feature (1)..(1494): Ortholog of  Ceres SEQ ID NO 14302887 as cited in SEQ ID NO 66146
acgacctttcaatacaaaatcagatcatcgtcgtgtgtttaactttaacgaatctaggttttattgaatctcgacatgtcggaggagaaagtcgtcgctgtgatcatggttggtggtccgaccaaaggaactcgatttcgcccgttatcgttcaatacaccgaaaccattgattcctttggctggtcaacctatgattcatcatcctatctctgcttgtaaaaagatatcaaatctggctcagatttttctgattggattttacgaggaacgagaatttgctttgtatgtgtcttcaatatctaacgagctgaaaattccagtgcgatacttgaaagaagataaaccccatggttcagctggtgctctttattactttcgtgatagaattatggaagagaaaccgtcacatgttttcctcctcaactgtgatgtttgctgttctttccctcttcaaggcatacttgacgcacatcgaagatatggtggtattggaactatgctagtaatcaaggtttctgcagaagcagctagccaatttggtgaattgatagctgatcctgatactaaagaactcctgcattatacagagaagcccgagactttcgtcagtgacttgataaactgtggtgtctatgtgtttacttcagatatcttcaatgcaattgaagaagtatatagccaaataagagacacatctagcaactaccaatccgctacaaggtctgttcctgcagattttgtgagattagatcaagatatattgtcacctcttgctggaaagaagcaactatacacatatgagaacaaggatttctgggaacagatcaagactccggggaaatctttgaaatgctcggctttatatctttcccaattccgcgaaacatcgcctcatattttagcttcaggagatggtactaataggaaaccaactataattggtgatgtttatattcacccatccgtaaaactgcatccaaccgcaaagatcggtccaaatgtgtcgatatcagcaaatgttcgtgttggacctggtgtaaggcttattagctgcataatcttagacgatgttgaaatcaaggagaatgctgttgttataaactcaattatcggatggaaatcttctataggtagatggtcaagagttcaagctagtggagattacaatgacaggcttgggattaccattcttggtgaggctgtaactgtggaagatgaagtagcagtcataggaagcattgttctccagaataagactcttaatgttagtgttcaagatgatatcatcttgtgatttatcacaatgattatcgtttggattttttttctttttaattgaaacagagaaacttttacagaattgtgtattacatgaattgagttcacaggattagattttgagtaagtgaaactatggaagatttgtaaactctcactgtactttgtgtttagatactaaaaagattttagaagaaagagttttaaaagatct

SEQ ID NO: 76958 - protein, 406 aa, Arabidopsis thaliana
  peptide (1)..(406): Ceres Seq. ID no. 12482197
MSEEKVVAVIMVGGPTKGTRFRPLSFNTPKPLIPLAGQPMIHHPISACKKISNLAQIFLIGFYEEREFALYVSSISNELKIPVRYLKEDKPHGSAGALYYFRDRIMEEKPSHVFLLNCDVCCSFPLQGILDAHRRYGGIGTMLVIKVSAEAASQFGELIADPDTKELLHYTEKPETFVSDLINCGVYVFTSDIFNAIEEVYSQIRDTSSNYQSATRSVPADFVRLDQDILSPLAGKKQLYTYENKDFWEQIKTPGKSLKCSALYLSQFRETSPHILASGDGTNRKPTIIGDVYIHPSVKLHPTAKIGPNVSISANVRVGPGVRLISCIILDDVEIKENAVVINSIIGWKSSIGRWSRVQASGDYNDRLGITILGEAVTVEDEVAVIGSIVLQNKTLNVSVQDDIIL

SEQ ID NO: 76959 - protein, 396 aa, Arabidopsis thaliana
  peptide (1)..(396): Ceres Seq. ID no. 12482198
MVGGPTKGTRFRPLSFNTPKPLIPLAGQPMIHHPISACKKISNLAQIFLIGFYEEREFALYVSSISNELKIPVRYLKEDKPHGSAGALYYFRDRIMEEKPSHVFLLNCDVCCSFPLQGILDAHRRYGGIGTMLVIKVSAEAASQFGELIADPDTKELLHYTEKPETFVSDLINCGVYVFTSDIFNAIEEVYSQIRDTSSNYQSATRSVPADFVRLDQDILSPLAGKKQLYTYENKDFWEQIKTPGKSLKCSALYLSQFRETSPHILASGDGTNRKPTIIGDVYIHPSVKLHPTAKIGPNVSISANVRVGPGVRLISCIILDDVEIKENAVVINSIIGWKSSIGRWSRVQASGDYNDRLGITILGEAVTVEDEVAVIGSIVLQNKTLNVSVQDDIIL

SEQ ID NO: 76960 - protein, 367 aa, Arabidopsis thaliana
  peptide (1)..(367): Ceres Seq. ID no. 12482199
MIHHPISACKKISNLAQIFLIGFYEEREFALYVSSISNELKIPVRYLKEDKPHGSAGALYYFRDRIMEEKPSHVFLLNCDVCCSFPLQGILDAHRRYGGIGTMLVIKVSAEAASQFGELIADPDTKELLHYTEKPETFVSDLINCGVYVFTSDIFNAIEEVYSQIRDTSSNYQSATRSVPADFVRLDQDILSPLAGKKQLYTYENKDFWEQIKTPGKSLKCSALYLSQFRETSPHILASGDGTNRKPTIIGDVYIHPSVKLHPTAKIGPNVSISANVRVGPGVRLISCIILDDVEIKENAVVINSIIGWKSSIGRWSRVQASGDYNDRLGITILGEAVTVEDEVAVIGSIVLQNKTLNVSVQDDIIL

SEQ ID NO: 76961 - DNA, 772 bp, Arabidopsis thaliana
  misc_feature (1)..(772): Ceres Seq. ID no. 12482211
  misc_feature (1)..(772): Ortholog of  Ceres SEQ ID NO 13595613 as cited in SEQ ID NO 59866
agacaaagtaaggaggccagatagcagacccgtctctctccgtctccgtctccgtctccgccatgaccagctcttccgctccttcacgcaaggctttaagcaagatcgcgtgtaataggttgcagaaagagctttctgagtggcaattgaatcccccctctggatttcgtcacaaagtcactgataatcttcaaaaatggacaatagatgttaccggagctccagggacgctttacgctaatgagacttatcagcttcaggttgaatttcctgaacattaccctatggaagcaccccaggtagtgtttgtttctccggcaccttcacatccacatatttacagcaatggacatatttgtttagatattctatatgactcatggtcaccagcaatgacagtgaattcagtctgcatcagcattctttcgatgctatcaagttcacccgcaaagcaacgccctgcggataacgatcgttatgtgaagaactgtaagaatgggaggtctcctaaggagacgaggtggtggttccatgacgacaaggtttgatgcaccaccaagattaaagagaagcctttatatgttaatgatgacatttaaaaatgtcaaaacctaactttttgtctcactcttactgtggaatatgtcaagtgaagagctctgaattatataagagaacactgagagccggaatctacatttcgtactgaacatgtgcacaaaaagattaattaatgctaaacaataagttgtcattaatgccaatagttatt

SEQ ID NO: 76962 - protein, 161 aa, Arabidopsis thaliana
  peptide (1)..(161): Ceres Seq. ID no. 12482212
MTSSSAPSRKALSKIACNRLQKELSEWQLNPPSGFRHKVTDNLQKWTIDVTGAPGTLYANETYQLQVEFPEHYPMEAPQVVFVSPAPSHPHIYSNGHICLDILYDSWSPAMTVNSVCISILSMLSSSPAKQRPADNDRYVKNCKNGRSPKETRWWFHDDKV

SEQ ID NO: 76963 - protein, 87 aa, Arabidopsis thaliana
  peptide (1)..(87): Ceres Seq. ID no. 12482213
MEAPQVVFVSPAPSHPHIYSNGHICLDILYDSWSPAMTVNSVCISILSMLSSSPAKQRPADNDRYVKNCKNGRSPKETRWWFHDDKV

SEQ ID NO: 76964 - DNA, 1834 bp, Arabidopsis thaliana
  misc_feature (1)..(1834): Ceres Seq. ID no. 12482247
  misc_feature (1)..(1834): Ortholog of  Ceres SEQ ID NO 15177258 as cited in SEQ ID NO 51386
gtaatttagctttcacaacaaaaaaactcttttctttttgtctgctcgtttttcttttcataatgggagccttggaagcagaaagagccgccaacaatgccacggcgttagagacacagtcgtcaccggaagatctcagtcaaccatctcctctgcgtaagatcatctccgtcgcttcaatcgccgccggtgtacagttcgggtgggccttacagctttctcttctgactccttacatacaactcctcgggatccctcacaaatggtcgtcttacatgtggctttgtggtcctatctccggcatgattgttcaaccgatcgtcggttaccacagtgaccgatgcgagtccagattcggtcgccgtcgtcctttcattgccgccggagtcgcactcgtagccgtctcggttttccttatcggattcgcggcggatatgggacatagttttggagataaactcgagaacaaggtaaggactcgagccattataatcttcctaaccgggttttggttcctcgacgtggctaacaacaccttacaaggaccatgccgtgctttcttagccgatttagccgccggagacgctaaaaaaacgcgagtcgcaaacgcgtgtttctccttctttatggcggttggaaacgttttgggttacgctgctggatcttacactaaccttcacaaaatgtttcctttcacaatgacaaaagcttgcgacatctattgtgcgaatctcaagacttgtttcttcttatccatcactctcctccttatcgtcacattctcgtctctatggtacgttaaagacaaacaatggtctccacctcaaggagacaaggaggagaaaacatcaagtctttttttctttggagaaatctttggagctgttagacacatgaaacgtcccatggtgatgcttctaattgtcacggtcattaattggatcgcttggtttccatttattttgtatgataccgattggatgggtcgtgaagtgtacggtggaaactcagatggagatgaacgatcgaagaaactttacgaccaaggagttcaggctggtgcattgggattgatgtttaattctatacttcttggtttcgtgtcacttggtgttgaatcgattggtcggaaaatgggaggagctaaacgactatggggatgtgtgaatttcatactcgccataggtttggccatgacggttcttgttactaaatcggctgagcatcaccgggaaatcgccggtcctttagccggaccaagcagtggtattaaagccggagtatttagtctctttaccgttcttggtatcccattggccattacttacagtattccatttgcactagcgtccattttctcaaccaattccggtgccggccaaggactttcattaggcgttttaaatatagcaatatgtataccacaaatgatagtatcattctcaagtggaccattggacgctcaattcggcggtggaaacctaccttcatttgtggtcggagcaattgccgcggcgattagtggagtcttagcgttaaccgttttaccttcaccgcctccggacgcaccagccatgtcaggggctatgtgattccattagttaactagtttatatatatatatatatatatatatatatatatatatgaatttccatctaatacagtattgttgtgcaaaagtgaaacccccaaaaaatggataaagtgagaaaaataaaccttggtcgtctgtcttttactgttctttagttttttttttttttttacttttgttattgatgttagtcaatttgttttcgttttgtttggacgttaataaattctgtgtttg

SEQ ID NO: 76965 - protein, 529 aa, Arabidopsis thaliana
  peptide (1)..(529): Ceres Seq. ID no. 12482248
NLAFTTKKLFSFCLLVFLFIMGALEAERAANNATALETQSSPEDLSQPSPLRKIISVASIAAGVQFGWALQLSLLTPYIQLLGIPHKWSSYMWLCGPISGMIVQPIVGYHSDRCESRFGRRRPFIAAGVALVAVSVFLIGFAADMGHSFGDKLENKVRTRAIIIFLTGFWFLDVANNTLQGPCRAFLADLAAGDAKKTRVANACFSFFMAVGNVLGYAAGSYTNLHKMFPFTMTKACDIYCANLKTCFFLSITLLLIVTFSSLWYVKDKQWSPPQGDKEEKTSSLFFFGEIFGAVRHMKRPMVMLLIVTVINWIAWFPFILYDTDWMGREVYGGNSDGDERSKKLYDQGVQAGALGLMFNSILLGFVSLGVESIGRKMGGAKRLWGCVNFILAIGLAMTVLVTKSAEHHREIAGPLAGPSSGIKAGVFSLFTVLGIPLAITYSIPFALASIFSTNSGAGQGLSLGVLNIAICIPQMIVSFSSGPLDAQFGGGNLPSFVVGAIAAAISGVLALTVLPSPPPDAPAMSGAM

SEQ ID NO: 76966 - protein, 509 aa, Arabidopsis thaliana
  peptide (1)..(509): Ceres Seq. ID no. 12482249
MGALEAERAANNATALETQSSPEDLSQPSPLRKIISVASIAAGVQFGWALQLSLLTPYIQLLGIPHKWSSYMWLCGPISGMIVQPIVGYHSDRCESRFGRRRPFIAAGVALVAVSVFLIGFAADMGHSFGDKLENKVRTRAIIIFLTGFWFLDVANNTLQGPCRAFLADLAAGDAKKTRVANACFSFFMAVGNVLGYAAGSYTNLHKMFPFTMTKACDIYCANLKTCFFLSITLLLIVTFSSLWYVKDKQWSPPQGDKEEKTSSLFFFGEIFGAVRHMKRPMVMLLIVTVINWIAWFPFILYDTDWMGREVYGGNSDGDERSKKLYDQGVQAGALGLMFNSILLGFVSLGVESIGRKMGGAKRLWGCVNFILAIGLAMTVLVTKSAEHHREIAGPLAGPSSGIKAGVFSLFTVLGIPLAITYSIPFALASIFSTNSGAGQGLSLGVLNIAICIPQMIVSFSSGPLDAQFGGGNLPSFVVGAIAAAISGVLALTVLPSPPPDAPAMSGAM

SEQ ID NO: 76967 - protein, 438 aa, Arabidopsis thaliana
  peptide (1)..(438): Ceres Seq. ID no. 12482250
MWLCGPISGMIVQPIVGYHSDRCESRFGRRRPFIAAGVALVAVSVFLIGFAADMGHSFGDKLENKVRTRAIIIFLTGFWFLDVANNTLQGPCRAFLADLAAGDAKKTRVANACFSFFMAVGNVLGYAAGSYTNLHKMFPFTMTKACDIYCANLKTCFFLSITLLLIVTFSSLWYVKDKQWSPPQGDKEEKTSSLFFFGEIFGAVRHMKRPMVMLLIVTVINWIAWFPFILYDTDWMGREVYGGNSDGDERSKKLYDQGVQAGALGLMFNSILLGFVSLGVESIGRKMGGAKRLWGCVNFILAIGLAMTVLVTKSAEHHREIAGPLAGPSSGIKAGVFSLFTVLGIPLAITYSIPFALASIFSTNSGAGQGLSLGVLNIAICIPQMIVSFSSGPLDAQFGGGNLPSFVVGAIAAAISGVLALTVLPSPPPDAPAMSGAM

SEQ ID NO: 76968 - DNA, 1649 bp, Arabidopsis thaliana
  misc_feature (1)..(1649): Ceres Seq. ID no. 12482269
  misc_feature (1)..(1649): Ortholog of  Ceres SEQ ID NO 13657647 as cited in SEQ ID NO 66399
cgccttatgaatctctctatcgcggtttcattagattcagtttaactcgagtgatgaaaccaatctccgtgctagagctctttgatcccgtggctggtaggatattacggcgtttgtagctctgtcgtcgtggatagagttagaacgacgaaatcagccttggtttcctaactgtatctgaatttttgcaacaatgtctgagctaaaagagcgcctgcttcctccaagacctgcttcagctatgaacctcagagatgcttctgtgactcggccttctgcttctggaagaccaccccttcttggagttgatgtcttgggtctgaagaagcgtggacaaggcctacgctcttggattcgtgttgatacttctggtaatactcaggtcatggaggttgacaagttcactatgatgcgtaggtgtgacttacccgcccgtgatttaaggctgcttgatcccttattcgtgtatccctctactatcctaggccgagagaaggctattgttgtcaacttagagcagatccgttgtattattactgcagacgaagttctgcttctgaattcccttgacaactacgtgctgcgctatgttgttgagttgcagcagagactaaagactagtagtgtaggtgagatgtggcagcaggaaaattcccagttgagtaggaggaggagcaggagttttgacaatgcttttgagaattcatcccctgattatttacctttcgagtttagagctcttgaaatagcccttgaagctgcttgtacgtttctcgattcccaggcttcagagttggagattgaggcatacccgttattagatgagcttacctcaaagatcagtacactaaacttggagcgtgtgcgtagactaaagagcaggcttgtagcactgacaagaagagttcagaaggttcgggatgagatcgagcagctaatggatgatgatggagatatggcagaaatgtatctaacagagaagaagaggagaatggaaggatctatgtacggtgaccagtccttattgggttacaggtcaaatgatggtctatctgtttctgcaccggtgtctcctgtttcttctccacctgattcccgaagacttgataaaagcttgagcattgcgaggagtcggcatgacagtgcaaggagttctgaaggtgcagagaatatagaagagctagagatgttgctggaagcttactttgtcgtcattgatagtactctaaacaagttgacatcgttaaaggagtacattgatgacactgaagatttcattaacattcaactggataatgtgcggaatcagctgatccagttcgagttgcttctgacgactgcaacgtttgttgtagccatatttggggtcgttgctgggatctttgggatgaactttgagatagacttcttcaatcagccaggtgcattcagatgggtactcataattactggagtatgtggctttgtgatattttcggcattcgtctggttcttcaagtacagaagactcatgcctctataagaagagagacatgaatgtgctccccagaaagtagacatcaacttatattgttatgttgcttacagatattaatgatttgtttcctttacacaatggaatcttgggaatttttatcataggcattgtc

SEQ ID NO: 76969 - protein, 442 aa, Arabidopsis thaliana
  peptide (1)..(442): Ceres Seq. ID no. 12482270
MSELKERLLPPRPASAMNLRDASVTRPSASGRPPLLGVDVLGLKKRGQGLRSWIRVDTSGNTQVMEVDKFTMMRRCDLPARDLRLLDPLFVYPSTILGREKAIVVNLEQIRCIITADEVLLLNSLDNYVLRYVVELQQRLKTSSVGEMWQQENSQLSRRRSRSFDNAFENSSPDYLPFEFRALEIALEAACTFLDSQASELEIEAYPLLDELTSKISTLNLERVRRLKSRLVALTRRVQKVRDEIEQLMDDDGDMAEMYLTEKKRRMEGSMYGDQSLLGYRSNDGLSVSAPVSPVSSPPDSRRLDKSLSIARSRHDSARSSEGAENIEELEMLLEAYFVVIDSTLNKLTSLKEYIDDTEDFINIQLDNVRNQLIQFELLLTTATFVVAIFGVVAGIFGMNFEIDFFNQPGAFRWVLIITGVCGFVIFSAFVWFFKYRRLMPL

SEQ ID NO: 76970 - protein, 426 aa, Arabidopsis thaliana
  peptide (1)..(426): Ceres Seq. ID no. 12482271
MNLRDASVTRPSASGRPPLLGVDVLGLKKRGQGLRSWIRVDTSGNTQVMEVDKFTMMRRCDLPARDLRLLDPLFVYPSTILGREKAIVVNLEQIRCIITADEVLLLNSLDNYVLRYVVELQQRLKTSSVGEMWQQENSQLSRRRSRSFDNAFENSSPDYLPFEFRALEIALEAACTFLDSQASELEIEAYPLLDELTSKISTLNLERVRRLKSRLVALTRRVQKVRDEIEQLMDDDGDMAEMYLTEKKRRMEGSMYGDQSLLGYRSNDGLSVSAPVSPVSSPPDSRRLDKSLSIARSRHDSARSSEGAENIEELEMLLEAYFVVIDSTLNKLTSLKEYIDDTEDFINIQLDNVRNQLIQFELLLTTATFVVAIFGVVAGIFGMNFEIDFFNQPGAFRWVLIITGVCGFVIFSAFVWFFKYRRLMPL

SEQ ID NO: 76971 - protein, 378 aa, Arabidopsis thaliana
  peptide (1)..(378): Ceres Seq. ID no. 12482272
MEVDKFTMMRRCDLPARDLRLLDPLFVYPSTILGREKAIVVNLEQIRCIITADEVLLLNSLDNYVLRYVVELQQRLKTSSVGEMWQQENSQLSRRRSRSFDNAFENSSPDYLPFEFRALEIALEAACTFLDSQASELEIEAYPLLDELTSKISTLNLERVRRLKSRLVALTRRVQKVRDEIEQLMDDDGDMAEMYLTEKKRRMEGSMYGDQSLLGYRSNDGLSVSAPVSPVSSPPDSRRLDKSLSIARSRHDSARSSEGAENIEELEMLLEAYFVVIDSTLNKLTSLKEYIDDTEDFINIQLDNVRNQLIQFELLLTTATFVVAIFGVVAGIFGMNFEIDFFNQPGAFRWVLIITGVCGFVIFSAFVWFFKYRRLMPL

SEQ ID NO: 76972 - DNA, 1003 bp, Arabidopsis thaliana
  misc_feature (1)..(1003): Ceres Seq. ID no. 12482277
  misc_feature (1)..(1003): Ortholog of  Ceres SEQ ID NO 14311773 as cited in SEQ ID NO 59245
  misc_feature (1)..(1003): Ortholog of  Ceres SEQ ID NO 15225880 as cited in SEQ ID NO 0
ctccattaatgttgctctcacactcatgcacctctcttatctttataggagtgtgttccctttgtatgttacccaaaacgggacattaccataacaaaacagagagatgagtcaagaagaacaaccaaagcggccacaagagccagtcacttacggtgacgtttttgaagtctccggtgaactcgctgataagcctatagcgccggaggatgcaaacatgatgcaagcagcggagacacgtgtgtttggccacactcagaaaggcggtgcagcggcagtcatgcagtctgcagccactgctaataaacgcggtggctttgtccatccaggtgacacaactgatctcgccgctgaacgaggcgtcacagtggcgcaaactgacgtccctggtgcacgtgtcacaacagaattcgtcggtggacaggtcgttggacaatacgtcgagcctaggccagtggcgactgcggcagtttatggtaagcagaagttggtgggtttgagtttacaaagtgcaataacgattggagaagcattggaagcgactgtgcaaaccgctggaaacaaaccggtggatcaaagcgacgcagcagcgattcaagcggcagaggttagagcttgtggcactaatgtgattgctcctggtggaatcgccgcttctgctcaatcagcagcaaatcacaacgctaccatagaccgtgatgaggataaaatcaagctcattgatgttttggcggggtgcgaccgggaagttagccgcagataaatctgtgaccaggcaggacgcagagggagtggtgagcgctgagctgaggaacaatcctaatttgtctactcaccctggtggtgtagcggcttctattactgccgccgctaggcttaacgagagagctgatatatgaaaaatcctgcgagagggagatgttttggttctgttgttcaaaaaagttcagtcataatgtaaaaaaatggtcactttccggttataaagttgaaatctttctct

SEQ ID NO: 76973 - protein, 218 aa, Arabidopsis thaliana
  peptide (1)..(218): Ceres Seq. ID no. 12482278
MSQEEQPKRPQEPVTYGDVFEVSGELADKPIAPEDANMMQAAETRVFGHTQKGGAAAVMQSAATANKRGGFVHPGDTTDLAAERGVTVAQTDVPGARVTTEFVGGQVVGQYVEPRPVATAAVYGKQKLVGLSLQSAITIGEALEATVQTAGNKPVDQSDAAAIQAAEVRACGTNVIAPGGIAASAQSAANHNATIDRDEDKIKLIDVLAGCDREVSRR

SEQ ID NO: 76974 - protein, 181 aa, Arabidopsis thaliana
  peptide (1)..(181): Ceres Seq. ID no. 12482279
MMQAAETRVFGHTQKGGAAAVMQSAATANKRGGFVHPGDTTDLAAERGVTVAQTDVPGARVTTEFVGGQVVGQYVEPRPVATAAVYGKQKLVGLSLQSAITIGEALEATVQTAGNKPVDQSDAAAIQAAEVRACGTNVIAPGGIAASAQSAANHNATIDRDEDKIKLIDVLAGCDREVSRR

SEQ ID NO: 76975 - protein, 180 aa, Arabidopsis thaliana
  peptide (1)..(180): Ceres Seq. ID no. 12482280
MQAAETRVFGHTQKGGAAAVMQSAATANKRGGFVHPGDTTDLAAERGVTVAQTDVPGARVTTEFVGGQVVGQYVEPRPVATAAVYGKQKLVGLSLQSAITIGEALEATVQTAGNKPVDQSDAAAIQAAEVRACGTNVIAPGGIAASAQSAANHNATIDRDEDKIKLIDVLAGCDREVSRR

SEQ ID NO: 76976 - DNA, 1747 bp, Arabidopsis thaliana
  misc_feature (1)..(1747): Ceres Seq. ID no. 12482381
  misc_feature (1)..(1747): Ortholog of  Ceres SEQ ID NO 13596509 as cited in SEQ ID NO 62004
  misc_feature (1)..(1747): Ortholog of  Ceres SEQ ID NO 13500385 as cited in SEQ ID NO 67583
gatccgggtacatattcttcttcttcttcaaatcgagatcgaagaagaaccaacaaaaaaccaaaaatggagacgaagccaaaccctagacgtccttcaaacacagttctaccatatcaaacaccacgattaagagatcattaccttctgggaaaaaagctaggccaaggccaatttggaacaacctatctctgcacagagaaatcaacctccgctaattacgcctgcaaatcgatcccgaagcgaaagctcgtgtgtcgcgaggattacgaagatgtatggcgtgagattcagatcatgcatcatctctctgagcatccaaatgttgttaggatcaaagggacttatgaagattcggtgtttgttcatattgttatggaggtttgtgaaggtggtgagctttttgatcggattgtttctaaaggtcattttagtgagcgtgaagctgtcaagcttattaagacgattcttggtgttgttgaggcttgtcattctcttggtgttatgcatagagatctcaaacctgagaatttcttgtttgatagtcctaaagatgatgctaagcttaaggctaccgattttggtttgtctgtcttctataagccaggacaatatttatatgacgtagttggaagtccgtactatgttgcaccagaggtgctaaagaaatgttatggacctgaaatagatgtgtggagtgctggtgttatcctctacattttactcagcggtgttcctcccttctgggcagagactgagtctggaatctttagacagatattgcaagggaagttagatttcaaatctgacccgtggcctactatctcagaagctgctaaagatttgatctataaaatgctcgaaaggagccccaagaaacgcatttctgctcatgaagccttgtgtcacccatggattgtcgatgaacaagcagcaccagacaagcctcttgatccagcagtcttatctcgtctaaagcagttttctcaaatgaataagattaagaaaatggcattacgggtaattgctgagagactttcagaggaagaaattggaggtctgaaggaattgttcaagatgatagacacagacaacagcggaacgattacttttgaagagctcaaagcgggtttgaagagagtcggatctgaactgatggaatcagaaatcaagtctctcatggatgcggctgatatcgacaacagtggtacaatagactacggagaattcctagcagcaaccttacacatgaacaagatggagagagaggagattctggtggctgcattttcggactttgacaaagacggaagcggttatatcaccatcgatgagcttcagtcagcttgcacagagtttggtctatgtgatacacctctggacgacatgatcaaggagattgatcttgacaatgacgggaagatcgatttctcggagtttacagcaatgatgaggaaaggagatggagttgggagaagcagaaccatgatgaagaacttgaacttcaacattgctgatgcttttggagttgatggtgaaaaatctgatgactgactcatcattcttccacaatttctgttttttttctctttaatttcgtttatattttgaattctaatttctaaggatacaaaaatatattctggcttgttttttgctttcctttttatttttgtacatgagcaactttctaaatttttatcctcatatggataatttttgcttcatataaaagtttttgaattcc

SEQ ID NO: 76977 - protein, 517 aa, Arabidopsis thaliana
  peptide (1)..(517): Ceres Seq. ID no. 12482382
DPGTYSSSSSNRDRRRTNKKPKMETKPNPRRPSNTVLPYQTPRLRDHYLLGKKLGQGQFGTTYLCTEKSTSANYACKSIPKRKLVCREDYEDVWREIQIMHHLSEHPNVVRIKGTYEDSVFVHIVMEVCEGGELFDRIVSKGHFSEREAVKLIKTILGVVEACHSLGVMHRDLKPENFLFDSPKDDAKLKATDFGLSVFYKPGQYLYDVVGSPYYVAPEVLKKCYGPEIDVWSAGVILYILLSGVPPFWAETESGIFRQILQGKLDFKSDPWPTISEAAKDLIYKMLERSPKKRISAHEALCHPWIVDEQAAPDKPLDPAVLSRLKQFSQMNKIKKMALRVIAERLSEEEIGGLKELFKMIDTDNSGTITFEELKAGLKRVGSELMESEIKSLMDAADIDNSGTIDYGEFLAATLHMNKMEREEILVAAFSDFDKDGSGYITIDELQSACTEFGLCDTPLDDMIKEIDLDNDGKIDFSEFTAMMRKGDGVGRSRTMMKNLNFNIADAFGVDGEKSDD

SEQ ID NO: 76978 - protein, 495 aa, Arabidopsis thaliana
  peptide (1)..(495): Ceres Seq. ID no. 12482383
METKPNPRRPSNTVLPYQTPRLRDHYLLGKKLGQGQFGTTYLCTEKSTSANYACKSIPKRKLVCREDYEDVWREIQIMHHLSEHPNVVRIKGTYEDSVFVHIVMEVCEGGELFDRIVSKGHFSEREAVKLIKTILGVVEACHSLGVMHRDLKPENFLFDSPKDDAKLKATDFGLSVFYKPGQYLYDVVGSPYYVAPEVLKKCYGPEIDVWSAGVILYILLSGVPPFWAETESGIFRQILQGKLDFKSDPWPTISEAAKDLIYKMLERSPKKRISAHEALCHPWIVDEQAAPDKPLDPAVLSRLKQFSQMNKIKKMALRVIAERLSEEEIGGLKELFKMIDTDNSGTITFEELKAGLKRVGSELMESEIKSLMDAADIDNSGTIDYGEFLAATLHMNKMEREEILVAAFSDFDKDGSGYITIDELQSACTEFGLCDTPLDDMIKEIDLDNDGKIDFSEFTAMMRKGDGVGRSRTMMKNLNFNIADAFGVDGEKSDD

SEQ ID NO: 76979 - protein, 418 aa, Arabidopsis thaliana
  peptide (1)..(418): Ceres Seq. ID no. 12482384
MHHLSEHPNVVRIKGTYEDSVFVHIVMEVCEGGELFDRIVSKGHFSEREAVKLIKTILGVVEACHSLGVMHRDLKPENFLFDSPKDDAKLKATDFGLSVFYKPGQYLYDVVGSPYYVAPEVLKKCYGPEIDVWSAGVILYILLSGVPPFWAETESGIFRQILQGKLDFKSDPWPTISEAAKDLIYKMLERSPKKRISAHEALCHPWIVDEQAAPDKPLDPAVLSRLKQFSQMNKIKKMALRVIAERLSEEEIGGLKELFKMIDTDNSGTITFEELKAGLKRVGSELMESEIKSLMDAADIDNSGTIDYGEFLAATLHMNKMEREEILVAAFSDFDKDGSGYITIDELQSACTEFGLCDTPLDDMIKEIDLDNDGKIDFSEFTAMMRKGDGVGRSRTMMKNLNFNIADAFGVDGEKSDD

SEQ ID NO: 76980 - DNA, 3699 bp, Arabidopsis thaliana
  misc_feature (1)..(3699): Ceres Seq. ID no. 12482385
  misc_feature (1)..(3699): Ortholog of  Ceres SEQ ID NO 12589728 as cited in SEQ ID NO 0
  misc_feature (1)..(3699): Ortholog of  Ceres SEQ ID NO 14302164 as cited in SEQ ID NO 0
atgcaaaacaataccaacaattattaatctcaattcttccttccatttctatctctctcactctctttctctctcgatcttcttcttcttcaactcttctgtcgataggctcagtatcggatttttcgtcaacactataaaacccatttttctatctctctgtctaaaagtctttactttaaaacaaacagtgacatgaaaaatcaaagcttcgatacaatctcaggatggatttgagtatcgcttaatgaagttttgatctttgggtttagttctacaacagagtatttcgaggattgtatatattgagggtttttgttgtttaggtgataatgataccggaactggggagaagaccgatgcatagagggaacgaagattcatcttttggggatgattatgagaaagagattggagtattacttggtgagcagcagagaaggcaagtagaagctgatgagcttgagagagagcttaatttgtataggagtggctctgctccaccgactgttgatggttctgttagtgctgctggagggctttttagcggcggaggtggggctccttttttggagtttggtggaggcaacaagggtaatgggtttggtggcgatgatgaggagtttaggaaagatccggcttacttgtcttattactatgctaatatgaagttgaatccgaggttgccaccgcctttgatgtctagggaggatttgagggttgctcagaggcttaaagggagtagtaatgttttaggtggtgttggggataggaggaaagttaatgatagtcaatctttattctctatgccacctggttttgatcagaggaagcagcatgagtttgaggttgagaaaactagtgcttcttcttctgaatgggatgctaatggattgatcggtttgccgggtttggggattggaggcaagcagaagagttttgctgatatctttcaggctgatatggggcatggacatcctgtcactaagcagccctcacgtcctgcaagtcgtaatacctttgatgaaaatgttgactctaagaataatctgtctccatctgcatcgcaaggcattggtgcaccatctccatacagctatgcagctgttctgggttcgtctttgtctagaaatggaactccagatccacaggccattgctagggtgcctagtccctgtcttactcccattgggagtgggagagtgagttcaaatgataagaggaacacaagtaatcaaagcccgttcaacggtgggctcaacgagtcttctgatcttgtcaatgctttatctggcatgaacctgtctggcagtggcgggttagatgaacgtggtcaggctgagcaagatgtggaaaaggtcaggaactatatgtttggactgcaaggtgggcataacgaagtcaatcaacatgggttcccaaacaaatctgatcaagcccagaaggcaactggcttgttgaggaattcacaattgagaggggcacaaggatctacctataatgatggaggtggagtagctactcagtaccagcatcttgatagcccaaactattgtctcaacaattatggattaaatccagctgtagcttctatgatggctaaccaacttggaactaataactattctccagtgtatgaaaatgcttctgcagcatctgctatgggattttctggaatggattccagacttcatggtggaggttatgtatcatctggtcaaaacctctctgaatcacgtaatcttggcagattcagtaatcgaatgatgggaggaggtactggtcttcagtcacatatggcagatccaatgtatcatcagtatgctgattcgcttgatcttctcaatgatccttccatggacgtgaactttatgggtaattcatacatgaatatgcttgaactccagagggcttatcttggagcacagaaatcacagtacggtgtcccttacaaatccgggagccctaacagccacaccgattatgggagtccaacatttgggtcatatcctggcagcccattggctcatcatcttctgcctaattctcttgtgtcaccctgtagccctatgagacgaggtgaagttaatatgcgatatccctctgcaacaagaaactacgcaggaggggtaatgggttcctggcacatggatgctagtttggatgaaggctttggatcttcaatgcttgaagagttcaaaagtaacaaaacaagaggattcgaacttgctgaaatagctggccatgttgtagagttcagttcggatcagtatggaagccggtttattcagcagaaactcgagacagcaacaagtgatgagaaaaacatggtttatgaggagatcatgccacacgctcttgccctgatgactgacgtttttggaaactatgtgattcagaagttctttgagcatggactcccaccacagagaagagaattggcagataaactctttgacaatgttttgcctcttagcctacagatgtatggttgtcgtgttattcagaaggcaattgaggtggttgatctagaccagaaaattaaaatggtgaaagaactcgatggacatgtgatgcgatgcgtacgtgatcagaatgggaaccatgtggttcaaaagtgtattgaatgtgtgcctgaagaaaacatcgaatttattatttccaccttctttggcaatgttgtgaccctctccactcacccatatgggtgccgagttattcagagggtattggagcactgccatgaccctgatactcagagtaaggttatggatgaaatcatgtcaactattagtatgctggcccaagatcagtatggaaactatgttattcagcatgtattggaacacggaaagcctgatgagcgtactgtgattatcaaggaattagcggggaagattgttcagatgagccaacagaagtttgcttcaaacgttgttgagaaatgtttgacttttggagggccagaggaacgggaatttctggtaaatgagatgctgggcacaactgatgaaaacgagcctcttcaggcgatgatgaaggatcagtttgccaactatgtagtgcaaaaagttttagagacatgtgatgaccaacagcgtgagctgatccttggtcgtattaaagtgcatctcaatgctttaaagaaatacacttatggaaagcatatcgttgctcgtgttgaaaaactcgttgctgctggagagaggaggatggctttgcagtccctaacccagcctcagatggcgtaaggccgcaagtgttgtacagcttaactagggtggatggctctgccatagcgttttgagaattaggtaaaatctaaaccggaaataatctgcgggaaaattgtgaaggagagctttgttttctctgcaaatctgtaaaattgtgtagttgcttacggtttttctatacatagaaccaaacatcccactttaggctgatgagtaagagaggaaatatgcagagaatggtgtaaaggtgggctgaggtatggtgaggattttagggtttcctttacacgaaagagaatggctttttcattgccaaatgtgtagaagtgagaatatgttcatgcttttaggacaatcctagtgtttagagttttttctccatctatgtaatttgtttcatcaaactcttgtttcctatttcactagtaactctttcgtttctgtaatattgcaatatttttgt

SEQ ID NO: 76981 - protein, 972 aa, Arabidopsis thaliana
  peptide (1)..(972): Ceres Seq. ID no. 12482386
MIPELGRRPMHRGNEDSSFGDDYEKEIGVLLGEQQRRQVEADELERELNLYRSGSAPPTVDGSVSAAGGLFSGGGGAPFLEFGGGNKGNGFGGDDEEFRKDPAYLSYYYANMKLNPRLPPPLMSREDLRVAQRLKGSSNVLGGVGDRRKVNDSQSLFSMPPGFDQRKQHEFEVEKTSASSSEWDANGLIGLPGLGIGGKQKSFADIFQADMGHGHPVTKQPSRPASRNTFDENVDSKNNLSPSASQGIGAPSPYSYAAVLGSSLSRNGTPDPQAIARVPSPCLTPIGSGRVSSNDKRNTSNQSPFNGGLNESSDLVNALSGMNLSGSGGLDERGQAEQDVEKVRNYMFGLQGGHNEVNQHGFPNKSDQAQKATGLLRNSQLRGAQGSTYNDGGGVATQYQHLDSPNYCLNNYGLNPAVASMMANQLGTNNYSPVYENASAASAMGFSGMDSRLHGGGYVSSGQNLSESRNLGRFSNRMMGGGTGLQSHMADPMYHQYADSLDLLNDPSMDVNFMGNSYMNMLELQRAYLGAQKSQYGVPYKSGSPNSHTDYGSPTFGSYPGSPLAHHLLPNSLVSPCSPMRRGEVNMRYPSATRNYAGGVMGSWHMDASLDEGFGSSMLEEFKSNKTRGFELAEIAGHVVEFSSDQYGSRFIQQKLETATSDEKNMVYEEIMPHALALMTDVFGNYVIQKFFEHGLPPQRRELADKLFDNVLPLSLQMYGCRVIQKAIEVVDLDQKIKMVKELDGHVMRCVRDQNGNHVVQKCIECVPEENIEFIISTFFGNVVTLSTHPYGCRVIQRVLEHCHDPDTQSKVMDEIMSTISMLAQDQYGNYVIQHVLEHGKPDERTVIIKELAGKIVQMSQQKFASNVVEKCLTFGGPEEREFLVNEMLGTTDENEPLQAMMKDQFANYVVQKVLETCDDQQRELILGRIKVHLNALKKYTYGKHIVARVEKLVAAGERRMALQSLTQPQMA

SEQ ID NO: 76982 - protein, 963 aa, Arabidopsis thaliana
  peptide (1)..(963): Ceres Seq. ID no. 12482387
MHRGNEDSSFGDDYEKEIGVLLGEQQRRQVEADELERELNLYRSGSAPPTVDGSVSAAGGLFSGGGGAPFLEFGGGNKGNGFGGDDEEFRKDPAYLSYYYANMKLNPRLPPPLMSREDLRVAQRLKGSSNVLGGVGDRRKVNDSQSLFSMPPGFDQRKQHEFEVEKTSASSSEWDANGLIGLPGLGIGGKQKSFADIFQADMGHGHPVTKQPSRPASRNTFDENVDSKNNLSPSASQGIGAPSPYSYAAVLGSSLSRNGTPDPQAIARVPSPCLTPIGSGRVSSNDKRNTSNQSPFNGGLNESSDLVNALSGMNLSGSGGLDERGQAEQDVEKVRNYMFGLQGGHNEVNQHGFPNKSDQAQKATGLLRNSQLRGAQGSTYNDGGGVATQYQHLDSPNYCLNNYGLNPAVASMMANQLGTNNYSPVYENASAASAMGFSGMDSRLHGGGYVSSGQNLSESRNLGRFSNRMMGGGTGLQSHMADPMYHQYADSLDLLNDPSMDVNFMGNSYMNMLELQRAYLGAQKSQYGVPYKSGSPNSHTDYGSPTFGSYPGSPLAHHLLPNSLVSPCSPMRRGEVNMRYPSATRNYAGGVMGSWHMDASLDEGFGSSMLEEFKSNKTRGFELAEIAGHVVEFSSDQYGSRFIQQKLETATSDEKNMVYEEIMPHALALMTDVFGNYVIQKFFEHGLPPQRRELADKLFDNVLPLSLQMYGCRVIQKAIEVVDLDQKIKMVKELDGHVMRCVRDQNGNHVVQKCIECVPEENIEFIISTFFGNVVTLSTHPYGCRVIQRVLEHCHDPDTQSKVMDEIMSTISMLAQDQYGNYVIQHVLEHGKPDERTVIIKELAGKIVQMSQQKFASNVVEKCLTFGGPEEREFLVNEMLGTTDENEPLQAMMKDQFANYVVQKVLETCDDQQRELILGRIKVHLNALKKYTYGKHIVARVEKLVAAGERRMALQSLTQPQMA

SEQ ID NO: 76983 - protein, 861 aa, Arabidopsis thaliana
  peptide (1)..(861): Ceres Seq. ID no. 12482388
MKLNPRLPPPLMSREDLRVAQRLKGSSNVLGGVGDRRKVNDSQSLFSMPPGFDQRKQHEFEVEKTSASSSEWDANGLIGLPGLGIGGKQKSFADIFQADMGHGHPVTKQPSRPASRNTFDENVDSKNNLSPSASQGIGAPSPYSYAAVLGSSLSRNGTPDPQAIARVPSPCLTPIGSGRVSSNDKRNTSNQSPFNGGLNESSDLVNALSGMNLSGSGGLDERGQAEQDVEKVRNYMFGLQGGHNEVNQHGFPNKSDQAQKATGLLRNSQLRGAQGSTYNDGGGVATQYQHLDSPNYCLNNYGLNPAVASMMANQLGTNNYSPVYENASAASAMGFSGMDSRLHGGGYVSSGQNLSESRNLGRFSNRMMGGGTGLQSHMADPMYHQYADSLDLLNDPSMDVNFMGNSYMNMLELQRAYLGAQKSQYGVPYKSGSPNSHTDYGSPTFGSYPGSPLAHHLLPNSLVSPCSPMRRGEVNMRYPSATRNYAGGVMGSWHMDASLDEGFGSSMLEEFKSNKTRGFELAEIAGHVVEFSSDQYGSRFIQQKLETATSDEKNMVYEEIMPHALALMTDVFGNYVIQKFFEHGLPPQRRELADKLFDNVLPLSLQMYGCRVIQKAIEVVDLDQKIKMVKELDGHVMRCVRDQNGNHVVQKCIECVPEENIEFIISTFFGNVVTLSTHPYGCRVIQRVLEHCHDPDTQSKVMDEIMSTISMLAQDQYGNYVIQHVLEHGKPDERTVIIKELAGKIVQMSQQKFASNVVEKCLTFGGPEEREFLVNEMLGTTDENEPLQAMMKDQFANYVVQKVLETCDDQQRELILGRIKVHLNALKKYTYGKHIVARVEKLVAAGERRMALQSLTQPQMA

SEQ ID NO: 76984 - DNA, 1330 bp, Arabidopsis thaliana
  misc_feature (1)..(1330): Ceres Seq. ID no. 12482393
  misc_feature (1)..(1330): Ortholog of  Ceres SEQ ID NO 13596392 as cited in SEQ ID NO 62136
  misc_feature (1)..(1330): Ortholog of  Ceres SEQ ID NO 13654360 as cited in SEQ ID NO 67980
  misc_feature (1)..(1330): Ortholog of  Ceres SEQ ID NO 13596394 as cited in SEQ ID NO 68561
gaattcccgggcaggtgcaagcttcacgcttgaaaatctccgttcgttttctacctcgtttagatcggagatggcggagaagccggcgcaagagcaagagcagaagcgagcgatggaacctgcagttctcgacgatattattcgtcgtttggttgagtttcggaacacgagacctggatcggggaagcaagttcatctcagtgaaggtgaaattcgtcagctttgtgctgtctccaaagaaatatttcttcaacagcccaatctgcttgaattggaagctcccatcaagatctgcggtgatattcatgggcagtattcagatctattgaggctttttgagtatggagggttccctcccgaagctaattatttgttcttgggtgattatgttgaccgtggcaagcaaagcttggaaacaatatgtcttcttctagcttacaaaatcaagtaccctgagaacttcttcttgttgagagggaatcatgaatctgcttccattaatcgtatttacggtttctatgatgagtgcaaacgcaggttcaatgtcagactctggaaaatattcaccgattgctttaactgtcttcctgtggccgccttaattgatgacagaatactatgtatgcatggtgggatttccccagagctgaaaagtttggaccagattagaaatattgcacggccgatggatattccggagtctggtttggtatgtgatttactatggtcggatcctagtggagacgtaggctggggcatgaatgatcgtggtgtttcatacacttttggagctgacaaagtcgcagagttcttggagaaacatgacatggaccttatctgtcgtgcccaccaggttgttgaagatgggtatgagttctttgcagaaagacaacttgttacagtattttcagctcccaactattgcggggaatttgacaacgctggcgcaatgatgagcattgatgagagcttaatgtgctcattccagattctaaagccgtcagaaaagaagtcgccttttctgtgacaccgattatccagtgaccaccattgcttcaaattaacaattctacaaaagttgtatatggcaagaggatctagagacggaaactgctcaattgggaccttaatggtactgataatagagcattagacatgtagctgttgacagtgatggcatcgagcagaaggaacaagtcaagtctgtactgtgattttagcatctctcacatctatgtttgtyctaaaatgtgtgtgtgtttttagtcttctctctgaataatatagattctcatttgtactctctatttatttaggagaacccaaattc

SEQ ID NO: 76985 - protein, 341 aa, Arabidopsis thaliana
  peptide (1)..(341): Ceres Seq. ID no. 12482394
NSRAGASFTLENLRSFSTSFRSEMAEKPAQEQEQKRAMEPAVLDDIIRRLVEFRNTRPGSGKQVHLSEGEIRQLCAVSKEIFLQQPNLLELEAPIKICGDIHGQYSDLLRLFEYGGFPPEANYLFLGDYVDRGKQSLETICLLLAYKIKYPENFFLLRGNHESASINRIYGFYDECKRRFNVRLWKIFTDCFNCLPVAALIDDRILCMHGGISPELKSLDQIRNIARPMDIPESGLVCDLLWSDPSGDVGWGMNDRGVSYTFGADKVAEFLEKHDMDLICRAHQVVEDGYEFFAERQLVTVFSAPNYCGEFDNAGAMMSIDESLMCSFQILKPSEKKSPFL

SEQ ID NO: 76986 - protein, 318 aa, Arabidopsis thaliana
  peptide (1)..(318): Ceres Seq. ID no. 12482395
MAEKPAQEQEQKRAMEPAVLDDIIRRLVEFRNTRPGSGKQVHLSEGEIRQLCAVSKEIFLQQPNLLELEAPIKICGDIHGQYSDLLRLFEYGGFPPEANYLFLGDYVDRGKQSLETICLLLAYKIKYPENFFLLRGNHESASINRIYGFYDECKRRFNVRLWKIFTDCFNCLPVAALIDDRILCMHGGISPELKSLDQIRNIARPMDIPESGLVCDLLWSDPSGDVGWGMNDRGVSYTFGADKVAEFLEKHDMDLICRAHQVVEDGYEFFAERQLVTVFSAPNYCGEFDNAGAMMSIDESLMCSFQILKPSEKKSPFL

SEQ ID NO: 76987 - protein, 304 aa, Arabidopsis thaliana
  peptide (1)..(304): Ceres Seq. ID no. 12482396
MEPAVLDDIIRRLVEFRNTRPGSGKQVHLSEGEIRQLCAVSKEIFLQQPNLLELEAPIKICGDIHGQYSDLLRLFEYGGFPPEANYLFLGDYVDRGKQSLETICLLLAYKIKYPENFFLLRGNHESASINRIYGFYDECKRRFNVRLWKIFTDCFNCLPVAALIDDRILCMHGGISPELKSLDQIRNIARPMDIPESGLVCDLLWSDPSGDVGWGMNDRGVSYTFGADKVAEFLEKHDMDLICRAHQVVEDGYEFFAERQLVTVFSAPNYCGEFDNAGAMMSIDESLMCSFQILKPSEKKSPFL

SEQ ID NO: 76988 - DNA, 1631 bp, Arabidopsis thaliana
  misc_feature (1)..(1631): Ceres Seq. ID no. 12482400
  misc_feature (1)..(1631): Ortholog of  Ceres SEQ ID NO 14313147 as cited in SEQ ID NO 54166
  misc_feature (1)..(1631): Ortholog of  Ceres SEQ ID NO 13598882 as cited in SEQ ID NO 0
cttctcctctgccatgaaaatcgcagttcctcaagacaaaacctcctcagaaatctcccatctttgatgacttttgcttccttagttttcactttcttgtccgaacgctctcaaaaactttgagaccaccccaataaacgaattaaacagactattatcaatcaatacacaacacaacaatcaaaccaaaccccatggctgagaatcttgcttgtggtgaaaccagcgagtcatggatcattgacaacgacgatgatgatatcaactatggcggcggatttacgaacgagattgattacaatcaccaactttttgctaaagacgacaactttggcggcaacggatcaattccgatgatgggttcttcttcatcgtccttgagtgaagacagaatcaaagagatgttggtgagagagattgagttttgccctggaactgattatgttaagagattgctttctggtgatttggatttgtctgttcgaaaccaagctcttgattggattctaaaggtttgtgctcattaccattttggacatctgtgcatatgcctatccatgaactacttggatcggttcttaacatcctatgaattgccgaaagacaaggattgggctgctcagttactagctgtgtcttgcttatcattagcatccaaaatggaagaaactgatgtgcctcacattgttgatttacaggtggaagatcccaagtttgtttttgaggccaaaacaataaaaaggatggagcttttggttgtcaccactttgaattggagattgcaagctctaactccattctccttcattgattatttcgttgacaagatcagtggtcacgtgtcggagaatttgatctatagatcgtcaagattcatcttaaacaccaccaaagcaattgaattcttagacttcaggccttctgagatagctgcagctgctgcagtgtctgtttccatttcaggagaaacagaatgcattgatgaggaaaaggcactgtctagtctcatatatgtaaaacaggagagggtgaagagatgtttgaatctgatgagaagtctcactggggaggagaatgtgcggggaactagtttatcgcaggagcaggcgcgagttgcggtaagagctgtacctgcaagtccagttggagtgttggaagcaacatgtttgagctataggagtgaagagagaacagttgagtcatgtacaaattcctcacagagtagtccagacaacaacaacaacaacaacaacagcaacaagaggaggagaaaacaatgagagagaataaaagagtcatacattgctttttacaacccaaaaccacaagtactcatgacatttgaggttcttatttatttttttggttttttttttctacataaattttctttttctttctttgatttctcattttcaatctgaaaattggattgaatatgagagttttgtgagaaaggaaaaaagaaaataagagagagagagagagctctttggaaggcggcaaaattaataagtcattattgatgatgatgagagacatccctgttcttgctccaagggacttttttttttctacataatgtcagagatataattaaaaaaaaaagaaatagaaagagaattaatttt

SEQ ID NO: 76989 - protein, 361 aa, Arabidopsis thaliana
  peptide (1)..(361): Ceres Seq. ID no. 12482401
MAENLACGETSESWIIDNDDDDINYGGGFTNEIDYNHQLFAKDDNFGGNGSIPMMGSSSSSLSEDRIKEMLVREIEFCPGTDYVKRLLSGDLDLSVRNQALDWILKVCAHYHFGHLCICLSMNYLDRFLTSYELPKDKDWAAQLLAVSCLSLASKMEETDVPHIVDLQVEDPKFVFEAKTIKRMELLVVTTLNWRLQALTPFSFIDYFVDKISGHVSENLIYRSSRFILNTTKAIEFLDFRPSEIAAAAAVSVSISGETECIDEEKALSSLIYVKQERVKRCLNLMRSLTGEENVRGTSLSQEQARVAVRAVPASPVGVLEATCLSYRSEERTVESCTNSSQSSPDNNNNNNNSNKRRRKQ

SEQ ID NO: 76990 - protein, 308 aa, Arabidopsis thaliana
  peptide (1)..(308): Ceres Seq. ID no. 12482402
MMGSSSSSLSEDRIKEMLVREIEFCPGTDYVKRLLSGDLDLSVRNQALDWILKVCAHYHFGHLCICLSMNYLDRFLTSYELPKDKDWAAQLLAVSCLSLASKMEETDVPHIVDLQVEDPKFVFEAKTIKRMELLVVTTLNWRLQALTPFSFIDYFVDKISGHVSENLIYRSSRFILNTTKAIEFLDFRPSEIAAAAAVSVSISGETECIDEEKALSSLIYVKQERVKRCLNLMRSLTGEENVRGTSLSQEQARVAVRAVPASPVGVLEATCLSYRSEERTVESCTNSSQSSPDNNNNNNNSNKRRRKQ

SEQ ID NO: 76991 - protein, 307 aa, Arabidopsis thaliana
  peptide (1)..(307): Ceres Seq. ID no. 12482403
MGSSSSSLSEDRIKEMLVREIEFCPGTDYVKRLLSGDLDLSVRNQALDWILKVCAHYHFGHLCICLSMNYLDRFLTSYELPKDKDWAAQLLAVSCLSLASKMEETDVPHIVDLQVEDPKFVFEAKTIKRMELLVVTTLNWRLQALTPFSFIDYFVDKISGHVSENLIYRSSRFILNTTKAIEFLDFRPSEIAAAAAVSVSISGETECIDEEKALSSLIYVKQERVKRCLNLMRSLTGEENVRGTSLSQEQARVAVRAVPASPVGVLEATCLSYRSEERTVESCTNSSQSSPDNNNNNNNSNKRRRKQ

SEQ ID NO: 76992 - DNA, 2484 bp, Arabidopsis thaliana
  misc_feature (1)..(2484): Ceres Seq. ID no. 12482432
  misc_feature (1)..(2484): Ortholog of  Ceres SEQ ID NO 13655640 as cited in SEQ ID NO 63844
  misc_feature (1)..(2484): Ortholog of  Ceres SEQ ID NO 13584744 as cited in SEQ ID NO 69137
gtcagaatattttgaaaatcacgttgaagctttatggttatctttttaatataatcgtgttagtggagtacagtttgtaaagcaaagcttgcgaggttatgattcatcatcagatccagactctctgattcatcatctgcaatggctcgttggttgcttcagatcctgatcatctcttctcttcatctgagctctgtatcaagtcaacaagagacaagctttgtctatgaaagcttcctcgaccgacaaaatctttatcttgacaaatctgcaatagtacttcccagtggattattgcagttgacaaatgcttcagagcaccagatgggtcatgctttccacaagaaaccaattgagttcagttcatctggaccactctccttctcaacacactttgtgtgtgctttggtgcctaagccaggttttgaaggtggccatggtattgtctttgtattgtctccttctatggactttactcacgcagaatcaactagatacttggggattttcaatgcttcaacaaatggatcttcctcttatcacgtacttgctgttgagcttgacactatttggaacccagatttcaaagatattgaccacaatcatgtggggattgatgtgaacagtcctatatctgtcgcaatagcttcagcatcttactattccgacatgaaagggagtaatgaaagcataaacctcttgagtggaaaccctatacaggtctgggtggattatgaaggcactttgctcaatgtttcggttgctcctcttgaagtccagaagccaactcgacctcttttatcacaccccatcaaccttacagaactttttccaaatagatcaagtctgtttgctgggttctctgcagcaacagggacagcgatcagtgatcaatatattctctggtggagttttagcatagacagaggatcgctgcagcgacttgatatctcaaaacttcctgaagttcctcatcctagagctccacataagaaagtatctacactgattattctcctacccgtttgtctggctattttggtgttggctgttcttgcaggactttatttccgcaggagacgcaagtattcagaagtatctgaaacatgggaaaaggagtttgatgcgcatcggttctcttacaggtccttgttcaaagcaacaaaggggttcagcaaagatgaatttctgggaaaaggaggttttggagaagtttatagaggaaatctcccacaaggcagagaaatagcagtgaaaagagtgtcccataatggtgatgaaggtgtgaagcagtttgtggctgaagtcgtgagcatgagatgtctgaaacacaggaatcttgtaccactgtttgggtattgcagaagaaaacgagaacttcttcttgtctcagagtacatgcccaatggtagtcttgacgagcatttgtttgatgaccagaaaccggttctttcttggtcacagagacttgtggtcgttaagggtatagcctctgctctctggtacctgcatacaggtgctgaccaagttgttctgcaccgagatgtcaaagcttccaacattatgttagacgcggagttccatggaaggttaggggattttggcatggccaggtttcatgagcacggaggcaatgcagctacaacagcagctgttgggactgtagggtacatggccccggagctaatcacaatgggagcttccactggaactgatgtttacgcatttggtgttttcatgcttgaagtaacctgtgggaggagacccgtggaaccgcagttgcaagttgagaaacgacatatgatcaaatgggtttgtgagtgctggaaaaaggattctttgcttgatgctactgacccgagattgggaggtaaatttgtagctgaggaagtcgagatggttatgaaactgggtctgctctgttcaaatatagtgccagaatccagacccacaatggaacaagtggtcctgtacctaaacaaaaacctacctttgccagatttctcaccatacactttggggattggcacatttgctccggttctggtagatgcatcctcccttgtagtctcttccgcttcatggagtttgtcaggtccatcgatgtcttcatcctcgcccaaccactcaccttacgcttggcagtcaacagatcagccatggggacagacaatagacactaagaactctcttcacatagttgcagaaccagagaagccctcacccgctgtcaaaatggtcacattgcctgcagaagatcctcagtccaatcattccagcatcagcagtcagaggtaaattagtgatgtacatatcagcaagaagatatcattattagctctcaatattgttttcatctgtctcacttgtcgcaacaaaatctgtttgttcgttgtataatcagttaatgattatacaattctcatattacaacttgtactcctcaatatgattttatacatgatttggtccatatttgggttc

SEQ ID NO: 76993 - protein, 718 aa, Arabidopsis thaliana
  peptide (1)..(718): Ceres Seq. ID no. 12482433
MARWLLQILIISSLHLSSVSSQQETSFVYESFLDRQNLYLDKSAIVLPSGLLQLTNASEHQMGHAFHKKPIEFSSSGPLSFSTHFVCALVPKPGFEGGHGIVFVLSPSMDFTHAESTRYLGIFNASTNGSSSYHVLAVELDTIWNPDFKDIDHNHVGIDVNSPISVAIASASYYSDMKGSNESINLLSGNPIQVWVDYEGTLLNVSVAPLEVQKPTRPLLSHPINLTELFPNRSSLFAGFSAATGTAISDQYILWWSFSIDRGSLQRLDISKLPEVPHPRAPHKKVSTLIILLPVCLAILVLAVLAGLYFRRRRKYSEVSETWEKEFDAHRFSYRSLFKATKGFSKDEFLGKGGFGEVYRGNLPQGREIAVKRVSHNGDEGVKQFVAEVVSMRCLKHRNLVPLFGYCRRKRELLLVSEYMPNGSLDEHLFDDQKPVLSWSQRLVVVKGIASALWYLHTGADQVVLHRDVKASNIMLDAEFHGRLGDFGMARFHEHGGNAATTAAVGTVGYMAPELITMGASTGTDVYAFGVFMLEVTCGRRPVEPQLQVEKRHMIKWVCECWKKDSLLDATDPRLGGKFVAEEVEMVMKLGLLCSNIVPESRPTMEQVVLYLNKNLPLPDFSPYTLGIGTFAPVLVDASSLVVSSASWSLSGPSMSSSSPNHSPYAWQSTDQPWGQTIDTKNSLHIVAEPEKPSPAVKMVTLPAEDPQSNHSSISSQR

SEQ ID NO: 76994 - protein, 657 aa, Arabidopsis thaliana
  peptide (1)..(657): Ceres Seq. ID no. 12482434
MGHAFHKKPIEFSSSGPLSFSTHFVCALVPKPGFEGGHGIVFVLSPSMDFTHAESTRYLGIFNASTNGSSSYHVLAVELDTIWNPDFKDIDHNHVGIDVNSPISVAIASASYYSDMKGSNESINLLSGNPIQVWVDYEGTLLNVSVAPLEVQKPTRPLLSHPINLTELFPNRSSLFAGFSAATGTAISDQYILWWSFSIDRGSLQRLDISKLPEVPHPRAPHKKVSTLIILLPVCLAILVLAVLAGLYFRRRRKYSEVSETWEKEFDAHRFSYRSLFKATKGFSKDEFLGKGGFGEVYRGNLPQGREIAVKRVSHNGDEGVKQFVAEVVSMRCLKHRNLVPLFGYCRRKRELLLVSEYMPNGSLDEHLFDDQKPVLSWSQRLVVVKGIASALWYLHTGADQVVLHRDVKASNIMLDAEFHGRLGDFGMARFHEHGGNAATTAAVGTVGYMAPELITMGASTGTDVYAFGVFMLEVTCGRRPVEPQLQVEKRHMIKWVCECWKKDSLLDATDPRLGGKFVAEEVEMVMKLGLLCSNIVPESRPTMEQVVLYLNKNLPLPDFSPYTLGIGTFAPVLVDASSLVVSSASWSLSGPSMSSSSPNHSPYAWQSTDQPWGQTIDTKNSLHIVAEPEKPSPAVKMVTLPAEDPQSNHSSISSQR

SEQ ID NO: 76995 - protein, 610 aa, Arabidopsis thaliana
  peptide (1)..(610): Ceres Seq. ID no. 12482435
MDFTHAESTRYLGIFNASTNGSSSYHVLAVELDTIWNPDFKDIDHNHVGIDVNSPISVAIASASYYSDMKGSNESINLLSGNPIQVWVDYEGTLLNVSVAPLEVQKPTRPLLSHPINLTELFPNRSSLFAGFSAATGTAISDQYILWWSFSIDRGSLQRLDISKLPEVPHPRAPHKKVSTLIILLPVCLAILVLAVLAGLYFRRRRKYSEVSETWEKEFDAHRFSYRSLFKATKGFSKDEFLGKGGFGEVYRGNLPQGREIAVKRVSHNGDEGVKQFVAEVVSMRCLKHRNLVPLFGYCRRKRELLLVSEYMPNGSLDEHLFDDQKPVLSWSQRLVVVKGIASALWYLHTGADQVVLHRDVKASNIMLDAEFHGRLGDFGMARFHEHGGNAATTAAVGTVGYMAPELITMGASTGTDVYAFGVFMLEVTCGRRPVEPQLQVEKRHMIKWVCECWKKDSLLDATDPRLGGKFVAEEVEMVMKLGLLCSNIVPESRPTMEQVVLYLNKNLPLPDFSPYTLGIGTFAPVLVDASSLVVSSASWSLSGPSMSSSSPNHSPYAWQSTDQPWGQTIDTKNSLHIVAEPEKPSPAVKMVTLPAEDPQSNHSSISSQR

SEQ ID NO: 76996 - DNA, 1116 bp, Arabidopsis thaliana
  misc_feature (1)..(1116): Ceres Seq. ID no. 12482488
  misc_feature (1)..(1116): Ortholog of  Ceres SEQ ID NO 14311572 as cited in SEQ ID NO 51713
  misc_feature (1)..(1116): Ortholog of  Ceres SEQ ID NO 14308664 as cited in SEQ ID NO 55450
  misc_feature (1)..(1116): Ortholog of  Ceres SEQ ID NO 15226673 as cited in SEQ ID NO 66997
  misc_feature (1)..(1116): Ortholog of  Ceres SEQ ID NO 14302998 as cited in SEQ ID NO 67440
aaagattctcaaaacatttcatcactctccaacaactattcaccacattcaatggagtcaccaccactatacgagatatcctcaagctcttcttctgaaaaacctagacaccatttccaatcccttgatctcttccctaacctcaaccaaaactcttgtatcaacaataccctaattgagcctttaccgcttattgatcgcataaacttgaactcaaacctagacctaaaccctaatcccttgtatgcggaagaaggagagcaagaggaggaagaagaagaagaagaagaccgtgaagtggacgtggacttacacatcggccttcctggttttggtaaaccaagcaatgatgctaaacagctgaagaagagaaatgggaaggagatcgccacatatgacgccggaaaaggcatcgagaatgaactttccggaaaggcatactggatcccggcgccggagcaaattctcatagggttcactcatttttcttgccatgtatgcttcaagacattcaatcgctacaacaatcttcagatgcacatgtggggacatggttcacaatacaggaaaggaccggagtcactgaaaggcacacagccacgagccatgttagggatcccttgttactgctgcgttgaagggtgcaggaacaacattgaccatcctcgttccaagccactgaaagactttaggacgctccaaacgcactacaaacgcaaacacggacacaaacccttctcgtgtcgcctttgcggtaagcttttggctgtcaagggcgattggcgaacacatgagaagaattgtggaaaacgttgggtttgcgtttgcggttctgattttaaacacaaacgttcccttaaggaccatgttaaggcgtttgggtctggtcatgggccttatccaactggtttgtttgaagagcaggcttctaattcatctgtctccgagactttttttttttaaatttgggtatctttttcttttcacttatggaatatctatttactttagaaaaataatacaatgtggtatctaattgttccaaattaggaacacgaagtgtaccattatatttttcatcactatattagttaataaatgaaagatatgaatgag

SEQ ID NO: 76997 - protein, 320 aa, Arabidopsis thaliana
  peptide (1)..(320): Ceres Seq. ID no. 12482489
KDSQNISSLSNNYSPHSMESPPLYEISSSSSSEKPRHHFQSLDLFPNLNQNSCINNTLIEPLPLIDRINLNSNLDLNPNPLYAEEGEQEEEEEEEEDREVDVDLHIGLPGFGKPSNDAKQLKKRNGKEIATYDAGKGIENELSGKAYWIPAPEQILIGFTHFSCHVCFKTFNRYNNLQMHMWGHGSQYRKGPESLKGTQPRAMLGIPCYCCVEGCRNNIDHPRSKPLKDFRTLQTHYKRKHGHKPFSCRLCGKLLAVKGDWRTHEKNCGKRWVCVCGSDFKHKRSLKDHVKAFGSGHGPYPTGLFEEQASNSSVSETFFF

SEQ ID NO: 76998 - protein, 303 aa, Arabidopsis thaliana
  peptide (1)..(303): Ceres Seq. ID no. 12482490
MESPPLYEISSSSSSEKPRHHFQSLDLFPNLNQNSCINNTLIEPLPLIDRINLNSNLDLNPNPLYAEEGEQEEEEEEEEDREVDVDLHIGLPGFGKPSNDAKQLKKRNGKEIATYDAGKGIENELSGKAYWIPAPEQILIGFTHFSCHVCFKTFNRYNNLQMHMWGHGSQYRKGPESLKGTQPRAMLGIPCYCCVEGCRNNIDHPRSKPLKDFRTLQTHYKRKHGHKPFSCRLCGKLLAVKGDWRTHEKNCGKRWVCVCGSDFKHKRSLKDHVKAFGSGHGPYPTGLFEEQASNSSVSETFFF

SEQ ID NO: 76999 - DNA, 1720 bp, Arabidopsis thaliana
  misc_feature (1)..(1720): Ceres Seq. ID no. 12482567
  misc_feature (1)..(1720): Ortholog of  Ceres SEQ ID NO 13656091 as cited in SEQ ID NO 69094
aagagcgcagaacgcacggtacaactactcccgcccttgatgatctgaatccaggaaaacaggatccaagtggggttgaattatggaggatgagacgagatcaacgtcatcactttccgatatagctattagtattatcgacgaaggtcctctttctccattacgacaacgtagtgaaagaagtgttgtatctcatatcaaacgcaacttacagtcatcggggaaaccactgattcttttggaatcagctggtaaggcgtcctgctgcatcttcagaatccctgatagcctcgcagaggtgaatcctaaagcctataagcccaaagttgtttccattggtccttatcattacggagaaaatcacctccaaatgattcagcagcacaagtttcggtttctggagcttttcgtagacagggcaacaaagaaaggaatggacgaaaacgtcttgtatgcggcagtaggtgctttgcaacacaagataagagcttcttattctgaggaacttaggatagaaaaatcagaactggtgtctatgatgattttggatgggtgcttcattctcatgttgttacttatcgtgtcaagaaagatagatttggatatgaataaggatccaatcttcacgatcccctggattttggcatctattcagagtgatcttctcctcttggaaaatcaggtccctttctttgttcttcgaactatatttgataaatcaggaatagggtcacctggtgatctaaacaggatggcgtttagcttcttcaacctctcaatagataaaccagatacatattgggcgaaacacagagaccgcggggctaaacatcttcttgacctcaaccgtaagaccttcatacctagcatgagatctatgggtgaatcagaaacaacaccatcctcgaaatttcaacactctaagggtaaatccggagaagtatcatcgtcagagtctacatttccgttgatactgtcggccaaaagacttcgcctccaagggataaagttcaggttaaggagtgatgctgaatcaatattagatataaaattaaagaagaacaagcttcagataccactgttaagattggatggtttcatcagctcaatcttcctcaactgtgttgcctttgaacagttttacacagagagtaccaacgacataacaagctacgtggttttcatgggatgtcttctaaacgatcaggaagatgctactttcttgaacaacgacaagcggatcatagagaactactttggcaacgagaatgaggtatcacagtttttcaaaactatatgtaaagatgttgtatttgacacacgtagaagttacttacggaatgtgtttgagggagttaacgagtacacctccaaaacgtacaatggagtatgggctggctttaggcacacgcactttgagtcaccatggactgctctgtcatcctttgctgttgttttcgttattcttcttaccatgacgcaagccgcttatgcgattcgttcctactatcacgatacagagtgagatggaaactcagcttctccataggggcttccttcgggaaaatcacgtgaactacttgttctgttttatccgctacaaatgtcattcgcgctttaattagacccgcacatacgtgcaggatttcatatttttaaaaatatggtgtattaaatttatattcaatttagttttttctaaagtagtatttaatttatt

SEQ ID NO: 77000 - protein, 480 aa, Arabidopsis thaliana
  peptide (1)..(480): Ceres Seq. ID no. 12482568
MEDETRSTSSLSDIAISIIDEGPLSPLRQRSERSVVSHIKRNLQSSGKPLILLESAGKASCCIFRIPDSLAEVNPKAYKPKVVSIGPYHYGENHLQMIQQHKFRFLELFVDRATKKGMDENVLYAAVGALQHKIRASYSEELRIEKSELVSMMILDGCFILMLLLIVSRKIDLDMNKDPIFTIPWILASIQSDLLLLENQVPFFVLRTIFDKSGIGSPGDLNRMAFSFFNLSIDKPDTYWAKHRDRGAKHLLDLNRKTFIPSMRSMGESETTPSSKFQHSKGKSGEVSSSESTFPLILSAKRLRLQGIKFRLRSDAESILDIKLKKNKLQIPLLRLDGFISSIFLNCVAFEQFYTESTNDITSYVVFMGCLLNDQEDATFLNNDKRIIENYFGNENEVSQFFKTICKDVVFDTRRSYLRNVFEGVNEYTSKTYNGVWAGFRHTHFESPWTALSSFAVVFVILLTMTQAAYAIRSYYHDTE

SEQ ID NO: 77001 - protein, 384 aa, Arabidopsis thaliana
  peptide (1)..(384): Ceres Seq. ID no. 12482569
MIQQHKFRFLELFVDRATKKGMDENVLYAAVGALQHKIRASYSEELRIEKSELVSMMILDGCFILMLLLIVSRKIDLDMNKDPIFTIPWILASIQSDLLLLENQVPFFVLRTIFDKSGIGSPGDLNRMAFSFFNLSIDKPDTYWAKHRDRGAKHLLDLNRKTFIPSMRSMGESETTPSSKFQHSKGKSGEVSSSESTFPLILSAKRLRLQGIKFRLRSDAESILDIKLKKNKLQIPLLRLDGFISSIFLNCVAFEQFYTESTNDITSYVVFMGCLLNDQEDATFLNNDKRIIENYFGNENEVSQFFKTICKDVVFDTRRSYLRNVFEGVNEYTSKTYNGVWAGFRHTHFESPWTALSSFAVVFVILLTMTQAAYAIRSYYHDTE

SEQ ID NO: 77002 - protein, 363 aa, Arabidopsis thaliana
  peptide (1)..(363): Ceres Seq. ID no. 12482570
MDENVLYAAVGALQHKIRASYSEELRIEKSELVSMMILDGCFILMLLLIVSRKIDLDMNKDPIFTIPWILASIQSDLLLLENQVPFFVLRTIFDKSGIGSPGDLNRMAFSFFNLSIDKPDTYWAKHRDRGAKHLLDLNRKTFIPSMRSMGESETTPSSKFQHSKGKSGEVSSSESTFPLILSAKRLRLQGIKFRLRSDAESILDIKLKKNKLQIPLLRLDGFISSIFLNCVAFEQFYTESTNDITSYVVFMGCLLNDQEDATFLNNDKRIIENYFGNENEVSQFFKTICKDVVFDTRRSYLRNVFEGVNEYTSKTYNGVWAGFRHTHFESPWTALSSFAVVFVILLTMTQAAYAIRSYYHDTE

SEQ ID NO: 77003 - DNA, 1273 bp, Arabidopsis thaliana
  misc_feature (1)..(1273): Ceres Seq. ID no. 12482582
  misc_feature (1)..(1273): Ortholog of  Ceres SEQ ID NO 13577044 as cited in SEQ ID NO 58682
gaacaatctagaagaagaacgataacatccaatctctctttatattccttccttccattgtggcaataatcaatcgatggcgaaggagcttgctgataaggctaaagaggctttcgtagacgatgacttcgatgttgctgttgacttgtactccaaagccattgacttggatcctaattgcgctgagttcttcgctgatcgtgctcaggcctatatcaaactcgaaagcttcactgaggccgtggcagatgcgaacaaagcaattgagttggatccttcattgaccaaagcttacctaagaaaaggaactgcctgtatgaagcttgaagagtatcggactgctaaaacagctcttgaaaagggtgcctctatcacgccgagtgaatccaaatttaagaagttgatagatgaatgcaattttctaatcacagaagaagagaaagatttggttcaaccggtgccttcgactttgccttcaagtgtgacagcaccaccagtatctgaacttgatgtcacccctacagccaagtacaggcacgagtactaccaaaagccagaggaagttgtggtaactgtttttgcaaaaggaatacccaagcagaatgttaacatcgactttggtgaacaaattctgagtgttgtgattgaggttcctggagaggatgcgtattatctccaaccgagattgtttggaaagataataccagataagtgcaaatatgaagtattgtcgaccaaaattgagatctgtcttgcaaaagccgatataatcacatgggcctccctcgaacacggcaaagggccagcggttttgccaaagcctaatgtctcatcagaggtttcacagaggccagcttatccatcttctaagaaagttaaggactgggacaagctggaagctgaagtgaagaagcaggaaaaagatgagaagctggaaggagacgcagctttgaacaaattcttccgggagatataccagaatgcggatgaggatatgaggcgagcgatgagcaaatcatttgtggaatcgaatgggacagtgctgtcaacaaactggcaagaggttgggactaagacaatcgagagtactcctccggatggcatggagctcaagaaatgggagatctgatctgatatgatatgatgatcctttcctttttatgcagttgtgaattttgcctaaatgtagacaaatcttgaaacctggtccctttcttcctgtaatgaggatcctaaggtttttgcttttttgttaaatatggctttctacctc

SEQ ID NO: 77004 - protein, 350 aa, Arabidopsis thaliana; identical to SEQ ID NO: 48150
  peptide (1)..(350): Ceres Seq. ID no. 12482583

SEQ ID NO: 77005 - protein, 270 aa, Arabidopsis thaliana; identical to SEQ ID NO: 48151
  peptide (1)..(270): Ceres Seq. ID no. 12482584

SEQ ID NO: 77006 - DNA, 1073 bp, Arabidopsis thaliana
  misc_feature (1)..(1073): Ceres Seq. ID no. 12482680
  misc_feature (1)..(1073): Ortholog of  Ceres SEQ ID NO 14303446 as cited in SEQ ID NO 59378
aggcgagagagatgagcgcgacggagctgccgacgaaggaggcacacatacttaaaggccacgagggggcggttttagcggcgaggtttaacggtgacggaaactacgctctcacctgtggcaaggatcgaactatccgcctctggaacccgcaccgtggaatcttaatcaagacctacaaatctcatggccgcgaagtccgcgacgttcatgttacttcagacaatgccaaattttgctcatgtggtggtgatcggcaagtttactactgggatgtttcaactggacgtgtaatccgtaaattccgtggtcatgatggagaggtcaatgcagtgaagttcaatgattcgtcgtctgtggttgtatcagctgggttcgatcgttcgctacgtgtatgggactgcagatctcacagtgttgagccagtacagatcattgatacatttttggatacagtcatgtctgttgttttaacaaagactgagattattggtggtagtgtcgatggaacagttcgcacatttgacatgcgtatcggtagggagatgtcagataacctaggccaaccggttaactgtatatcgatatcaaatgatggaaactgcgttttagctggttgcttggattctactctgcgtctacttgacaggaccacaggagagctactccaagtctataaaggtcatatttccaagtcatttaaaacggattgttgcctcacgaattcggatgcacatgtgattggaggatcagaggatggattggttttcttttgggatttggtagatgcaaaagtgctatcgaaatttagagctcacgatttagtggtgacaagcgtgagttaccacccgaaggaagactgtatgttgacttcttcggtcgatggtacaattcgtgtctggaaaaaatgaagaaacaacaaatcttgacttcgattgattttgttatttacgtctcaaactcacctttcttcttctactataggctatagctggttttttggagttggaaagttgaaatattttgtagagtacttgtatcattgtatgtgaaggaaaactttttttaggcct

SEQ ID NO: 77007 - protein, 302 aa, Arabidopsis thaliana
  peptide (1)..(302): Ceres Seq. ID no. 12482681
AREMSATELPTKEAHILKGHEGAVLAARFNGDGNYALTCGKDRTIRLWNPHRGILIKTYKSHGREVRDVHVTSDNAKFCSCGGDRQVYYWDVSTGRVIRKFRGHDGEVNAVKFNDSSSVVVSAGFDRSLRVWDCRSHSVEPVQIIDTFLDTVMSVVLTKTEIIGGSVDGTVRTFDMRIGREMSDNLGQPVNCISISNDGNCVLAGCLDSTLRLLDRTTGELLQVYKGHISKSFKTDCCLTNSDAHVIGGSEDGLVFFWDLVDAKVLSKFRAHDLVVTSVSYHPKEDCMLTSSVDGTIRVWKK

SEQ ID NO: 77008 - protein, 299 aa, Arabidopsis thaliana; identical to SEQ ID NO: 23167
  peptide (1)..(299): Ceres Seq. ID no. 12482682

SEQ ID NO: 77009 - DNA, 1341 bp, Arabidopsis thaliana
  misc_feature (1)..(1341): Ceres Seq. ID no. 12482687
  misc_feature (1)..(1341): Ortholog of  Ceres SEQ ID NO 13584001 as cited in SEQ ID NO 63430
  misc_feature (1)..(1341): Ortholog of  Ceres SEQ ID NO 15180075 as cited in SEQ ID NO 0
agcaccgtctccaatggcgggtttcagttctctaattcctagaacgcttctgaaacgcgccgttagtagcgcaacaagaaatctaacggcgccgttagcttctatttcagcagcaagaaatctcttcattggaggaggatgtgacgaaaattatggtgagccaggagtgttttctcattccaatggaataagaaagtacaacaccgttggtaatgctggcgcactaactggtccatttcatcatcttcttggggtcaaccagacaaacaagcccgcctttttaagggtccaatctatgagctatcagtttgtcgctgattctcattcatctcctaaacgtattgtgaagaatgaggatgaggaagatttttctgattcatcaaagaagggaaacgctgaaaaccctaggaaacatcaaattggggagaacatacccaagaaggataaaataaagtttcttgtgaacactcttcttgatattgaagataataaagaggctgtttatggagctctggatgcttgggttgcttgggagcgcaatttccccattgcttccctcaaaatagtaatagctagtcttgaaaaggaacatcaatggcatcgaatggtccaggtgataaagtggatcctaagtaagggacaagggaacacgatggggacgtacggacagttgatacgggcgttagatatggatcgtagagcagaagaggctcatgttatctggcgaaagaaagttgggaacgatctgcattctgtgccttggcaattatgcttacaaatgatgcgcatatatttccggaacaacatgttacaggaacttgttaagctattcaaggatctggagagttatgaccgtaagcctccggacaagcacattgtgcagaccgtggctgatgcttatgagcttttgggaatgcttgatgagaaagaacgggtagtgacgaagtatagccatcttttacttggtacaccatccgatgataaaccaagtagatcttcgaggaagaagaagaaaccagaactgaggattccagaagcaacgacagaaggcgcagttgatgcagcaaaagctgaaatccaagaagagcgaaaagaaaatctggataatcaccaagaatcagaagctgccactgaaaaacaattcgaacatggagcgtaagttgtagtatttaatcgataaagtatcactgcaagagaaacatggactgtaaggatgtatttaatcgatggattgttgacaatgctcacatcccttgggatttgtcgcaatggatggatatagagtttagggtttgagtgcggcactagtattactgagaaataagataacaaaatcacatc

SEQ ID NO: 77010 - protein, 385 aa, Arabidopsis thaliana
  peptide (1)..(385): Ceres Seq. ID no. 12482688
APSPMAGFSSLIPRTLLKRAVSSATRNLTAPLASISAARNLFIGGGCDENYGEPGVFSHSNGIRKYNTVGNAGALTGPFHHLLGVNQTNKPAFLRVQSMSYQFVADSHSSPKRIVKNEDEEDFSDSSKKGNAENPRKHQIGENIPKKDKIKFLVNTLLDIEDNKEAVYGALDAWVAWERNFPIASLKIVIASLEKEHQWHRMVQVIKWILSKGQGNTMGTYGQLIRALDMDRRAEEAHVIWRKKVGNDLHSVPWQLCLQMMRIYFRNNMLQELVKLFKDLESYDRKPPDKHIVQTVADAYELLGMLDEKERVVTKYSHLLLGTPSDDKPSRSSRKKKKPELRIPEATTEGAVDAAKAEIQEERKENLDNHQESEAATEKQFEHGA

SEQ ID NO: 77011 - protein, 381 aa, Arabidopsis thaliana
  peptide (1)..(381): Ceres Seq. ID no. 12482689
MAGFSSLIPRTLLKRAVSSATRNLTAPLASISAARNLFIGGGCDENYGEPGVFSHSNGIRKYNTVGNAGALTGPFHHLLGVNQTNKPAFLRVQSMSYQFVADSHSSPKRIVKNEDEEDFSDSSKKGNAENPRKHQIGENIPKKDKIKFLVNTLLDIEDNKEAVYGALDAWVAWERNFPIASLKIVIASLEKEHQWHRMVQVIKWILSKGQGNTMGTYGQLIRALDMDRRAEEAHVIWRKKVGNDLHSVPWQLCLQMMRIYFRNNMLQELVKLFKDLESYDRKPPDKHIVQTVADAYELLGMLDEKERVVTKYSHLLLGTPSDDKPSRSSRKKKKPELRIPEATTEGAVDAAKAEIQEERKENLDNHQESEAATEKQFEHGA

SEQ ID NO: 77012 - protein, 287 aa, Arabidopsis thaliana
  peptide (1)..(287): Ceres Seq. ID no. 12482690
MSYQFVADSHSSPKRIVKNEDEEDFSDSSKKGNAENPRKHQIGENIPKKDKIKFLVNTLLDIEDNKEAVYGALDAWVAWERNFPIASLKIVIASLEKEHQWHRMVQVIKWILSKGQGNTMGTYGQLIRALDMDRRAEEAHVIWRKKVGNDLHSVPWQLCLQMMRIYFRNNMLQELVKLFKDLESYDRKPPDKHIVQTVADAYELLGMLDEKERVVTKYSHLLLGTPSDDKPSRSSRKKKKPELRIPEATTEGAVDAAKAEIQEERKENLDNHQESEAATEKQFEHGA

SEQ ID NO: 77013 - DNA, 1192 bp, Arabidopsis thaliana
  misc_feature (1)..(1192): Ceres Seq. ID no. 12482703
  misc_feature (1)..(1192): Ortholog of  Ceres SEQ ID NO 14307801 as cited in SEQ ID NO 59512
  misc_feature (1)..(1192): Ortholog of  Ceres SEQ ID NO 14309110 as cited in SEQ ID NO 0
  misc_feature (1)..(1192): Ortholog of  Ceres SEQ ID NO 15225903 as cited in SEQ ID NO 0
ggagagacatgatgagagaaatatcactggaatctgaaccagacagtttctgatcttcttctccttagaggatctctcggagaagattcaaaaccaagaacaatctcagtctctatctctctctctgggtgcatttagatggctggagttgtgcgattaacgacgacgtcggttcaagccattcgtgtctcctcgtccttcagctcctttgccaccgctcttaatcctctgcaaccttgcttacctccaaactcgaatctgaattccgacaagagattgcgtcttctctcatcttctccttcctgctcgtcttctcattaccacccatcttctggtctcggaagccatctcccccttagacgacccaagagccaagtggttcgtgtcaagatgaaaatgtagccgagacagagccaccgaaatggtgggagaggaatgctccaaacatggtcgatattcattctactgaagagttcttgagcgctttaagcggtgcgggtgaaagattagttattgtagagttttatggaacttggtgtgcttcttgcagagcattgttcccaaagctttgcaagacagcggtggaacatcccgatatagtgttccttaaagtaaactttgatgagaataaaccgatgtgcaagagtttgaacgtgagagtgcttccttttttccacttttaccgtggagctgatggtcagcttgagtcattctcatgttctcttgctaaggtaaagaaggctatttcggtttcaccttttccgcaactagagcttggcataacgcttcaaacaaagagaactacttcgttgttctttttcgataggatctatcaaatattatagaccctttgctgatattgataccaaaaccggttgaatgcatttggtctgtctctgattactatttgacatcctcttcttttgaatatttgtgtgtattcagtttcagaagataaaagatgcaatccaactgcacaataccgatcgttgcagcctcggtccagccaaggtacctgaaggcttaacattagccaaaccagctgcatcaagttgaagtgccagatttttagatatattactaaggcaacaatctttggttgctcaagcaaatactcagcttaaaattctgtatatcgtcatatttttgggtgtaaaagaatacttcctaaagccagttacgattcttctgc

SEQ ID NO: 77014 - protein, 132 aa, Arabidopsis thaliana
  peptide (1)..(132): Ceres Seq. ID no. 12482704
MVDIHSTEEFLSALSGAGERLVIVEFYGTWCASCRALFPKLCKTAVEHPDIVFLKVNFDENKPMCKSLNVRVLPFFHFYRGADGQLESFSCSLAKVKKAISVSPFPQLELGITLQTKRTTSLFFFDRIYQIL

SEQ ID NO: 77015 - protein, 87 aa, Arabidopsis thaliana
  peptide (1)..(87): Ceres Seq. ID no. 12482705
MAGVVRLTTTSVQAIRVSSSFSSFATALNPLQPCLPPNSNLNSDKRLRLLSSSPSCSSSHYHPSSGLGSHLPLRRPKSQVVRVKMKM

SEQ ID NO: 77016 - protein, 69 aa, Arabidopsis thaliana
  peptide (1)..(69): Ceres Seq. ID no. 12482706
MCKSLNVRVLPFFHFYRGADGQLESFSCSLAKVKKAISVSPFPQLELGITLQTKRTTSLFFFDRIYQIL

SEQ ID NO: 77017 - DNA, 1360 bp, Arabidopsis thaliana
  misc_feature (1)..(1360): Ceres Seq. ID no. 12482838
  misc_feature (1)..(1360): Ortholog of  Ceres SEQ ID NO 14310524 as cited in SEQ ID NO 58840
  misc_feature (1)..(1360): Ortholog of  Ceres SEQ ID NO 15169541 as cited in SEQ ID NO 67500
aaaatatcaaaacacgagacagatttgattccatttttattactgttactatcatccaaacccttggtatttgtagccatgagtcttgtttcagatctcatcaaccttaacctctcagactccactgacaaaatcattgctgaatacatatgggttggtggttctggaatggacatgagaagcaaagccaggactctacctggaccagtgactgacccttcgcagctaccaaagtggaactatgatggttcaagcacaggccaagctcctggtgaagacagtgaagtcatcttataccctcaagccatattcaaggatcctttccgtagaggaaacaacattcttgtcatgtgcgatgcgtacactcccgcgggtgaaccaatcccgactaacaaaagacacgctgcggctaaggtctttagcaaccctgatgttgcagctgaagtgccatggtatggtattgagcaagaatacactttactccagaaagatgtgaagtggcctgttggttggcctattggtggttatcccggccctcagggaccgtactattgcggtattggagcagacaaatcttttggcagagatgttgttgattctcactacaaggcctgcttatacgctgggatcaacattagtggcatcaatggagaagtcatgccgggtcagtgggagttccaggtcggtccagctgttggtatctcggctgctgatgaaatttgggtcgctcgttacattttggagaggatcacagagattgctggtgtagtggtatcttttgacccgaaaccgattcccggtgactggaacggtgctggtgctcactgcaactacagtaccaagtcaatgagggaagaaggcggttacgagatcatcaagaaagcaatcgataaattgggactgagacacaaagaacacattgctgcttacggtgaaggcaatgagcgtcgtctcacaggacaccacgagactgctgacatcaacactttcctttggggtgttgcgaaccgtggagcatcgatccgagtaggacgtgatacggagaaagaagggaaaggatactttgaggacaggaggccagcttcgaacatggatccttacattgtcacttccatgattgcagagactacaatcctctggaatccttgatgatcatcagatcaagaaaaaatcttgaatgtcactcaaatttgtgtttcttgcaagattcaaagtttgtgttctctatcaagcaatgtcttaggataagtcaaagatttgctctgcttattctgctttttatttacttcacatcctattgaaaacatttctgtgtattatttatgaataaacattatcttaaaagggctgatttatttac

SEQ ID NO: 77018 - protein, 382 aa, Arabidopsis thaliana; identical to SEQ ID NO: 22775
  peptide (1)..(382): Ceres Seq. ID no. 12482839

SEQ ID NO: 77019 - protein, 356 aa, Arabidopsis thaliana; identical to SEQ ID NO: 22776
  peptide (1)..(356): Ceres Seq. ID no. 12482840

SEQ ID NO: 77020 - protein, 326 aa, Arabidopsis thaliana; identical to SEQ ID NO: 22777
  peptide (1)..(326): Ceres Seq. ID no. 12482841

SEQ ID NO: 77021 - DNA, 1377 bp, Arabidopsis thaliana
  misc_feature (1)..(1377): Ceres Seq. ID no. 12482886
  misc_feature (1)..(1377): Ortholog of  Ceres SEQ ID NO 14308080 as cited in SEQ ID NO 55218
ggggacttaaaataaaaacgctgtctttccctatctttgagatctctctctcttcttgtgttttttttttcttatcttctttctcataaaaagtctctctcctctctcttccttgcgtcttctctttccccaatctctctcaggtttctctttcctctctcaccagaagggcaaaaaaattcccttaaagagtcccccgtttttgtttaaccccctcttctctcatatctttgaaatggatgacgatgggtttcgtaattggggttactatgaaccagctgctgctacctttaaaggtaatctcggtttgcagctaatgtctaccattgatcggaacactaaaccgtttttacctgggcgggatccgaatctaatgatggggcctaacgggtcatatcaccaccaagagcctcctatccacatgagctacaattggattaaccaacagaaggataagttcttcaatatgttgcctgttacaacagccactcctaactacggtaatgtccttcccgaaacttcgtctgctccgtcgatgcagatgaatctccatcatcatcttcaaaccgaggagaatccggttaagttggaagaagagattgttgttcagactaagaagagaaagaccaatgcaaaagctggctcgactccaaaggctaagaagccaaggaaaccaaaggatgagaacagtaacaacaacaacaacaacaacacgaatgttactcgagttaaacccgctaagaaaagtgttgacttggtgatcaatggagtgagtatggacatttcgggtcttcctgttcctatctgcacttgcactggagctcctcagcaatgctaccgttggggatgtggcggttggcagtctgcttgttgtaccacaaacatctcaatgcatccattaccaatgagtactaaacgccgtggagcgaggatctcgggaaggaagatgagtcaaggcgcgtttaagaaggttcttgagaaacttgcttctgatgggtttaactttgggaatccgattgatcttaagagccattgggcaagacatggaactaacaagttcgtcacaatcagatgattagttgcttgattagtaaaacagaacaagtgagtgtttctcttccgggatggaatctctcaatgatggtgtatgtatatacaacaaatctgaaatctgtgaccttttcaaaaattctgtctgcaatctgagttcgattctgttttcaggtaaaccatcttcgttgtagggtttggaagcagagttctctgttttctttaccacttttttttatcacacttttgctttgttttttgtttgtttgtctatctgtgtgtctgaggaagaagaaggtgtctgagaaaaaatgggaaatttgcatc

SEQ ID NO: 77022 - protein, 279 aa, Arabidopsis thaliana; identical to SEQ ID NO: 44176
  peptide (1)..(279): Ceres Seq. ID no. 12482887

SEQ ID NO: 77023 - protein, 252 aa, Arabidopsis thaliana; identical to SEQ ID NO: 44177
  peptide (1)..(252): Ceres Seq. ID no. 12482888

SEQ ID NO: 77024 - protein, 233 aa, Arabidopsis thaliana
  peptide (1)..(233): Ceres Seq. ID no. 12482889
MMGPNGSYHHQEPPIHMSYNWINQQKDKFFNMLPVTTATPNYGNVLPETSSAPSMQMNLHHHLQTEENPVKLEEEIVVQTKKRKTNAKAGSTPKAKKPRKPKDENSNNNNNNNTNVTRVKPAKKSVDLVINGVSMDISGLPVPICTCTGAPQQCYRWGCGGWQSACCTTNISMHPLPMSTKRRGARISGRKMSQGAFKKVLEKLASDGFNFGNPIDLKSHWARHGTNKFVTIR

SEQ ID NO: 77025 - DNA, 1621 bp, Arabidopsis thaliana
  misc_feature (1)..(1621): Ceres Seq. ID no. 12488562
  misc_feature (1)..(1621): Ortholog of  Ceres SEQ ID NO 14311854 as cited in SEQ ID NO 51455
  misc_feature (1)..(1621): Ortholog of  Ceres SEQ ID NO 14313097 as cited in SEQ ID NO 58902
atcttcttgctttcttcacttctttaactctttgagttatttatttccagaagcttcatagtttctggaaaatgctaatccactagcggaataaaagacagatctttaatccactttagaaaccgcgttttctgaaaatgcggttgcgttttccgatgaaatctgccgttttagcgtttgctatctttctggtgtttattccactgttttccgtcggtatacggatgattccgggaagactcaccgccgtatccgccaccgtcggaaatggctttgatctggggtcgttcgtggaagctccggagtacagaaacggcaaggagtgcgtgtctcaatcgttgaacagagaaaacttcgtgtcgtcttgcgacgcttcgttagttcatgtagctatgacgcttgactcggagtacttacgtggctcaatcgcagccgtacattcaatgctccgccacgcgtcgtgtccagaaaacgtcttcttccatctcatcgctgcagagtttgacccggcgagtccacgcgttctgagtcaactcgtccgatctactttcccgtcgctaaacttcaaagtctacattttccgggaagatacggtgatcaaccttatctcttcttcaatcagacaagctttagagaatccattgaactatgctcggaactacctcggagatattcttgatccatgcgtagacagagtcatttacctagactcggacatcatcgtcgtcgatgacataacaaagctttggaacacgagtttgacagggtcaagaatcatcggagctccggagtattgtcacgctaacttcacaaagtacttcacttcaggtttctggtccgacccggctttacccggtttcttctcgggtcgaaagccttgttatttcaacacgggtgtgatggtgatggatctagttagatggagagaaggaaactacagagaaaagcttgaaacttggatgcagatacagaagaagaagagaatctacgatttgggttctttgcctccgtttcttcttgtcttcgcagggaacgttgaagcaattgatcataggtggaaccaacatggtttaggaggagacaatgtacgaggaagttgtaggtctttgcataaaggaccagtgagtttgttgcattggagtggtaaaggtaagccatgggtgagacttgatgagaagagaccgtgtccgttggatcatttatgggaaccgtatgatttatatgagcataagattgaaagagctaaagatcagtctttgttcgggttctcttctttgtctgagttaacagaagattcaagctttttctgaagagtttgtgtaagtcaacaacattctttttacttgttattgtagttttgggttattacaaatacattgttgagttgttgagagatatatttttttgactgttggttgtgtaaaaaattgactagtgagaaaagagtttgtagaagctattgatgaggactagttaggagaattttttgtttggaatttgtattttgttgtgttctttccctaaatggttatgttgatctcaattttctgtatgtggagtcttttcaagaatatgcagcaagtgttgttagcctgaaataaaacccaagtttgttaaactg

SEQ ID NO: 77026 - protein, 390 aa, Arabidopsis thaliana
  peptide (1)..(390): Ceres Seq. ID no. 12488563
MRLRFPMKSAVLAFAIFLVFIPLFSVGIRMIPGRLTAVSATVGNGFDLGSFVEAPEYRNGKECVSQSLNRENFVSSCDASLVHVAMTLDSEYLRGSIAAVHSMLRHASCPENVFFHLIAAEFDPASPRVLSQLVRSTFPSLNFKVYIFREDTVINLISSSIRQALENPLNYARNYLGDILDPCVDRVIYLDSDIIVVDDITKLWNTSLTGSRIIGAPEYCHANFTKYFTSGFWSDPALPGFFSGRKPCYFNTGVMVMDLVRWREGNYREKLETWMQIQKKKRIYDLGSLPPFLLVFAGNVEAIDHRWNQHGLGGDNVRGSCRSLHKGPVSLLHWSGKGKPWVRLDEKRPCPLDHLWEPYDLYEHKIERAKDQSLFGFSSLSELTEDSSFF

SEQ ID NO: 77027 - protein, 384 aa, Arabidopsis thaliana
  peptide (1)..(384): Ceres Seq. ID no. 12488564
MKSAVLAFAIFLVFIPLFSVGIRMIPGRLTAVSATVGNGFDLGSFVEAPEYRNGKECVSQSLNRENFVSSCDASLVHVAMTLDSEYLRGSIAAVHSMLRHASCPENVFFHLIAAEFDPASPRVLSQLVRSTFPSLNFKVYIFREDTVINLISSSIRQALENPLNYARNYLGDILDPCVDRVIYLDSDIIVVDDITKLWNTSLTGSRIIGAPEYCHANFTKYFTSGFWSDPALPGFFSGRKPCYFNTGVMVMDLVRWREGNYREKLETWMQIQKKKRIYDLGSLPPFLLVFAGNVEAIDHRWNQHGLGGDNVRGSCRSLHKGPVSLLHWSGKGKPWVRLDEKRPCPLDHLWEPYDLYEHKIERAKDQSLFGFSSLSELTEDSSFF

SEQ ID NO: 77028 - protein, 361 aa, Arabidopsis thaliana
  peptide (1)..(361): Ceres Seq. ID no. 12488565
MIPGRLTAVSATVGNGFDLGSFVEAPEYRNGKECVSQSLNRENFVSSCDASLVHVAMTLDSEYLRGSIAAVHSMLRHASCPENVFFHLIAAEFDPASPRVLSQLVRSTFPSLNFKVYIFREDTVINLISSSIRQALENPLNYARNYLGDILDPCVDRVIYLDSDIIVVDDITKLWNTSLTGSRIIGAPEYCHANFTKYFTSGFWSDPALPGFFSGRKPCYFNTGVMVMDLVRWREGNYREKLETWMQIQKKKRIYDLGSLPPFLLVFAGNVEAIDHRWNQHGLGGDNVRGSCRSLHKGPVSLLHWSGKGKPWVRLDEKRPCPLDHLWEPYDLYEHKIERAKDQSLFGFSSLSELTEDSSFF

SEQ ID NO: 77029 - DNA, 1334 bp, Arabidopsis thaliana
  misc_feature (1)..(1334): Ceres Seq. ID no. 12488951
  misc_feature (1)..(1334): Ortholog of  Ceres SEQ ID NO 14305026 as cited in SEQ ID NO 52980
  misc_feature (1)..(1334): Ortholog of  Ceres SEQ ID NO 15175670 as cited in SEQ ID NO 55204
  misc_feature (1)..(1334): Ortholog of  Ceres SEQ ID NO 13662391 as cited in SEQ ID NO 68631
gagacgctcacattgcaaaaacaaaaccaacaaggaacttgtctctctctctggctctctttctcttaacgtgatcataacgtgattcgaaaattggatatagataggtttcttgttggatcttgatccctctggaaaaggaggggagaatagcagttcatgatgggattttgtatctgcccgttggagtcacctgcgagattactatggagtacaagcttcttccgccataagatcatgatcttctaatccttcctacttcttcccatctttttaatcatcttctcgctatctctgcttcctctttctctctgtttcctctttctcagaactcagaagtagttgttgttttatttctgttgatcaaaaatggaatccaattcgtttttcttcgatccatctgcttcacacggcaacagcatgttcttccttgggaatctcaatcccgtcgtccaaggaggaggagcaagatcgatgatgaacatggaggaaacttcgaagcgaaggcccttctttagctcccctgaggatctctacgacgatgacttttacgacgaccagttgcctgaaaagaagcgtcgcctcactaccgaacaagtgcatctgctggagaaaagcttcgagacagagaacaagctagagcctgaacgcaagactcagcttgccaagaagcttggtctacagccaaggcaagtggctgtctggtttcagaatcgccgagctcgttggaaaacaaaacagcttgagagagactacgatcttctcaagtccacttacgaccaacttctttctaactacgactccatcgtcatggacaacgataagctcagatccgaggttacttccctgaccgaaaagcttcagggcaaacaagagacagctaatgaaccacctggtcaagtgcccgaaccaaaccaacttgatccggtttacattaatgcggcagcaatcaaaaccgaggaccggttaagttcagggagcgttgggagcgcggtactagacgacgacgcacctcaactactagacagctgtgactcttacttcccaagcatcgtacccatccaagacaacagcaacgccagtgatcatgacaatgaccggagctgtttcgccgacgtctttgtgcccaccacttcaccgtcgcacgatcatcacggtgaatcattggctttctggggatggccttagaaaaccactctgataataaatgtgtgtttatttaagttcaagagtcatcttcttgttgtttccatgttgacgataattgttgactcgtggaataattccgctgttcaacggtatttttatcagttgcattatatgcttttatgaaa

SEQ ID NO: 77030 - protein, 272 aa, Arabidopsis thaliana; identical to SEQ ID NO: 44481
  peptide (1)..(272): Ceres Seq. ID no. 12488952

SEQ ID NO: 77031 - protein, 255 aa, Arabidopsis thaliana; identical to SEQ ID NO: 44482
  peptide (1)..(255): Ceres Seq. ID no. 12488953

SEQ ID NO: 77032 - protein, 237 aa, Arabidopsis thaliana; identical to SEQ ID NO: 44483
  peptide (1)..(237): Ceres Seq. ID no. 12488954

SEQ ID NO: 77033 - DNA, 1229 bp, Arabidopsis thaliana
  misc_feature (1)..(1229): Ceres Seq. ID no. 12489223
  misc_feature (1)..(1229): Ortholog of  Ceres SEQ ID NO 14309755 as cited in SEQ ID NO 20741
  misc_feature (1)..(1229): Ortholog of  Ceres SEQ ID NO 13596474 as cited in SEQ ID NO 62169
  misc_feature (1)..(1229): Ortholog of  Ceres SEQ ID NO 13598714 as cited in SEQ ID NO 62656
  misc_feature (1)..(1229): Ortholog of  Ceres SEQ ID NO 13596969 as cited in SEQ ID NO 63375
  misc_feature (1)..(1229): Ortholog of  Ceres SEQ ID NO 15225685 as cited in SEQ ID NO 63616
  misc_feature (1)..(1229): Ortholog of  Ceres SEQ ID NO 13597519 as cited in SEQ ID NO 64759
  misc_feature (1)..(1229): Ortholog of  Ceres SEQ ID NO 13587054 as cited in SEQ ID NO 0
accatatacccacactcacaagtcacaactcaaataatctttgtcttcctcctacaaatatggggttttctccttcattttcttgcagtgctattggagccctaattttgggttgccttctgcttcaagcatcaaactctaatgctcagttgaggcctgatttctacttcgggacgtgcccatttgtttttgatatcattggaaatatcatcgtcgatgaactgcagactgatcctcgtattgccgcgagcctccttcgtcttcactttcacgactgctttgttcgtggttgtgatgcatcgatcttgcttgacaattccacatcattccggactgagaaagatgctgctccgaacgcaaattcggctcgagggtttaatgtcatagatagaatgaaagtagcccttgagagagcttgcccaggaagagtctcttgtgcagatattctcaccatcgcctctcaaatatcagtgcttttgtcgggaggtccatggtggccggttccgttggggaggagagacagtgtagaagctttcttcgctctggctaatacagctctgccctctccgtttttcaatcttactcaacttaaaacagcctttgctgacgttggcctaaaccgcacttccgatctagttgctctttccggtggtcacacatttggaagagcacaatgccagttcgtgacgcctcgtctctacaacttcaatggtacaaacagtccagacccaagtctgaacccaacttaccttgtcgaactccgtcgattgtgtcctcaaaacggaaacggcaccgttctggtcaacttcgatgtcgtgactccagatgctttcgatagtcaatactacaccaaccttcgtaatgggaaaggtcttattcagagtgaccaggaactcttttcgactccaggagccgatacgatccctttagtaaaccaatacagcagcgacatgtccgtgttctttcgagcattcattgacgcaatgattaggatgggaaatcttagacctttgactggaactcaaggagagattagacaaaattgtagggttgtgaatccacgaattagggttgtggagaacgacgatggtgttgtgagttctatctgattatgcatgttgccatgttggggatatatatatggatatgtaagaaagtataaaatgcgcacgtgagaacaatttcgactaataaaagttttcacgagttatgagatttatgaaattggt

SEQ ID NO: 77034 - protein, 368 aa, Arabidopsis thaliana; identical to SEQ ID NO: 44251
  peptide (1)..(368): Ceres Seq. ID no. 12489224

SEQ ID NO: 77035 - protein, 349 aa, Arabidopsis thaliana; identical to SEQ ID NO: 44252
  peptide (1)..(349): Ceres Seq. ID no. 12489225

SEQ ID NO: 77036 - protein, 238 aa, Arabidopsis thaliana; identical to SEQ ID NO: 44253
  peptide (1)..(238): Ceres Seq. ID no. 12489226

SEQ ID NO: 77037 - DNA, 1794 bp, Arabidopsis thaliana
  misc_feature (1)..(1794): Ceres Seq. ID no. 12558789
  misc_feature (1)..(1794): Ortholog of  Ceres SEQ ID NO 13594209 as cited in SEQ ID NO 59089
  misc_feature (1)..(1794): Ortholog of  Ceres SEQ ID NO 15169599 as cited in SEQ ID NO 66096
  misc_feature (1)..(1794): Ortholog of  Ceres SEQ ID NO 13502874 as cited in SEQ ID NO 66298
  misc_feature (1)..(1794): Ortholog of  Ceres SEQ ID NO 14308011 as cited in SEQ ID NO 69234
ctcagcagcttcttctgctttcaattactctcgccgacgattttctcaccggaaaaaaacaatatcattgcggatacacaaactataatggacctcctcttgctggagaagtctttaatcgccgtcttcgtggcggtgattctcgccacggtgatttcaaagctccgcggcaagaaattgaagctacctccaggtcctataccaattccgatcttcggaaactggcttcaagtcggagatgatctcaaccaccgtaatctcgtcgattacgctaagaaattcggcgatctcttcctcctccgtatgggtcagcgaaacctagtcgtcgtctcctcaccggatctaacaaaggaagtgctcctcactcaaggcgttgagtttggatccagaacgagaaacgtcgtgttcgacattttcaccgggaaaggtcaagatatggtgttcactgtttacggcgagcattggaggaagatgagaagaatcatgacggttcctttcttcaccaacaaagttgttcaacagaatcgtgaaggttgggagtttgaagcagctagtgttgttgaagatgttaagaagaatccagattctgctacgaaaggaatcgtgttgaggaaacgtttgcaattgatgatgtataacaatatgttccgtatcatgttcgatagaagatttgagagtgaggatgatcctcttttccttaggcttaaggctttgaatggtgagagaagtcgattagctcagagctttgagtataactatggagatttcattcctatccttagaccattcctcagaggctatttgaagatttgtcaagatgtgaaagatcgaagaatcgctcttttcaagaagtactttgttgatgagaggaagcaaattgcgagttctaagcctacaggtagtgaaggattgaaatgtgccattgatcacatccttgaagctgagcagaagggagaaatcaacgaggacaatgttctttacatcgtcgagaacatcaatgtcgccgcgattgagacaacattgtggtctatcgagtggggaattgcagagctagtgaaccatcctgaaatccagagtaagctaaggaacgaactcgacacagttcttggaccgggtgtgcaagtcaccgagcctgatcttcacaaacttccataccttcaagctgtggttaaggagactcttcgtctgagaatggcgattcctctcctcgtgcctcacatgaacctccatgatgcgaagctcgctggctacgatatcccagcagaaagcaaaatccttgttaatgcttggtggctagcaaacaaccccaacagctggaagaagcctgaagagtttagaccagagaggttctttgaagaagaatcgcacgtggaagctaacggtaatgacttcaggtatgtgccatttggtgttggacgtcgaagctgtcccgggattatattggcattgcctattttggggatcaccattggtaggatggtccagaacttcgagcttcttcctcctccaggacagtctaaagtggatactagtgagaaaggtggacaattcagcttgcacatccttaaccactccataatcgttatgaaaccaaggaactgttaaactttctgcacaaaaaaaaggatgaagatgactttataaatgtttgtgaaatctgttgaaatattcccttgttttgcttttgtgagatgtttttgtgtaaaatgtctttaaatggttcgttctacgattgcaataataattagtggtgctcattgttttggatggatcaatgttatacttatatcattt

SEQ ID NO: 77038 - protein, 534 aa, Arabidopsis thaliana
  peptide (1)..(534): Ceres Seq. ID no. 12558790
LSSFFCFQLLSPTIFSPEKNNIIADTQTIMDLLLLEKSLIAVFVAVILATVISKLRGKKLKLPPGPIPIPIFGNWLQVGDDLNHRNLVDYAKKFGDLFLLRMGQRNLVVVSSPDLTKEVLLTQGVEFGSRTRNVVFDIFTGKGQDMVFTVYGEHWRKMRRIMTVPFFTNKVVQQNREGWEFEAASVVEDVKKNPDSATKGIVLRKRLQLMMYNNMFRIMFDRRFESEDDPLFLRLKALNGERSRLAQSFEYNYGDFIPILRPFLRGYLKICQDVKDRRIALFKKYFVDERKQIASSKPTGSEGLKCAIDHILEAEQKGEINEDNVLYIVENINVAAIETTLWSIEWGIAELVNHPEIQSKLRNELDTVLGPGVQVTEPDLHKLPYLQAVVKETLRLRMAIPLLVPHMNLHDAKLAGYDIPAESKILVNAWWLANNPNSWKKPEEFRPERFFEEESHVEANGNDFRYVPFGVGRRSCPGIILALPILGITIGRMVQNFELLPPPGQSKVDTSEKGGQFSLHILNHSIIVMKPRNC

SEQ ID NO: 77039 - protein, 505 aa, Arabidopsis thaliana
  peptide (1)..(505): Ceres Seq. ID no. 12558791
MDLLLLEKSLIAVFVAVILATVISKLRGKKLKLPPGPIPIPIFGNWLQVGDDLNHRNLVDYAKKFGDLFLLRMGQRNLVVVSSPDLTKEVLLTQGVEFGSRTRNVVFDIFTGKGQDMVFTVYGEHWRKMRRIMTVPFFTNKVVQQNREGWEFEAASVVEDVKKNPDSATKGIVLRKRLQLMMYNNMFRIMFDRRFESEDDPLFLRLKALNGERSRLAQSFEYNYGDFIPILRPFLRGYLKICQDVKDRRIALFKKYFVDERKQIASSKPTGSEGLKCAIDHILEAEQKGEINEDNVLYIVENINVAAIETTLWSIEWGIAELVNHPEIQSKLRNELDTVLGPGVQVTEPDLHKLPYLQAVVKETLRLRMAIPLLVPHMNLHDAKLAGYDIPAESKILVNAWWLANNPNSWKKPEEFRPERFFEEESHVEANGNDFRYVPFGVGRRSCPGIILALPILGITIGRMVQNFELLPPPGQSKVDTSEKGGQFSLHILNHSIIVMKPRNC

SEQ ID NO: 77040 - protein, 433 aa, Arabidopsis thaliana
  peptide (1)..(433): Ceres Seq. ID no. 12558792
MGQRNLVVVSSPDLTKEVLLTQGVEFGSRTRNVVFDIFTGKGQDMVFTVYGEHWRKMRRIMTVPFFTNKVVQQNREGWEFEAASVVEDVKKNPDSATKGIVLRKRLQLMMYNNMFRIMFDRRFESEDDPLFLRLKALNGERSRLAQSFEYNYGDFIPILRPFLRGYLKICQDVKDRRIALFKKYFVDERKQIASSKPTGSEGLKCAIDHILEAEQKGEINEDNVLYIVENINVAAIETTLWSIEWGIAELVNHPEIQSKLRNELDTVLGPGVQVTEPDLHKLPYLQAVVKETLRLRMAIPLLVPHMNLHDAKLAGYDIPAESKILVNAWWLANNPNSWKKPEEFRPERFFEEESHVEANGNDFRYVPFGVGRRSCPGIILALPILGITIGRMVQNFELLPPPGQSKVDTSEKGGQFSLHILNHSIIVMKPRNC

SEQ ID NO: 77041 - DNA, 1312 bp, Arabidopsis thaliana
  misc_feature (1)..(1312): Ceres Seq. ID no. 12559149
  misc_feature (1)..(1312): Ortholog of  Ceres SEQ ID NO 12578315 as cited in SEQ ID NO 62451
  misc_feature (1)..(1312): Ortholog of  Ceres SEQ ID NO 13584577 as cited in SEQ ID NO 65298
ttacacgtctatctttctttcctttgtataccaaaaaatataaaataaaaaacactatggcggaaaactacgaccgtgccagtgagttaaaagcattcgacgagatgaagattggcgtgaaaggactcgtcgacgccggagtcacaaaagtcccgcgcattttccataacccgcatgttaacgtagcaaaccctaagcctacatcgacggtggtgatgattccaacaatcgatctaggtggcgtgttcgaatccacggtcgtgcgagagagtgtagttgcgaaggttaaagacgcaatggagaagtttggatttttccaggcgattaaccatggggttccacttgatgtgatggagaagatgataaatggtattcgtcggtttcacgaccaagatccagaagtgaggaaaatgttctatacccgagacaaaaccaaaaagcttaaatatcactctaatgctgatctctatgagtctcctgctgcgagttggagagataccttaagttgtgtcatggctcctgatgttccaaaagcacaggacttacctgaggtttgtggggagatcatgttggagtactcaaaggaagtgatgaagttagcggagttaatgtttgaaattttatcagaagctttagggttgagtcctaaccacctcaaagaaatggattgcgcaaaaggtttatggatgctctgtcattgttttccaccctgtcctgagccaaaccgaacattcggcggcgctcagcacacagacagatctttccttactattcttcttaacgacaacaatggaggacttcaagttctctacgatggatactggatcgatgttcctcctaatcccgaagcacttatctttaacgtaggagatttcctccagcttatctcgaatgacaagtttgtaagcatggagcatagaattttggcaaatggaggtgaagagccgcgcatttcggtcgcttgtttctttgtgcatacttttacttcaccaagttcgagagtatatggacccattaaagagcttctgtctgagctaaaccctccaaaatacagagacaccacctcggaatcctccaatcactatgtggctagaaaacctaatgggaattcttcgttggaccatttaaggatctgaaacttgaacctatatctcagaggttttcttgagtttccaataaaatttggtgcacgctgtgacgtaccatgttcaagaccttgaacgtatcattcaataattcttccgttgtgagtttcggctgcatgtttgacccaaaccagagagagtatggatcaatcaaggagagtgaacct

SEQ ID NO: 77042 - protein, 377 aa, Arabidopsis thaliana
  peptide (1)..(377): Ceres Seq. ID no. 12559150
TRLSFFPLYTKKYKIKNTMAENYDRASELKAFDEMKIGVKGLVDAGVTKVPRIFHNPHVNVANPKPTSTVVMIPTIDLGGVFESTVVRESVVAKVKDAMEKFGFFQAINHGVPLDVMEKMINGIRRFHDQDPEVRKMFYTRDKTKKLKYHSNADLYESPAASWRDTLSCVMAPDVPKAQDLPEVCGEIMLEYSKEVMKLAELMFEILSEALGLSPNHLKEMDCAKGLWMLCHCFPPCPEPNRTFGGAQHTDRSFLTILLNDNNGGLQVLYDGYWIDVPPNPEALIFNVGDFLQLISNDKFVSMEHRILANGGEEPRISVACFFVHTFTSPSSRVYGPIKELLSELNPPKYRDTTSESSNHYVARKPNGNSSLDHLRI

SEQ ID NO: 77043 - protein, 359 aa, Arabidopsis thaliana; identical to SEQ ID NO: 40798
  peptide (1)..(359): Ceres Seq. ID no. 12559151

SEQ ID NO: 77044 - protein, 343 aa, Arabidopsis thaliana; identical to SEQ ID NO: 40799
  peptide (1)..(343): Ceres Seq. ID no. 12559152

SEQ ID NO: 77045 - DNA, 1620 bp, Arabidopsis thaliana
  misc_feature (1)..(1620): Ceres Seq. ID no. 12560037
  misc_feature (1)..(1620): Ortholog of  Ceres SEQ ID NO 14308370 as cited in SEQ ID NO 55399
atggttgtcaagactggtttccctattaccgactcgtcttcttctgcttcaatggccgaatttccagaaccgggcactgtaaaccctgactcggatctatcgaatggtcgagctgagaagcctgagatagacacttcggctccgttcgagtcagtgagagaagcagccactcgtttcggcggttttggtttctggagaccttctctcaataaactcccagatgcttctcaggaaaatatccaagaacctgatatcatgggactcaaagcacaagctttcgagctacaaagagaactaattgttaaagaacgcgaaacgctagaggtgttgaaggagcttgaggcgactaaagccacagtcttaaagctgcagcagaggaatgaagcttatgaggaggacacgttgagagaagaagttgacagtcatatcaagccagcgggtgtggttctaaaggatttaagccaggcgaagatgaatttgtgcaagattgcaagtatacgcgaatctgtggagcagttgaagaataaactgaatgaggaaagagctgcacttgagaagacacgcgagagacttatggagaaatctctcaaggtgttttctttagaggaagaagaagtgagagtaagatttgccaaggagggtcaaaccggcgagaaagatcttggaatgttgaatgaggttcaaagattgagccgtcaagctcaagaggtgaagaaaaccggagagaatgcagagttggaagttgtgaaagcaatggctgagactgaaagcacaagagataagattagaacagctaagataaggttggtggctgctagaaagatgaaggaagcggccagagaggctgaggcggttgcaatcgcagagattgaggctgttactggaagtatgaatgttggtaaggccgaggctgtgactatctctgctgaagagtattctgtgcttgctcgtagtgctagagacgcagaggaagaggcgagaaagcgagtggaagatgcaatgtcgagagttgaagaagctaatgtttcaaagaaggatgttctgaagaaagttgacgaagcggctcaagaaattgaaaccagcaagagagtattggaggaagctgtggagagagttgacgctgcaaatgcttcgaagatcgaagcagaagaggcgctgcgaaaatggcggtcagagaatggacagaggagaagattatcttcttcggtgaacaacacttccaagttcaagagcagaagagagacaacaacacgtctgatggatgtaaacggtctgcatctgacatacgatgttgttgacgggtcatcatcttcttcaacggtcccagtcttgaaaccaacaatgtcaataggacaaatactgagcaagaagctacttcttgcagaggattcagatatgaatgttgctaatgagagaagaaaaatgtcgttgggtcagatgcttgcaaagaatagcagtagtgataaaactgtaagcaagagaagtgaagggaaagagaatgagaaaaggacgaagactcgaaagagaaagagtttcggatttgctaagatctctgtgttgttgaacaaagagagcaagaacaagaagaagaagaaaaagatagctttgaacttaaggtga

SEQ ID NO: 77046 - protein, 539 aa, Arabidopsis thaliana
  peptide (1)..(539): Ceres Seq. ID no. 12560038
MVVKTGFPITDSSSSASMAEFPEPGTVNPDSDLSNGRAEKPEIDTSAPFESVREAATRFGGFGFWRPSLNKLPDASQENIQEPDIMGLKAQAFELQRELIVKERETLEVLKELEATKATVLKLQQRNEAYEEDTLREEVDSHIKPAGVVLKDLSQAKMNLCKIASIRESVEQLKNKLNEERAALEKTRERLMEKSLKVFSLEEEEVRVRFAKEGQTGEKDLGMLNEVQRLSRQAQEVKKTGENAELEVVKAMAETESTRDKIRTAKIRLVAARKMKEAAREAEAVAIAEIEAVTGSMNVGKAEAVTISAEEYSVLARSARDAEEEARKRVEDAMSRVEEANVSKKDVLKKVDEAAQEIETSKRVLEEAVERVDAANASKIEAEEALRKWRSENGQRRRLSSSVNNTSKFKSRRETTTRLMDVNGLHLTYDVVDGSSSSSTVPVLKPTMSIGQILSKKLLLAEDSDMNVANERRKMSLGQMLAKNSSSDKTVSKRSEGKENEKRTKTRKRKSFGFAKISVLLNKESKNKKKKKKIALNLR

SEQ ID NO: 77047 - protein, 522 aa, Arabidopsis thaliana
  peptide (1)..(522): Ceres Seq. ID no. 12560039
MAEFPEPGTVNPDSDLSNGRAEKPEIDTSAPFESVREAATRFGGFGFWRPSLNKLPDASQENIQEPDIMGLKAQAFELQRELIVKERETLEVLKELEATKATVLKLQQRNEAYEEDTLREEVDSHIKPAGVVLKDLSQAKMNLCKIASIRESVEQLKNKLNEERAALEKTRERLMEKSLKVFSLEEEEVRVRFAKEGQTGEKDLGMLNEVQRLSRQAQEVKKTGENAELEVVKAMAETESTRDKIRTAKIRLVAARKMKEAAREAEAVAIAEIEAVTGSMNVGKAEAVTISAEEYSVLARSARDAEEEARKRVEDAMSRVEEANVSKKDVLKKVDEAAQEIETSKRVLEEAVERVDAANASKIEAEEALRKWRSENGQRRRLSSSVNNTSKFKSRRETTTRLMDVNGLHLTYDVVDGSSSSSTVPVLKPTMSIGQILSKKLLLAEDSDMNVANERRKMSLGQMLAKNSSSDKTVSKRSEGKENEKRTKTRKRKSFGFAKISVLLNKESKNKKKKKKIALNLR

SEQ ID NO: 77048 - protein, 454 aa, Arabidopsis thaliana
  peptide (1)..(454): Ceres Seq. ID no. 12560040
MGLKAQAFELQRELIVKERETLEVLKELEATKATVLKLQQRNEAYEEDTLREEVDSHIKPAGVVLKDLSQAKMNLCKIASIRESVEQLKNKLNEERAALEKTRERLMEKSLKVFSLEEEEVRVRFAKEGQTGEKDLGMLNEVQRLSRQAQEVKKTGENAELEVVKAMAETESTRDKIRTAKIRLVAARKMKEAAREAEAVAIAEIEAVTGSMNVGKAEAVTISAEEYSVLARSARDAEEEARKRVEDAMSRVEEANVSKKDVLKKVDEAAQEIETSKRVLEEAVERVDAANASKIEAEEALRKWRSENGQRRRLSSSVNNTSKFKSRRETTTRLMDVNGLHLTYDVVDGSSSSSTVPVLKPTMSIGQILSKKLLLAEDSDMNVANERRKMSLGQMLAKNSSSDKTVSKRSEGKENEKRTKTRKRKSFGFAKISVLLNKESKNKKKKKKIALNLR

SEQ ID NO: 77049 - DNA, 2366 bp, Arabidopsis thaliana
  misc_feature (1)..(2366): Ceres Seq. ID no. 12560246
  misc_feature (1)..(2366): Ortholog of  Ceres SEQ ID NO 15179283 as cited in SEQ ID NO 0
gattgattctgtaatttcagcgagtcgtctcgtctagctctcacttttgttcgtctcttctgcgtcaaacatttccaccattttcgtttcttaaacctttcttcagctcttctcttcgtcaatctgcgatagtggaattgaagtctcttcggtgagtttctttactaatggagaccgccgcttcgagcgtagctacaactcgtggcggttcccttcagaatccgtcgccgacggctccgtcaagaaaagagtggcgcgccgtttcggattcacaagacaccacagattatgtggatttggaacagttaaagctgaacaggacagatgagagaacgatttatgagaatggaagagaacaggatggttattcaaatagtgagatgttgcagcaacagattcttaatgtttctagaaagaaaggagaattacagcagttggagattgagcttcgagctcagatgattgcgagacatgagatcatggagatccagagcaactatgaatctcaattcacagagtatgctaatgctgctgctagaatgcaggagcaacttcatgagaatgagagatctattcgggaggcagagaggaagttagaagagaaagacagagagctacatgcgattaaactagataatgaagcggcttgggccaaagagggtatcctaagagaacaaaataaagaacttgccacattcagaagagagcgtgatcactctgaagctgagaggtcccagaatatacataaaatatctgaacttcaggagcatattcaagagaaagagagtcagctcagtgaattgcaggaacaaaataggattgctcaagaaactatcctgtacaaggatgagcaactaagagaagcacaaggttggattgctcgtgcccaagagattgatgctttacaatcatctacaaatcattcgttgcaggctgaattgcgagaacgtactgagcagtataaccagctctggcatggttgtcagaggcagtttgcagagatggagagattgcatgtgcacacagtgcaacagcttcagcaagagcttgctaatgtaagggaagctggtggttccaaaacaaactccggtggagcctcccagactattcagaacagcgggaaccaatttgatgctcatggaaacagcgcagaaagtgcaaacattagtgtccattcaaatggaaaaagcgcagataacatctcatcttttacttcaactgatgataaggctacccagaacaaccgtgttgatgggatatcagcttccaatcttgcgacacatgggttccttcaagctggtcagatgacccctctgcattcatttgtcatgcatcaacaagagatttctcagcttgttcagcctcaggtcccttcacaacatattgaacaatcagtgttgctacagcaaaaggctcaggctgtaccagatagttcacagatgcctatgcagaatcatgtgcatccatctcaaggtgttcatggcttggtacaatcctttggtcaagggtacggagatattcaaactagccaagtagcacaatacggaactacgacaacaccatcctctgtgaatgaacaggcagtggaatctggcaatggagattataatggatctaatcagtcagagaataactttcaagacatttcttcacagttccgtgatgccctaaggcttgattctcattcccagaatcagaaacctgaggaactcaatggtcaggtttcacctgatgaacacagtggtgctaaatccattgtccctgaaactctagtctcatccggaaaacctgagaggaactcagagtgcgctctgctcgatgaaaggtcgcttttgacatgcatcctccgtactataccagctggtgggagaatcagaatcagttcaacgcttccaaaccgtttgggcaaaatgctagcccctctacactggcatgattacaggaaaaagtacgggaagctggatgattttgttgctagccatcttgagttattttcgatagaggatgactacattcaagttagagacggtgcacagaaaatggtagcagcatcagcagcagcagccaaagtggcagcagcagctgcagcttcgtcatccccaaactccatctatgtggctatgactcctatggctcagtctcaagggttaaagaagaatgacaacagagttaggcagagctctgattttatggtgaagcagcaaagaaagctctgattttacaagtcaagcttttcaaagtaaaagcgtattagagtgaggctaaacaatctcctatcttgtttttcattttttggtgtatccccgaagctaagatatacattcataattacttttgccctttcaatagtatcaatgcttaaagtc

SEQ ID NO: 77050 - protein, 682 aa, Arabidopsis thaliana
  peptide (1)..(682): Ceres Seq. ID no. 12560247
METAASSVATTRGGSLQNPSPTAPSRKEWRAVSDSQDTTDYVDLEQLKLNRTDERTIYENGREQDGYSNSEMLQQQILNVSRKKGELQQLEIELRAQMIARHEIMEIQSNYESQFTEYANAAARMQEQLHENERSIREAERKLEEKDRELHAIKLDNEAAWAKEGILREQNKELATFRRERDHSEAERSQNIHKISELQEHIQEKESQLSELQEQNRIAQETILYKDEQLREAQGWIARAQEIDALQSSTNHSLQAELRERTEQYNQLWHGCQRQFAEMERLHVHTVQQLQQELANVREAGGSKTNSGGASQTIQNSGNQFDAHGNSAESANISVHSNGKSADNISSFTSTDDKATQNNRVDGISASNLATHGFLQAGQMTPLHSFVMHQQEISQLVQPQVPSQHIEQSVLLQQKAQAVPDSSQMPMQNHVHPSQGVHGLVQSFGQGYGDIQTSQVAQYGTTTTPSSVNEQAVESGNGDYNGSNQSENNFQDISSQFRDALRLDSHSQNQKPEELNGQVSPDEHSGAKSIVPETLVSSGKPERNSECALLDERSLLTCILRTIPAGGRIRISSTLPNRLGKMLAPLHWHDYRKKYGKLDDFVASHLELFSIEDDYIQVRDGAQKMVAASAAAAKVAAAAAASSSPNSIYVAMTPMAQSQGLKKNDNRVRQSSDFMVKQQRKL

SEQ ID NO: 77051 - protein, 611 aa, Arabidopsis thaliana
  peptide (1)..(611): Ceres Seq. ID no. 12560248
MLQQQILNVSRKKGELQQLEIELRAQMIARHEIMEIQSNYESQFTEYANAAARMQEQLHENERSIREAERKLEEKDRELHAIKLDNEAAWAKEGILREQNKELATFRRERDHSEAERSQNIHKISELQEHIQEKESQLSELQEQNRIAQETILYKDEQLREAQGWIARAQEIDALQSSTNHSLQAELRERTEQYNQLWHGCQRQFAEMERLHVHTVQQLQQELANVREAGGSKTNSGGASQTIQNSGNQFDAHGNSAESANISVHSNGKSADNISSFTSTDDKATQNNRVDGISASNLATHGFLQAGQMTPLHSFVMHQQEISQLVQPQVPSQHIEQSVLLQQKAQAVPDSSQMPMQNHVHPSQGVHGLVQSFGQGYGDIQTSQVAQYGTTTTPSSVNEQAVESGNGDYNGSNQSENNFQDISSQFRDALRLDSHSQNQKPEELNGQVSPDEHSGAKSIVPETLVSSGKPERNSECALLDERSLLTCILRTIPAGGRIRISSTLPNRLGKMLAPLHWHDYRKKYGKLDDFVASHLELFSIEDDYIQVRDGAQKMVAASAAAAKVAAAAAASSSPNSIYVAMTPMAQSQGLKKNDNRVRQSSDFMVKQQRKL

SEQ ID NO: 77052 - protein, 585 aa, Arabidopsis thaliana
  peptide (1)..(585): Ceres Seq. ID no. 12560249
MIARHEIMEIQSNYESQFTEYANAAARMQEQLHENERSIREAERKLEEKDRELHAIKLDNEAAWAKEGILREQNKELATFRRERDHSEAERSQNIHKISELQEHIQEKESQLSELQEQNRIAQETILYKDEQLREAQGWIARAQEIDALQSSTNHSLQAELRERTEQYNQLWHGCQRQFAEMERLHVHTVQQLQQELANVREAGGSKTNSGGASQTIQNSGNQFDAHGNSAESANISVHSNGKSADNISSFTSTDDKATQNNRVDGISASNLATHGFLQAGQMTPLHSFVMHQQEISQLVQPQVPSQHIEQSVLLQQKAQAVPDSSQMPMQNHVHPSQGVHGLVQSFGQGYGDIQTSQVAQYGTTTTPSSVNEQAVESGNGDYNGSNQSENNFQDISSQFRDALRLDSHSQNQKPEELNGQVSPDEHSGAKSIVPETLVSSGKPERNSECALLDERSLLTCILRTIPAGGRIRISSTLPNRLGKMLAPLHWHDYRKKYGKLDDFVASHLELFSIEDDYIQVRDGAQKMVAASAAAAKVAAAAAASSSPNSIYVAMTPMAQSQGLKKNDNRVRQSSDFMVKQQRKL

SEQ ID NO: 77053 - DNA, 1901 bp, Arabidopsis thaliana
  misc_feature (1)..(1901): Ceres Seq. ID no. 12560410
  misc_feature (1)..(1901): Ortholog of  Ceres SEQ ID NO 14316424 as cited in SEQ ID NO 58251
aaaagccctcgtttaaaaaaaaaaaaagagaagaaggaaatcaggaatgatctgattcttcgacgaaaggggaagaggttgttgaattcaaaatctctctctcttctctgtctctctcgcgtgagctagttgcagatttttccagatctcaacattgaaattcaaactcaaagctagagagggagagagatagatagatagagggagaagaagaagacgaacacggagctgaaacaatgattacgatcccataccttaccgctgtatcaacgtatttcagctacggcttgcttttcgcgtttggtcagcttcgcgattactctcgcctaatcttcgattggtggcgcaccaacaatctccagggatacgctccgatctgcttggcgcatgaggatttctacatccgacgattgtatcatcggattcaggactgttttggacgtcccatttcaagtgcacctgatgcttggattgatgtggttgagagagtctctgacgataacaacaagacgttaaagcgaactacaaagactagcaggtgccttaatttgggttcctacaattatcttggatttggttctttcgatgaatattgcacgcctcgtgtcattgagtctctgaagaaattttcagcaagtacatgtagctctcgcgttgatgcaggaactacatctgtgcatgcagaacttgaggattgtgttgctaaatatgtcggacaacctgctgctgttatttttggcatgggttatgcaacaaactcggctatcattcccgtcttgattggaaagggagggttgataataagcgattctttgaaccatacttcgattgtcaacggcgctcgaggttcaggagctactatccgtgttttccaacacaacacacctggtcatctggaaaaagtattgaaagaacaaatcgccgagggacaacccaggacgcatagaccgtggaagaaaattattgttgttgttgagggtatttacagcatggaaggggaaatttgtcatctgcccgagattgtttcaatatgcaagaagtataaggcatatgtttacttggacgaagctcacagcattggagcaattggcaagacaggaagaggtgtttgtgaactccttggagttgacacttctgatgtggacataatgatgggaactttcacgaaatcttttgggtcttgtggtggctatattgcgggatcaaaggacctcatccaatatttgaagcaccaatgcccggctcacctttacgccacatcaatttcaactccttccgcgacacaaatcatatcggcgataaaggttatccttggagaggatggttcaaacagaggggcacaaaagttagcaagaataagggagaacagcaactttttcagggctgagttgcagaagatggggtttgaagttcttggagacaatgattcaccagtcatgccaataatgctttacaatccagcaaaaattccagcattctcaagggaatgtttgcgagaaaacttggcggtggtggtcgtcggtttcccagctacacccctattgctagccagggctcgtatttgcatatccgcatctcactcaagagaagatcttataaaagccctacaggttataagcaaagcaggtgaccttaccgggatcaaatattttccggcagctccaaaaaagcaagaagtagagaaaaatggcatcaaattggattaaacccgtaaggcaacagtttctttccaagagatgtttggctagcaattagctgtagtgtacaattatctcgctgttcgtctttgtcttgtcgtgaaacatgtgattgttgtcattcttctctctttattatttttattgtttttgtcagagttaataattgtatagtgtccctctatatattgttgccccaaaatt

SEQ ID NO: 77054 - protein, 489 aa, Arabidopsis thaliana; identical to SEQ ID NO: 45845
  peptide (1)..(489): Ceres Seq. ID no. 12560411

SEQ ID NO: 77055 - protein, 321 aa, Arabidopsis thaliana; identical to SEQ ID NO: 45846
  peptide (1)..(321): Ceres Seq. ID no. 12560412

SEQ ID NO: 77056 - DNA, 3674 bp, Arabidopsis thaliana
  misc_feature (1)..(3674): Ceres Seq. ID no. 12560696
  misc_feature (1)..(3674): Ortholog of  Ceres SEQ ID NO 15225226 as cited in SEQ ID NO 58693
  misc_feature (1)..(3674): Ortholog of  Ceres SEQ ID NO 13654989 as cited in SEQ ID NO 63117
  misc_feature (1)..(3674): Ortholog of  Ceres SEQ ID NO 13584744 as cited in SEQ ID NO 69137
aattcttctttgtcttcctcgtgatcatcgaggaagcttgatctcttctatggaatggagaatttgactctcctccttaggatctgtcttgtttcgtcggttttagttgctgcttcttcctcaggatcggaattgttatctccgttatcatcaccaccgtctccattacccgaaacttcaaaagggtttggtcaagcaccgagtaattcacctgaatctcacaaatccgacaatgtgccaccgtctaaagcttcttctcaaccgtctcttcctcctttagctgatttggcagctccaccaccgtcagattccgtcggaggtaaagcaccggccggtgtgcctgttgtctttgttcctaatgctccagctccagctacaatacccgttaaggatttgcccgtagcttcgcctccggttcttcaacccattacaccgattgcttcaccacctcgattcattccaggagatgcaccaaaggagcctcctttctcaggaagagttactccagccccggtttcatcacctgtttcggatattcctccaattccatcagtggctctgcctccgcctacaccgagcaatgtacctcctagaaatgcttctaacaatcacaagcctcctcctatcgaaaagtctattgctcctgttgcatcaccaccaacaatatcaattgacattgcaccaccagtacatcccgtcatacctaagttaacaccctcgagctcacctgtacctacctcgactccaactaagggatctccgagaagaaatccgccaactacccacccagttttccccatagaatctcctgctgtctcaccagatcatgctgcaaatccagtaaaacatccgccccccagcgataacggagatgatagtaaaagtccgggtgctgcaccggcaaatgaaactgctaaacccttacctgtcttcccacataaagcttctcctccttcgattgctccctcagccccaaaatttaacagacactctcatcatacatctccatctactactccaccgccagattctactcctagtaatgtacaccaccatccttcatcaccatctcctcctcctctatcttcacaccatcaacatcatcaagaacgaaagaaaatcgcagatagtccagctccttcaccactgccaccgcatctcatatctccaaagaagtcaaaccgtaaaggttcaatgactcctcctccacaatcgcaccatgctccttctcctcccattcctgattctttgatttctcctgctcacgctccagtctctttctctatgaaacgcatctccccggctctagcaccttctccaacccaagtgtttcctctcaggtcctcttcaagaccttcaaaatctcggaaattccctctaggtccacctcttcaagcatttcctcctcctccccctaattcagattgttcttcaactatttgtttggaaccgtacacaaacacacctccgggatctccatgtggctgtgtctggccaattcaagttgagctacgccttagcatggcgctctacgacttcttcccaatggtttcagaatttgctcgggaaatcagcgccggagttttcatgaaacagagccaagtccgtataatgggagctaacgcggccagcgaacaacctgagaaatccattgttctaatcgatttagtaccgcttggagataaattcgataacatgactgcaatgctgacttaccagagattctggagtaaaaaagtctatatagatgaaccaatctttggcggatacgacgtgatttacgtgcgttatcctggtttacccgcttccccgccaacttctggtatgaccattatagatcaaggaccgtactctggtaataataacggaagggcggtcaaaccgctcggagttgatgttccaaggaagccgcgcaagaaagagctcaatggtggaagtattgctgtgattgttttatccgcagctgcttttatcggtttatgtttcgttatcgtttggttcttggttttccggcgacaaagagatcgacgacgtctttcgaaaagaacaccacttgctcgcccttcactgccttccctctcgaaaccatcaggctcggcgagatctttaactggaagccgatttagctcaacttcattgtcatttgaatccagcattgctccgtttactctctctgcaaagactttcaccgcaagtgaaataatgaaagctacaaataactttgatgaatcgagggttcttggtgaaggcggatttggacgagtttacgaaggtgttttcgatgacggaactaaagtagcagttaaggtattgaagagagatgaccagcaaggtagcagggagttcttagccgaagtggaaatgcttagtcgtcttcatcacagaaacctcgtgaatttaattggtatttgtatcgaagatcgtaaccgttccctggtttatgaactcataccaaatggcagcgttgaatctcacctccacgggattgataaagcatcttcgcctttagattgggatgctcggttgaagatagctcttggtgcggcccgtggtttagcgtatttacacgaagactcgagcccgcgagttatacacagagacttcaagtccagcaacatcttgctggaaaacgatttcacacctaaagtatctgactttggattggctcgtaacgcccttgatgatgaagataacagacatatatcgacacgcgttatgggaacgtttgggtatgtggcaccggaatacgcaatgacagggcatcttttggtgaagagtgatgtgtatagttacggagttgtgcttctcgagctacttacagggcggaaaccagtggatatgtctcaaccgcccggacaagagaacttagtttcatggactcggccttttcttacgagtgcagaagggcttgcagctattatagatcagtctttaggacccgagatctcattcgatagcatagctaaagtcgcggcaatagcttctatgtgcgttcaaccagaagtatcacaccgtcctttcatgggagaagtagtgcaagctttgaaacttgtcagcaacgaatgtgatgaagctaaagaactcaattctttaacttctatctctaaagacgattttagagatgacactcaagctgagagctcttgtggtgacagctcagcaaggatggctcggtatccattgctaccaaattacgactctgagcctgatacagagagaggattatctacatcggaaatgtacacggggtcagggaggttcgagagacagtctaactcgggtcccttgacctcgggtcgaggcaagagtttctggcaaaagatgaggagattatcgaccggaagcttgagtgagcatggaacaccaacggtcatgttacgatccggttctcgctaaacaatcttttgcctacagaacactgaagagtttttgattgcccgtttaagttaagagactgaaaggaaagaaggtgccttctcctacaagcaaaactctttgcctcatggaaaccggttaagataaaaccaggagtgatcatttcccggttcaaaatttttagttgaatagatctgtttatctgagaagaagaaacaagagattctgttaaatctaatttgaatgtacatatcacgttttaaagtaacaggcttaagcattaagtatcatcatccttc

SEQ ID NO: 77057 - protein, 1113 aa, Arabidopsis thaliana
  peptide (1)..(1113): Ceres Seq. ID no. 12560697
MENLTLLLRICLVSSVLVAASSSGSELLSPLSSPPSPLPETSKGFGQAPSNSPESHKSDNVPPSKASSQPSLPPLADLAAPPPSDSVGGKAPAGVPVVFVPNAPAPATIPVKDLPVASPPVLQPITPIASPPRFIPGDAPKEPPFSGRVTPAPVSSPVSDIPPIPSVALPPPTPSNVPPRNASNNHKPPPIEKSIAPVASPPTISIDIAPPVHPVIPKLTPSSSPVPTSTPTKGSPRRNPPTTHPVFPIESPAVSPDHAANPVKHPPPSDNGDDSKSPGAAPANETAKPLPVFPHKASPPSIAPSAPKFNRHSHHTSPSTTPPPDSTPSNVHHHPSSPSPPPLSSHHQHHQERKKIADSPAPSPLPPHLISPKKSNRKGSMTPPPQSHHAPSPPIPDSLISPAHAPVSFSMKRISPALAPSPTQVFPLRSSSRPSKSRKFPLGPPLQAFPPPPPNSDCSSTICLEPYTNTPPGSPCGCVWPIQVELRLSMALYDFFPMVSEFAREISAGVFMKQSQVRIMGANAASEQPEKSIVLIDLVPLGDKFDNMTAMLTYQRFWSKKVYIDEPIFGGYDVIYVRYPGLPASPPTSGMTIIDQGPYSGNNNGRAVKPLGVDVPRKPRKKELNGGSIAVIVLSAAAFIGLCFVIVWFLVFRRQRDRRRLSKRTPLARPSLPSLSKPSGSARSLTGSRFSSTSLSFESSIAPFTLSAKTFTASEIMKATNNFDESRVLGEGGFGRVYEGVFDDGTKVAVKVLKRDDQQGSREFLAEVEMLSRLHHRNLVNLIGICIEDRNRSLVYELIPNGSVESHLHGIDKASSPLDWDARLKIALGAARGLAYLHEDSSPRVIHRDFKSSNILLENDFTPKVSDFGLARNALDDEDNRHISTRVMGTFGYVAPEYAMTGHLLVKSDVYSYGVVLLELLTGRKPVDMSQPPGQENLVSWTRPFLTSAEGLAAIIDQSLGPEISFDSIAKVAAIASMCVQPEVSHRPFMGEVVQALKLVSNECDEAKELNSLTSISKDDFRDDTQAESSCGDSSARMARYPLLPNYDSEPDTERGLSTSEMYTGSGRFERQSNSGPLTSGRGKSFWQKMRRLSTGSLSEHGTPTVMLRSGSR

SEQ ID NO: 77058 - protein, 733 aa, Arabidopsis thaliana
  peptide (1)..(733): Ceres Seq. ID no. 12560698
MTPPPQSHHAPSPPIPDSLISPAHAPVSFSMKRISPALAPSPTQVFPLRSSSRPSKSRKFPLGPPLQAFPPPPPNSDCSSTICLEPYTNTPPGSPCGCVWPIQVELRLSMALYDFFPMVSEFAREISAGVFMKQSQVRIMGANAASEQPEKSIVLIDLVPLGDKFDNMTAMLTYQRFWSKKVYIDEPIFGGYDVIYVRYPGLPASPPTSGMTIIDQGPYSGNNNGRAVKPLGVDVPRKPRKKELNGGSIAVIVLSAAAFIGLCFVIVWFLVFRRQRDRRRLSKRTPLARPSLPSLSKPSGSARSLTGSRFSSTSLSFESSIAPFTLSAKTFTASEIMKATNNFDESRVLGEGGFGRVYEGVFDDGTKVAVKVLKRDDQQGSREFLAEVEMLSRLHHRNLVNLIGICIEDRNRSLVYELIPNGSVESHLHGIDKASSPLDWDARLKIALGAARGLAYLHEDSSPRVIHRDFKSSNILLENDFTPKVSDFGLARNALDDEDNRHISTRVMGTFGYVAPEYAMTGHLLVKSDVYSYGVVLLELLTGRKPVDMSQPPGQENLVSWTRPFLTSAEGLAAIIDQSLGPEISFDSIAKVAAIASMCVQPEVSHRPFMGEVVQALKLVSNECDEAKELNSLTSISKDDFRDDTQAESSCGDSSARMARYPLLPNYDSEPDTERGLSTSEMYTGSGRFERQSNSGPLTSGRGKSFWQKMRRLSTGSLSEHGTPTVMLRSGSR

SEQ ID NO: 77059 - protein, 703 aa, Arabidopsis thaliana
  peptide (1)..(703): Ceres Seq. ID no. 12560699
MKRISPALAPSPTQVFPLRSSSRPSKSRKFPLGPPLQAFPPPPPNSDCSSTICLEPYTNTPPGSPCGCVWPIQVELRLSMALYDFFPMVSEFAREISAGVFMKQSQVRIMGANAASEQPEKSIVLIDLVPLGDKFDNMTAMLTYQRFWSKKVYIDEPIFGGYDVIYVRYPGLPASPPTSGMTIIDQGPYSGNNNGRAVKPLGVDVPRKPRKKELNGGSIAVIVLSAAAFIGLCFVIVWFLVFRRQRDRRRLSKRTPLARPSLPSLSKPSGSARSLTGSRFSSTSLSFESSIAPFTLSAKTFTASEIMKATNNFDESRVLGEGGFGRVYEGVFDDGTKVAVKVLKRDDQQGSREFLAEVEMLSRLHHRNLVNLIGICIEDRNRSLVYELIPNGSVESHLHGIDKASSPLDWDARLKIALGAARGLAYLHEDSSPRVIHRDFKSSNILLENDFTPKVSDFGLARNALDDEDNRHISTRVMGTFGYVAPEYAMTGHLLVKSDVYSYGVVLLELLTGRKPVDMSQPPGQENLVSWTRPFLTSAEGLAAIIDQSLGPEISFDSIAKVAAIASMCVQPEVSHRPFMGEVVQALKLVSNECDEAKELNSLTSISKDDFRDDTQAESSCGDSSARMARYPLLPNYDSEPDTERGLSTSEMYTGSGRFERQSNSGPLTSGRGKSFWQKMRRLSTGSLSEHGTPTVMLRSGSR

SEQ ID NO: 77060 - DNA, 1413 bp, Arabidopsis thaliana
  misc_feature (1)..(1413): Ceres Seq. ID no. 12560711
  misc_feature (1)..(1413): Ortholog of  Ceres SEQ ID NO 13654989 as cited in SEQ ID NO 63117
  misc_feature (1)..(1413): Ortholog of  Ceres SEQ ID NO 13657138 as cited in SEQ ID NO 65923
  misc_feature (1)..(1413): Ortholog of  Ceres SEQ ID NO 13584744 as cited in SEQ ID NO 69137
aaaagtctgcgtttcttcaccaaccctacacgaaccaagatagatagaaaccttctccttcttctgcttcttttatcatcggagaattcgaatcttcttttcctctttttgagattctctaattatccttttggaagagtttcgtgtgagagagaagcgtaatgggctgctttggttgttgtggtggtggtgaggatttccgtagagtttctgaaactggaccaaagccagtgcataacactggaggttacaatggaggtcaccatcaaagggcagatccacccaaaaaccttccagtcattcagatgcagcctatctctgttgcggccattccagctgatgaattgagggatataacggataactatggttcaaagtccttgattggtgagggttcatatggaagagtcttttatggtattcttaaaagtggtaaagcagctgccattaagaaactggattctagtaagcaaccagatcaagaatttctcgcccaggtatcaatggtttcgagattgcgacaagaaaatgttgttgcgcttctgggctattgtgttgatggcccactccgtgttcttgcttatgaatatgctcctaatggatctcttcatgatattcttcatggtcgaaaaggtgttaaaggggcacagccaggtcctgttctgtcgtggcaccagagagtcaaaattgctgttggtgcggctagaggactcgagtacttgcatgagaaggcaaaccctcatgttatccacagagacatcaaatccagcaatgtacttctgttcgatgatgatgttgccaagattgctgattttgatttgtccaaccaagcccctgacatggctgctcgccttcactcaacccgtgtgctcggaacctttggctatcacgctccagagtatgcaatgacggggacgttgagcacaaagagtgatgtctatagttttggcgttgttctgctggagctcctcacaggtcgtaaaccagttgatcataccttaccacgtggacagcagagtgtcgtgacatgggcaacccctaaattgagtgaagacaaggtgaagcagtgtgttgacgcaagactaaacggagaatatcctcccaaagctgttgctaagctggctgcggtagctgcactgtgtgtgcaatatgaggcagacttcaggcctaacatgagcatagtggtgaaggctcttcagccgttgctcaatcctcctcgttctgctccccagactccacacaggaacccgtattgatatgctctagtctgatatcaccctttatgatcatcactatttcatttgtttttgtttgaatccgatttgtgtaaatttgtgaaataggcgtttattctctcataaaccccctgccacttcactgaaaatcttacttggaaagacctgaatgttactg

SEQ ID NO: 77061 - protein, 364 aa, Arabidopsis thaliana; identical to SEQ ID NO: 46018
  peptide (1)..(364): Ceres Seq. ID no. 12560712

SEQ ID NO: 77062 - protein, 316 aa, Arabidopsis thaliana; identical to SEQ ID NO: 46019
  peptide (1)..(316): Ceres Seq. ID no. 12560713

SEQ ID NO: 77063 - protein, 250 aa, Arabidopsis thaliana; identical to SEQ ID NO: 46020
  peptide (1)..(250): Ceres Seq. ID no. 12560714

SEQ ID NO: 77064 - DNA, 1861 bp, Arabidopsis thaliana
  misc_feature (1)..(1861): Ceres Seq. ID no. 12560789
  misc_feature (1)..(1861): Ortholog of  Ceres SEQ ID NO 13595900 as cited in SEQ ID NO 69289
ctctttctcttttcttccgcaaatctccgcaaaatcttccctcaaactcagatccgattcttctaattctttgtccccccagagattcttcttctttctccaagtaaaagaaaacaactttctttctcttttcttgcgaaagtcctcaactttcaccactaaatcagcttccttcaatcactgtgtttgctttggacccagtttctgatttagcgactagggttttgattggaaccgtattaagtatatgagaatcgggttttactggtgaatcggattatcatcggaattcggaaaaagatggatcggaatcaaaagatggatcacgttatcggcgggaagtttaagttgggtaggaagcttggaagtggatcattcggtgaactttatttagggatcaatattcaaactggagaagaagtcgcagttaagctggaacctgtgaagacgaggcatcctcaactgcagtatgaatcgaaaatatatatgtttcttcaaggaggaacgggtgttccccatctgaaatggtttggagttgagggtgaatacagttgcatggttatcgatcttcttgggccaagcttggaggacttattcaattactgcaagcgaatattttcattaaaatctgttttaatgcttgcagatcaattgatatgtagagttgagtatatgcattcgcggggttttcttcaccgcgatattaaaccagacaactttttgatgggtcttgggcgcagagcaaaccaggtgtatatcattgattatggccttgctaaaaaatacaaggatcttcagacacaaaagcatataccatacagggaaaacaagaatcttacaggaactgctcggtatgcaagtgtgaacacacaccttgggattgagcaaagtagaagagatgatctggagtcacttggttatgtgttgatgtattttctacgaggaagtcttccgtggcaaggtttaaaagctggtacgaagaagcagaaatatgacaagattagtgaaaagaagatgcttacttctgtagagactctttgcaagtcgtatccatcagagttcacatcgtacttccattactgtcgttcattgagatttgaggacaaaccggattattcatatctgagaagactttttagggatcttttcattcgtgaaggttatcagcttgattatgtgtttgattggacaatctcgaagtatcctcagattggctctagttcgagaccaaggccaactccaagaccagcgttggaccctccaggaccacctgcagaaagagctgaaaagcctacagtcggacaggacctgcgaggaagatttacaggtgcaattgaggcattcaccagacgaaatgtttcaagccaaggcgctcttggtgatcgctctagacacagatcttctgatgatataccctcttctgccaaggaagtgcacgagtctcgaaatggaagtacctcaaagagaggtgtgatatcaagcaccagacctggctcatcagctgaaccaagcgagaaccactcaagccgactattttcaagtggttcacgtcatgccacaacccaacgggttccacagagctatgaatctgcagctgcagcaaggcctgggcatgaggatgccattagaaacttcgagctccttaccatcggctctggaaagaagaggaaatgaagatagggaaggagaagtttgatgagagtgaaaagacaacattcggtgctgatggctctctcctctgaaaataggaaagacatgtcctcgaattgttttttaaccttgggaacaagatgagaaagtgagagagagaaagagagttaatgtaatctgcctctcccaatctctcagtctctgtttttaa

SEQ ID NO: 77065 - protein, 457 aa, Arabidopsis thaliana; identical to SEQ ID NO: 45986
  peptide (1)..(457): Ceres Seq. ID no. 12560790

SEQ ID NO: 77066 - protein, 451 aa, Arabidopsis thaliana; identical to SEQ ID NO: 45987
  peptide (1)..(451): Ceres Seq. ID no. 12560791

SEQ ID NO: 77067 - protein, 395 aa, Arabidopsis thaliana; identical to SEQ ID NO: 45988
  peptide (1)..(395): Ceres Seq. ID no. 12560792

SEQ ID NO: 77068 - DNA, 821 bp, Arabidopsis thaliana
  misc_feature (1)..(821): Ceres Seq. ID no. 12560805
  misc_feature (1)..(821): Ortholog of  Ceres SEQ ID NO 14309484 as cited in SEQ ID NO 52876
aaagaggcgacgtaccacccacctaaccacaaccagatccccaaaagacagagaactttctcgatacgaacgccaaagagaagaagacgaagacgaagatgatgggtgtgttgaagtcggcgattggggatatgttgatgaccttctcttgggttgtcctctccgctacctttggaattcagacggcggcgattatctccgccggtgattttcaggcaatcacttgggctccgttggtgattttgacgtcgttgattttcgtctacgtctcgatcttcaccgttatcttcggtagcgctagcttcaatcctaccggaagcgctgccttttatgtcgccggtgtccccggagatactcttttctccttggcgattagattacctgctcaggcaattggtgctgcaggaggtgcattggcgatcatggagttcataccagagaaatacaagcatatgattggaggtccttctcttcaggttgatgtgcacactggagctattgctgaaacgatcttaagttttggtattacctttgcggttttgctaattatcctcaggggtccacggagattgcttgctaagacgttcttgcttgctcttgcaaccatctcatttgttgtcgccggatctaaatacactggaccagccatgaatcctgccattgcgtttggatgggcatacatgtacagctcccacaacacatgggaccatatctacgtctactggatcagttctttcgtaggagcattatctgctgcattgcttttccgttctatcttcccgccacctcggccccagaagaagaaacaaaagaaagcctga

SEQ ID NO: 77069 - protein, 240 aa, Arabidopsis thaliana
  peptide (1)..(240): Ceres Seq. ID no. 12560806
MMGVLKSAIGDMLMTFSWVVLSATFGIQTAAIISAGDFQAITWAPLVILTSLIFVYVSIFTVIFGSASFNPTGSAAFYVAGVPGDTLFSLAIRLPAQAIGAAGGALAIMEFIPEKYKHMIGGPSLQVDVHTGAIAETILSFGITFAVLLIILRGPRRLLAKTFLLALATISFVVAGSKYTGPAMNPAIAFGWAYMYSSHNTWDHIYVYWISSFVGALSAALLFRSIFPPPRPQKKKQKKA

SEQ ID NO: 77070 - protein, 239 aa, Arabidopsis thaliana
  peptide (1)..(239): Ceres Seq. ID no. 12560807
MGVLKSAIGDMLMTFSWVVLSATFGIQTAAIISAGDFQAITWAPLVILTSLIFVYVSIFTVIFGSASFNPTGSAAFYVAGVPGDTLFSLAIRLPAQAIGAAGGALAIMEFIPEKYKHMIGGPSLQVDVHTGAIAETILSFGITFAVLLIILRGPRRLLAKTFLLALATISFVVAGSKYTGPAMNPAIAFGWAYMYSSHNTWDHIYVYWISSFVGALSAALLFRSIFPPPRPQKKKQKKA

SEQ ID NO: 77071 - protein, 229 aa, Arabidopsis thaliana
  peptide (1)..(229): Ceres Seq. ID no. 12560808
MLMTFSWVVLSATFGIQTAAIISAGDFQAITWAPLVILTSLIFVYVSIFTVIFGSASFNPTGSAAFYVAGVPGDTLFSLAIRLPAQAIGAAGGALAIMEFIPEKYKHMIGGPSLQVDVHTGAIAETILSFGITFAVLLIILRGPRRLLAKTFLLALATISFVVAGSKYTGPAMNPAIAFGWAYMYSSHNTWDHIYVYWISSFVGALSAALLFRSIFPPPRPQKKKQKKA
